United States Patent Application Publication US 2005/0228172 A9 - sequence listing, part 193

SEQ ID NO: 872314 - DNA, 636 bp, Homo sapiens
atccagagaatgctggtgcaaagggtgggtttccaaagccttgtgcagctctgcccctatggctttgtagggttcagcccctggtgctaattttaaggcctgatctagagtgcctgtggcttttccaggtgcaggaatgcaaactgtcagtgaatctaccactttgtggtctgcaggacagtgccttcttctcatagctccactaggcagtgccccagtgggaactctgtgtaggggctcaaatcccatatttcccctcttcactgctctagtagaggttctccatgagggctctgctcctrcagcaggcttctgcctgggcacccagtatttttcatacatcctctaaaatctaggtgaaggctcccaaacctcatctcttgtattctatgcacccacaagcttaataccacgtggaagctgccaaggcttatgtcttgcactttctgaagcagtggcctgagaggcacctggacccctttgagcctggactggagctggagtgactgggatgcaagaagcaatgtcctgagactgcacagggtggcagggccctgggcctggtacaagaaaccattcagtcctcttagcactctgggcctgtgataggaggggctggcctgaaggtctctgaaa

SEQ ID NO: 872315 - DNA, 636 bp, Homo sapiens
atccagagaatgctggtgcaaagggtgggtttccaaagccttgtgcagctctgcccctatggctttgtagggttcagcccctggtgctaattttaaggcctgatctagagtgcctgtggcttttccaggtgcaggaatgcaaactgtcagtgaatctaccactttgtggtctgcaggacagtgccttcttctcatagctccactaggcagtgccccagtgggaactctgtgtaggggctcaaatcccatatttcccctcttcactgctctagtagaggttctccatgagggctctgctcctgcagcargcttctgcctgggcacccagtatttttcatacatcctctaaaatctaggtgaaggctcccaaacctcatctcttgtattctatgcacccacaagcttaataccacgtggaagctgccaaggcttatgtcttgcactttctgaagcagtggcctgagaggcacctggacccctttgagcctggactggagctggagtgactgggatgcaagaagcaatgtcctgagactgcacagggtggcagggccctgggcctggtacaagaaaccattcagtcctcttagcactctgggcctgtgataggaggggctggcctgaaggtctctgaaa

SEQ ID NO: 872316 - DNA, 607 bp, Homo sapiens
aacaacaaaatgtcaggctaatatccctgatgaacattgatgtgaaagtcctcaataaaatactggcaaaatgaattcagcagcacatcaaaatcttatccaccacgatcaagtcagcttcttccctaggatgcaaggctggttcaacatacacaaatcaataaacgtaatccatcacataaacagaaccaatgataaaaaccacatgattatctcaacagatgcagaaaagacctttgataaaattcaacaccccctcatgctaaaaaccctcaataaactaggtattgatggaacatatctcaaaatagtaagagctatttatgacaaacccatagccactgtcatactgaatgggcaaaagcttgaagtattctctttgaaaaccggcacaagacayggatgccctctctcaccactcctattcaacatagtattggaagttctggacaggagagtcagacaagagaaagaaataaagcgtattcaaataggaagagaagaagtcaaattgtctctgtttgcaggtggcatgattgtatatttagaaaaccccattgtctcagcccaaaaaagccttaagctgataagcaactttagcaaagtc

SEQ ID NO: 872317 - DNA, 535 bp, Homo sapiens
cattcaggcaagagaaagaaataaagggtattcaaatagcaagaaaggaagtgaaattgtctctgtttgcagatgacataattgtacatttagaaaactctatcatctcaacccaaaaacttcttcagctaataagcaacttcagcatagtctcaggatacaaaatcagtgtgcaaaaatcacaagcactcctatacaccaacagtagacaaacagccaagtcatgagtgaactcccatccacaattgctacaaagagaatataatacctaggaatacatcttgcaagagatrtgaagcacctcttcaagaactaccaaccactgctcaagaaaataacagaggacacaaaaaatggaaaagcattccatgctcatgggtagaaagaatcgatatcatgaaaatggccatactgcccaaagtaatttatagattcaatgctattcccatcaagctaccattgactttcttcacagaattagaaaaaagtactttaaatttcatagggaaacaaaatagagctcatatagccgaga

SEQ ID NO: 872318 - DNA, 660 bp, Homo sapiens
cagtggtaagtctcctctatgcctcttcttcagctggaggagttcaacccctgtatgtgtttttcttctcccctttcactctcctgaccctagaacaatttatctcagccaaggaagctctgctccttctggctgatctctcagctcatcctgatgggtgtttcttaggggtgggaaagaacttggagtccacatygagcaggacggagacactaatcatcctcctgcacaagaggctcgcaagaatggtagggctaatgtctaacattgtgcaatgtccagtttttcctccattttttaactaaaattggctctttcccaaaacctcacactgcttattctcgtgttttctctgtgtgtatcctgaaatggccttatgcacccaccagactgtccaccttggatgtgagtctgcctctttgcttttgctttgcatgacatgtgactttgtaaactcacaatccctgttatttttgtacacacagctcttgtgtttgtgcagcagcaaagacaaagcttcccttaaaatatccactgagatttatacttatttttaccctacaggctcagatgaccttcaacacttcccctgtctgctggcacattgctgggactgacactaattggaaccccagctctgccagcttcttatgacttacc

SEQ ID NO: 872319 - DNA, 660 bp, Homo sapiens
cagtggtaagtctcctctatgcctcttcttcagctggaggagttcaacccctgtatgtgtttttcttctcccctttcactctcctgaccctagaacaatttatctcagccaaggaagctctgctccttctggctgatctctcagctcatcctgatgggtgtttcttaggggtgggaaagaacttggagtccacattgagcaggayggagacactaatcatcctcctgcacaagaggctcgcaagaatggtagggctaatgtctaacattgtgcaatgtccagtttttcctccattttttaactaaaattggctctttcccaaaacctcacactgcttattctcgtgttttctctgtgtgtatcctgaaatggccttatgcacccaccagactgtccaccttggatgtgagtctgcctctttgcttttgctttgcatgacatgtgactttgtaaactcacaatccctgttatttttgtacacacagctcttgtgtttgtgcagcagcaaagacaaagcttcccttaaaatatccactgagatttatacttatttttaccctacaggctcagatgaccttcaacacttcccctgtctgctggcacattgctgggactgacactaattggaaccccagctctgccagcttcttatgacttacc

SEQ ID NO: 872320 - DNA, 660 bp, Homo sapiens
cagtggtaagtctcctctatgcctcttcttcagctggaggagttcaacccctgtatgtgtttttcttctcccctttcactctcctgaccctagaacaatttatctcagccaaggaagctctgctccttctggctgatctctcagctcatcctgatgggtgtttcttaggggtgggaaagaacttggagtccacattgagcaggacggagacactaatcatcctcctgcacaagaggctcgcaagaatggtagggctaatgtctaacattgtgcaatgtcyagtttttcctccattttttaactaaaattggctctttcccaaaacctcacactgcttattctcgtgttttctctgtgtgtatcctgaaatggccttatgcacccaccagactgtccaccttggatgtgagtctgcctctttgcttttgctttgcatgacatgtgactttgtaaactcacaatccctgttatttttgtacacacagctcttgtgtttgtgcagcagcaaagacaaagcttcccttaaaatatccactgagatttatacttatttttaccctacaggctcagatgaccttcaacacttcccctgtctgctggcacattgctgggactgacactaattggaaccccagctctgccagcttcttatgacttacc

SEQ ID NO: 872321 - DNA, 595 bp, Homo sapiens
cctttggtttgaatgtcctcccatagctcagagtaatttgatcgtctgaagccttcttctctcagctcgtcgaagtcattctccatccagctttcttccgttgctggtgaggaactgcgttcctttggaggaggagaggcgctctgctttttagagtttccagtttttctgttctgttttttccccatctttgtggttttatctacttttggtcgttgctgatggtgatgtacagatgggtttttggtgtggatgtcctttctgtttgttagttttccttctaacagacaggaccctcagctgcaggtctgttggaataccctgccgtctgaggtgtcagtgtgcctctgctggggggtgcctcccagttaggctgctcgggggtcaggggtyagggacccacttgaggaggcagtctgccggttctcagatctccagctgtgtgctgggagaaccactgctctcttcaaagctgtcagacagggacatttaagtctgcagaggttactgctttttgtctgtgccctgcccccagaggtggagcctacagaggcaggcaggcgtccttgaactgtggtgggctccacccagttcg

SEQ ID NO: 872322 - DNA, 594 bp, Homo sapiens
aatatatggaaactgtgccttttgcttaattttgctgtaagcctaaaatggcttttaaaataaagtctattaaaagtaaaacaaacaaacaaacaaaaaaacaaaaaaacagactacagcagtatagatagtaacataatcttactagagtatttatcctattttgtattaaagggaaattgttgtactcccatgaatgggcacaccatagtcaacctattggtggtaaacctagaaattaatttgaagtcttctaacctcaggttttggtagcagtagggtatgttaaatytagtgtccaaagccagggagcttttttttttactaatttttgactcagagctggatgtggggtagattcatggtttgggcaatgccagctcctcttcaacgtcattctctaagtcataatttccaagtatgctgacagaccccgttcatgggagcctttgtatagtaaagttggcttggtaaatgacacagaaacaggtatgcttatctcatggaaaagatctctaccacaacaatctccccataatatgatgtttttttccttgaacccgcaaggaacatgcataatttgattagtacaca

SEQ ID NO: 872323 - DNA, 662 bp, Homo sapiens
ttgaggacattttgagaaggcagccatctgcaagccaagaagacagccctcaccagaaactgaatttactggcatcctgatcacagacttctgagagaaaataaattttattgtttaaaccaccagtttgtagtattttcttatggcagcctgagcagactaatataccaagttttaaatcttcttgattattcattattaatgacgttaatttttaggatttataactaatggctatttaagattctttaaccagataatactatttttttcgtaagtttttccatcttctccctttcctctttgttttaaaatcatctgtattcacaaataagaagacaggtagccttagaatcacatctaagagractgattcttaagatttcttgaataactctaaaattttctagaaaaaatagaaaacctgacaatgaactctctcaatcattgcatttcaatatctaacatcaaacttactttggcttcagaaaacgtcaaatgtgccactcaagattattttcagaataataatcactggaatccaaacattacataaactaaggcatctttcgtcttaattccttgtgtttactcttgtcaaggagggtcacttttactttacagttcagttcctatgactggatgccagtgttggtaagtaa

SEQ ID NO: 872324 - DNA, 646 bp, Homo sapiens
aagtttttaattcatgaactttcatggatatgagcaaagctttgcaacagaggaaagtacacagactctactaaccacaaacaaatggtcttttgtcagtcaaatgcagttatttagtctctgcaactgcattatttgttagatttctggcagtggttctcaactctggctgccaattctggctgcacattggaatcacccagaagtttcatttaactggtctggagtggcaactggtcatttagtttaacactccccggatgaatccaacgtgtagctatggcttaaaaccaatggtgtatagcaaggttgtgagcttaaaagcctggcaaaataatatagagagcagggggttgggacaaccttaagagtccaatttaattaacaaaaaaaaaaacacaacaaaacaaatcaatgcatggattaaacttaatatctacaaacaytggctcacggtgtatcttctgttcttggaacagccttttattataaacatatcaacgataaaaatacttactccaaaatgcaagtctgtgaacacatcctataaggcagatggaaagaaatcaagaaaaatcataaccaatgtcaccaacatgttattcccttgtgaaagtgaacttcacaggtgggtctatgaccacac

SEQ ID NO: 872325 - DNA, 595 bp, Homo sapiens
ctacgaagggtcttcagttcctaattctcagtcttactgccaacctacctgaccaagtttccctcttctgatgctgtgcaagctccatctgaactaccatatttgaccaagccattgttttgcaactgcaaacttattcacaaccaagctgccccagcttcctagaggtaatcttcaaagttctccaggactctccatatcaagcctggcattaccctagtcctaccagaagccagctctgcgtgtgcatatacccaccattctgttatggggattatatctgtgaagaactgccaaggaaaatagtaaagtcattacctcaactcactcaaatgagataaaaactgcacgtaaaactccagatcactctaattgctgtagtttccaacctctgtttttatcagaggaactrttttattaaaacaaaattttacccagaacctcagtgttgattcatgtattcaatagctattgagcacttatttgtgcaaagcactgaatatatgccttagtaaatagaattcacatctgccaactaaataggtccagttcaagtccaggagtcatccctgattccctttttccccttattgca

SEQ ID NO: 872326 - DNA, 663 bp, Homo sapiens
aatgtacattggttcttctctcaacttctttaaaggtatatataaaattatataaagtaataattgtgacaatgtattgttggacttctaacatttatagatataatgtgtatagcaataccacaaaaggcagggggaagggaatagagctatgtttgaataatgtttctatttctcagtggaattgagtgagtataaatcagatgctcattctgataagatgtgcattgtttcaagtccaacagagcttaaagattaaaaaaaaaaawgggtaatcccagcactttgggagagtgaggtgggtggtttgcttgaggccaggagtttaagaccagcttgggccacatggtaaaaccccatctctacaaaaaacaaacaaacccccacaaatcagccaggcattgtggtgtgtgtctgtagtcagaaggtgacttgggaggctgaggtgggagaattacttgagcccaggaggttgatggtctggtgagccatggtcacaccactgcattctagcccaagtgacagagtgagactctctcttaaaaaaaaaaataataaaaatagtacattgtaagttcctagaggaactaacaaggatacaagtaaaaatatatgtggaaaaaaatcatcaaagaaatgtaaatgctatattagaaaatattt

SEQ ID NO: 872327 - DNA, 626 bp, Homo sapiens
gttcttatgctcagtgattgcatagtaaatatttcattaatcatttattttcaacccatctgtggctttatctttaaagtccatctctttttttttttcgtttttttttgagatggagtctcgctctgttgcccaggctagagtgcagtggcgcgatctcggctcactgcaagctctgcctcttgggttcacaccattctcctgcctcagcctcccgaatagctgagactacaggcacccgccaccacgcccggctaattttttgtatttttagtagagayggggtttcactgtgttagctaggatggtctcgatctcatgaccttgtgatccgcccacctcggcctcccaaagtgctgggattataggcgtgaaccaccgtgcccggcctctaaagtctatctcttatagacatcatatagttgggttttgcttttttagtagagacggggtttcactgtattagccaggatggtcttgatctcctgaccttgtgatttgcctgcctcggcctcccaaagtgctgggattacaggcgtgacgaccgtgcccggccaaggggttttgcttttttaaccattctgaaaatctctgccttttaactaaagtgtttagtccaattaaat

SEQ ID NO: 872328 - DNA, 579 bp, Homo sapiens
ctgtaataggctctgtacagcagtgcagacggggtaaagggaacccacaggggagaatgcagagcatcagggctccttaccttttcgaggtctgagaaagcacagttagggagcagttcctggaacccagaacaggaaagctgtgtggactggctgcctaatgggagtgcaggcttgggtcagggacagtctgtggtgactccacagggagagaaccagggggatgaataaccccagctgaactctccttcctttttcttatctcctgcaggtaccaccccacctycattgcttaaacccaattagaaagacagaagcaaggaagcccctgatcttatccatgtaggtcagccttccagggaaagaagaatagagagtggatctggaggtgcaaatggaagattccaacacaccccataaatatctcctgtagttccatgcccagaatcagggccctgctgtgagttgtactgcatctcttctagaaggcactcattaacttgcaaacatccaaacttgggaaagtgacacccttccttattagtacaaggtctggagtggtccatgaaattggctggc

SEQ ID NO: 872329 - DNA, 579 bp, Homo sapiens
ctgtaataggctctgtacagcagtgcagacggggtaaagggaacccacaggggagaatgcagagcatcagggctccttaccttttcgaggtctgagaaagcacagttagggagcagttcctggaacccagaacaggaaagctgtgtggactggctgcctaatgggagtgcaggcttgggtcagggacagtctgtggtgactccacagggagagaaccagggggatgaataaccccagctgaactctccttcctttttcttatctcctgcaggtaccaccccacctccattgcttaaacccaattagaaagacagaagcaaggaagcccctgatcttatccatgtaggtcagcctyccagggaaagaagaatagagagtggatctggaggtgcaaatggaagattccaacacaccccataaatatctcctgtagttccatgcccagaatcagggccctgctgtgagttgtactgcatctcttctagaaggcactcattaacttgcaaacatccaaacttgggaaagtgacacccttccttattagtacaaggtctggagtggtccatgaaattggctggc

SEQ ID NO: 872330 - DNA, 600 bp, Homo sapiens
ccctaaatgacacaactgagagcacaactctctccttagacacagtgctcagctagctgagctaattgtcctcacaagggtgcttgaattaaaacaaagggagagaagttaacatttattctaagtgtgctttcctagtcctccatgcccatgccactatctagaaagagagagacttcctcacagctaatgtgtctcccattaaacactatcatgaaattaacagactattatcctcatctttccttccagaggaagtggcagtaatacattgtaaaggccaccaaaagtggatggatgaaataaccaagggaaataaattggaagaccaagcagctaaattggcagcaagaaagccccagatttttgatccacttgargcccctctggtctgggggatgctccataagagaaataaaacctcaatattctcctgcagaaatataatgggccacttctcagggatacaccttcagcccttaggatggcctcaattggaggatggcaaacttcatctaccagcttccagccaatggaaagttcttaaaattcttcatcaagcctcccacctaggaaaagataaaacctatcaattggctc

SEQ ID NO: 872331 - DNA, 583 bp, Homo sapiens
tgattattattttcgttatctcagcaaaaggaatgcggtaggagagcagggtgataataaggagtaggtcagcaaaaaaacatgtgagcaaaagaatctgtgtcataattaagttcaaggggaggtactaagcctggatgtgcacataggccagatttatgtttctctccgcccaaacatctcagtggagtgaagaataacaaggcagcattgctgccaacatgtctcgtctcccaccatacggtggtttttctcctatctcagaattgaacaaatatacaatcgggttttataccaagacattcagttcccaggggcaggcaggagacagtggccttcctgtatctcaactgcaagaggctttcctcttttastaatccacctcagcacagaccctttacgggtgtctgtaaagtcaggtctctctcatcccacgaggccatatttcagactatcacatggggagaaaccttggacaatacccagcttttcagggcagaggtccctgtggcttttcacagtgcattgtgcccctggtttattgagactagagaatggcgatgacttttaccaagcatactgt

SEQ ID NO: 872332 - DNA, 627 bp, Homo sapiens
ttgctgccaacatgtctcgtctcccaccatacggtggtttttctcctatctcagaattgaacaaatatacaatcgggttttataccaagacattcagttcccaggggcaggcaggagacagtggccttcctgtatctcaactgcaagaggctttcctcttttactaatccacctcagcacagaccctttacgggtgtctgtaaagtcaggtctctctcatcccacgaggccatatttcagactatcacatggggagaaaccttggayaatacccagcttttcagggcagaggtccctgtggcttttcacagtgcattgtgcccctggtttattgagactagagaatggcgatgacttttaccaagcatactgtttgtaaacattttgttaacaaggcacgtcctgcacagccctagatcccttaaaccttgattccatacaacacatgtttttgtgagctcaaaattggggcaaaatggctggggcaaagtggctggggcaaagttacaaattaacaacatctcagcaaagcaattgtttaaggtacaggtcgaaatggaatctcttatgtcttccctttatacatagacacagtaacagtctgatctctctttcttttccctacaa

SEQ ID NO: 872333 - DNA, 627 bp, Homo sapiens
ttgctgccaacatgtctcgtctcccaccatacggtggtttttctcctatctcagaattgaacaaatatacaatcgggttttataccaagacattcagttcccaggggcaggcaggagacagtggccttcctgtatctcaactgcaagaggctttcctcttttactaatccacctcagcacagaccctttacgggtgtctgtaaagtcaggtctctctcatcccacgaggccatatttcagactatcacatggggagaaaccttggacaatacccagcttttcagggcagaggtccctgtggcttttcacagtgcattgtgcccctggtttattgagactagagaatggcgatgacttttaccaagcatactgyttgtaaacattttgttaacaaggcacgtcctgcacagccctagatcccttaaaccttgattccatacaacacatgtttttgtgagctcaaaattggggcaaaatggctggggcaaagtggctggggcaaagttacaaattaacaacatctcagcaaagcaattgtttaaggtacaggtcgaaatggaatctcttatgtcttccctttatacatagacacagtaacagtctgatctctctttcttttccctacaa

SEQ ID NO: 872334 - DNA, 633 bp, Homo sapiens
gataatgtgaaagttatagttccttccttttcttccctccaaattcactttctagagctgactactatttgcacttcagtttcatgtttccagaaaactcaccatatacagaaataaagtgaggagaacttaataactgcattcagtataaagttgtggcagcatggatgcagggaaaatgcagtaccctagggctttcacagtgggtgcccttacctccctaggactgagggtgttgttaccaggcctgaagacagacagggtatgtagagatggatgcttcacaggaacctaaatcaagggacacagccagcttacagggttggggtcagggaaataaaactctgcccttactccttttttctagactccttctgggctccaaccagatgtagtttgacatagtctgagtggctcakccttcaggaccatagagcagaatggagaaggtggggtcaatgaaagattcccagcctatttgacttactgttttgcaacttgtttctcacctattgataaacgatgcgcattttgctatatcaatttatgaaaattcacctcattctttgttcattatgtcatagaatttcatttcgtggaattattaaatgatagctagaacctgagacggga

SEQ ID NO: 872335 - DNA, 645 bp, Homo sapiens
gtatttctgcctctaggtctttgaagaatagcaacactgtcttccacaatgtttgaactaatttacatttccaccaacattgtaaaagtgttcctttttctccacaacctcgccagaatctgttgtgtttttttgactttttaataatagtcattctgactggtgtgagatgttatctcattgtggttttgatttgcatttatctactgatccatgatttgagctctttttcacgtgattgttggctgcatgtttgtctgattttgagaagtgtctgttcatgtgctttgcccactttttaagggggttgtttttttcttataaatttgtttaarttccttataaatgctggatattaggcctttgtcagatggatagatggcaacatttttctctcattctgtggttgtctgtttactctgttgtttcttttgctgtgcaggagctctttagtttatttagatcccatttgtcaatttttgcttttgttgcaattgtttttggcattttcatcatgaaatctttgcctgtacttatgtcctgaatggtattgcctaggttttcttctagagtttttatagctttaggttttacattttagtctttaatacaccttgagttgatttttgtctatggtgtaaggaa

SEQ ID NO: 872336 - DNA, 645 bp, Homo sapiens
gtatttctgcctctaggtctttgaagaatagcaacactgtcttccacaatgtttgaactaatttacatttccaccaacattgtaaaagtgttcctttttctccacaacctcgccagaatctgttgtgtttttttgactttttaataatagtcattctgactggtgtgagatgttatctcattgtggttttgatttgcatttatctactgatccatgatttgagctctttttcacgtgattgttggctgcatgtttgtctgattttgagaagtgtctgttcatgtgctttgcccactttttaagggggttgtttttttcttataaatttgtttaaattccttataaatgctggatattaggcctttgtcagatggatagatggcaamatttttctctcattctgtggttgtctgtttactctgttgtttcttttgctgtgcaggagctctttagtttatttagatcccatttgtcaatttttgcttttgttgcaattgtttttggcattttcatcatgaaatctttgcctgtacttatgtcctgaatggtattgcctaggttttcttctagagtttttatagctttaggttttacattttagtctttaatacaccttgagttgatttttgtctatggtgtaaggaa

SEQ ID NO: 872337 - DNA, 612 bp, Homo sapiens
attacatactgtgtatgcttaattttgtgtagctgtgtaaaactgaagactgttaaatttgctgctaaataatttcccattgtatgaatgcactgttgcttattcactttttcttttaatatgattgataatctttccaatattttactattacaaacaatgttgtgaagtgtaccctgatgtacacatgcacatctttctccaggcaaaggtccttaacccttggatccatggatagatttcacagagtccatgaacgtgaatgggaaaaaaaaaaactaaatctgtctctttattaccttctaactgaaatgcagcatttcttytcattacaaatgcagacaagagagaaacacaatacctgtgcctgtaaccttgtcataagtagctctgtatgctttgtattttttgtcactgataaaaataacaaaattttatatctcattatggctgtaaatatctagaaatatcatttgtgctcattactattttgaaattattgtagttattagaccccctacttgctgctgttatttaatacgttaataaaaatgaataatttttactatagcacaaatttattgttttagtatttgatagccatattctgat

SEQ ID NO: 872338 - DNA, 539 bp, Homo sapiens
aattttgtcaaatgctttttctgcatctattgagacgattacatgtttttttttgcccttcattcttttaattatgtgtaccatatttatagatttgcatatgctgaacaattcttatatccctgggatacatttcagttgatcatggtgaatgatccttttaaatgtactgttaaatktgttttctttttttgctgaggatttttgcatttatgttcgtgagggatattgacttgtaattttcttttcatttagtgtccttgccttgctttgctattaaggtaatgctggccttgtatgatatgtttggaagtacttcatctttttttaattttttgaagagtttgggaaaaaaagataatatttcttctttaaatgtttggtagaattcatcagtgaagccatctggttcttggcttttctttggtgggagacattttatttctgattcaacctccttaccactcattattagtcagttcagattttaatttctctgggattcattctcagtaggttgtatgtgtttaggaatttgt

SEQ ID NO: 872339 - DNA, 681 bp, Homo sapiens
ttcattttcaaaagtgtctccatttggaggatgaattgtatcagtagttcttaaagtgtggtctagggatctctgggggtatctgagatattttcttgagccagcaagatcaaaattatttttataatatattacaaaactgtttttctttttctcctctaattttcttatgagtggagttttccaaaggctacgtgaagtgtgatgttgcagctaagtgaatgtagagggagatctgagaatccaactgtcttctgttcagccaaatattaaagagattgcatgaacataaagccactactcttagtagtttttttttgttcattttggaaaatatctttatttttcattaaagtatgttgtttatgttatcataagctgggtctattttatttgtattattttaagtaaatttataaataaatatatattttcatgctcagttttaatgtcaaacagggtaaatattcataaatataacctrtataaacatcagccctttgaggtcctcagtaatagttaagaatgtaaaagcctcctgagactgaaaagttatgttactggaaagttacgtttttcctcgtatcatttcaattaccagtttgggtttacttcagtttctctctttggggtcatagagttttatttccccatacatgagcatacttcctctcaattcat

SEQ ID NO: 872340 - DNA, 593 bp, Homo sapiens
atccagtggtatacttcttccaaactgaatgtcttataactctcttactatgaacagtaagaaattgcacagaaatatagttactttatattcaaaacctacctatttctttcttggtttatgacttttcatatcctgagtatccatccatgaaacaggatagccgaggaaggttgaagagggcatcaggatatggcagaatacctccattttaattgtagataaactgctcattagatgtgtgcctgtttcaggttacccaaaatttctgtttctcactttcttcatcattaagctactaggtagtaaagcttaaatgaactaaagcatgtaaagcatctagcacttcatgagtgttcagttaaactaaaaaaaatgtattttcacagacttagcctgtggatgtgastattcaggaaggaagtttagagtgattttgggtgtcagagagagaaggcaattgtctcagaagaggatattagaaggggttaatagaaatgaaggctataattctctaaagtagaatttgatctacagatttattttatgtaagggatgaatcttattgttggatgagtcttaccttaatgtgt

SEQ ID NO: 872341 - DNA, 571 bp, Homo sapiens
ggccatgtgaggtgtcagtctgcccctactggggggtgcctcctagttaggctactcgggggtcagggacccacttgaggaggcagtctgcccattctcagatctccagctgcgtgctcagagaacctctactctcttcaaagctgtcagacagggacatttaagtctgcagaggattctgctgccttttgtttggcaatgccccgtccccagacgtggagtctacagaggcaggctggcctccttgagctgaggtgggctccacccagtttgagcttcccggctgctttgattacctgctcaagcttcagcaatggcaggcaccstcccccagcctcgctgccaccttgcagtttgatctcagactgctgtgctagcaatgagcaaggctccgtgggaataggaccctctgagccaggagcgggatataatctcctggtgtgccgtttgctaagaccattggaaaagtgcagtatgagggtgggagtgacccgattttccaggtgccgtctgtcacccctttctttgactaggaaagggaattccctaaccccttgtgcttcccagatga

SEQ ID NO: 872342 - DNA, 603 bp, Homo sapiens
gtaatcactgctgacctggcaggttcttcctcatgatagccttctcaacaggttcacttctgctaaggtgtgaggtgtgtgtctctgtttgtttgcttgtggcaaagttgtcatgttttactctaaatacaaagtaagaagacaggagccaccaatgtcttgcacacaataaatgttaaatgaagatttttggggtttgattgggtgcaccgggtttggaaaaaaaatcagaggtgtcagtcactatgctcaaaatgtctgtgaagcccccattgctggctgctgtttctcttgaacagttcccgttgctttttggagtaatcagcacctgggtaagatttgcaactstccaatccacaaaattctgtaggtgtccagagaggcgggaagctgttttaaaactgtccttctttagaatctattatgaggcctttttgggggaggaatagcatggcttctgagtactcattctattaggttgtctggttttggggagttggtagagtactaactctaggttctctgatttctaggagttggtagagtactacctctaggttctctgatttctaggagttggtaaagtacttacgctaggttctc

SEQ ID NO: 872343 - DNA, 624 bp, Homo sapiens
attcatgtacctgaaagtgacagggagaatggaaccaagttggaaaacactcttcagggtattatccaggagaacttctccaacctagcaagacaggccagcattcaaattcaggaaatacagagaacaccacaaagatactccttgagaagagcaaccccaagacacataatcrtcaggtttaccaaggttgaaatgaaggcaaacatgttaaggacagccagagagaaaggccaagttaccaacaaagggatgcccatcagactaacagtggatctcttggcagaaacctgcaagccagaggagagtgggagccaatattcaacatctgtaaagaaaagaattttcaacccagaatttcatatccagccaaactaagcttcataagcgaagaagaaataaaacccttacagataagcaaatgctgagagattttgtcaccaccaggactgccttacaagagctcctgaaggaagcactaaatatggaaaagaaaaaccggtaccagccactgcaaaaacataccaaattgtaaagaccatcaacactatgaagaaactgcatcaactaacggggaaagtaaccagctagcatcataatgacaggatccaattcacacataac

SEQ ID NO: 872344 - DNA, 638 bp, Homo sapiens
aaaagttaaaaaataatagatgttggtgtggatgtggtaaaaaggaaacacttttacttttctggtgggaatgtaaactagcataaccactatgaaaaacagtatgaagattccttaaagaactaaaagtagaactaccattcaatccagcaatcccactactgggtaactacccaaaaagaaaccattatrtgaaaaagacacacacacatgcatgtttgtagcagcataattcacaattgcaaacatatggaaccaatctaaatgtccatcaaccaatgagtggataaagaaaatgtggtatatatacaccatggaatacaacttagccataaaacagaatgaaataatggccttttcagcaacttggatggagctggtggtcattatcctaagtgaggtaactcaggaatggaaaaccaaacatcatatattctcacttataagtggtagctaagctatgaagatgcaaaggcataagaattatataatagacataatggactttagggacttggggggaagggtggaagggtggtgagggataaaagactgcatattgggtacagtgtacactgcttgggtgacaggtaaaccaaaatctcggcaattgccactaaagaacttatccatgtaac

SEQ ID NO: 872345 - DNA, 638 bp, Homo sapiens
aaaagttaaaaaataatagatgttggtgtggatgtggtaaaaaggaaacacttttacttttctggtgggaatgtaaactagcataaccactatgaaaaacagtatgaagattccttaaagaactaaaagtagaactaccattcaatccagcaatcccactactgggtaactacccaaaaagaaaccattatgtgaaaaagacacacacacatgcatgtttgtagcarcataattcacaattgcaaacatatggaaccaatctaaatgtccatcaaccaatgagtggataaagaaaatgtggtatatatacaccatggaatacaacttagccataaaacagaatgaaataatggccttttcagcaacttggatggagctggtggtcattatcctaagtgaggtaactcaggaatggaaaaccaaacatcatatattctcacttataagtggtagctaagctatgaagatgcaaaggcataagaattatataatagacataatggactttagggacttggggggaagggtggaagggtggtgagggataaaagactgcatattgggtacagtgtacactgcttgggtgacaggtaaaccaaaatctcggcaattgccactaaagaacttatccatgtaac

SEQ ID NO: 872346 - DNA, 674 bp, Homo sapiens
taataagattcgttcactatagatacaattaaaactaccatttaccatgtgtcagataaatattatctctcagttcttcaacaactcaattgaagttggtatgattttccctcttttacagatggtttagagaagttaaaacatttgctcaaaatcatacatttaacagtgtgtggcaaaggtacaattcaaacctatgtttttctgccttaaaactcaccttttcatctttgattatgttttattaactccacataaggctcataatgtttataaatattagtgagatatatttgggtcttgccaacccctgtcattaagaaaaggggccaggcacagtggttcacgcctgtaatcccagcactttgggaggccaaggcgggtagatgacccgagctcaggagttcaagaccagcctgggcaacatgacgaaaccttgtctctagtaaaaatacgaaaaacagattagctgaatgtggtggtgcactcctataatcccagctacccgggaggctgaggcacarcaatcacgtgagcccaggaggcaggggttgcagtgagctgagatcgcaccactgcactccagcctgggccacagagcaagactctgtctcaaaaaaaaaaaaaaaagggaatgcagttttggaaactgccctcagactactgggtaaaaa

SEQ ID NO: 872347 - DNA, 664 bp, Homo sapiens
acctggaagtgatttagggctgttgaccagggttcttgtcatttgaaaatagatgatagcagaaaaaagagaaggagatgcaaaggtatgagcagagtggagtggcttccttatgaaagtggctggctagtgcttatgtctctggttttacagattgtttttattcaggtaatattgaatcaatcttaaaagaacttaagaagaagaataactcatcaccatgctgggcgccgtattttctatttttctctatggtgtytcccagtctttattcgtatctataccatttgctctcatggcggtctcatgtatctattctgtttgtaaaattttaatatgacatcatttttatgacacttcagtctctgcatcatttctaattattttattatattctgtcatgtaattatgtaaactctttgtcttttacttaaagtactcattattttgattatacaatactgttgcaatgaacatcttttttatttgggcattttcttttctttttagttattcagataaattccccagcattgaattactggatccaagagagagacatttttaaggatataaaatcacatttctaaagaattgatctaataaaaaaatgctgctagtaatatacctatttttcctgtttactcagtttgagttatagaat

SEQ ID NO: 872348 - DNA, 655 bp, Homo sapiens
tggcctcaacttaaagtcaccagctgcattaacccctaaccagagggtcatcctgttctttgaagctaggcattgaattctcctttctagccatgtaagtctcagatggcatcttcttccaatatacagctgtttcatctacattgaaaatctgttgtttagtatagctacttttgtcaattatcttagctagatcttctggataattggctgcagcttttccatcagcacttgctgctttaccttgcactttcatgttayggaaacagcttatttccttaaacctcatgaaccaacttctgccagcttccagtttttcttctgaaatttccttacctctctcagccttcatagttttgaagacagttggagacttgctgtggaataagctttggcataagggaatgttgtaactggtttgatcttcttattctttcctagcttttgagttaaagtgagacatgtgactctttctttcacttgaacacatagagggcattggaaggtttttaattggcccaattttaattctgtgggtcttggggagtagggagacctgaggggagggagagagacgggggaatagctggacagtggaacagtgagtgaggacatacacaatatttatctgttaagtttgttgtcttatgtgagc

SEQ ID NO: 872349 - DNA, 537 bp, Homo sapiens
ctgacttggcaattggcaggatgatactactattcactgagaggagagacataaaacagggtacaaatttgaaaggaagaatgtacaggggatggtaacaaattgagttttagacatgttgagtaagaggtacctgtgaaacatcaaagatattaagtaggcttttggcttagtgggtttgacagtgacttgggagattttagttgtagacagatattgggagtcattgggtgtataatacttgattctgtctcattaggaatgggagaatagaaatatcaagtatacttttaagttatttttgaataaaggtattatgtttaatttgcatgacaaatctgtaagaaayctctaggacagggaaacattattgcacatagaagtggctagtggcttgaagggttgcctaatatgtaaagacatccaaatttttaaaaggtggagtaggtagagggaaattttaacttatttttttaaatatggcaagaattgtcagattgggttaaaaaatcaagacccaactctatatgctatctg

SEQ ID NO: 872350 - DNA, 594 bp, Homo sapiens
tcacgctgggagctgtagaccggagctgttcctattcggccatcttggctcctcctccgagagctttttttttaatttaaaaatcacaacacttgagaatttcaattaatcccataattaagaaatgcctactccatgtaggtgctcartaggtattcttgtaaaccaggacactggttttcatgattgcattttgctatgttcataatcaatccctgtattccacaggaccctgggaaattatttgataactaggtcactttttctttttgtaaagggttgaattgtgtccccctgccagattgatgaagtcctaaccccctatccctcagtaattcagaacatggccttgtggccttatttgcagattgacaaactggttgttgcagatgtaattaatcaagttaaaatgagatcattatggtgggccctaaaccaatgtaagtggtatccttataaaaaggggaaatttggctgggtgtggtgcctcgcacctgtaatcctagctcctacggaggctgaggtgggaggatcgcttgaggccaggggtcagaaaccagcctgggcgacacagtgagaccctgtctctaaaaa

SEQ ID NO: 872351 - DNA, 573 bp, Homo sapiens
ttctttgcaatgggttcgaacatccttctttagctcggagaagttcgttattaccgatcttctgaagcctacttctgtcaactcgtcaaagtcattctccgtccaggtttgttccattgctggtgaggagctgtgatcctttggaggagaagaggcgctctgatttttagaattttcagcttttctgctctggattctccccacctttgtggttttatctacctttggtctttgatgatggtgtcctacagwtggggttttggtgtggatgtcctttttgttgatgttgatgctattcctttctgtttgttagttttctttctaacagtcaggtccctcagctgcaggtctgttggattttgctggaggtccactcccgaccctgtttgcctgggtatcagcagcagaggctgcagaacagcaaatattgcagaacagcaaatgttgctgcctgatccttcctctggaagcttcgtctcagagggtcacccggctttatgaggtgtcagtctgcacctactgggaggtgtctcccagttaggatactcagggggcaggggcccacttaaggaa

SEQ ID NO: 872352 - DNA, 584 bp, Homo sapiens
ggaggagagaaaggaaaggaaggaaagaaaggagagagggagagaaaggaagaaaggaagaaaggaagggagggagggagggagggagagagagagaaaagaaagaaagcaagcaaaaggaagagagagaaaggaaggaaggagggagggagaagggaggagggaaggtgaaagggaggaagasaggaagggagggaggagggagaggaagaagaggagggggaggagggggttgggagaggaggaggaggagagaaagtggctagaaatgagtttggaagttgctttctaccttttaggtttttttttggcctctgggcagttacccaattcttaaaaaatggaaaagctctctgcacttacatggacagcacttaaatccattactaagtgggggtgggggagccaagctaaaggacaataactatattacactatactttatgtaaagagggggaggatgatggtggtaaaaatccaaattttatttacttggatatgcaaaaagaaactggaaggatatataaaaagagcagcagtgatactggtggtgtgggtatcagaaagaggacagatgtgttcat

SEQ ID NO: 872353 - DNA, 520 bp, Homo sapiens
cctaatagatatctacacaacatactactcaacaattacagaatatgcattcttcccacttgcacatgaacatactctaagattgaccatgtgcaatgtcattaagcaagtctcaataaatttaaaaaaactaaatcataccaagcatattctcagatcacagtggaataaaaatagaaatcaataccaaaaggcactctcaaaaccacacaattacatggaaactaaacaatttktcctgaataaattttgagtaaacaacaaaattagggcagaaataaaaaaaaatctttacaaaaaatgaaaatgcagacacaacataccaaaatgtctgatatgtagcaaaagcagtgttaagaggaaagtttatagtgctaaatgcctacatcaaaaagaaagatctcaaattgacaatttagccttgcatctaaaggaactataaaaacaagaacaaactaaacacaaagctagcagaagaaaaaaaataactaaaagcagagcagaattaaataaaactgag

SEQ ID NO: 872354 - DNA, 579 bp, Homo sapiens
tgttctcctaggtctctgggcctttttcccattgtcctgatgcacaacaactgaatcccttttatccatgctaatatctagcaacttgttgctgggccacacccaccctcagcattctcttcaggacatgcgtttttactatttacatggttaagtctgcaaattttccaaattttcagactctgctttccttttaattataaacyttgtctttaaattactcttttgctcctgaatctcagcttaagcagccaaaagtagccacacagttccttctatattttgcttagaaatctcttccagaaatcctaattcatcactcttacgttctgccttccataaagccctaggacagggaggcaatggtgccaagttcttcacaactgtattttacttcaaatcccaataagatactccttatttttatctaagacttcattagaatgaccttcactgtctatattcctatctacatttcagtcaccacaacttaactaatctctaagaagttccaaactttccctagtattctcgtcttctatgtcctcacaagaatctaggctttttctagtctgctcc

SEQ ID NO: 872355 - DNA, 605 bp, Homo sapiens
ggcaattatcacattgcctctctaaaagtgataaattggcagccagtaccagggagaggtcatttcctgatggtccacacctgttgcactgaagtgtcaattgaatgcagatgccagagagatgcaacttccctgtcatgtgcattaagagacataatggcagagaacgaccttccaagggcacaccactggaaaagggaaraaagcctcagatgggcatttgtgcaacttcctaaacacactgtgtgtgctcacctgtcaatggcaaggagggcactgcgcatgaaggcatcccaccctaaaggaagaatcatggaaaaggggccagcgtataaagtcctaggatcacggttaaacaccacacttgttcttcaagttactcacttgggtctcttccaagagtatcttttcttttctgttctaaagccttttaaaataaaactccactcctactctaaagtttgcctcggtctctttttctgccttatgcccctttgtcaaattatttcttctgaggaggcaagaattgagactgctagagacctgtatggattcactgctggtaacttggataccttccaccagtaacaatcatgattgaatta

SEQ ID NO: 872356 - DNA, 595 bp, Homo sapiens
attttccaaagtgtagatgaaatgacaaatatgcaaaaatgagagatgtacaaagtaagtcacaataaaaaataaaaaaagtcattggttctaaaaccctgccaagtgatagcaactacagccttccttacaggtctagtattttcttcaatgtcctcaatatctttctcctccttctcagagtcagcaaaaaggtcacagccatcatcatcctcttcctcatcactcacttgtgtgatgtgctaagagtataaaatascaaattagaactactagttattaagctaaagaagagatactgccacttagcctttaggctcctccttcaaaatcgtaacagctgtttaaaataataatcataatcacgatgcagtaagttataaagcaaaagatgtgctggaacaaataatacacaagatttacttcaaatctaaataaaaatgcaatctttaataagaatgtaaccacaagaatataaaaagcaaaatattaaaatatcaaaattgtctgttactagagaaatatttttatttatttactttttttatttttgagtaattttgttgttgcccaggctgcagtgcaatggggtgat

SEQ ID NO: 872357 - DNA, 595 bp, Homo sapiens
attttccaaagtgtagatgaaatgacaaatatgcaaaaatgagagatgtacaaagtaagtcacaataaaaaataaaaaaagtcattggttctaaaaccctgccaagtgatagcaactacagccttccttacaggtctagtattttcttcaatgtcctcaatatctttctcctccttctcagagtcagcaaaaaggtcacagccatcatcatcctcttcctcatcactcacttgtgtgatgtgctaagagtataaaataccaaattagaactactagttattaagctaaagaagagatactgccacttagcctttaggctcctccttcaaaatcgtaacagctgtttaaaataataatcataatcacgatgcagtaagttataaagcaaaagatgtgctggaacaaataatacacaagatttacttcaaatctaaataaaaatgcawtctttaataagaatgtaaccacaagaatataaaaagcaaaatattaaaatatcaaaattgtctgttactagagaaatatttttatttatttactttttttatttttgagtaattttgttgttgcccaggctgcagtgcaatggggtgat

SEQ ID NO: 872358 - DNA, 616 bp, Homo sapiens
gtatttaggaatcaattcagtgaaatgttgtgaaacgatgaagcttttgttacatctcaaaatgaatgttacaggtaaaaacaaaaagttattactaaaactttcaaaaaagcaatattttctagttctatacattctacttctaaaacatctcctgaaattctcccccaaattattataacagcatcctgttggtgtttcctaccaaygtttcccttacagtgcccagagtcatgaatctaaaatagatatgctcatgtccctctttgttcaaagacatcctctgactttgaactgcttacagaaatagattccacctgtgttgatacaagtgattgattggtcatggtttgctgaagtgtatatggtcaagtattctagggatatgcctgagctgaatgaaaagacattcttgaattcagttttaatatcctcgatggatatgggaatagaggagaagaatgaaatgtggctagtgtttcccatgctgagattaaggtcaaactccttagtacatgctttataaaggatctgtcaacaaatttacttccaagagtattatcttctgttatcattgcaacatctcctagcattatctgcaatgtccttcctgacc

SEQ ID NO: 872359 - DNA, 600 bp, Homo sapiens
ctatatcacccaaacctgaaaagggaaagaaggatgtgaagaaaataatataggaggaagaagaatgaagaaacagcgggcaagaaaaagaagaagactagaaagagaagatgaagcaggataaagtggaggagaaatmgctttactgaatggtaggtcatatacaaattatactggggaaaagtgaaatttggcccctaaattccacatctacctacacggtgaacattgagggtatgcctaggtcctaagaggaatttgtcttcaataatcttcatgaatcatttaagagttttaatggtaactaacgagaaaaatttcagtaagctatattaaaactgttaaatgatttatttaacagttttggtcaaaacagtgacccccttattcatcaagcacttagggttgatttggcaacactaaacatcctttaagattctgttcataacctacttcctctataaaatcttctttgacctctgctctttccattttctgaatttgtgttccacgtacaggaagtatgtctgttacttctgctcttccaacaacaacaacaacaacaaaaagcccaaggatgctgctaaatatcttaaaagg

SEQ ID NO: 872360 - DNA, 600 bp, Homo sapiens
ctatatcacccaaacctgaaaagggaaagaaggatgtgaagaaaataatataggaggaagaagaatgaagaaacagcgggcaagaaaaagaagaagactagaaagagaagatgaagcaggataaagtggaggagaaatagctttactgaatggtaggtcatatacaaattatactggggaaaagtgaaatttggcccctaaattccacatctacctacacggtgaacattgagggtatgcctaggtcctaagaggaatttgtcttcaataatcttcatgaatcatttaagagttttaatggtaactaaygagaaaaatttcagtaagctatattaaaactgttaaatgatttatttaacagttttggtcaaaacagtgacccccttattcatcaagcacttagggttgatttggcaacactaaacatcctttaagattctgttcataacctacttcctctataaaatcttctttgacctctgctctttccattttctgaatttgtgttccacgtacaggaagtatgtctgttacttctgctcttccaacaacaacaacaacaacaaaaagcccaaggatgctgctaaatatcttaaaagg

SEQ ID NO: 872361 - DNA, 625 bp, Homo sapiens
taatattatctgggatgacaaaataaataagattattctctagcagtaaaataggtagacttaatacctaggaacttctatttttaaaacctgaccaaaattctggtacagctgtaccttgtcaagggacaaagagagttaaatatagtttgggtgggagaatcgctttttaaagaaaaagtgctgctcctttttttatgaagacaggagttaagagaatcttattttttttttctgttagattgcattcattcactaaatattgacatttacccaaacaactataayagcagaaatgctacttcctttgcatatttctgagtatttattacagagctgggcttttagtagtcactgattggtggtgtcttttcctatgtttagtacgttggataacttcaaaacaaaagtcactgatgttatatcagctactactgatgtactgctatagagacaaagaagcatacggttcttgactattccaatgcttgtgttgtccagaaccatgcagtgtagtatgcactttcttagttataatgtcatcagtaacatgaagtccaaaggcatacagtttctttcattgtgcatgcaccagaagcttagaatcaatagcactcttatcagg

SEQ ID NO: 872362 - DNA, 575 bp, Homo sapiens
agagtacatgtagaacggattttaagctaaaagcagcagggcgaagcagatgggctctgctgttttacacagaattagatcccacctccagctagtttatgggctccaagcttcagtgtcctcatctataaaatgggtgaaaataacacccatctatagagtatctctgaagattaggaaacatgtaccataaagtacttagcacctgctaagtatcatgcactgtgtgcataacacttgctaattaactctttcccttttcaagctaaacgtttcaatttcagtatattgggaagtacaatgctgaactctgaaaaagactctcccaaaaaattttactatttaggcatcttcrtatgtgagtctgtatgtatatgagctagacttgtagatgatcactagctcataggattaaaaataataataatgagccttttggtaatagtagagaatacaacttttaaattgtacttatgaacattctgttcattgtagacaactggggaaaaagtgatctgtcactggaggttaaaatgtatatttttatgctggtataagacaggtatctatttctc

SEQ ID NO: 872363 - DNA, 681 bp, Homo sapiens
tttcaataatatacggttcagtggctataattacaggattgttaaagttcacattttactattcatcttgttatctctggtaatggaaggttggaataaatgcacataattacatggttggtcttaaattatttttatattgctcttgccaggatatactcgaaaagcagtatttattctctaatatttatttttggtggtagtggttttagcaaaataaaagtaataaatacataaatggactggtcccacgagcttactatctatggtttttttcaarttaattctaacccattcatctctctgagcctgctaggggcaggaggtgcttagagtctatggaagaaaaacgtcatgtttcagagctctggtaacaggaaaatgtccctcatgaggtactcatcatttgatctattattttatctatttgtagcagagtaactcagtaacctacagatctgtggaccaacttactaaataaggtgtcaaataagtttgatttcattctaaagcaatgccatgtcatgaaagtaaagtgaatttttttgtttgtattatactggaaatagtctcattgtactatatggcactcaaaacattttataaaaatcttagcactatcaactaaaaattaactcataagctcccgtaattaactgaacagatgactccctgttggcc

SEQ ID NO: 872364 - DNA, 524 bp, Homo sapiens
gaaatgcaaatcaaaaccacaatgagataccatctcatgccagttaggatggggatcattaaaaagtcaggaaatggccaggtgtggtggctcatgcctgtaatcccagcattttgggaggccgaggcaggcagatcatgaggtcaggagatcgagaccagcctggctaacatgatgaaaccctgtctttactaaaaatacaaaaattagctgggtgtggtggcatgcacctgtagtcccagctacttgggagtctgaggcaggagaattgcttgaacccragaggcagaggttgcagtgagccaagatcctgccactgcactctaggctgggtgacagagtgaggctccatctcaaaaaaaaaaaaaaaaaaaaaaattcaggaaacaacaggtgctggagaggatgtggagaaataggaacgcttttatactgttggtgggagtgtaaattagtgaaaccattgtggaagtcagcaggtaatctttttacggtctgagtaatgaggaacctggctaatagtt

SEQ ID NO: 872365 - DNA, 602 bp, Homo sapiens
aatagcgtcttctgctttctaataatgaacttttctgtaatgcctcaagatctacaaagatgtcttattttgcttccagagtcacgtgagaaaacagtaacaatttgagggaggtgttgctctttcagctttatccagagatgtgcggtggcttgttccaggtgttatatgacaggacaatggacctcaaactcaagattctttttcctctacacttcactactttaactctcctgattattttgtggactgatgaataagtacgtgtaaactgattttagttttyctggtaatgaaaaaaaaaaaaaacaatgagtattgttactcttgtaataatcacatcattttttgtctttctttctttttctcattttatttttagacagggtcttgctctgtcacccaggctggagtgcagtggcatgatcacagctcactgaagcttcgaattcccgggtttaagcagtcctcccacctcagcttaccaaggagctaggactacaggcatgtgctgcaacacctggctattttaattttttattttatttttttttatttttgtagagacagggtctccctgtgttgctcaggctggcctagaa

SEQ ID NO: 872366 - DNA, 623 bp, Homo sapiens
cctctcctctcctcctctctttcttgagacagggtcttgctctgtcacccaggctgcagtacagtgattcaatcctggctcactccaacttctgcctcctgggctcagatccttccacctcagcctcctgagtagctgggatcacagttgcatgccacagtgcctggctaatttttttttctcttttgtagagatggggtttcaccatgttgcccagctggtctagatctcctaggctcaagcaattcaccctcctcggcctcytaaagtgctgggattacaggcatcagccactacttctggcctgtgtttttcttttttaaagataagacctaaagaggattttgactattttgaaaatatattcatatctgtgtatttttggttattcacttccaggtcctaaagttgcaattaaggagaaaaaaatcattgattattcttagtagttttgatgaggtaatgcaaggtttttctgtagcaaagtcagcatgcgtcgtgaatatggttaagctatgtatgattaaaggattatttatgttttatttataagtatttgctatcaataacagctcccaaaagtaagattcaccagtattactacagcatatgggacttttgct

SEQ ID NO: 872367 - DNA, 623 bp, Homo sapiens
cctctcctctcctcctctctttcttgagacagggtcttgctctgtcacccaggctgcagtacagtgattcaatcctggctcactccaacttctgcctcctgggctcagatccttccacctcagcctcctgagtagctgggatcacagttgcatgccacagtgcctggctaatttttttttctcttttgtagagatggggtttcaccatgttgcccagctggtctagatctcctaggctcaagcaattcaccctcctcggcctcttaaagtgctgggattacaggcatcagccrctacttctggcctgtgtttttcttttttaaagataagacctaaagaggattttgactattttgaaaatatattcatatctgtgtatttttggttattcacttccaggtcctaaagttgcaattaaggagaaaaaaatcattgattattcttagtagttttgatgaggtaatgcaaggtttttctgtagcaaagtcagcatgcgtcgtgaatatggttaagctatgtatgattaaaggattatttatgttttatttataagtatttgctatcaataacagctcccaaaagtaagattcaccagtattactacagcatatgggacttttgct

SEQ ID NO: 872368 - DNA, 600 bp, Homo sapiens
aattcttgctccactagttatgtgaccttgagcaaattacttaacttctctgtgccttacttttgccatttgtgaagtggaaactaaatagcctttatgtcccagtaacaatgcaaagtttattcattgccgattagaaggggcacactgttcaagatgctcattaattcattcactcattttatgtaatgactcatttatcaatcctttgttgagtctcaaccactgtcctaggtaatgctgatacaatcttatgttttgaagctcgccacaaaatttgatcaccactagakccaagatttaacacattatttcatttaatagctattttgagtcttcagggtacaatttacagttttgggggggaagatgtagggaaatatgactcgtcagactcaattaagtgcatttactcagggctacccatctattaagtggcatggttctctaaccccatagttcattctctttttctgtgcaccactagtaggttttgcataaggtaattttgtccaagtggttactgtgtgggtcctgttcacaatcttgatcatgattgtattccaacttctatgtcagagtttgcaagcatgtggctta

SEQ ID NO: 872369 - DNA, 595 bp, Homo sapiens
gtctgattactttgtgagtcatcaaattgatttgactgtccttgcccttcatataatgtcccaatagacacttaacctgactctacttccttgaatttggcaaagtaagcacgatcattggagttactgcttttgggattatttatttatcacatcacctctgccatcattacttcccactcrtctttgtttggcttactttctactgtgcttctctctatcaaatctttgcacctccttaggaagatctggaagtcacctctctgtaaatctgagaagttattttcattgttgttggatgataatgcttaagccagtgttggaggctgcacaagtaaattacatggttttagaagcacctcctccttccatctgtgctgtttggttgtattctttattggatctgggatgatatgacttctttgcctggggctgttgctgccattacgcagttttggattcactgttgcttcataccaatgttggtgctgtaaatgtacatgataagagttccacagtgagatggactacaagacttctggacccagagccccctaaaactagatccaagaccagattatgcactgctactgag

SEQ ID NO: 872370 - DNA, 634 bp, Homo sapiens
ccctaactatgcacaaactgagaactctttttaagggtaaataaatgttctcattcatcctcacaattgatttaaaatattgtaacattttctaaatatgtacaaacagaaagctatctcatagttcttgtatgaccagaaagttattgaaattttacaaatcaaatgcaaacaataccatgtaaatgaagaacattaacgtggcagatgacattttcctgagaataaagctctacttgcaacataaatacaacacaattgctatrttttaggttctttagaatttggcacattttactgctgtatgccttgtgatttctcagttctgttattatttgtctctgtttgaacccatgcaaaaccttcatccacacagcttagactgtcattcagccctctctttctgcaaataaatctaatatatgtctatagtcagcccacttttcttctatgcagatttcattaatgaaagtagtaattcttgtcagtgtgattgcaagcacaaactcaaagataacattacatggcagtccttggttggcaattgaatggtcagtattcagttgaaaggtcatcaaccagaaatatggttagccattttttagaagaaaacaaattagaaaaaagtatggat

SEQ ID NO: 872371 - DNA, 609 bp, Homo sapiens
tggcacaattattgcttatatttctcctattgctgcttttactgctgtagctgcctcctgaactgctgctgctgctaccatggcttctagatgcttctttgacaatttatttattttccagtggaacccatctgtgargaagcccttcatagcagtaatatcctggggctgggcactactacaataatgatgctttcgttaatcaccccatgtaattttagtttttgctgataaatactacaataaatcgattgaaactgatgaaaatagctcaaaatttagagacatacagtatttcattttaccatcagcgtatttctatgtttatgcaatagggattgaaaaagttcaatccccatgctcaaaaacacatacttccagctctctgagatgatatgccagacagggcttttgattagaagccttatttttttgcctagttctagcttctgtatgagtggagactttattaacaaaggtaggtttggagcactcaacagaagcgtagagaatatatggaaaaaaaaaaagaagaagaaaaaagataaaagggaaccaaacaaaacaggtttacaactgttttactaataagagggaaaagtctgctca

SEQ ID NO: 872372 - DNA, 631 bp, Homo sapiens
ttgagttatacaccaacacataatgtacacccactgtgtgacaggtactcttccaaatgctttacatatgtgacttcatttaatcctcactagcctttgaacctaataaagtgactattttacgattaaaaacattgagactcagagaggttaagtggcttgattaacatggtgttaaagccaggattcaaacctggttgtgaccagaaaactcttggtctttctgctgtaccacacagtctgtcaactcaggaaacagactacacaaacacatcaagctcttttgtcaggaatcaagtacacagattgatgaagcactttgattaatgcagctaacacacctttccaaagcatctacaagactttccaattcctaataagtatttgaatgttttccaatctgcctgaacccgtttcaacccaaggagatagtaaataaaaggagcagactgatgaaacactcacacttgatatgtstttttttttgaatgaatgaatcaatgaataaatgattgagtgaggttccacatgatcaaatctcttgcactaggaaaggagggatgctagtttataaaagaagcaaaggcacaggaagttatgcacccttcaaaagcacaccaatgggctcgta

SEQ ID NO: 872373 - DNA, 482 bp, Homo sapiens
caaaaagatcttatttgttaacttatttacatggatactatgtcttccccaacttcaagttcatgaggtctgtgtttctgtcttgtttatcaccccaggctcaatgtcttaaaatagcacctcgtaggctctcaataacagaagatggcaccaaattaatacactgaaaatgccacaagattttagayaaatgtaaaaacattcaggctttgattatttggtgaacattttgaggcattacgtgagttggagcaaaactcttgaggttaaataatatttgaatgggctctgagaggcaaggggagcgtggccatgcttgtccccccacccttatctgtattctgataagaaaatacagaataaatttctttgaaattaaaaaataactcaaactctctgtaattatttttctttaattttctgagagaaggtttttttttaatttggagaaatttttaaaaattaaataaaaactagaaata

SEQ ID NO: 872374 - DNA, 774 bp, Homo sapiens
aactattttgtaaaatgtgatttttaagattttctgtaactaaaatattacattcaaattaattaaattctgactgggtgcggtggctcacgcctgtaatcccagcactttgggaggcggaggcgggtggatcatgaggtcaggagattgagaccatcctggttaataaggtgaaactgcgtctctactaaaaatacgaaaaaaattagccggcgcggtggcaggcacttgtagtcccagccggtggcaggcacttgtagtcccagctactcgggaggctgaggcaggagaatggtgtgaacccaggaggcggagcctgcagtgagccgagatcgcgccactgcactccagcctgggcaacagagcaagactccatctcaaataataataataataataataataattattattattattattattacattctgtgctaacataagactcaacagcctttgagtcaacttttcagtcaactttgttgtcctcaaaaaagcatcttaatgaaaacacagaagaatatacttaggaccttggattaggcagagttcttacatatgccatcaaaarcatgattcatttagcacaggacagcaaaagcatgattcatttaggatatgttacttagcttgatttaggcattccacaacgtatacacatatcaaaacacaatattgcacacaatgaacatatacaattgttgtcaactaaaaaattcatttttaaaacagcatgatccatttaaaaactgatcaattagacagacccttt

SEQ ID NO: 872375 - DNA, 575 bp, Homo sapiens
ctcaggtatttctttacagcaatgcaagaatggtctaatatattctccttcccccaaaaccccagctcaatgacagaaaggtcgattcctcagtcttctaaggttatctcaatgaagaaaaaggagatattagggaatatatcagttattcctatcctcaatcatatgttcattcttgaatcatgtatttgtttttttcataaaatgaaaagaggaaacttattagagttttaaactctaatctaacattctagaacatgtaatctgtgtgtatgtccatggaacagtaaaaaaaaaattaattaattaccctgagacctggcccaaacrccttaaaatgcatcacatttgctcttacagtaggcccaaaaagtgttgtgttaaaactagtgagttctgtgtccctgaagatgtttaaaaatggttaatcagtggtatccaggaatagagtagaattgcttgatgcagcaaacagacatttgcattttaaaatcccttcaaatccggagagtttttatttctaagatggatacagtagagatggaaagaaagatgagaggatctttaaaaatcaa

SEQ ID NO: 872376 - DNA, 600 bp, Homo sapiens
agaggttccttgagtgagacaccaaaaagtccccaaataacagagcttgtgattgactttttctaacgtactatctggttatttaaagtagtggttgtctcttctttaattaaaaaaggaactctaggctgggcgtggtggctcacacctataatcctagaactttgggaggccaaggcaggtggatcacctgaggtcaggagttcgagaccagcctgaccaacatggtgaaaccccatctcgactaaaaatacaaaaattagctgggcgtggtggtgtatgcctgttatcccagctattcgggaggctgagacaggagaatcactggaacccgggaggtggaggttgcagtgagccgagatcgygccattgcactcaagcctgggtgacagagtgagactccatctcaaaaaaaaaaaaaaaaaggcactctagtttctaaagttattcttccccttggctggttctgtttgtatgaacggctcatttcatagcaattgacatcaccctatgaattcaggatactgaaaggaacagtttgcatttttaattgttctctatcagtctgtctatatgcttctaatcttccatgccaggagc

SEQ ID NO: 872377 - DNA, 636 bp, Homo sapiens
tattaataataaaacggcaattttccccttccaagttcattgtgctaaaatcattctacacctccctcttcacttaaaatctacaatttaaaactttaaaaaataacttcaaccatacctaatgccataaactatgattctcaccaccttgttttatctcactcaaatttatttagacccccatcagccctgctctttcttgtgcctggctctwttaatgataattactcagaatactatccccattctgtgataccatcacatcgttgtggggaagattgtgatcttatcccaacctattctgtttaactctgacactccttctattatagtggggccttgataagatcatgcctgttaggatcagacattagttggaatcaatatttgaaaatgtgcctgtttctgtttaatagtaaagttagtgtgagggttgaagtgagatcatttgttggatgagattgtacaactttatctttctactactttatgctcaaaagcacagaatgaggtctctgggaaaccataattttactgaccaatccacccggatatattagcttttaggtaggtgacctaccctgaagggaacacatattttttaaactggttgaagtcagaataatgagtttgaaa

SEQ ID NO: 872378 - DNA, 590 bp, Homo sapiens
tttgtctagttgtgggctgtctaaacgtgaaactctgggttcaaaccgtgtccaggagtgtagaattttaaaatgtacaatgtggagcttcaaaagtgcacaagatttcttttttttaaaaaagaagacattccagtttaagtgaaattcaaggctattgttatgtaccttgaattgatttattactggaaaagactgcctagatacagacaaaatacaaacttgaacctgtaaaaattcaatatttcaaaatggaaaaaatggagaaaaactttgtataagtgagaataagctaggttttgctgaggctgtatgcaaccctaatactacaacagctttgtacctgaaaaagttcatttctttctcatactccctgaccactgtgkttgccagtccacctctttgtttccatgattgcttcagcaaaagcaaggcataatggtgaattggccattggatcttacgggttctgtgtaggagtgacacaagccacttcttcaatttcactggtcaagcaaagccatgtggccagatccaactttaaaagagatctggaaattgaagagttggaactaactgatcagtagcca

SEQ ID NO: 872379 - DNA, 650 bp, Homo sapiens
taccagtggcatgtgtcaggattcaaacctagaaaatgtgactccaaaaacaataatgtccttttgttatacttcaactgtaaagtcaatgatgattcaggatatgatgtatctgattttataagcaggaattattacagtcaccattgtgtatttgcttgtattttaaagcaagaacacagtatctctaattgacgggaacaggaggcagagaaattctaggcagaaaagggtgggtcgctggcaaaaaccccaccctcaagccaamaagcctgaaactgtggcccaaagtgagaacttctatccctgttttcccactcaaatgttgccttttcctcaaccacctacactgtcccatcatatgcctataaaaaccccagcctcagctggtagacaggactacggctggatgttggagagaagcagcttgacttcaaagggatggtttgatggtgcaactttggagaagaatctggccagagacggtcggacttcaggggaagattacctacccaccccgtccccttttcagctccccttcccactgagagccactttcgtagacaataaaatcccctgcatttaccatccttcaatttgttcatgcaaccccatttttcccagaccaccagacaagagcttgggagcca

SEQ ID NO: 872380 - DNA, 640 bp, Homo sapiens
aaggtaagcaatgattcattatttctttatgcctatgagattatatgttcatgtaacaggcaaaaaagacatcactcatagatagactcattttttataccatgtttttaaaaaaggagaagaaagatgagaccaagagagggagagattgaaaggagagattatgaaatgagttacaattacaaattgggtataaagctgcggagttttaaataatcaatgagaaagatgattacaaggagtgaaacagctcattcacaggaaaataatgacagctttattttcataaatatttaacaaataacttcaaaggactaggactgcgctgttcttggtttyttgcatgcacacacacacacacacacacacaccactaaaatttctctccctagtctacaaaaaaagactttcattaccttcctttttctcactagtgcttagttatttcatactttaatgtttagttactaaatattcaacgtttaaattttctcggtgaggaaataatccagaactttctgaaacacaaagtatcactatttgcttctttaaaaaatagtctattaatttcttaccatctcctgatttaaatctgaattactttgcatggcttgtgtaacttatcaaacccctatcttaa

SEQ ID NO: 872381 - DNA, 625 bp, Homo sapiens
gctgaggcaggagagtcacttgaacctgggaggcagaggttgcagtgagctgagagtgcaccactgcactccagcctaggtgacagagtgagactcaaaaacaaaaaaaaagaaaaaagaaaaagaaaaagatttaatgattgtcctattggattttggacttgcatggattctgtagcctctttgttttggccaatttctcccatttgaacaggtgtatttactcaatgcctgtactcatattgtgtctaggaagtaactaatttgcttgtgattttacaggctcatagatggaagggacttgccttgtctcagatgagactttggatttggacttttgggctaatactgaaattagttaagactttggggaactgttggaagggcatgattgtgttttgaaaagtgaggacatgagatgtgggagggttgaggggtggactgatgtggtgtggctctatgtacccatccaaatctcaccytgaattgtaataatccccacaagtcaagggtgggaccaggtggatgtaattgaatgatggggacagttccctcatgctgttcttgtaatagtgagtgagttctcacaagatatgatggttttatgattgtccagcatttcacc

SEQ ID NO: 872382 - DNA, 641 bp, Homo sapiens
atattttagttcagtaaaaatggaaatagctgtaattaaaagattacttatatcttttctaccctttacaatcccataattaacaactttatttagagaagccaactgaaatatgctttagttgaactaaaaggtattatttatcatatctgatatggtttagatctgtgtcctcatccaaatcttatgttgaattataatccacaatgttggaggtggggcctggttgraggtgattgaataattgggggcagtttctcatgtatggtttagcaccatctccttggggctgttcttgtgatggttagtgagttctcatgagatctggttgtttaaaagtaagtagcaccttccctctctctctctcgttcctgctgaggcctgcttcccctttgccttgattgtaaatttgccatgattgtaaatttcctgaggtctccccaggaacagaagctgccatgtctcctgtatagcctgcagaactgtgagcccattaaacctctttttttttaaataaattacccagtgtctatttctttatatatatatatatatatataatatatatatatatatataatatatatatatattttattatactttaagttctatatgtgccatgttggtgtgctgcactc

SEQ ID NO: 872383 - DNA, 641 bp, Homo sapiens
atattttagttcagtaaaaatggaaatagctgtaattaaaagattacttatatcttttctaccctttacaatcccataattaacaactttatttagagaagccaactgaaatatgctttagttgaactaaaaggtattatttatcatatctgatatggtttagatctgtgtcctcatccaaatcttatgttgaattataatccacaatgttggaggtggggcctggttgaaggtgaytgaataattgggggcagtttctcatgtatggtttagcaccatctccttggggctgttcttgtgatggttagtgagttctcatgagatctggttgtttaaaagtaagtagcaccttccctctctctctctcgttcctgctgaggcctgcttcccctttgccttgattgtaaatttgccatgattgtaaatttcctgaggtctccccaggaacagaagctgccatgtctcctgtatagcctgcagaactgtgagcccattaaacctctttttttttaaataaattacccagtgtctatttctttatatatatatatatatatataatatatatatatatatataatatatatatatattttattatactttaagttctatatgtgccatgttggtgtgctgcactc

SEQ ID NO: 872384 - DNA, 641 bp, Homo sapiens
atattttagttcagtaaaaatggaaatagctgtaattaaaagattacttatatcttttctaccctttacaatcccataattaacaactttatttagagaagccaactgaaatatgctttagttgaactaaaaggtattatttatcatatctgatatggtttagatctgtgtcctcatccaaatcttatgttgaattataatccacaatgttggaggtggggcctggttgaaggtgattgaataattgggggcrgtttctcatgtatggtttagcaccatctccttggggctgttcttgtgatggttagtgagttctcatgagatctggttgtttaaaagtaagtagcaccttccctctctctctctcgttcctgctgaggcctgcttcccctttgccttgattgtaaatttgccatgattgtaaatttcctgaggtctccccaggaacagaagctgccatgtctcctgtatagcctgcagaactgtgagcccattaaacctctttttttttaaataaattacccagtgtctatttctttatatatatatatatatatataatatatatatatatatataatatatatatatattttattatactttaagttctatatgtgccatgttggtgtgctgcactc

SEQ ID NO: 872385 - DNA, 658 bp, Homo sapiens
agtcaagacacatcagtgtgctgtattatggagacccatctcacatgcgaagacacacataggctcaaaacaaagggatggagaaaaatttaccaagtaaatggaaagaaaaaagaaaagcaggggttgcaatcctattctctgataaaacagactttaaactgacaaagataaaaacagacaaagaagggcataacataatggtaaagggatcaatgcaacaagaaaacttaactatcctaaatatatacgcacccaaaaacaggagcacctggattcctaaaacaagctcttagagacctacaaagagatttagactcccacacaatcatagcgggagactttaacaccccactgtcaatattagacagatcaagacagaaaattaacaaggatattcaggacttgaattcagctctgaatcaggtggatctaatagacatctacagaactgtgcatcccaaatcaacagaatatacattcttctcagtgccacaaygtatttattctaaaatcgaccacataattggaagtaaaacactcctcagcaaatgcaaatgaactgaaataataacaaacagtctctcagaccacagtggaaagcaattaaaactcaggattaaaaactcactcaaaaccacacaattacatggaaaat

SEQ ID NO: 872386 - DNA, 547 bp, Homo sapiens
acttcattgcccatatcactatcaacattttagtcaaagccattcaacaagtctctaggaagttccaaactttcccacaccttcctgtcttcttctgagccctacaagtctctaggaagttctaaacttttccacattttcctatcttcttctgagccctacaagtctctaggaagttctaaacttttccacattttcctatcttcttctgagccctacaaacttccaacctctgccagttgtccagttccaaagtcgcttccacatttttgggtatctttatagaagaaccccactctctgcagtatcaaatttactgcattagtctgttctcatgcttcgatgaagaactgcctgagactgggtaatttayaaaggatagaggtttaattgattcacagttctgcagggctgggagggcctcaagaaattcacaattatggtggaaggggaagcaaacatgtccttcttcacttggtggcaggaaggagaagtgagtgctgagagaaggaggaagccccttgtaaaaaccatcagatcttgtgag

SEQ ID NO: 872387 - DNA, 499 bp, Homo sapiens
atctccctctgccttggagaatttgctccctccattatgttccctggagtacacactccctaggaatctcagctagatgcccaggactctctaggagtccctcttccttaataccaccaattctttatcatgtctgtctacatattcagtagactatatctcatatttcttcttcttctcttgcttctctggcactgccttaatccaatcgaccatgatgtctcaattagataattgaagaacagwctatacaaacttcctctcttcagtctcagactgtccagcccagccactgcatggaaattactcatgcaattatgtggcttaatatcctttaggagccccccaaacttacaaagaaaacccagcttggtagactcagtatatgtttccagaatcagaacatggcatcctgactatctcttcggtagtactgtcttccatttactgattggtttagccaactgacattcttgctattattacattgtgcctacat

SEQ ID NO: 872388 - DNA, 635 bp, Homo sapiens
ttgggccttttctctcttttgtacaaacagcatttttatgagttaaaagcctgggaatgagtggtgggcacaaggcagtgttcatttggaagcaataagaatacagtcttaaaagtgaagccacttcattatcatttcatataaaacatggcaatcttggctggactgtgaaactcatttccaagtgtggccaggctccaagtgaatgcttgctatcacagaagctgtatgttwttattaaccccaggacattgcactgatgatgacaaaaatttgcacttcctgactccaactttatttctaaactaattataattatattatatttcattagatcgaagacactatcaactattatttattgctaagaaagaaaatacctctaataaaacttttacatgtcatcaatttcaagatacatctcaatgtctgataaattaaaatctttaaattgacaagaattataagacaaagaaataaagcacataaggcagaaggcaaaaataattcctttactactgaccaaactgttattagcagaagtgtgttatatttgggatgataacatcttaatactaagcctcagaaatagcagaattgtacacagcacaacttgactggtaggattccacata

SEQ ID NO: 872389 - DNA, 640 bp, Homo sapiens
cctaataaaatgtgagatgaatgccttcacccacacaagtgatggaattctcggctttcaaacagtgatacatgaaatcaaacattcagctaagatagctcattccacttctccataaatttatttttcatttccaactttctccaggggctagattaaaggtcatgtggaatcatatggatgaagaaattttcctgccaaattagctcctccaggttgttccacacccttgggtaaatggtaagcttattaggaagctgcatgacatttgtcattacatgggcttttcaattcattgcaaatttcttgttctaagaggaagtctttagtttatgaaattcttaaaagcactcaaattgtgattaacatactaatcataattgtcattagctgaggaggccaggtgcagtagctcatgcctataatcccagaactttgggaggccaaggcaggaggatcgcttgagctcaggagtttgagataagcctgggcaacgcagtggracctggtctacaaaaaatcaaaaaatcgattaagagggtgtggtgtcatgaaactgtagccccagctacttgggaagctgaggcaagaggattgattgagccagagagtttgaagttgtgaagttgctatgatcttg

SEQ ID NO: 872390 - DNA, 625 bp, Homo sapiens
cgtaatccatttgaaaatttattttcatttgtatatgtgtgagataggaattctaatccaatcatttcccagatagataactaagaacatcatctattataatattcacccttattcccctctttgtgccctgtcatttcaaataccgtattcattacttctcaggcttttggctaagatcaagkgtgaaataccatattcatcatatactaaacttctacatgtagatgaatctgtttctggagtctctgttcagttccactgaattatttgtctatgcttgtgccaatcccacaatgttttaaccactatagctttatggtatattttgatatctaatagggaaaattcttcactattgttctttttcaaaatgttcttggctagacttctgcattttttcttccagatgaacttaagaatttgtggtcaagttgcataaaaagttcagaacccatcaaatactttgtttctaaatgtttctccttttctagttactgatctatttctccttctccccatcccacctcctttaagcagtacatgtggtcatcagcaaggcactcccaaaattctaagaagtaaaaattttaaacccccacattataaataaaactagaacatg

SEQ ID NO: 872391 - DNA, 625 bp, Homo sapiens
cgtaatccatttgaaaatttattttcatttgtatatgtgtgagataggaattctaatccaatcatttcccagatagataactaagaacatcatctattataatattcacccttattcccctctttgtgccctgtcatttcaaataccgtattcattacttctcaggcttttggctaagatcaagtgtgaaataccatattcatcatatactaaacttctacatgtagatgaatctgtttctggagtctctgttcagttccactgaattatttgtctatgcttgtgccaatcccacaatgttttaaccactatagctttatggtatattttgayatctaatagggaaaattcttcactattgttctttttcaaaatgttcttggctagacttctgcattttttcttccagatgaacttaagaatttgtggtcaagttgcataaaaagttcagaacccatcaaatactttgtttctaaatgtttctccttttctagttactgatctatttctccttctccccatcccacctcctttaagcagtacatgtggtcatcagcaaggcactcccaaaattctaagaagtaaaaattttaaacccccacattataaataaaactagaacatg

SEQ ID NO: 872392 - DNA, 625 bp, Homo sapiens
cgtaatccatttgaaaatttattttcatttgtatatgtgtgagataggaattctaatccaatcatttcccagatagataactaagaacatcatctattataatattcacccttattcccctctttgtgccctgtcatttcaaataccgtattcattacttctcaggcttttggctaagatcaagtgtgaaataccatattcatcatatactaaacttctacatgtagatgaatctgtttctggagtctctgttcagttccactgaattatttgtctatgcttgtgccaatcccacaatgttttaaccactatagctttatggtatattttgatatctaatagggaaaattcttcactattgttctttttcmaaatgttcttggctagacttctgcattttttcttccagatgaacttaagaatttgtggtcaagttgcataaaaagttcagaacccatcaaatactttgtttctaaatgtttctccttttctagttactgatctatttctccttctccccatcccacctcctttaagcagtacatgtggtcatcagcaaggcactcccaaaattctaagaagtaaaaattttaaacccccacattataaataaaactagaacatg

SEQ ID NO: 872393 - DNA, 583 bp, Homo sapiens
tgagaggaagtagctcaactggccctctgttggtaggaataatctggggcatgagagtggtggttgagaagcataggctgaacgaaatagggatgaagagaacaggaagcattttgaataactgaacatgatagtgggatggtttcccatggcctggatctgttaggaatacattcactggccaagagtatcaagaggaagagaattgaaagtaggaagcctcttttagggactgtgggtggaggaggtagtaatcgtatgttactttattcctcatttttttccataaggcaygacaacaaagattggggagtgcttcattagccagggtagggttagaataggaggtgtcattatcaagtgtagtctcttgaattctcatacattttacagtttaactacagccatactatctcataatctacacagcaattctgagagactggccatccttacttttcagataagaaaactgtggcttctaaggagaaaacgacctcagagtcaagtggctagtaaatatgactctgtggctgcaataaagaacttttgacttcaaaatcagtgctcctttcattatgtt

SEQ ID NO: 872394 - DNA, 596 bp, Homo sapiens
aatcaacagatgcataataatgttgtccacttacaaccctctatctctgatatcactatctctgcctgcttccagcatagtacacaacaaccgttcattcacaaatgcaagaaatgtttaaggaagagacgctacttgttgggtaccataagcagtgtggagggggcaggatggataagcatacatgcccactaggagcttataatctagtggaggagaaagaagtaacaggctggagagtatcaaggaaagaagataacctgtctggctgaaagagaagccatctgggytgtgatatcactgagcaggtcttgaaacatgacgcttaagtacctcctatcctcccctgcccaccgcagctgcattttctcgcctgccattcgctagtgaccctgaatttccaatcgtgccctacttcagcttgaaccctccagcctgttgtgattggttatttccttttttctattaaatattcccagctagatgtccctctgataaagtcctgtacattccatttgaaagtatgaatgatgggtaaccaatgttgatgctgcccttggagacaatgacacatgaaggattcctatggaggaact

SEQ ID NO: 872395 - DNA, 588 bp, Homo sapiens
agctgttcttcctgatgttcttcctctcactacgcctccaacaggccccagtgtgtgttgctccccacatgtgtccatgtgttctcattgttcagcttccacttacaagtgagaacatgcggtgtttggttttctgttcctgtgttagtttgctgaggataacagctttcagctccatccatgtctctgcaaaggacrtgatcttgttcctttttatggctgcatagtattccatagtgaatatgtaccacattttctttatccagtctatcactgatggacatttgggttgataccatgtctttgctattgtgaattgtgctgcaatgaacatatgcattcatgtatctttataatagcatggtttatattcctctgggtagatagtaaaggaattaccaggtcaaatggtatttctacttctaaacttttgagaaatcaccacactgtctaccacagtggttgaactaacttacattcccaccaacagtgtaaaaatgtttctatttttctgcagcctcaccagtacctcttgtttcttgactttttaataataaccattctgactggtgtgagatggtatctcat

SEQ ID NO: 872396 - DNA, 701 bp, Homo sapiens
ccatgacatcattagaagttatttttgccaggcaggcatggtggttcatgtctgtaatcccagcacattgggatgccaaggcaggtggatcacgaggtcaggaggtcaagactagcctggccaacatggtgaaaccctgtctctactaaaaatacaaaaattagycgggtgtggtggcatgcgcctgcagtcccagctactcaggggctgaggcaggagaattgcttgaacctgagaggcagaggttgcaatgagccaaggccaagccattgcactccagccttggcaacagagcgagactctatctcaagagaaaaaaacaacaaaaaaaagaagttactttttccttggccatcattaagtcaagaaaggattggtgaatagcataggaaaatatgatgatatcttttgacagcccagatttgttctctttctctcttgacttgagtttgcccaggtctgtagctctgcttatcatcttatcactgcttcccagatgggctttacttctgcaggtgtgaaattgctgctgctccaaactctgtccatcctatcacaactgcacaatacctcccagaaataccaaaaagcttcttgcttatttgttgtgctctatttgttgggtcatttcagatagcattggaagacaaggaaggtaaatgtgggaccaagtctccattttgctatgaagtgatcccctt

SEQ ID NO: 872397 - DNA, 707 bp, Homo sapiens
gtaagtattagcaccttttaaatttacattaacaataacagagaaatggggaggcaggaaatgaaaggagaggggtaaaaatagctcacagatgtcataaccaaagtttagaggaactcaaaaaatcattaatcactattttttaaattttctaaaaaactatactatgcacatcctggttaaaattgtatgagtgataatttgcctctcatcaattaaaaatggggaaataggcaaggtcattaactctgctgtggctgaatcccagactgtgctttctttaaaagggaagagagatartctacggagactaaccagttcagtggttgagtgatttctacaagagtcatcaccaactcaaaactttcctgaagtccttctgactattttaacgcttgccatctgcagaaggtaaaaatctgctagaggccaagttccaatcgctatccagcccaccactgaccctctttgatttcattctccatcaacaaggaggacatggacagggtcaatggtctaatgcgttttagtgacagccctgatttttcattggaaagaggagaaagatcgtttcccatttttctccttgacccacggatttgaccaactcaggcacattaaaagtctgcaaaagcaggtagcctgcaggaagttcaccctagggggtgagttcctagttgggctgaaacgggtttccaggcatgttt

SEQ ID NO: 872398 - DNA, 707 bp, Homo sapiens
gtaagtattagcaccttttaaatttacattaacaataacagagaaatggggaggcaggaaatgaaaggagaggggtaaaaatagctcacagatgtcataaccaaagtttagaggaactcaaaaaatcattaatcactattttttaaattttctaaaaaactatactatgcacatcctggttaaaattgtatgagtgataatttgcctctcatcaattaaaaatggggaaataggcaaggtcattaactctgctgtggctgaatcccagactgtgctttctttaaaagggaagagagatagtctacggagactaaccagttcagtggttgagtgatttctacaagagtcatcaccaactcaaaactttcctgaagtccttctgactattttaacgcttgccatctgcagaaggtaaaaatctgctagaggccaagttccaatcgctatccagcccaccactgaccctctttgatttcattctccatcaacaaggaggacatggacagggtcaatggtctaatgcgttttagtgacagscctgatttttcattggaaagaggagaaagatcgtttcccatttttctccttgacccacggatttgaccaactcaggcacattaaaagtctgcaaaagcaggtagcctgcaggaagttcaccctagggggtgagttcctagttgggctgaaacgggtttccaggcatgttt

SEQ ID NO: 872399 - DNA, 598 bp, Homo sapiens
aaaaagtacaatgatatggtcaagataattaatattttaatgggtaaactctgtttaattggatttttaaaactcttacaaaaagggatccatcttaaaaatgatgtaaacatctatttaatatcatgtttgctctcytgaagtacaacattcatataaacaatttttacttaaaaatcattattatgggcctctttagacagggtaggcctctctagcttactagagtacacactatttctatatctatatcaatgccagtgtgatcctctaaaatgtatgttccttgtcacccttctctaaaatcaaactctaacaaaatattggaactcttctgcaccttggcattccctacttcttcagtataacttctctctacttttccatatgcatctccacccaaagaaattacttacagatccttgaaagcatagtgctcttcctgggtgcacacgttgcacaggataatcctaccatcttgagcacctttgtgccaccatttttgcctagcttactccttcacatccttcaggctcaagaaacatctcccccagaatctttctataaccctagctggtctgtgtcgtagcactcatct

SEQ ID NO: 872400 - DNA, 598 bp, Homo sapiens
aaaaagtacaatgatatggtcaagataattaatattttaatgggtaaactctgtttaattggatttttaaaactcttacaaaaagggatccatcttaaaaatgatgtaaacatctatttaatatcatgtttgctctcctgaagtacaacattcatataaacaatttttacttaaaaatcattattatgggcctctttagacagggtaggcctctctagcttactagagtacacactatttctatatctatatcaatgccagtgtgatcctctaaaatgtatgttccttgtcaccyttctctaaaatcaaactctaacaaaatattggaactcttctgcaccttggcattccctacttcttcagtataacttctctctacttttccatatgcatctccacccaaagaaattacttacagatccttgaaagcatagtgctcttcctgggtgcacacgttgcacaggataatcctaccatcttgagcacctttgtgccaccatttttgcctagcttactccttcacatccttcaggctcaagaaacatctcccccagaatctttctataaccctagctggtctgtgtcgtagcactcatct

SEQ ID NO: 872401 - DNA, 634 bp, Homo sapiens
gggttggttccaagtctttgctattgtgaatagtgctgctataaacatactgttgtgtgcatgtgtctttatagcagcatgatttataatcctttgggtatatacccaggaatgggatgactgggtcaaatggtatttctagttctagatcccagaggaatcaccacactgacttccacaatggttgaactagtttacagtcccaccaacagtgtaaaagtgttcctatttctccacatcctctccagcacctgttgtttcctgactttttaatgattgccattctaactggtgtgagatggtatctcattgtggttttgattctctgatggccagtgatgatgagcattttttcatgtgtcttttggctgaataaatgtcttcctttgagaagtgtctgttcatatccttcacccacytgttgatggggttgtttttttcttgtaaatttctttgagtactttgtagatgctggatattagccctttgtcagatgagtagattgcgaaaattttctcccattctgtaggttgcctgttcactctgatggtagtttcttttgctgtgcagaagctctttagtttaattcgatcccatttgtcaattttggcttttgttgccattgcttttggtg

SEQ ID NO: 872402 - DNA, 583 bp, Homo sapiens
gtcttggctatatgggctcttttttggttccatatgaaatttaaagtagttttttctaactctgtgaagaaagtcaatggtagcttgatgtgaatagcattgaatctgtaaaatacttagggcagtttggctgttttcatgatacygatacttcctatccatgagcatggaatattcttccatttgtttgtgtcctctcttatttctttgagcagtggtttgtagttctccttaaagaggcccttcatgtcccttgtaaattgtattcctaggtattttattctctttgtagcaattgtgaatgggagttcactcataatttggctctctgtctattattgctgtataggaatgtttgtgatttttccacattgattttgtatcctgagactttgctgaagttgcttatcagcttaaggagattttgggtttagacgatggggttttctaaatatacaatcatgtcatctgcagagatgatttaatttcctctctacctatttgaataccctttatttctttctcttgccttattgtcctggccagaacttccaatactgtgttgaataggagtggtgagaga

SEQ ID NO: 872403 - DNA, 574 bp, Homo sapiens
tactcttcagatctcagctcacttgtcttttcttcagggaaaacttgccagatcttcttaaaagggtgatttaatttagtttgatgttcttacagcaatatgtgccaccccatctatagctctcatcacggcagcaaatttacatgcgtttcctacagcagataagcgtttgtccttagtattccacacatcttgctacaccagctactttgttgagcacagttgctcattctcaagtgctcagcagtaggcagattcttcttattttagagcacartcttattatggaatgaaggcgatcatagaaagggccataatttcttctgggggctctgactggattgctcattaaatgcttggagagagaaaacctttcagagaaattatcctttcactgtgtgactgaatggagtttgaacaatttcctggggtacaatgcattatctcttcccgattttgtggcaaattcttcttaagcatgtggggtgtcaactccaagtaattaattaattaattggcaaacactgattgaacctgcatagtaccctgcctctccaaataaatactatcattt

SEQ ID NO: 872404 - DNA, 630 bp, Homo sapiens
aaaaagagcccgaatggccaaggccattttatctacaattttactaagccaaaagaacaaagctggaggcatcatgctaccagacttcatgtagtatggtagctactatagtacatagctacagtaaccaaaaaatcagggtactggtacaaaagcagacaaataaaccaatagaacagaatagagaacccagaaataagactgcacacctacatctatctgatcttccacaaagctgacaaaaacaagcagtgggaaaagactccctattcaataaatggtgctgggataactggctagccatatgmacaagactgaaaccgaaccccttccttacaccatatacaaaaattaactcaaggtggattaaagacttaaatgtaaaacccaaaactataaaaaccttggaagacaacctaggcaataccattcagaacataggcatgggcaaagattttatgaaaaagatgccaaaaaccaattacaacgaaagcaaaaattggcaaatagagtctaattaaatgaaggagcttctgcacagcaaacgaaactatcatcagagtgaacagacaaactacagaatgggagaaaatgtttgcaaataaatgcatctgagaaaggcgtaatatc

SEQ ID NO: 872405 - DNA, 630 bp, Homo sapiens
aaaaagagcccgaatggccaaggccattttatctacaattttactaagccaaaagaacaaagctggaggcatcatgctaccagacttcatgtagtatggtagctactatagtacatagctacagtaaccaaaaaatcagggtactggtacaaaagcagacaaataaaccaatagaacagaatagagaacccagaaataagactgcacacctacatctatctgatcttccacaaagctgacaaaaacaagcagtgggaaaagactccctattcaataaatggtgctgggataactggctagccatatgcacaagactgaaaccgaaccccttccttacaccatatacaaaaattaactcaaggtggattaaagacttaaatgtaaaacccaaaactataaaaaccttggaagacaacctaggcaataccattcagaacataggcatgggcaaagattttatgaaaaagatgccaaaaaccaattacaaygaaagcaaaaattggcaaatagagtctaattaaatgaaggagcttctgcacagcaaacgaaactatcatcagagtgaacagacaaactacagaatgggagaaaatgtttgcaaataaatgcatctgagaaaggcgtaatatc

SEQ ID NO: 872406 - DNA, 631 bp, Homo sapiens
ctcttggaaaatgagtggcactgcttataaaaaaagatcaaaaaaagaaagaagggaaagaaagaaaagcaaaataaaataactcacagttcatgtctaaatgatcatagattattccattataaacattttaaataaaaacaaacaataactaattatataactcttctgtcttcctcaatagactggaaactccatgagggcagggttgcaactctggtttgctgatgtctctctagcgcttagcattataaatatttgcagacatattaccaatcaaatattcatatcaatataagaaatctctcaacttaaagacatgttacttacatgtgtctcattcttttcaacagctgaatttcactgtagtgagtcagtaagatgaaggaagaagtggaggaaycagaaaggaaagagctcccttccaaagaccaataaatatcagctctggccaaggcagtctgctctgacctgtgggtatggagtataaacttccttgtgcatgcaactatttttctcattttagattttattttctcccccaactgtatggagtttccctacattttgagatgaaatttgtacgagagtattgtgtaggcttttgtgggcatgtttgggcctctgcata

SEQ ID NO: 872407 - DNA, 631 bp, Homo sapiens
ctcttggaaaatgagtggcactgcttataaaaaaagatcaaaaaaagaaagaagggaaagaaagaaaagcaaaataaaataactcacagttcatgtctaaatgatcatagattattccattataaacattttaaataaaaacaaacaataactaattatataactcttctgtcttcctcaatagactggaaactccatgagggcagggttgcaactctggtttgctgatgtctctctagcgcttagcattataaatatttgcagacatattaccaatcaaatattcatatcaatataagaaatctctcaacttaaagacatgttacttacatgtgtctcattcttttcaacagctgaatttcactgtagtgagtcagtaagatgaaggaagaagtggaggaacsagaaaggaaagagctcccttccaaagaccaataaatatcagctctggccaaggcagtctgctctgacctgtgggtatggagtataaacttccttgtgcatgcaactatttttctcattttagattttattttctcccccaactgtatggagtttccctacattttgagatgaaatttgtacgagagtattgtgtaggcttttgtgggcatgtttgggcctctgcata

SEQ ID NO: 872408 - DNA, 616 bp, Homo sapiens
aatgaggaacacttaaagtatgagtctctttatatcaagttcaaaaacagccctaattgaacagattaggggtgcatacagaagtgggaacacttttaaggaaactctgggagttagtgtgactgggaaggggccccagagaggattkctgggtcaagaagcccatgcttttcacagaacccctttctagtgtttgcacatgacccgaatcagcccctgggctcatgtcacattctctcctgctggctaacatttttgcaatgggtgtaacctgcttgttttattattagtcaccaaccacaggcgacttgcttttccatcagaccctcgcagtgtgcttggccttcggttcccagcctagtgggagccaacgaccctatgagatctgggtatttctgggtatctctgggctctcattggctggatcacaggggcttccacgacttgacagccaatcactgaggagcttgatgaagtccccttctgtctgttgaaaactttagagagaacatattttaaaaatgtgtgctaaatacatatctgacagtgtctgaatttaatgtccaagaaattgacctgaaactcaaggctgcaaatttacccacccttttggggc

SEQ ID NO: 872409 - DNA, 616 bp, Homo sapiens
aatgaggaacacttaaagtatgagtctctttatatcaagttcaaaaacagccctaattgaacagattaggggtgcatacagaagtgggaacacttttaaggaaactctgggagttagtgtgactgggaaggggccccagagaggatttctgggtcaagaagcccatgcttttcacagaacccctttctagtgtttgcacatgacccgaatcagcccctgggctcatgtcacattctctcctgctggctaacatttttgcaatgggtgtaacctgcttgttttattattagtcaccaaccrcaggcgacttgcttttccatcagaccctcgcagtgtgcttggccttcggttcccagcctagtgggagccaacgaccctatgagatctgggtatttctgggtatctctgggctctcattggctggatcacaggggcttccacgacttgacagccaatcactgaggagcttgatgaagtccccttctgtctgttgaaaactttagagagaacatattttaaaaatgtgtgctaaatacatatctgacagtgtctgaatttaatgtccaagaaattgacctgaaactcaaggctgcaaatttacccacccttttggggc

SEQ ID NO: 872410 - DNA, 618 bp, Homo sapiens
atcaccaccatgcttacatcgcaagagctcctgaggaaagcactaaatatggaaagaaaaaaaacagtagcaaccactgcaaaaaccacaccaaaatataaagattaatgatgttatgaagaaactgcatcaactagtgtgcaaaataaccagagagcatcatgatgacaggatcaaatttacacataacatattaaccttaaatgtaaatgggttatacgccccaattaaaagacacaggctggcaaattggataaagagtcaagacatatygatgtgctgtattcaggagacccatctcacatgcaaagacacacgtaggctcaaaataaagggatggaggaaaatttaccaagcaaatagaaagaaaaaaaaaaaagcaggggttgcaatcctagtctctgataaaacaggctttaaaccaacaaacggcaaaaaagacaaagaagggcattacataatggtaaagggatcaatgcaacaagaagagctaactattctaaatatatatgtacccaatacaggagcacccagattcctaaaacaggttcttagagacctacaaagagattcagactcccacacaataatagcgggagactttaacatcccactgtc

SEQ ID NO: 872411 - DNA, 590 bp, Homo sapiens
ttacaagaacatggcagcaagttctccaccaatttattactcaatttttctataaggaaaattggtacaataacattagccttcaatttttatagaagtgttctaaatatatataaacaacattcataaatggtttgaaatgtttgtaaatagaacactcaatgcaagctatattagtatacattttaatggctaaaaaacaaagtaaaactagattcttccgtttctataattctaaaatttagtttttatgatgttgtcatggtgggacaatccaatttagaactattttaaaaaatatttgttaagaagaactctttaaaagaagcctactatgatagcataaatggaatatcaaaggtttttgctaaaatgaaagatwtagagttataagtatttagtgaataattagtttcagaataaagggccaagaacagtaacaaaaagtgcattccttaattgtgtttttctcaaagacaatattattttctgaaagttctttctctttctctatctgcatgtatgtttatgtgtatatgcatctatgcttatatgtgcatagttgtgtatgtagtaatattaaaactgga

SEQ ID NO: 872412 - DNA, 692 bp, Homo sapiens
gtagaattagtcactaacgcataacagaatgctttacacagtactaaggtatcaacaaaattagagattttggggtttatttcaggaatataagaaatcaactacaaaaactcatcctgtttctatcccattcttaacattttccttcctaaattcttgtacttttggatttaaaatgatcrgctctggctacttccatgaattacaggaaataattagctgctaaactttattttacatcagaaagtttggaagtggcatgtttgttaacaagtgtcttttatgtttcttagaactggaagacctgcctcatgtttcatgaagcttccatgatactacgtttagttgtagtcacactgtgtgacagaacatattgccttcatattcctaaactcaaataagaatttgcctttaaatttgtgacttatgaacacattaggatagaaatctctagtctgaggtctgtgaacctattgaaatggtgtaaaatttgtgtgaatgtgccttatttttttcttggaaaggggcacatagcttttatcagctcttcaatgaacttcttgtctccccagttttgtggcacttttcttttcctgcttcagttttgtcaagaattatgacttcacagcatcatttagataatctgaatatgtaatttcctcaaaagagcaatccattgaaaggaacatagg

SEQ ID NO: 872413 - DNA, 619 bp, Homo sapiens
atcagtgtgctgtattcaggagacccatctatgtgcaaagaaatacacaggctcaaaataaagggatggaggaatacttagcaagcaaatggaaagcaaaaaaggcaggggtttcaatgctggtctctgagaaaacagcctttaaaccaacaaagatcaaaagagacaaagaagaccattacataatggtaaagggatcaatgccacaagaagagctaactatcctaaatatatataaatccaacacaggagcacccagattcataaagcaagttcttagagacctgcaaagacactcagactcccacacaataatagtgagagactttaacaycccactgtcaatattagacagatcaacgagacagacaattaacagggaaattcagaacttgaatagacatctacagaactctccaccccaagtgaacaaaatgtacattcttctcagcaccgcatcacacttattctaaaattgaccacataattggaagtaaaacactcctcagcaaatgcaaaagaatggaaatcataacaaacagtctcccagaccacagtgcaatcaaattagaactcaggattaaaaaaactcactcaaaaccgcacaactacatggaaa

SEQ ID NO: 872414 - DNA, 639 bp, Homo sapiens
ttttatttacttatctgtttcagcttttttctttctttgattttttttaactttgtaaaatttgacttttgttttaaaatcttactgtatttttacaaactcacctttaagcctttacgtcaggtatttttttttttttttttttttacttaggattttacctcaccaaatgaccttagtacaaatccctcagtgagaatcaaggtgtgtgccttggtttggaaaggagggagttgacactgtggaaggcataggaatctgagaggcaactgtgagctgcaagactccctgcaactctctgggcttcagtgttctcacctgtaaaatgaggatgtgccaattagatgatgtctgttaactcagcaaaaaattacaagatataattttagaaaaggagaggcggagacaggactttatttctcctaaatggttgcagcctgccaagtggccagcccacaggctgggaagcatgcctctggccaargcccagagacaggcactttgaaagaggaagaactttatactgaacaggctggctctctgcacttctcttcctagagaatctcctggctggctcagcgacttcagctctctgctcagaagtcatttcctctgaaaagtcttccctgctgaccctcc

SEQ ID NO: 872415 - DNA, 603 bp, Homo sapiens
catctgtgaaaatgcataaatctcagattccagaagtctgatgaaatcaactagaacataattaagcttaaccaaatctctcttctctggggtgctcagcaaactataacaaggccacagctgcaaaagtgcgtttcatgaagcagtgagtggagactgastccgtcaggttttgaaggcattgcagatgtcggtttaacttacagcaccactacctactatttctgtggccttggagatggattaacttctctgggcttattgtccttctctataacatggttataacagcaccaatctcagcatatatctcagttgcaaaggttgaaagagattgcatatgtgtacaaaagacatatgaagtatctcaccgtttcaggacttacagtcttctcttagggattctgccaaactacatggatgaggctggggcagccacatttgtagtatgaagtcctgctttcctgtccattgttgattggagaatagtgggcctctgcaccaacccagactgatctgggattctcttttcccacagttggcacttgcaattggagttgctaaactgagtcaaatcaatgtcagatttcttgggagataatg

SEQ ID NO: 872416 - DNA, 627 bp, Homo sapiens
ttttttttttttagacggagtttctctcttgttgcccaggctggagtacagtggtgccatcttggctcactgcaatctctgcctcctgggtttaagcgattctcctgcctcagcctcccgagtagcttacaaatattcctaaaaacctaattgttggttgagggagtagaagcaatttatcatgaatttgataacatattgccaaattacccccmaaaaaactgagcattgtactgaacaggggtgaggttatgggccaggagacacatgagaaggctgtttctgtagttcaatggagaataattggtgactcactaaaggtggtagatcaaaaacaggtaggcatctgggatgatgcccagcttcctgtgttgggtgataagacccatggatatacctaagagagaaagagcatgcagagggaataactcaattcctttcaaggccgtcattatggactcttagttaggaatgtgtattctggctaattccctcttcctcatatcaacaactttttaactttcttgatccaaatacctagacccaaaccattagaaaaattctctttcattaagggtaactacataaaaatgaccttgctttattcataagagaacatttactgag

SEQ ID NO: 872417 - DNA, 640 bp, Homo sapiens
ttaagtgtttaatccattttgatttgatttttgtgtatggtgagagatagggatttagtttcattcttctacatattgttatgcagtttctcattacatttagtgaagagactgtcctttccccattgtatgttcttggcacttttgttgaaaatgagttggctgtagtggagasaggcagagcaagatggaggaaaagaatgctccactgatcgttccctacacaaggacaacaatttatctacacgaaaaacaaaacaaacaaaacagacagacaaacaaaaaaacacctttagaagaaccagaagttagatgagccctcacagtagctagttttatctttgtatcactgagagaggcactgaagagataagaaaaacagacctgaactgccacccctccccgacccctgcagcagcagtatggtgcagagagcacagaaattgtgaggccatgaactcagtgctatcctgttagagcagaaagaaaaacctggaccaaactcagctgacgtctgcccatggagagagcattgtaacaattcctagccagaggggaatcccagcagttggaacttgagttcctgcaaaccttgccactgagggatacagtcctctctgtctgtaaatgaatttgaaag

SEQ ID NO: 872418 - DNA, 640 bp, Homo sapiens
ttaagtgtttaatccattttgatttgatttttgtgtatggtgagagatagggatttagtttcattcttctacatattgttatgcagtttctcattacatttagtgaagagactgtcctttccccattgtatgttcttggcacttttgttgaaaatgagttggctgtagtggagagaggcagagcaagatggaggaaaagaatgctccactgatcgttccctacacaaggacaacaatttatctacacgaaaaacaaaacaaacaaaacagacagacaaacaaaaaaacacctttagaagaaccagaagttagatgagccctcacagtagctagttttatctttgtatcactgagagaggcactgaagagatargaaaaacagacctgaactgccacccctccccgacccctgcagcagcagtatggtgcagagagcacagaaattgtgaggccatgaactcagtgctatcctgttagagcagaaagaaaaacctggaccaaactcagctgacgtctgcccatggagagagcattgtaacaattcctagccagaggggaatcccagcagttggaacttgagttcctgcaaaccttgccactgagggatacagtcctctctgtctgtaaatgaatttgaaag

SEQ ID NO: 872419 - DNA, 577 bp, Homo sapiens
aattcactcaaaaccacacaactacatggaaacttaacaacctgttcctgaatgactactgggtaaacaatgaaattaaggtagaaataaataagttctttgaaaccaatgggaacaaagacagtgtaccaaaacctctgggacacagctaaaacagtgtttagatggaaatttatagcattaaatgcccacaggagaaagcaggaaagatctaaaatcgacaccctaacatcacaattaaaagaactagagaatcaagagcaaacaaattgaaaacctagaagaagacaagaaattactaagatcagagcagaactgaaggagacagaggcacgaaaaacacttcaaaaaatcaacaaatccaggagstgtttttttgaaaagattaacaaaatagatagactgttagccagactaataaagaagaaaagagagaagaatcaaatagacacaataaaaaaagataaagggggtatcaccactgatcccacagaaatacaaagtaccatcagagaatactataaacacctctatgcaaataaacaagaaaacccagaagaaatggataaatttctgg

SEQ ID NO: 872420 - DNA, 555 bp, Homo sapiens
caccactcctattcaacacagcattggaagttctggctagggtaatgaggcaagagaaataaataaagggtattcaaataggaagagaggaagtcatattgtctctgtttgcagatgacataattggatatttagaaaaccccattatctcagcccaaaatctycttaagctgataagcaacttcagcaaatctcaggatcaaaatcaatgtgcaacaatcacaagcattcctatataccaataacagacaaacagacagccaaatcatgagtgaactcccattcacacttgctacaaagagaataaaaggaatacaacttataagggatgtgaaggacctcttcaaggaggactataaaccaccactcaaggaaataagagaggacacaagcacatggaaaaacattccatgctcatggatagaaagaattaatattgtgaaaatggccatactgcccaaagtaatttatagatttaatgctatccccatcaagctaccattgactttcttcacagaattagaaaaaactactttaaatttcatatggaatcaa

SEQ ID NO: 872421 - DNA, 565 bp, Homo sapiens
ggctgcagaccagagctgttcctattcggccatcttgccagcctaccctgtaaagtttttagtcatgattccttcaaactttgtttttttgctccatctctatctcttctccttacacttggtactctcattaaacttatgyggcgttttaaaaaatcttgactgaattttacttatgagttctcagaatgactggttcaagagacaaaaaagcatgaggcaaatttgtaatactcataattagaaggtggctgatgtgattttaaaaattaaaaacaaattttattttgttttgttttttgagagagagtcttactctttcacccaggctggagtacggtggtgccatctcagcccactgcaacttgtgcctcctggcttgaagtgattctcctgcctcagcctccatgagtagctgagacttcaggcacctgccaccatgcccagctaatttttgtatttttagcagagacagggttttaccatgttggccaggctgttctcgaactcctgacctcaggtgatctgcctgccttggcctcccaaagtgctgggattacagatg

SEQ ID NO: 872422 - DNA, 565 bp, Homo sapiens
ggctgcagaccagagctgttcctattcggccatcttgccagcctaccctgtaaagtttttagtcatgattccttcaaactttgtttttttgctccatctctatctcttctccttacacttggtactctcattaaacttatgcggcgttttaaaaaatcttgactgaattttacttatgagttctcagaatgactggttcaagagacaaaaaagcatgaggcaaatttgtaatactcataattagaaggtggctgatgtgattttaaaaattaaaaacaaattttattttgttttgttttttgagagagagtcttactctttcacccaggctggagtacggtggtgccatctcagcccactgcaacttgtgcctcctggcttgaagtgattctcctgcctcagcctccmtgagtagctgagacttcaggcacctgccaccatgcccagctaatttttgtatttttagcagagacagggttttaccatgttggccaggctgttctcgaactcctgacctcaggtgatctgcctgccttggcctcccaaagtgctgggattacagatg

SEQ ID NO: 872423 - DNA, 501 bp, Homo sapiens
atggttttataaggggcttttcccccacttcgctctgtacttcttgctgctgccatgtgaagaaggacacgtttgcttcccattccactgcgattgtaagtttcctggggtatccctggccatgcagaactgtgagtcaattaaacctctttcctttataaattacccrgtctcaggtatgtctttattagcagtgtgagaatggactaatatagtaaattggtactgggtagtggggcactgctgtaaagatacttgaaaatgtagaagcaactttggaactgggtaacaggcagaggttgaaacagtttggagggctcagaagaagacaggaagatgtgggaacgtttggaacttcctagagacttgttgaatggctttgaccaaaatgctgatagtgatatggacaataaagtccaggctgaggtggtctcagatggaaatggtaactagttgggaactagaggaaaggtctcttgttatgctttagcaaagagactg

SEQ ID NO: 872424 - DNA, 597 bp, Homo sapiens
ttgaagttgatcatcctggtttaatttttgctgccactttatgggctctttcaatgtgcctcatcacataagtaatgtcattttcatttttgtaaatcaagtctcctagattgttcacctgaaagcctgattctcctttagagaaaaaaaatgctaaaaaaacaaaacaaaacaacaaaaaaaaaaacaaaacattatatatcgcattacaattttattcaacaaatacagagrtttccagaatagttaaaataaagtagaaaacaactctggtgttataagagcagtaggttcatatgcccactgtgcagtaatagaccaatacactaagacagcagtttgcaacaaagaatttaatgatcacagggcagccaaggggagagatatgagtagaccctcaaatccatctcctcaagaacttctgcgttagggtttttaaggggattgtggagggtgaggggttggaaaattaaggttgttgattgggcaggggaagggggatgaaatcattaggatttggaaactgcatactgagtcagttcctcagtggggtccttcagaccagctgacatcagtagtttcactggtacacaggat

SEQ ID NO: 872425 - DNA, 643 bp, Homo sapiens
atgtagggcaggggttcccaacccttactggtccgtggcctgttaggaactgggctgcacagcaggaggtgagcttcttcatgagccagcattacggcctgagctcctcctcctgtccaatcagtggtgacattagattctcatagaaacatgaatcctactgtgaattgtgcgtgcctgatgatctgaggtggaacagttaccttccaaaaccgtccccacttcaccccccggctgtggaaaagttgccttccacaaaatccatccctagtgccaaaaaggttggggaccactggtatagaggtatcctcagtaggactcagcaagctggcaaccctaattatgtctattaggacaccccaagaatggctctctgctggaagtaaaaasggttaatgccttatggattcattttctagggccaggtttcccaagggggtaaagggcatgtcttttgtgaaaaggacctggatgctaaacaggcaaccctgttccccatcaactttctccttagagctatttccagctccagtgctgaatgcatctgtgacatccccactcctggaggggaatctggtcaccctgagctgtgaaacaaagttgctcttgcagaggcctggtttgtagctttacttctccttct

SEQ ID NO: 872426 - DNA, 689 bp, Homo sapiens
tggttatcttcacagtttaatttttattttattcttctgcctttatcatttcaagttctgtcactgactcaacaaatacttactgagaagttgctctatcccaggcacaaccctaggtgctagagataactcacaacctcaggcagtcaggtgcarccctgttgccttggaaactacagtcttttatgaggggcagacagtaaacaagcaaggaagaagaggcagaaggaaagtggtgaagtcattggtgtccttggcaataactgattcagttggagtgatgaggactacagccttgttggaatacaatttctgaaggagggagatgtgtgaagagagagagttggagggagagagagaaggattatagataattatttttaggagttgtgctataaggaaaaacagagaaatggggtggttgcaggagggagggttaagagacagttttgtttttcctgagctgggagatgtgacagcatgtttgccaacctccaggaagggctagtagatgaggggaaccatttgtgcagcggtcacctatctcttcttttccaccagtcacatccttgaagaagcctgaaagataggctttgcagagggacgttaatactcaatccagtggacaagggggaagacaatgtatagggcacaggtgcaggtttatcttcttatttttccagcttctt

SEQ ID NO: 872427 - DNA, 538 bp, Homo sapiens
tgttggtttttaattttaaaaatggccactaagtctaggggctggatatttcttatttcctccccagatccactttccactcttctccacctgcctgggaagctgacatgtatgggccacatcgtggacttcctcggcctctagcttcagttggtttgatcagtggtgagcactgactagcaggagactcgaggcaggaaggacagtgcagttgaggtgtttatgcccctggctcacgcctrtgggacctctgaagtccctaaaatgagagtgtcagctcctcctcagggccatctccacacagccctctctgtctccagtttttcctgaatgcccctctccttactccttggacctgggtatggctatacggtcaagctgttagcagtctaggaatactgccatgggacttgtagtttcctttcctctgttcacatttttgtaaatatttctgctaataaagcttttcttgtcctaatttaattgtgccatctctatcctactaggaccatgacacagacatctattaactacttca

SEQ ID NO: 872428 - DNA, 620 bp, Homo sapiens
atgttagattaaaatagaatacaaaactatgataaaataatctcaatttttttaattataagcacacacagagaaaaagtagacagagctgagggaataaataccaaatgctgttatataatttgtttcttctaaatggtagaattggccaggtgcagtggctcacacctgtaatcccagcactttggaaggccgaggcaggtggatcacgagatcaagagatcgagaccatcctggccaagatggttaaacctcatctctactaaaaatacaaaaaattagccgggtgtagtggcacgtgcctgtagtcccagctacttrggaggctgaggcaggagaatcacttgaacccgggaggcagagattacagtgagccaagatcgtgccactgcactccagcctggcgacagagggagactccgactcaaaaacaaaaaaagaaaaaggcagaattgtgaataatgccttatttcttcataactttctgtattctctccagtgaacattttataataaggaatacaaacatttttagaagctttttataatatccacattaagtccaacattgtatttgtgttacttagcaattaaactttaagacattttgcaaaattttt

SEQ ID NO: 872429 - DNA, 620 bp, Homo sapiens
atgttagattaaaatagaatacaaaactatgataaaataatctcaatttttttaattataagcacacacagagaaaaagtagacagagctgagggaataaataccaaatgctgttatataatttgtttcttctaaatggtagaattggccaggtgcagtggctcacacctgtaatcccagcactttggaaggccgaggcaggtggatcacgagatcaagagatcgagaccatcctggccaagatggttaaacctcatctctactaaaaatacaaaaaattagccgggtgtagtggcacgtgcctgtagtcccagctacttaggaggctgaggcaggagaatcacttgaacccgggaggcrgagattacagtgagccaagatcgtgccactgcactccagcctggcgacagagggagactccgactcaaaaacaaaaaaagaaaaaggcagaattgtgaataatgccttatttcttcataactttctgtattctctccagtgaacattttataataaggaatacaaacatttttagaagctttttataatatccacattaagtccaacattgtatttgtgttacttagcaattaaactttaagacattttgcaaaattttt

SEQ ID NO: 872430 - DNA, 579 bp, Homo sapiens
aaagtcagtatttgttttaaaaatttagttaaatatcactataacctggcaagccataaacatcttctttagacaactaaattaatggatctttacaccttttacactgctagggaaaaaatatcatcacagttagactaattgtaagttttttattcaacattcattcaacaaatacttatgatcattgaagatttcccaagcattcttctaccttctacaaaaacagccaaaaattcctgtgctttaagatagttatatttttatcataaaatgtaatgcagtgctccaaatagattttacctttcatttaagaatttcgagatgaatctgtagtagtcagrgttctaggatgaaggcatctgtagtagtcagggtttgccagagaaaacagaaccaacagggtgtgtgtgtgtgtgtgtgtgtgtgtgtgtgtgtgtgtgtgtgtgtagagagagagagatttactttaagaaattggctcatagaattgtagaggcgtagtgatatggtttggctgtgtccccaccgagatctcatcttgaactgtagctcccataattcccacatcgtgggagg

SEQ ID NO: 872431 - DNA, 612 bp, Homo sapiens
taacgtcctgcaaagctatggtatagtatcatgaccaggataatatctcacataaaatcacagatcttattctattttcctagtttcattgcacttattcatgtgagtgtattgctgtgtgtcattctgtgtaatgttattacatgtttaggtttgggtattcagcatcacaaccaagatatagaacagtttcatcaccccaaggattccttgtactatccctttataagaacaccaatcttcattatgcctcacccattcctctccccaaccccagcaaccactaatttgttttccatttatatcattttgtcaactcaaaamtattgtttacatggaatcttacagaatgtaaatttttcaggctggattttttttactcagcataattttcttgaaatccatccaagttgttacatgtatcagtagttcgttcctttgtattgatgaataatattctgttatgtggacgcacctcagtttgtttaatccttcacccattgcagcacatctgggtggtttctagtttgggactatatgagcaaagctgctatgaacattcatttacagacatgtgtgtgaacatgaattttaatttctttggaataaggc

SEQ ID NO: 872432 - DNA, 611 bp, Homo sapiens
gaagtcatgtggctcaacttgtacaaagaaaaaagatttttaaaaaagtactgcatggaccattctgatataccagtgtcccatactcaacagtttgcaactatgatggtattggcatttgaaatgtgtagggacatttggtagttacaatgctaagagatgcgactagaatttagtatttggtgccagggatgctaaacatcctgtagttattggcacagtctcaaacaactaagaattgtctcactcaaaaagccaatactcctgttgaaaaacatgacamcaactgatgatggctatcagggcagagataagtgatgggtaaaggtatccgaagggccattgcaaattagaattcccaagaacacaagggagaacagtactggggagcaggatgcactagcaccttgccttctggaggaccaaaagaattgatgatcaagcttcagcttgcaagatttttctgacatattacgcccaagatgcaaaaagaatctacatttagctcttgaagctaatcctttttgtaggatttatggttcatgattcctaaaaaatagtttttaaaaataacattcctctcctttctttgccttccattttgatggttt

SEQ ID NO: 872433 - DNA, 615 bp, Homo sapiens
ctttttttttgatgtatgaagttatagctataaacttcccttttattactgatttcactgtatgctattggttttggtatattgtgtttccattaccatctatttcaagaaatatttcaattgtcttcttaatttcttcattgacccactggtgattcaggagcatattgtttaatttccatatgttcatatattttccaaaattcctattattggttcctagttttattgctttctgtttagagaatatgtttgataytgtttcaattttctttgaatgttttaagacttgtttttgtggcctatcatatggtctgttcttcggaacgatccatgtgctgaagaatatatattttgcacattctttgaataaagaatgatgcttgaataaagtgatctgtaaatatccattggggccatttgttttataatgcagataatgtctagtgtttctttgctgattttcggtctggaagatctgtccgtgggtgcttcagtgttgcatgcatatatatttacaattgctatgtgctttggctgaattcactccttcatcattatataatgactttctttttctcttcttagtttttgtctagaaatctgatttgtatg

SEQ ID NO: 872434 - DNA, 696 bp, Homo sapiens
ttataagtagggcaaggacaatagagtatgataaaggtcagcatagaggtaagccatgttttaatgaaagtccatagaagaagctttcagttcatctttgcctgtaatcaagaccttgctttaattgtgaatatctcaaattaattttaagtgattatctgttgttggaagtaaaggtagaatggaaagcaagaaagtaattcatgtaaaggaaatagcatgtacatatgtccagggtaataatgactcatactgacaaatgcaaaagtttcattatgaacagaggacagagtacaaagagtagaatgatgaaatgaggctagtgcagctatcagacttacaaatcagggaaggcctatgtgacacattaaagagttggaactttgctctgagaatactggctaaacattttaagcatgaaagctactgcttaaacttgtcatttaaaagaatcaccctgactgtagagtagatartagatttctaacaggcaagatagtcagcaggaaggttagttaagagatcgtacaataattcatactagggaaaataatgtcctgaattgagatagcagcagagttgctggagaaaggtgtttatattcaccttaaattgagaaaaataagaatatccaattttacaattgatgagatttgtgaaaggtggcagtgaatgaaaaaggagtcaagcaagatt

SEQ ID NO: 872435 - DNA, 630 bp, Homo sapiens
cattccttcggaggggaataggcactctgatatttagaattttcagcttctctgctctggtttctccccatctttgtggttttatctacctctggtctttgatgatggtgatgtacagatggggttttgatgtggatgtcatttctgtttattagttttccttctaacaatcaggaccctcagctgctggtctgttggagtttgctggaggtccactccagaccctgtttgcctgggtatcaccagcagaggctgcagaacagcaaatgttgctgtctgatccttcctctggaagcttcatctcagaggggcacccagctgtatgaggtgtcagtcagcccctactggaaggtgtctcccagttaggctactcaggggtcagggacccacttgaggaggcagtctgtccrctctcagatttcaaactccatgctgggagaaccactactctcttcaaagctgtcagacagggacgtttaagtctgcagaagtttctgctgccttttgttctgctatgccctgcccccagaggtggagtctgcagaggcatgtaggcctccttgagctgccatgggctctacccagttcgagcttcctggtggctttgtttacctactcaagcctcagcaa

SEQ ID NO: 872436 - DNA, 616 bp, Homo sapiens
ggagaatgagtttgacgaactaacagaagtaggcttcagaagatggataataaacaactccaagctaaaggagcatgttctaaccccatgcaaggaagctaagagccttgataaaaggttagtcgaattgctaactagaataaccaatgtagaaaagaacataaatgacctgatggaactgaaaaayacaggacaaaaacttcatgaagaatacacaagtatcaatagctgaatagatcaagcaaaagaaaggatatcagtgattgaagacaatcaacttaatgaaataaagagccaagacaagattagagaacaaagaataaaaaggaacaaacaaagcctccaagaaatatgggactatgtgaaaagaccaaatctacgtttgattggtgtacctgaaagtgatggggagaatggaaccaagttggaaaatactcttcaggatattatccaggagaatttccccaacctagcaagacaggccaacattcaaattcaggaaatacagagaacaccacaaagatactcctcaagagagcaactccaagacacgtaattgtcagattcaccaaggttgaaatgaaggaaaaaatgttcagggcagccagagagaaag

SEQ ID NO: 872437 - DNA, 616 bp, Homo sapiens
ggagaatgagtttgacgaactaacagaagtaggcttcagaagatggataataaacaactccaagctaaaggagcatgttctaaccccatgcaaggaagctaagagccttgataaaaggttagtcgaattgctaactagaataaccaatgtagaaaagaacataaatgacctgatggaactgaaaaatacaggacaaaaacttcatgaagaatacacaagtatcaatagctgaatagatcaagcaaaagaaaggatatcagtgattgaagacaatcaacttaatgaaataaagagccaagayaagattagagaacaaagaataaaaaggaacaaacaaagcctccaagaaatatgggactatgtgaaaagaccaaatctacgtttgattggtgtacctgaaagtgatggggagaatggaaccaagttggaaaatactcttcaggatattatccaggagaatttccccaacctagcaagacaggccaacattcaaattcaggaaatacagagaacaccacaaagatactcctcaagagagcaactccaagacacgtaattgtcagattcaccaaggttgaaatgaaggaaaaaatgttcagggcagccagagagaaag

SEQ ID NO: 872438 - DNA, 612 bp, Homo sapiens
catcacataaacaggaccaatgcaaaagccacatgattatctaaatagatacagaaaagaccttcgataaaatttaacacctcttcatgctagaaactctcaataaaataggattgaacttatctcaaaatagtaagagctatttgcgacaaacccaccgtcaatatcatactgaatgggmaaaagctggaagcattccctttgaaaactggcacaagacaaggatgccctctctcaccactcctatttaacatagtattggaagttctagccagggcaatcaggcaagagaaataaagggtattcaaataggaagagaggaagtcaaattgtctctgtttacagatgacatgattgtatatttagaataccccatcgtctcagcccaaaatctccttaagctgataagcaacttcagcaaagtccaggatacaaaatcaatgtgaaaaaatcacaagcattcctatacaccaataatagacaaacagccaaatcatgagtgaactcccattcacaattgctacaaagattataaaatacctaggaatccaacttacaagggatgtgaaggacctcttcaagaattacaaactactgctcaaggaaataaga

SEQ ID NO: 872439 - DNA, 593 bp, Homo sapiens
agaagacgagagttgtccttaaccaaatatttgtgacatccctctactagataaagctcatggtcatctatatttatgtttcttgtagctccaaaggcaatgatttgtacagaaattttgtttaatagtgcaattattgatataaataactatcagcaagaatgtttttcggaatacagttttgctgtttttyttatagggtatttgcttatctttgaataagcatggaggggagaagaaatgattgactaacaagctctaaagatactatactatactgtggaaagaaaaaaaaaaaacaccatcccttccaaaggaatctgtttgtgtaatgtctgataattaatgagtatctgtaaaggacaccagaagcaagaagcaaatgttagtagacaatttgtcaaagttataaataggtttaaatcactctatggtagaattaacttaaaagttttaacacattttgtcatttttacagacataccttaagaaaattttcatacattaaatgtgtatattttacctcagttgtaacattcaatgaaatattttatcatcctgtacataatcatataaataaatgaaactatttt

SEQ ID NO: 872440 - DNA, 613 bp, Homo sapiens
cccttcattcagtgaactgctaattggtgtatttacatccacattctaagaaacagtttgattggggtggtgcccaagttctgagggtttggagatagatcttgcatgtctcttttcaggaattaatacagtacttcaaaatttcctcaaaaacgtcaccaaggagccacttaattacataaccataattttaaaaatgtgttaagacagaagtgggtcaactgtagaagaagtgagggaaaaatgcggagagaatgtctaaaagaacaaactcaagatctccattgttgaagcctctttagaataactttatccatttaatcggtgatacactgctaatgatagacttctctggcaaggctgttgctttcagccaatccattacccagaattcatatgyctgtgatgaacagtgcatgtgtttgtttgggagttagggacttccattctaagtccagtgttagtgcatatttcctgcacgatcaaaggcatataattttctttcttactcctctgtttccccactcataaaaattaagtaaaagccgtgtttacataaggcattatttgaaggattaaattatataaaatcttataaattaaaattgtagca

SEQ ID NO: 872441 - DNA, 609 bp, Homo sapiens
gccacatacttttaaatgaccagatctcatgagaagtcactcactatgccaggacagcatcaagccatgagggatcctcccacatgacccaagcacttcccaccaggccctacttccaacattggggattataattgaacatgakatttgggcagggcatccaacctgtatgattttgccccggcccctcccaaatctcatgtccttcttacattgtaaaatgcaatcatgcctttcccaacagttccccaaagtcttaactcatttcagcattaactcaaaagtccaaagtctcttctgagacaaggcaagttccttccacctatgagcctataaaatacaaaacaagtgatttacttccaagatacaatgggggtataggcattggggaaacatttctattccaaaagggagaaatcagccaaaagaaaggggctacaggtctcaggtgagtttgaaacccagcagggcagtcattaaacctgaaagctccaaaataatctcctttgactccatgtcccacatccagggcacactgatacaagtggtgggctcccaaggccttgggcagctcttcccctgtgacattgtaggggtcagcccttgcgc

SEQ ID NO: 872442 - DNA, 633 bp, Homo sapiens
aaacagttctgttggatttcaccctggcaatgtaaattgataattgatagcttatcttcactggtaggggacagaggacagacagagccaaaagtcatcccgctgctcaccagacacaaatgcacatctgatggcttcctctgctcagttgtttatgtaaaaacgcagattcactaagcaagactaaggcataagtgactattcctctatgtcatctcacatgtaaatcgtgtattcagtaaaagcctcatcagagactcagaagaatgctattgattgtctcttatctacctaagacctggaagcaaccctgcttcaagttgtcccacctctccaggaagaaccaatgtacrtattacacatattgattgatgtctcatgtctccctaaaatgtataaaatcaagctgtgccccgaccaccttggaaacatgtcatcagggcctcctgaggctgtgtcatgggcgtgtccttaaccttggcaaaataaactttctaaattgattgcaacctgtctcagatacttttggttcacatctttaacaaatctctccctatcccttcccagtcactagtctcctacatttttaagtggcagaagttcaaagctagtaggaatttatcttaaaggtaa

SEQ ID NO: 872443 - DNA, 627 bp, Homo sapiens
caacacgaaataaagcctattgccacccccactcccacctagttttcctggaaacagatgagatgccttactttattctggacactgcatcagaagataagttaggcataaagacagaaatcatttgagacaagcagtgtcaatcctctccagcactccccctaaaacaaaggccggaagcaagatgtttctaacagttgaactgatttcttccaaatgatgccaacccaattacaaagcatgaaatctaaaygaaaacgtgatgtcaggacccatgctatctgtcttctgtgttatagttctgattgtcctacatttctcattgtttagtatgttcctgggaccagatgtgcttgatctaatttctgggctaggtaacagaactagtgccaaaaagagaagaagaaggaagagagatctatgaagaccacgcaaaagcaattctggaggcagaaagacatacctgataaaaacagttttcccttcattcacatcagagggtaatttcctcttctttttgtttgagacttgcacagctaaggtaaaaagaaaaacaacaaactgaaagagattagtgtaagccacatgacaaagagctaacttcttaagtacataaagataagcctg

SEQ ID NO: 872444 - DNA, 582 bp, Homo sapiens
tcctgacaattcaccttcagcatctttttaggcactcatcttggagggggttttgataataactgctaccatttattgaacccagatgatatgctaacattatataaatactatttctatttcagagataaaagargcttggagagggtgagtatgatggtgaattttatgtgttaacttgactgcactaagggatgcccaaatggctggtaaaacattatttctgggtgtgcctgtaagcatgtttctgaaagagattggcatttgaatcagtagactgagtaaagaagatcaccctcaccaatgtgggtgggcatcgtccagtctgttgagggtctggatagaacaaaatggtggaagaaggactaacttcctctctctactgggacatccatctctgcttgcccttgaaaatcagggctcctggttcttgggccttcagactcagactgggacttatgctatcagctgtcctggttcttaggcttccgggcttgggctaaaactaccccactggctttcttgggcctccagtttgcagaggcagcttatggatcttctcagtctccataatgtatgagc

SEQ ID NO: 872445 - DNA, 582 bp, Homo sapiens
tcctgacaattcaccttcagcatctttttaggcactcatcttggagggggttttgataataactgctaccatttattgaacccagatgatatgctaacattatataaatactatttctatttcagagataaaagaagcttggagagggtgagtatgatggtgaattttatgtgttaacttgactgcactaagggatgcccaaatggctggtaaaacattatttctgggtgtgcctgtaagcatgtttctgaaagagattggcatttgaatcagtagactgagtaaagaagatcaccctcaccaatgtgggtgggcatcgtccagtctgttgagggtctggatagaacaaaatggtggaagaaggactaacttcctctctctactgggacatccrtctctgcttgcccttgaaaatcagggctcctggttcttgggccttcagactcagactgggacttatgctatcagctgtcctggttcttaggcttccgggcttgggctaaaactaccccactggctttcttgggcctccagtttgcagaggcagcttatggatcttctcagtctccataatgtatgagc

SEQ ID NO: 872446 - DNA, 595 bp, Homo sapiens
gagcaagggactccagccttgctggaagagtgcaggagtgggaggagaagagacaggactacttaaatgaactccaggggcagtgatttccttggcttagacatccctgggaatgattttaccaatgatgatgagtgaggaggctggtgagatccccatgagctgggcccagagcaaggtaccttgcctgtaggtgcgtgtgaaatccttccagctcccatgtgagagggacgctcaggcccaccgcacatgtgaggaaggtgaggtgtggagatactggtgatttagccccaaggtactcagcaaacagctggtggagcctggattcaaaccctattctctgggacycagtgtctgcgtgtttggctcttcaccgtgttcctcccccaggtctttgctccatggcctgtgtccctttggtccccctaaactgtgctccatcttacagctcagggcttgctttgggggagttcaaagacctctctgttgtgaccttcttcacctccccagagccaggctgtgccccaacacccatgccacctccaatcacgggttgacacttggtgaggatgccaaaggtggaacttcaggcctt

SEQ ID NO: 872447 - DNA, 621 bp, Homo sapiens
agtggaaggagggagccacagtaggaaggtctgatttgggggtgtttggaatcaattccagctcatccatcccccaagcaggactgggcccccagaactctccttggctttcaagagtcagggaagggaaacagaggtgcagaagcattaaggtccgcttgggccagctcctacctgacaatgctccattctggctcaatccgcacgatggtggggtcttccacatactgaaagaccaggtcctggtggatcttggccctgtccacctgcaccgacaccttcatctctagcacctcatctgaggatgtggtgttgcagacaatgtaggatggagatcgcctggagggcaggaagacagagcactgggcgcctggtgttgaggaggacagaggtcytgagtcaaggccctcccacaccgctccctgcatgtcaggatgctcagaggccatgggtgggtgctctcagacagaaaactggagagccagtgacaaagactctccttggccaaactttagacaggttcctctgagccttcttttcaaataggcctcatccctgggtctgtctttggcctgtctagccttgttttttagcaagaatctggctaagtctatttgggga

SEQ ID NO: 872448 - DNA, 591 bp, Homo sapiens
tttcttcacatgccttagcagagacctgacaccctctgtctattggtgtccttgacagtcagggaagataaatcaatagcttggcacccttgcagcaaacccttagcatagcctttacacattatgctgaacttacatttctcaayaaaggaattgagtggcaagaatttcttctgaatacctcaaagaaagacaaaacaaaggagcaatttgaagcttctaggcaggtaaataaagacatggctccactgatgtgcagaatgctgatgacagaacctgcagccactgcagacttcctattaagaagaacctaagatgatctgtgtttttttaattcatcatccaattttcacatatagaaatgttcaccgtgttatatgctgcccaaatatgaacatctcaaaaagaaaatgcttcatagtgaaggcaacatttcactaaacttacataagaaaaatgataccaaattctagacaaagaaatttgctcgagccaggactttcaaaattcttcttttcccttgtctaaatctttccacatattcattatttactaattaatttgctagttaaattatggtttgtaatggga

SEQ ID NO: 872449 - DNA, 605 bp, Homo sapiens
aagacatcttaattattccatatgagtgaaaggaataaaatcaggagtatgtgaaatatacaaaaaaaaggtagaaaactctcggagtcaataatttaatcctcttccccaggggtggccaatccttgtatgccctattttgggggcagycaagtaaccaatccctgcggcctcttccgcatgcccgctcactctgccactaacaatgaaatgctacaaaacttgccagcatttgagaaaaggatgaaaagcaaaagccttagataatcctcttgataattagcccctaaataactaaattagatcttttcataaagagtggaaatgccacaattaggaaactctctttgttgtaaattaaattttgtttcagttggacttaccactagatcgcattaactatttgaagtgatttaactcattgctgttatttgatttttgactccagattggatcaaacgtacatccgagttttgcattttatcccaagcacacactttgaatcttgaacactaagtaaagaactactgtgctaataaaggatagtgctaatgaaattacatataaaagataaaagatatgaactattgttttacctttctcta

SEQ ID NO: 872450 - DNA, 622 bp, Homo sapiens
tccccatctttgtggttttatcgacctttggtctttgatgatggtgacatacagatggggttttggtgtggatgtcctttctgtttgttagttttccttctaacagtcagaaccctcagctgcaggtctgtcagagtttgctggaggtccactccagaccgtgtttgcctgggtatcaccagtggaggctgcagaacagcaactattgcagaacagcagatgttgctgcctratccttcctctggaagcttcgtctcagaggggcacccggctgtatgaggtgtcagttggcccctactgggaggtgcctcccagttaggctactcggggtcagggacccacttgaggaggcagtctgtctgttctcagatctcaaactctgtgctgggaaaaccactactctcttcaaagctgtcagacagggacgtttaagtctgcagaagtttcttctgccttttattcagctatgtcctgctcccagaggtggagtctacagaggcaggcaggcctccttgagctgtggtgggctccacccagttcgagcttcccagcctctttgtttacctactcaagcctcagcaatggcggatgcccctcccccagcctcgctgccaccttgcag

SEQ ID NO: 872451 - DNA, 622 bp, Homo sapiens
tccccatctttgtggttttatcgacctttggtctttgatgatggtgacatacagatggggttttggtgtggatgtcctttctgtttgttagttttccttctaacagtcagaaccctcagctgcaggtctgtcagagtttgctggaggtccactccagaccgtgtttgcctgggtatcaccagtggaggctgcagaacagcaactattgcagaacagcagatgttgctgcctgatccttcctctggaagcttcgtctcagaggggcayccggctgtatgaggtgtcagttggcccctactgggaggtgcctcccagttaggctactcggggtcagggacccacttgaggaggcagtctgtctgttctcagatctcaaactctgtgctgggaaaaccactactctcttcaaagctgtcagacagggacgtttaagtctgcagaagtttcttctgccttttattcagctatgtcctgctcccagaggtggagtctacagaggcaggcaggcctccttgagctgtggtgggctccacccagttcgagcttcccagcctctttgtttacctactcaagcctcagcaatggcggatgcccctcccccagcctcgctgccaccttgcag

SEQ ID NO: 872452 - DNA, 582 bp, Homo sapiens
ttcattgagggacagaatggctctcaggagacctgaagtgggtagcttctctccacaggcaggtcatcctgatgagtgttcagctctcagtggagaggagactggcagtgggtggctcccttctgcaggcaggtcatcccaacgtctgtccaagtatggctgagtctggggtttttatgggctcagaagggtggaagtgcatgccaattggtccatgggcagccatgggagggcttgaacaaaaggaccataagttctcaatccaggccacagactccatccagaactggcagcccaacccacaggcttcaggccatccctgccttgaaagtggggtttaaaccggacacccggccctttcagcccgggaacctgtytgcctcctgccttcaacatgccattcatggtgcccagggttttcatgccttggtgggggggggggggtctgcagacctgtgccaagctaccttcagccccccaaacctgggcttccatccctgagcttgtcagtgttcaaagtttcagagagtgtcaaggtggtggagtggggctgggatgtcagcacaaccccaagcacatgca

SEQ ID NO: 872453 - DNA, 589 bp, Homo sapiens
tcttttccctttttaaattgtttttatgatataacactatttcactccaaactgaattaatagcctaaattaaagagtagacatatctgcccaaacataaaaacaatgtgtcatccgaacatcacccaattaaagcagtgcttttccaacaatctgagttatgtttcttctttttttgttgttgtgaaattacaaatttgttatggagtgataactttaaaaacacaataaaaatgagttataagaaaaaaaactcaaagcaaagacatataaaacaaaagtccttattttttgttgttagattaaataaatattaagtggcatatttatttgctgtaaatatttctttcttatttatttatttatttattttgaaatggaatcttgctcattgcccaggctgcagtgcagtggygtgatctcaactcactgcaacctccgcctccagggttcaagctgttctcctgcctcagcctcctgagtagctgggattacagatgtgtgccaccacgcccatctaatattttatatttgtagtagagatggggtttcaccatgttggccaggctggtcttgaactcctgacctc

SEQ ID NO: 872454 - DNA, 537 bp, Homo sapiens
ttactgagtaaatataacacagtgttgatcatggcaaattgtcagtatagaataacaccaagtgagtcaaaagaaatgaattaagagaagattaagcacccctaatgaagcaacaaatgtttggtttagtaaatattatacatcaataaagttaaactagtggttttatggaaagaagagaaagacaaatgatgcgagagtggttgtgatgcagaacacatcagcctcagaggactccagggtgtcctcttatcagtttctataacagtgaccctgttactgcattaatttgctgargataatggcttccaactccatccatgtccctgcaaaggatgtgatctcagttatttcgatggctgcatagtattccatggtgtatatgtaccacattttctttatccagtctatcattgatggcatttagatagattccatgtctttgctattgtgaatagtgctgcaatgaacatacgtgtgcatgtatctttgtaatggaatgaggagctgaatgatgacaacacatgaacacatttt

SEQ ID NO: 872455 - DNA, 588 bp, Homo sapiens
gcaagcaaaagagtccttctggtgatttgtttgaatatatcatgttgctcagggtaagcagttggctgctgtgcaacactcagcctgaagcttttggcctggcaatgtagtttcaatttaatcagaggcaagagctataaaattatactgttcagaatgatatatacccagtggaatagccatgccacagcaacracctgaatttccacctcaagtatttggctaggaggaaattagtcatcatcgttatgttaaaaattgttaatgagacaggaaaaaggtcactgcaaatgcttccttaagtgacaattatttgatattgtactagtgagattttgttggcttgcttattttgaattaaaacattattggtatttttcttttttaaaaaatttatcttatgtcacattgtgttattatcctagtgtgaaaagtgtattcactttagaatcagactgccttacattcaaattttagtttattcttattcaacaaatatgtgcttactgtctgtcttagcttattcaggctgctataacaaaatacccttgactgggcaatttataaacaactaaatttatttttcac

SEQ ID NO: 872456 - DNA, 638 bp, Homo sapiens
tttctaatccgccttaaaataccccttaagatctcactttgcagacttttatctcactgtctgtacttttcatctctccctcattgctagtacatttttcattaaaaataataacaacaaaaacttaatatgctccctaaccccatctaaggaaatcttcaggaattgcctcattatttctttgtttcctttatagccaagcctctaaggagatatgtaaatgtgtttgttctgtgaaagggccatgtgtgcaaagcagtccccaaatgccaaaggagcccagaaatccaagaaggaggcagacaaatccagtttgtcagtattgggtgatttattaggggcgcttacaggcagaagcgtggtcttggcagcctcaagacaggtagatctcctcactgttcctcccaaacccaaggtataaggaaagggtcttatgtgctccagcaaaacagttaaaggcaaccctccaaaaccagcacgaatcctgtgtgcgtcacarcctctaatttatgtgataacatcaaggttgctttgatctaaaagtaggagtacatgttcttgcactagggacagaaaataaaacagaaaccaggagacattcatggggctagggccaatcagaagtcaaccggcagatt

SEQ ID NO: 872457 - DNA, 620 bp, Homo sapiens
ctgtgaaatggataacattaacatgctcattttgcaaaggaaactgaatcacagaccgtttaagtcaaacctgccaatgaatgctgagagttaggattcaaaactcggcactgtggctcctgagtttatgctcttaaccaccgttaggaagcaagaaggtctttgatgagggcactcggtgacaatgtgacatttaaatagaccaatgttttaaagctagacctacttcttattaattatcattaggaagactggttatttaatctgagactcagtttttwttatttttttatatatttgtaagttttcatttatttattttgtattatactttaagttttagggtacatgtacacaatgtgcaggcttgttacatatgtatacatgtgccatgttggtgtgctgcacacattaactcatcatttacattaggtatatctcctaatgctatccctcccccctccccccaccccacaacaggccctggtgtgtgatgttccccctcctgtgtccatgtgttctcattgttcaattcccacctatgagtgagaacatgtggtgtttggtattttgtccttgtgatagcttgctgagaatgatggtttccagcttcatccatg

SEQ ID NO: 872458 - DNA, 574 bp, Homo sapiens
actggcatttggtattgctttgttaggtatatacaggtgcatctagttgagtttttttttggaacaactaccaataacatccttttctagatcaataccacccttttgttatatcaatactactttttaaatattcgtataaaaatggtcagtactgccatatatttttgagatagccttcagagaaactttaagtctgtgtacacgcattacaagcttcaattaaataatttatatttccatcgattcacatgacagagcaactagcaaaggctggaggagaagttctcagtggaacaaaaatttgggtcttaatggcaaagtccagagtttacacaratcccaaaccataattccagttcatgctcattatggaaattctacatttttctcacacctctgcacttccagttgtctttaccactgaacatggaagtgctcaaataccaaaggcatgattctttcatgttatttatggcctgaccatggcaggaagtaccagaaacctcatgaggatttcctcccttgtgttattttcaactttgtgttcatgctgtaaaggtctaaatagttc

SEQ ID NO: 872459 - DNA, 661 bp, Homo sapiens
cacagtgcaatcaaactagaactcaggattaagaaactcactcaaaattgctcaactacatgggaactgaacaacctgctcctgaataactactgggtacataaagaaatgaaggcagaaataaagatgttctttgaaaccaacgagaacaaagacacaaacataycagaatctctggaacacattcaaagcagtgtagagggaaaatttatagcactaaatgcccacaaaagaaagcaggaaagactgaaaattgacaccctaacatcacaattaaaagaactagagaatcaagagcaaacactttcaaaagctagcagaaggcaagaaataactaagataggagcagaactgaaggaaatagagatacaaaaaacccttcaaaaaatcagtgaatccaggagctggttttttgaaaagatcaacaaaattgatagaccactagcaagactaataaagaagaaaagagagaagaatcaaatagatgcaataaaaaccgacaaaggggatatcaccaccgatcccacagaaatacaaaccaccatcagagaatactataaacacctctactcaaataaactagaaaatctagaagaaatcgataaattcctcgacacgtacactctcccaagactaaaccaggaagcagttgaatctctga

SEQ ID NO: 872460 - DNA, 661 bp, Homo sapiens
cacagtgcaatcaaactagaactcaggattaagaaactcactcaaaattgctcaactacatgggaactgaacaacctgctcctgaataactactgggtacataaagaaatgaaggcagaaataaagatgttctttgaaaccaacgagaacaaagacacaaacataccagaatctctggaacacattcaaagcagtgtagagggaaaatttatagcactaaatgcccacaaaagaaagcaggaaagactgaaaattgacaccctaacatcacaattaaaagaactagagaatcaagagcaaacactttcaaaagctagcagaaggcaagaaataactaagataggagcagaactgaaggaaatagagatacaaaaaacccttcaaaaaatcagtgaatccaggagctggttttttgaaaagatcaacaaaattgatagaccrctagcaagactaataaagaagaaaagagagaagaatcaaatagatgcaataaaaaccgacaaaggggatatcaccaccgatcccacagaaatacaaaccaccatcagagaatactataaacacctctactcaaataaactagaaaatctagaagaaatcgataaattcctcgacacgtacactctcccaagactaaaccaggaagcagttgaatctctga

SEQ ID NO: 872461 - DNA, 639 bp, Homo sapiens
agagaatggactaatacaggggtggatagctgggtaataactaccacagttgttttaccacagtgttctagattgattttatttctggaagtttctttctttctctttctttctttctttctttcaactttgtttctttcctcctttttttctttgccaatctctgggaaatcattttttctctgagacagtttttcacactattgcccaggctggagtgtaatggtgccattgtggttcactgcagcctcracctccagagctcaggtgatcctctcacaccggcctcctgagtgtctgggactaaggacatgtgcctccatggccggctggtggtagtttttcataacagaacccaagagcactttcctagagagcagtagtttaaatattagactggccattttgtaacctcagcaaactaggtcttacagcagcaatgatcatagacttcgaatcagagagacgcccctctgctacttaatagttgtgtggccattacataagacactaaatctctccaagatgagtactgtcatctctaaattgggtcttactcacagataagatgaaattgttatgaagatactagaccatctagtgaattgcttagtatacaatatctggtacatattacca

SEQ ID NO: 872462 - DNA, 612 bp, Homo sapiens
ttgagctattatgacattgttgttgtatgatagattcgattatatatttttcatctatttaaaatgcttttatttgtttctggttcctgccttggttctggataattacagctgctgattaagtgactgtcagttaaaagatttttatttggatacatgtctgaagagctgatgttgctgctatggcatccaaaataaaaaatttaaaagaactgttacataaacatggctaaaaaagaaactatcaacagaataaacagacaacytacagaatgggagaacatttttgcaaactatgcatccaaaaaaggtctaacttccagcatctctaaggaacttaaacaaatttacaagaaaaagcaaacaaccccattaaaaagtgggcaaaggatatgaacaggcacttttcaaaagaagacatacatgtggccaacaatcatgagaaaaagttcaacatcactgattattagagaaacgcaaatcaaaaccacaatgagataccatctcacaccaatcagaatggataaaattaagaagtcaaaaaataacaaatgctggcgaggttgtggagaaaaaggacctattttacactgttggtgggagtgtaaatta

SEQ ID NO: 872463 - DNA, 486 bp, Homo sapiens
aaattatgtggattaatgaatcactttttgcctttttcttgctgtgtacagtcatccctttgtatcagtggataccacagatgttcaaattccttatgtaaaatattgtagtatttgcatataacctaaccacatcctctcatatacttgtatgtgtagattatttataatacctaatacaatgcctgcacgtcacttcattcacataaattgaacatagtactcagcacgtggcaaattcaagttttactcttcaggactttgtggaatttttttttttcctcaaatatgtttgatctgtggttggttgggttcagggaygcagaacccatgtatgcacaggaccgactacacttttgttaaagactaaaagagattctggtgttaaaaaaaaaaaaaaacactatagcataatgagtagaggtatcagaaaagaaatcgtcatagaaaatttaataataagttgaaatttcaaactatgaagtc

SEQ ID NO: 872464 - DNA, 685 bp, Homo sapiens
gttcaactctgtgagatgaatgcacacatcacctagaaatttctgagaattcttctgtgtagtttttatttgaagatatttcctttgcctccatagaccacaagaggctccaaatatccacttccagattctagaaaaagagagacctaaaactgctcaatcaaaaaggtaggttcaagaccgtgagtgaatacacacatcaaaaagaagtttctcagaatgcttctgtgtagttttttttttttttgtgaagatatttccttttccaaaataggcctcaaagaccaccaaatatccacttgctgattctacaaaaagagcgtttcagatctgctcaatcaaaagacatgttcaactctgggagatgaatgcacacatcacaaggaagtttcccagaatgctgctgtgtagtttttatgtgaatatatttcctttcccaaactaggcytcaaagtgctccaaatatccacttacagatactacaaaaggagtgtttcgaaactgctcaataataagataggttcaactctgtgagatgaatgcacacatcacaaagaagtttctcagaaagtttctgtgtagtttttatttgaagatatttcctttttcaccataggacacaaatggatctatatgtccacttgcagaaaataaaaaaagtgagattcaaaactgctcaatcaaa

SEQ ID NO: 872465 - DNA, 678 bp, Homo sapiens
cagaatgcttccatgtagtttttatttcaagatatttccttttcctccataggctgaaaagggctccaaatatctacttgcagattatacaaaaagagagattcaaaactactgaatcaaaaataggtttaactctgtgttatgaatgcactcatcacaatgaagtttctcagaatgattctgtgtagcttttatatgaagatagttccttttattcaatagacctcaaagcgctccaaatatccacttacagtttctacaaaaagagtgtctcaaaactgcttaatgataagataggttcaactctgtgaggagaatgcacacatcacaaagaattttctcagaatgcttctatgtagtttttatgtgtagatatttacttttacaccrtagacttcaaaacgctccaaatatccatttacagattctacaaaaagagtgatcccaaactgctcaaacaaaagaaaagttcaactctgtcagatgaatgcacacatcgcaaagaacttcctcagaatgcttttgtgtaatttttctgtgaagatattttcttttccacagtaggcctcaaagcactacaaatatccacttgcagattctacaaaaagaatgtgaaaactgttcaatctacagaaaggttcaactctgtgagatgaatgcatacatcccaaagaagtt

SEQ ID NO: 872466 - DNA, 618 bp, Homo sapiens
ctgagaaacttctttggcatgtgtgcattcaactaacagtgttgaacgtatcttttgattgagcagcttagaatctctctttttgtagaaaatgcaagtagatatttggagccccattttgccctatggtagaaaacaraacatcttcacataaaatctacacagaagcattctgagaaacttctttgtgatgtttgcattgaactcccagagtcgaacctatcttttgatagagcacttttgtatctctctttttgcggaatctgcaagtggatatttggaaagcttgaggcctattgtgaaaaaggaaatatcttcacataaaaactacagagaagcattctgagaaacttctttgtgaggcatggattcaacccacagagttggacttatcattgagcagttttgaatctctctttttgtcgaatctgcaagtggatatttggagccctttgtaacctagggtggaaaaggaaataccttcaaataaaaactatatagaagcattccgtaaaacttctttgtgacgtgtgcattcgtctcacagagttgaacctatctaatgattgagcggttttgaaacactcattttgtagaacctgcaagtggatattggga

SEQ ID NO: 872467 - DNA, 378 bp, Homo sapiens
aaaggaaatatcttcacattcaaagtataaaggaagtttctgagatacttctttgtgatatgtgcattcatctcacagatttgatcgtctcttttaattcagccgtttggaaacagtctttttgaagaatctgcaaacggatatttgtgagcactttgagggctatgcaggaaaagaagtatcttcayagaaaaccataaagaaggtttctgagaaactgttttttgatgtctgcattcatctcgcagaggtaaacaattcttttctttgatcagttgggaaactctgttcttgtaggatctgctaagggacatttttgagtgcctagggccctatggtgaaaaagatattgtcttcacataaaaattagacagaggc

SEQ ID NO: 872468 - DNA, 378 bp, Homo sapiens
aaaggaaatatcttcacattcaaagtataaaggaagtttctgagatacttctttgtgatatgtgcattcatctcacagatttgatcgtctcttttaattcagccgtttggaaacagtctttttgaagaatctgcaaacggatatttgtgagcactttgagggctatgcaggaaaagaagtatcttcacagaaaacyataaagaaggtttctgagaaactgttttttgatgtctgcattcatctcgcagaggtaaacaattcttttctttgatcagttgggaaactctgttcttgtaggatctgctaagggacatttttgagtgcctagggccctatggtgaaaaagatattgtcttcacataaaaattagacagaggc

SEQ ID NO: 872469 - DNA, 621 bp, Homo sapiens
ctcgaaggatcggttcagctctgtgaggtgaatgcacacatcaaaaagaagtttcttagagtgcctctatgtagattttatgtgaagatatttgcttttccactttaggtctcaaagcgctccaaatatccaygtgcagattctaaaaaaagagagattctaagctactccatcaaaagataggttcagctctgtgagttgaattcacacatcacaaagaagtttctaggagtgcttctgtgtagttgttatgtgaagatatttgcttttccacagtaggcctcaaatcgctctacatatccacttgcagtttctacaaaaaagagtgtttccaaactgctccatcataagacacgttgaactctgagagttgaatgcacacatcacaaagaagcttctcagaatgcttctgtgtggttttaatttgaagatatttgcttttccaaaacaggcctcaaagctctccaaatatccacctggttattctgcaaaaagagggtttcaatactactcaataaaaaggaagattcaactctgtgtgaggaacgcattcatcacaaagaagtctttctgaatgcttctgtgtagcttttatatgaagatatttccttttacaccaca

SEQ ID NO: 872470 - DNA, 636 bp, Homo sapiens
aggatatgttttcacataaaaaatagaagcattctgaggaacttcttcatgacgtgtgcattcatctcaaagagttgaacttttcttttgattgagcagctttgaaaaactctttctgcagaatctgcaagttgatatttggagtactttgcggcctatagtagaaaaggaaatatcttcacataaaactagacagaagcattctgagaaacttctttgtgatgtgtgcactcatgtcacagagttgaamctttcttttgtttgagcagttttgaaactctctttttgtagaatcttcaagtgtatatttttagcactttgaggcctatggtggaaaagaaaatgtcttcacataaaaactagtcagaagctttctgagaaacttctttgtgatgtgtgcattcaactcatgtagttgaacctttcttttgattcagcagtttggaaacagtctttttgtagtatctgcaaatggatatttggagagctttgaggcctatggtggaaaaggaaatatcttcacataaaaactagacagaagcattctcagaaacttctttgtgatgtgtgcattcatctcacagagttgaacccttattttgattgagcagtgttgaaacactctttatagaatca

SEQ ID NO: 872471 - DNA, 636 bp, Homo sapiens
aggatatgttttcacataaaaaatagaagcattctgaggaacttcttcatgacgtgtgcattcatctcaaagagttgaacttttcttttgattgagcagctttgaaaaactctttctgcagaatctgcaagttgatatttggagtactttgcggcctatagtagaaaaggaaatatcttcacataaaactagacagaagcattctgagaaacttctttgtgatgtgtgcactcatgtcacagagttgaaactttcttttgtttgagcagttttgaaactctctttttgtagaatcttcaagtgtatatttttagcactttgaggcctatggtggaaaagaaaatrtcttcacataaaaactagtcagaagctttctgagaaacttctttgtgatgtgtgcattcaactcatgtagttgaacctttcttttgattcagcagtttggaaacagtctttttgtagtatctgcaaatggatatttggagagctttgaggcctatggtggaaaaggaaatatcttcacataaaaactagacagaagcattctcagaaacttctttgtgatgtgtgcattcatctcacagagttgaacccttattttgattgagcagtgttgaaacactctttatagaatca

SEQ ID NO: 872472 - DNA, 636 bp, Homo sapiens
aggatatgttttcacataaaaaatagaagcattctgaggaacttcttcatgacgtgtgcattcatctcaaagagttgaacttttcttttgattgagcagctttgaaaaactctttctgcagaatctgcaagttgatatttggagtactttgcggcctatagtagaaaaggaaatatcttcacataaaactagacagaagcattctgagaaacttctttgtgatgtgtgcactcatgtcacagagttgaaactttcttttgtttgagcagttttgaaactctctttttgtagaatcttcaagtgtatatttttagcactttgaggcctatggtggaaaagaaaatgtcttcacataaaaactagtcagaagctttctgagaaacttctttgtgatgtgtgcattcaactcatgkagttgaacctttcttttgattcagcagtttggaaacagtctttttgtagtatctgcaaatggatatttggagagctttgaggcctatggtggaaaaggaaatatcttcacataaaaactagacagaagcattctcagaaacttctttgtgatgtgtgcattcatctcacagagttgaacccttattttgattgagcagtgttgaaacactctttatagaatca

SEQ ID NO: 872473 - DNA, 649 bp, Homo sapiens
cacataaaatctagacagaagaattctgagaaacttcctttgaatgtgtgtattcatctcacagtgttgaacctttttttgtgattgagcagcttctaaacagtcattttgtagaatatgcaaaggaatatttgtgagcccattgatgcctctggggaaataggaaatatcttcaaataaaaactagaccgaatctttctgagaaacgtctttgtgatgtgtgaattcatctcactgagttcaactttattttgattgagcagtttggaaacagtctttttctagtgtctgcaaatggatattttaagcgctctgaggcctacagtgaaaaaggaaatatcttcaatataaatcagacagaagcattcatagaaacttctytgtgatgtgtgcattcatctcacaggttagaacttttcttttgattgagcagttttgaaacactcttttagcagaatctgcaagtgtatgtttgctgtgcatgaggaatacagtggaaaaggaatcttcttcacatgaaaacgagacagaagcattctgagaaacttttctgtgatgggtgcattcatttcacagagttgaacctttcttgtgattgagtggtttggaaactgtcttttcgtgtaatctgcagaaggatatttgtgca

SEQ ID NO: 872474 - DNA, 662 bp, Homo sapiens
tcaatgcacacatcacaaaggactttctctgaatgcttctctgtagggtttgtttatgtgaagatatttgcttttccactatagggtgaaacagggctccaagtatcaacttgcagattctgcaaaaaggagattcaaaacagctaaatccaaagattacttcaactatgtgagttgaatgcacacacaaaaaaagaagtttctcagaatgcctctgtgtagtttttatgtgaagatatttgattttccacattaggcctcaaagcgctccaaatatccacttgcagattctaraaaaagagtgtttcaaaactgccctatcaaaagaaacgtccaacactgtgagatgaatgcacacatcacaaagaagtttctcagaatgcttctttgtagtttttatgtgaagatattcccttttccaaagaaggccacaaagtactcccaatatccacttgcaggttctacaaaatgagtgtttcaaaaccgctcaatcattagataggttcaactctgtgagacgaatgcacacgtcacaaagaagttttacggaatgcttctatatagtttttatttgaaggtatttccttttccaccctaggttgcaaagggctccaaatatccacttgcagattcgacaaaaagagagattcaaaactgctcaa

SEQ ID NO: 872475 - DNA, 605 bp, Homo sapiens
ggttgcaaagggctccaaatatccacttgcagattcgacaaaaagagagattcaaaactgctcaatgataagtccaactctgtgggttgaatccatgcctcacaaagaagtttctcagaatgcttctctgtagtttttatgtgaagatatttcctttttcacaataggcctcaagctttccaaatatccacttgcagattccgcaaaaagagagatacaaaagtgctctatcaaaagataggttcgactctgggagttcaatgcaaacatcacaaagaagtttctcagaatgcttctgtgtagwttttatgtgaagatgttttgttttctaccatagggcaaaatggggctccaaatatctacttgcattttctacaaaaagagagattctaagctgctcaatcaaaagatacgttcaacactgttagttgaatgcacacatgccaaagaagtttctcagaatgcttctgtgtagtttttatgtgaagatatttgcttttccacaataggcctcaaatcgttctaaatatccacttgcaggctctacgaaaagagtgtttccaaattgctcaatcataaggtaggttcaactgtgagagttgaat

SEQ ID NO: 872476 - DNA, 605 bp, Homo sapiens
ggttgcaaagggctccaaatatccacttgcagattcgacaaaaagagagattcaaaactgctcaatgataagtccaactctgtgggttgaatccatgcctcacaaagaagtttctcagaatgcttctctgtagtttttatgtgaagatatttcctttttcacaataggcctcaagctttccaaatatccacttgcagattccgcaaaaagagagatacaaaagtgctctatcaaaagataggttcgactctgggagttcaatgcaaacatcacaaagaagtttctcagaatgcttctgtgtagattttatgtgaagatgttytgttttctaccatagggcaaaatggggctccaaatatctacttgcattttctacaaaaagagagattctaagctgctcaatcaaaagatacgttcaacactgttagttgaatgcacacatgccaaagaagtttctcagaatgcttctgtgtagtttttatgtgaagatatttgcttttccacaataggcctcaaatcgttctaaatatccacttgcaggctctacgaaaagagtgtttccaaattgctcaatcataaggtaggttcaactgtgagagttgaat

SEQ ID NO: 872477 - DNA, 605 bp, Homo sapiens
ggttgcaaagggctccaaatatccacttgcagattcgacaaaaagagagattcaaaactgctcaatgataagtccaactctgtgggttgaatccatgcctcacaaagaagtttctcagaatgcttctctgtagtttttatgtgaagatatttcctttttcacaataggcctcaagctttccaaatatccacttgcagattccgcaaaaagagagatacaaaagtgctctatcaaaagataggttcgactctgggagttcaatgcaaacatcacaaagaagtttctcagaatgcttctgtgtagattttatgtgaagatgttttgttttctaccatagggcaaaatggggctccaaatmtctacttgcattttctacaaaaagagagattctaagctgctcaatcaaaagatacgttcaacactgttagttgaatgcacacatgccaaagaagtttctcagaatgcttctgtgtagtttttatgtgaagatatttgcttttccacaataggcctcaaatcgttctaaatatccacttgcaggctctacgaaaagagtgtttccaaattgctcaatcataaggtaggttcaactgtgagagttgaat

SEQ ID NO: 872478 - DNA, 663 bp, Homo sapiens
taggttcaactgtgagagttgaatgcacacatcataaagaagtttctcagaatggttctgtgtagttttactttgaagatatttcattttccaaaacaggccccaaagctctccaaatatccacttggtgattctgcaaaaagagcgtttcaatactgctccataaaaagaaaggttcagctctgtgtgaggattgcmttcatcacaagaagtttctctgaatgcttctttgtagtttttatatgaagatagttccctttccaccacagggtgcaaagagctccaaatatccacttgcagattctacagaaaatgagatatgaaagtgctcaaggaaaagataagttcaactctgtgagttgaatgcacacctcacaaagaagaatctcaaaatgcttctgcatagtttatatgtgaagatatttccttttccaaataggcctccaagttctccagatatccactcgcagattctgcaaaaagagagactcaaaactgctgaatcaaaacatagtttcaactctgtgacttcattgcacacctcacaaagatgtttctcagaatgcttctgtgcagttttcatataaagatatctccttctccaaaatagatctcaaggttctccaaatattcacttccagattctatggaaagattgtctca

SEQ ID NO: 872479 - DNA, 634 bp, Homo sapiens
gtagtttttatatgaagatagttccctttccaccacagggtgcaaagagctccaaatatccacttgcagattctacagaaaatgagatatgaaagtgctcaaggaaaagataagttcaactctgtgagttgaatgcacacctcacaaagaagaatctcaaaatgcttctgcatagtttatatgtgaagatatttccttttccaaataggcctccaagttctccagatatccactcgcagattctgcaaaaagagagactcaaaactgctgaatcaaaacatagtttcaactctgtgacttcattgcacacctcacaaagatgtttctcagaatgcttctgtgcagttttcatataaagatatctccttctccaaaatagatctcaaggttctccaaatattcacttccagattctatggaaagattgtctcaaaactgctcaatcaaaccaaaggttcaaccctrtgagatgaatgcacacatcacaaggaagtttctcggaatacttctgtgtagtttttatttgaggatagttccttttccaccacagaccacaaagggctccaaatatccattgcagatgttacaaaaagagagattcaaaactgctcaaccaaaaggtagtttcaaccat

SEQ ID NO: 872480 - DNA, 631 bp, Homo sapiens
aatctcaaaatgcttctgcatagtttatatgtgaagatatttccttttccaaataggcctccaagttctccagatatccactcgcagattctgcaaaaagagagactcaaaactgctgaatcaaaacatagtttcaactctgtgacttcattgcacacctcacaaagatgtttctcagaatgcttctgtgcagttttcatataaagatatctccttctccaaaatagatctcaaggttctccaaatattcacttccagattctatggaaagattgtctcaaaactgctcaatcaaaccaaaggttcaaccctgtgagawgaatgcacacatcacaaggaagtttctcggaatacttctgtgtagtttttatttgaggatagttccttttccaccacagaccacaaagggctccaaatatccattgcagatgttacaaaaagagagattcaaaactgctcaaccaaaaggtagtttcaaccatgtgatatgaatgcacacagcacagagaaatttctcaaaatgcttctgtctagtgtttatttgaagatattgccttttctaccataggccacaaacgtctccaaatatccacatgcagcttctacaaaaagagagattcaaagcttctca

SEQ ID NO: 872481 - DNA, 587 bp, Homo sapiens
cttcacataaaaactacacagaagcattctgagaaacttctttgtggtatgtgcattcatctcacacagttgaactttcttttgattgagcagttttgtaacactctttttgtagaatctgcaagaagatatttggagcgctttggggcctacagtggaataggaaatatcttcacataaagactacacagaagcattctgagaarcttttttgtgatgtgtgcattcaactcagagttgaacctttcttttgattgagtagttttgaaacactccatttgtagaatatgcaagtggatatttggagcactttgaggccaacagttgaacagcaaatattttacataaaaactacagagaagaattctgagaaacttctttttgatgtgtgcatttatctcacacagttgaacttctcttttgtttgagcagttttgaaacactctctttgtagaatctgcaagtggctatttggaaggctttgaggcctattttggaaaatgaaatattttcacataaaaagtatacagaagcattctgagaaacttctttgtgatgtgtgcattcaactcactgatgtgaatcta

SEQ ID NO: 872482 - DNA, 585 bp, Homo sapiens
aagttatttgcttttccacgataggcctcaaagcacgccaaatatccacttgcagatcctatgaaaagagtgttccaaaactggtcaatcataagataggtttaactctgtgagttgaatgcacaatcacgaggaagtttctcagaatgcctctgtgtgcttttcatttgaaggtatttccttttccaccataggccgcaaagggctccaaatatccccttgcagattctgcaaaatgagagattcaaaactgctcaatcaaaagataggttcaactctgtgagttgaatgctcacataacaaagaagtttctcacagtatttctgcgtagttgtttaagtgaagatattytcttttccaaaatagggactcagaatgcttctgtgtagtttttatttgaagatatttccttttccaccataggccgcaaagggctccaaatatccacttgcagattgtataaaaagagagattcaaaactggtcactcgaaggatcggttcagctctgtgaggtgaatgcacacatcaaaaagaagtttcttagagtgcctctatgtagattttatgtgaagatatttgctttt

SEQ ID NO: 872483 - DNA, 585 bp, Homo sapiens
aagttatttgcttttccacgataggcctcaaagcacgccaaatatccacttgcagatcctatgaaaagagtgttccaaaactggtcaatcataagataggtttaactctgtgagttgaatgcacaatcacgaggaagtttctcagaatgcctctgtgtgcttttcatttgaaggtatttccttttccaccataggccgcaaagggctccaaatatccccttgcagattctgcaaaatgagagattcaaaactgctcaatcaaaagataggttcaactctgtgagttgaatgctcacataacaaagaagtttctcacagtatttctgcgtagttgtttaagtgaagatattttcttttccaaaatagggactcagaatgcttctgtgtagtttttatttgaagatatttccttttccaccataggccrcaaagggctccaaatatccacttgcagattgtataaaaagagagattcaaaactggtcactcgaaggatcggttcagctctgtgaggtgaatgcacacatcaaaaagaagtttcttagagtgcctctatgtagattttatgtgaagatatttgctttt

SEQ ID NO: 872484 - DNA, 589 bp, Homo sapiens
aatattttacataaaaactacagagaagaattctgagaaacttctttttgatgtgtgcatttatctcacacagttgaacttctcttttgtttgagcagttttgaaacactctctttgtagaatctgcaagtggctatttggaaggctttgaggcctattttggaaaatgaaatattttcacataaaaagtatacagaagcattctgakaaacttctttgtgatgtgtgcattcaactcactgatgtgaatctatcttttgatgagcagttttgaaactctctttttgtagtatctgcagttgtgtatttggagccctttgaggcctatggtggagaaagaaatgccttcacatgaaaaccccacagaagtattctgagaaactcctttgtgatatgtgcattcaactcacagatttgaacctatcttttgatggagccattttgaaactgtctttgtctattatctgcaagtggatatttctagccttttgtggcctatcgtggaaaaggaagtgccttcacataaaaaacagacagaagtattctgagaaacttctttatgatgtgtgcattcatctcacagagatga

SEQ ID NO: 872485 - DNA, 440 bp, Homo sapiens
gctctccaaatatccacttggtgattctgcaaaaagagcgtttcaatactgctccataaaaagaaaggttcagctctgtgtgaggattgcattcatcacaagaagtttctctgaatgcttctttgtagtttttatatgaagatagttccctttccaccacagggtgcaaagagctccaaatatccacttgcagattctacagaaaatgagatatgaaagtgctcaaggaaaagataagttcaactctgtgagttgmatgcacacctcacaaagaagaatctcaaaatgcttctgcatagtttatatgtgaagatatttccttttccaaataggcctccaagttctccagatatccactcgcagattctgcaaaaagagagactcaaaactgctgaatcaaaacatagtttcaactctgtgacttcattgcacacctcaca

SEQ ID NO: 872486 - DNA, 592 bp, Homo sapiens
aaaactgctgaatcaaaacatagtttcaactctgtgacttcattgcacacctcacaaagatgtttctcagaatgcttctgtgcagttttcatataaagatatctccttctccaaaatagatctcaaggttctccaaatattcacttccagattctatggaaagattgtctcaaaactgctcaatcaaaccaaaggytcaaccctgtgagatgaatgcacacatcacaaggaagtttctcggaatacttctgtgtagtttttatttgaggatagttccttttccaccacagaccacaaagggctccaaatatccattgcagatgttacaaaaagagagattcaaaactgctcaaccaaaaggtagtttcaaccatgtgatatgaatgcacacagcacagagaaatttctcaaaatgcttctgtctagtttttatttgaagatattgccttttctaccataggccacaaacgtctccaaatatccacatgcagcttctacaaaaagagagattcaaagcttctcaatcaaaagataggttcaactctgtgagttgaatgcacacttcacaaagaagtttctcagagtgcttctg

SEQ ID NO: 872487 - DNA, 608 bp, Homo sapiens
gcacacatcacaaagaagtttctcagaatgcttctgtatagtttttatctgaagttatttgcttttccacgataggcctcaaagcacgccaaatatccacttgcagatcctatgaaaagagtgttccaaaactggtcaatcataagataggtttaactctgtgagttgaatgcacaatcacgaggaagtttctcagaatgcctctgtgtgcttttcatttgaaggtatttccttttccaccataggccgcaaagggctccaaatatccccttgcagattctgcaaaatgagagattcaaaactgctcaatcaaaagataggttcaactctgtgagttgaatgctcacataacaaagaagtttctcacagtatttccgcgtagttgtttaagtgaagatattytcttttccaaaatagggactcagaatgcttctgtgtagtttttatttgaagatatttccttttccaccataggccgcaaagggctccaaatatccacttgcagattgtataaaaagagagattcaaaactggtcactcgaaggatcggttcagctctgtgaggtgaatgcacacatcaaaaagaagtttcttagagtgcctctatg

SEQ ID NO: 872488 - DNA, 639 bp, Homo sapiens
aaagcgctccaaatatccacttgcagattctagaaaaagagtgtttcaaaactgccctatcaaaagaaacgtccaacactgtgagatgaatgcacacatcacaaagaagtttctcagaatgcttctttgtagtttttatgtgaagatattcccttttccaaagaaggccacaaagtactcccaatatccacttgcaggttctacaaaatgagtgtttcaaaaccgctcaatcattagataggttcaactctgtgagacgaatgcacacatcacaaagaagttttacggaatgcttctatatagtttttatttgaaggtatttccttttccaccctaggttgcaaagggctccaaatatccacttgcagattcgacaaaaagagagattcaaaactgctcaatgataagtccaactctgtgggttgaatccatgcctcrcaaagaagtttctcagaatgcttctctgtagtttttatgtgaagatatttcctttttcacaataggcctcaagctttccaaatatccacttgcagattccgcaaaaagagagatacaaaagtgctctatcaaaagataggttcgactctgggagttcaatgcaaacatcacaaagaagtttctcagaatgcttctgtgtag

SEQ ID NO: 872489 - DNA, 611 bp, Homo sapiens
tgttgatgcctgagtgtttgccatctgaaagacaaaaccacccacgattttggtttgcttgtccccccaccaccacccaagaactcgcaacagtccttggaccctgctgatctgaatagttgtgctctctgatgtagcagcatgaacacctcttgcccaagaacctgcagcattccctggaccctgttgatcggaatagttgcactcactgatgcagcagcagaaactctagttttcctcctagaccacaaggaggaccaaggaaggtcagatttagtagcccttaccgatgcattcttgaaaacctgcacycttgcctgtcctcctagatcacaaagaggactgagaaaaatcggatttagtagcccttaccgacacattctcgataacctgttagagtcctaagcatgctcctgttagtattgggactttaccctgtcctataaagatgttatgccccaaaaatgaagtggaatgccatatcctgagggagggaagggatctccagggtcggaagagtgacaccttttgtcttcacttgaatagggaggataacatttctgaagctccccatatcctagcttcaggaataggctttgttagtcctgctt

SEQ ID NO: 872490 - DNA, 611 bp, Homo sapiens
tgttgatgcctgagtgtttgccatctgaaagacaaaaccacccacgattttggtttgcttgtccccccaccaccacccaagaactcgcaacagtccttggaccctgctgatctgaatagttgtgctctctgatgtagcagcatgaacacctcttgcccaagaacctgcagcattccctggaccctgttgatcggaatagttgcactcactgatgcagcagcagaaactctagttttcctcctagaccacaaggaggaccaaggaaggtcagatttagtagcccttaccgatgcattcttgaaaacctgcacccttgcctgtcctcctagatcacaaagaggactgagaaaaatcggatttagtagcccttaccgacacattctcgataacctgttagagtcctaagcatkctcctgttagtattgggactttaccctgtcctataaagatgttatgccccaaaaatgaagtggaatgccatatcctgagggagggaagggatctccagggtcggaagagtgacaccttttgtcttcacttgaatagggaggataacatttctgaagctccccatatcctagcttcaggaataggctttgttagtcctgctt

SEQ ID NO: 872491 - DNA, 649 bp, Homo sapiens
tgtgattttttgcacattgattttgtttcctgagactttgctgaagttgcctatcagcttaaggagattttgggctgagacaatggggttttctagatatacgatcatgtcatctgcaaatagggacaatttgacttcctcttttcctaattgaataccttttatttccttctcctgcctgattgccctggccagaacttccaacactatgttgaataggagtggtgagagagggcatccgtgtcttgtgccagtttttaaagggaatgcttctagttttcgcccattcagtatgatattggctgtggktttgtcatagatagctcttattattttgagatacgtcccctccataggtaatttattgagagtttttagcatgaagtgttgttgaattttgtcaaaggccttttctgcatcaattgagataatcaaatggtttttgtcattggttctgtttatatgctggattacgtttattgttttgcgtatgttgaaccagccttccatcccagggatgaagtccacttgatcatggtggataagatttttgatgtgctgctggattcagtttgccagtattttattgaggatttttgcatagatgttcatcagggatattggtctaaaattctctttttttgttgtg

SEQ ID NO: 872492 - DNA, 673 bp, Homo sapiens
aaaacaccaaaagcaatgacaacaaaagccaaaattgacaaatgggatctaattaaactcaagagattctgcacagcaaaacaaactactatcagagtgaacaggcaacctacagaatgggagaaaatttttgcaacctactcatctgacaaagggctaatatttagaatctacaaagaactcaaacaaatttacaaagaaaaaaacaaacaaccccatcaaaaagtcagtgaaggatatgaacagacasttctcaaaagaagacatttatgcagccaaaagacacatgaaaaaatgctcaccatcactggccatcagagaaatgcaaatcaaaaccacaatgagatatcatctcacaccagttagaatggcaatcattaaaaagtcaggaaacaacaggtgctggagaggatgtggagaaataggaacacttttacatggttggtgggactgtgaactatttcaaccattgtggaagacagtgtggaaattcgtcagggatctagaactagaaataccatttgacccagcaatcccattactgggtgtatacccaaaggattataaatcctgctgctataaagacacatgcacacgtatatttattgcagcactgctcacaatagcaaagacttgcaatcaacccaaatgtccaacaatgatagactggatt

SEQ ID NO: 872493 - DNA, 659 bp, Homo sapiens
gcacacattcattttgcctactatcaatcaattagtgcttcattctcttaaagaccagcacctccaacatgtaggcttaatcccatctcctcctacctttgtaaaggtcctttcaggaaagaataggtaactgcgtcaaatgttgctgatacatttaagaaaatatataagaaatgtttctttctgtgaaatcatactttcctagttttcatcctgattcttatattgggccttactgaaatcttctttggtctctttcttacgcaagtttatggaactttctctgtgtttagtcttgagtctccttactatacatcatcaattcctacaattctttataccttggcacatcttgtcaagcatgtgcaccttaccacctactgaatattactatattgattgtttttcttgtaatttaaataaagtgtcagaccattgtgatcaatcttcaacaactctccctactccaaaatgctttttctttgttcctaactgccawaactgtcaaaaacatcattgcttgctcaatctagagagccaggagtcattctcaagtttttcttctcttccctcacaaatccatcacaaatccttgttactctactagagaaaaatcttacttcatccactttggttctacaccactgccattaaatttt

SEQ ID NO: 872494 - DNA, 613 bp, Homo sapiens
tgagcaagtgtcagtaagtgtcagagctaaaatgcaaaagcagtttgatgcccacacgcttaaccacaacactgaattactctcttagcctctttgcaacttgggtgttactactactactactaaaaaaaaaaaaaaaaaaaaaaaaaaaaaaaaaggaagtagctgtttttctcacttgccctgactctagctaaccgttcttgacttctttgcattttatccatgcagaacaaagctatatttgtaatcgaactccarataaataagtacctgttctttagcagagtcaaaatctgaaaatgtttagctgaagctggtaaaatatttaaatccaataacgtcctgaatagaatgtaaggattctttcctttgttatcaaaacctaaaggcatccataggttcattccattctgcacttcagttgtttccttacaaactccccaccctcacccctacccctagtttctggggccaccagatagggacagcacctcctgggcaggagaacgtggagcatagtggctgcgcacacaatcagcagtgagttagcggaaaagaccacagaaatgttgggcatctggaattatagttcgtgtctgactgagaaatc

SEQ ID NO: 872495 - DNA, 595 bp, Homo sapiens
gggaaacaaggaatgacttgttctcctctgtgttcactacaagttgggtccttgtagtgaacatagtactcaataagtagttgaaccttgtagttgaacctaatctttagtagtacccaactacttattgagtactaggtttactaccaaggtgattggatcatttgtaccccacacctcagcatcagcaatatatctatgtaacaaatttacatatgtactccaaattggataaaaatgtttaaattattttaaaaagagaattttggtttaaaccaccatacctcaataatatgactccgggggatattcattggagctattcaacaaacattraaatgaatcacaaactccttatgtttcttgaaacactttatacttcccagtatcagagcaatcactgaaatgtactcagagaagaaatctcagtgtgacaactctggttcattgccacttcctaaatgcctttcccatttatatctgctttggaattctagactgccagctcaatacccctgccaccaaagggcctgcaatggctgctgcatcaggcaatatgccgtaaatactagcccaagctgcagcaaatttcctg

SEQ ID NO: 872496 - DNA, 517 bp, Homo sapiens
ttattgcagcaccattcacagtaggcaagatacggcatcaactcaagtgctcaataacagatgaagggatttgaaaaaaaatgtggtacataaatacaatggaatactattcagccatataaaagaataaaattctgtcattcatggcagcatggatgaaactgaatgacattaatttaagtgaaataagccaggaacagcaagttaaacactgcattttgtcactcatacctagaagctaaaaaaaacagttcatctcatagaagaaaaagcagacsaaaggatactatactagaggccgcgatgggtaggggaaagaggggagagggagagatttgttaaagaatacaaaattatagctaaataggaagaataagttctagtgttgtatagaaatataggatgcctatagtaaacaataatatatagcttcaaatagctcaaaggaggatattgaatgtttcaaacacaaataaatcataaattatgaatatgataattatgaatataaaaatct

SEQ ID NO: 872497 - DNA, 720 bp, Homo sapiens
ggcatatagatgactctctgatataaccaagagagccatgcacacacactgacacttaagacttaagagagttaaaaatgtccaaatccatctttatacaaactttagtgataatatgttatgagcgatccagtagttaattgaaactctcctggagtccacctctttattttaactttaattgaggttgcctatctcacttataattttgataccaaaatctgagaaaattgacaataaagtataacttatttgagtcaatacctatgcaatctgatttatactgacaaaattattcatactgacatgattaaaattattgataacatttacctatcctacttagtgtgaatgctcacaaattttcctgtagaaatacttcattaatgtgtttattatcyaatgccatcagtccttgttgttggtactaaataataatatattatctaaaattcaaaagtatttgaatttcaaaacacagctggctacaaggcatttttgacatagcattaatattttaatatatatagcaatagatagatttcaaatcatttttacttgcatgagtctctatagtcttgaaaatattgaaaatctcatacattttcagaatgaaaaattgagaataaagacagttcagtggcatttctaaggttatgaagctagtaatagtcgggccttggaaccatgtctaaatggaagtctagtcattcgactgaa

SEQ ID NO: 872498 - DNA, 678 bp, Homo sapiens
aagcagatcacaaaagttcagaaaatttgcagcctgacaatgcaataggaaagaaaaactcattttctgaggagaaattcaagcctgctgcagaaatttgcataagtaacaagaagccaaatgttaatcaccaagacaatggggaaaatgtttccagggcatgtcaaagacctttatggcagcctctcccatcacaggactggagatctaggaggaaaaaatggtttcatgggtcagacccaaggcctmgctgctgtgtgcagcctagggacttggtgccctgtgtctcaacagctccagccatggctaaaaggggccaaggtactgcttgggcaatggcttcagagggtgcaaaccccaagccttggaaggttccatgtaatgttgagcctgcaggtacacagaagtcaagaattgaggtttgggaacctccacctagatttcagaggatgtatggaaacacctggatgtacaggcagaagtttgctgcatgggaggggccctcatggagaacctctgctagggtagtgtgggagagatatgtgtggttggagcctccacacggagtccccactggggcactgcctagtggagctgtgagtaaagggccaccattctccagaccccagaattgtagatccaccaaaaacttgcaccatgcacctggaaatgctgcag

SEQ ID NO: 872499 - DNA, 678 bp, Homo sapiens
aagcagatcacaaaagttcagaaaatttgcagcctgacaatgcaataggaaagaaaaactcattttctgaggagaaattcaagcctgctgcagaaatttgcataagtaacaagaagccaaatgttaatcaccaagacaatggggaaaatgtttccagggcatgtcaaagacctttatggcagcctctcccatcacaggactggagatctaggaggaaaaaatggtttcatgggtcagacccaaggcctcgctgctgtgtgcagcctagggacttggtgccctgtgtytcaacagctccagccatggctaaaaggggccaaggtactgcttgggcaatggcttcagagggtgcaaaccccaagccttggaaggttccatgtaatgttgagcctgcaggtacacagaagtcaagaattgaggtttgggaacctccacctagatttcagaggatgtatggaaacacctggatgtacaggcagaagtttgctgcatgggaggggccctcatggagaacctctgctagggtagtgtgggagagatatgtgtggttggagcctccacacggagtccccactggggcactgcctagtggagctgtgagtaaagggccaccattctccagaccccagaattgtagatccaccaaaaacttgcaccatgcacctggaaatgctgcag

SEQ ID NO: 872500 - DNA, 598 bp, Homo sapiens
agttgctcgaatgttctgagtatggttgataggtcctctgtattcttattttcttcattaattatagagcaatcagtgttgaagtctgtaactataaaagtagatttgtccatttgcctagttttctttcagttccatcaattttttgcaatgtattttgaagtgttgttagctgcatacacatttagrattgttatttttcttgaatcactatctttgttatcattatgaatcatctgtctttatctctggtaatattccttactataaattttactttgataatataactactccaaccttctttgactagtgttgcctggtatacctttttaaatcctgttgtctttaacttctctatatcttaatataatatgggtttttagtagacagcacatagttcagtgttactttcgaatgcagtctgaatctgacattgacttttaactggatgttttgaatcatgtacatttaatgctatataattactgatacagttggatataaaccttctatcttgctgtagtttttctaattagctcatttgttctgtgtttctttctttctctcttactttctctctttcctttccctcttg

SEQ ID NO: 872501 - DNA, 608 bp, Homo sapiens
tcaaaaagtctgttttaaaagagaaattgaattatgtattttctttggcatgccaaacatttgataaatctattataatctaaaagctaggcatgtcagaacattagcattgatgtttaatagcatacgtcagttccagaaaactgctcatataaagcttgtttaataaaaaatgtgttawttttcaagtttttatccactttatgtagaattttacagatttattcttttaagtacatggcattaaaaaaaaattcactttgaaatagagaacacaaagatagttttttaaggatcaactatttgaaatttgtgtatgtgtgtgtaagactgactgtatattacaaaaagtagcaagagaaaaattaggtaggacttagaaagtgtaaactctaattgcgaactaaactagcccaaagctttccagtcctctgtagaagtcatctcaattcaacatataaatatacatgatcccaatttaatttaatttaagcattgtttgcctttaactgtcattattaagtaagcatgacataaatattttttactgtgattcaaccattcagaaagattaaaatgtttgtattgtagacataaaggaaagataa

SEQ ID NO: 872502 - DNA, 644 bp, Homo sapiens
aaagtgaattcaaagagttgacaaatgtttttgtgtagatagaggagatcgagttttacataaataatgatatatgtaaatataacaagaacatttattgagcacatagtgtactaagtgctttggtaaatactgtaaggtataaaaagatattgcatagatcttmtcttcaaacagtttactgtgaacttgagcaggaataactacgtatttaaaattttacagcaacttaaatcatattgtcatatacatttacatcctcatcataaattctctatactttgtcagtggtctccagattagtctttcttctttccatttattccaattcttggtactgtttatagaggaacattccaaaaatacagattttatgctactgttctagtttgaaaacataattccctggcactgtaagagaatacaatccaccttcttgggatggcatacaaagcactccataatttggctgctggcaaccttactattgccattttccaatcccatatttaatgtccaacaacacttggtcataaaacttgaagttccataagaaaacacactgtttgtcttaaatgactttgtttatgctatttcctctacttagtatgcccttttgtccacatggtaaacttttgttttta

SEQ ID NO: 872503 - DNA, 573 bp, Homo sapiens
catggctgggtaatcctctgagacaaaacttccagaggaacgatcagacagcagcatttgcggatcaccaatatccgctgttctacagccaccactgttctgcagccaccgctgctgatacccaggaaaacagggtctggagtggacctctagcaaactccaatggacctgcagctgagggtcctgtctgttagaaggaaaactaacaaacagaaaggacatccacaccaaaaacccatctgtacatcaccatcatcaaagaccaaaagtagataaaaccacaaagatggggaaaaaacagagcagaaaaaccagaaactctaaaaagcagagtgcctctcctcctccaaaggaacgcacctcctcaccagcaacggaacaaagctgtatggagaatgtctttgacgagttaagagaagaaggcttcagacratcctccaagctacaggaggaaattcaaaccaatggcaaagaagttaaaaactttgaaaaaaaaattagacgaatggatacctagaataaccaatgcagaaaagtccttaaaggagctgatggagctgaaagccaaggctt

SEQ ID NO: 872504 - DNA, 602 bp, Homo sapiens
ttatggttattttcagatgaacagtaactgctacactcttaaaagcacttaaggaaagtgtaagcatgtcctaaatagtcaaccatttaacctgggaaaacacaggctttcctgtttaatcaagtatcaggccaatctatagatataatcttaaaggattttcagcagtaatgaagacagtttgggaaaggagaaggcactttaaagacatgaaaccttacattacacgctcttagatatttttaaacataataagctcattggattcaggtatttttgtctttgcatttaaaaaaatatgtgtttctaatttgtttkcatatttaattatgtcaaagctgagaaattcatgagttaaatttataaatgtcatttgcaaccaaatgaagtatttatttttgaaaagaaagggtgaaggaacaaatactgatttgtacataataaaaatatatgtgtgtattatacatatatatatttttttcctccttgacactactttctcaccatatcaagtgtatttttgtactttatatataggttagaaaaatgtcaattgtctattccaaagaattctatctctgtaatagattatatttatgcta

SEQ ID NO: 872505 - DNA, 645 bp, Homo sapiens
aggcaaaacttctgtttcctctttgttattttggcccagtgatatctgggctgagggaagaggaggcagtaaggcaagtggtggttcctcctcctttccctttttaggcttttctgtgcataatggagccagggccaccttaattaaagcccatagtgttagagctgttactgggacctgttgcccttgtgcataatgttgtgtaagatttctcccaacttgttcccaragctctatgtcatcattccttcttttgagaaccatggattatggtttacaacaatttgcagtaggtcccttaattaagcctgcgaaactgaggctccactagctttaagcaactgtttcaacacttttatatattgtttccattgagctgataactgttgccccatgatgaaacctcagcctgaacaattccccccagacttggagatcctgagtgggcaccaatgacttactgattactcactgaccacgcagtccttttcacctctgtttttgggggggtccgtcgtgcttcctttgctgtgttcctcacatggggcactagctgcagggatccgtcccacagaccctgacccaacaacagatgaataacgtacactgacacagatattatgcttgtcagtccagctgagagtc

SEQ ID NO: 872506 - DNA, 645 bp, Homo sapiens
aggcaaaacttctgtttcctctttgttattttggcccagtgatatctgggctgagggaagaggaggcagtaaggcaagtggtggttcctcctcctttccctttttaggcttttctgtgcataatggagccagggccaccttaattaaagcccatagtgttagagctgttactgggacctgttgcccttgtgcataatgttgtgtaagatttctcccaacttgttcccagagctctatgtcatcattccttcttttgagaaccatggattatggtttacaacaatttgcagtaggtcccttaattaagcctgcgaaactgaggctccactagctttaagcaactgtttcaacacttttatatattgtttccattgagctgataactgttgccccatgatgaaacctcagcctgaacaattccccccagacttggakatcctgagtgggcaccaatgacttactgattactcactgaccacgcagtccttttcacctctgtttttgggggggtccgtcgtgcttcctttgctgtgttcctcacatggggcactagctgcagggatccgtcccacagaccctgacccaacaacagatgaataacgtacactgacacagatattatgcttgtcagtccagctgagagtc

SEQ ID NO: 872507 - DNA, 581 bp, Homo sapiens
acaccaataatttacagccccttctatcttatttctaacacacatgcttggtttaatgaaagtaaataccttttaaatattagatagtttttttaaaaaattcatgtaatgggtataggataaacaatgaatagacttaactggtgatcatcccccccatcatctcttgctagaaagactcctttatgtctgggttggctttttctcctgatttatgtggctgagagagaacacagtgattattgttcctcctggattgargtctactgcacaaggtctcacctcttttctggacaaggagtcttgagttctatcctaagatacatctataacatgaaatgcaccagctcagcctatttccaacctgaagccattctaccatacccttccccatattcacatttctgtcttcagagcaaagccagcttcccataggctcctcttaccaaggaggctacatcagatggagatatatcaagctgagctgtgattcatggggagctgtcatgtcagaatgggtcttattcatttgctcgtttatcctataatgccaccaaaagagaagttgtccagatcctctt

SEQ ID NO: 872508 - DNA, 616 bp, Homo sapiens
gatagttatataaaatgcaaatattttgagtcaatagacttgggggaaggaggaaaagaacaatgaatcttgtgtgaaagagcagaaacatataacaaggaactattgatagagtaagtatctcagaggaaatgagggcatcaccacacttcatcctttctgaggagccaaggaaaaagcctgggacctagatataagactgaaaatcaataaagcattttagacgtgtatatactggatgtgtatatacatgtgcacatatatatacacaaacacgtacatgtgtacacgtacataaacatgattttagaccttaacataagactatgtataatgtgaaaaaagagaaagatgtataaaatggaagtatatgaaactcgaaaaatacatgaaaatcaaaaaaaaagagaatgaatgaaataattaaaatatatacgtcaattttacagggatatttctagagaaatgacctagaacytaagacattaaagctggcattattgaatttagttagccttagggaactgaagatccctgtaaatcttcaaaatttgtgtatgtatattttggaaggagatgactcacagacttcattaaattcacaaagggctacctg

SEQ ID NO: 872509 - DNA, 649 bp, Homo sapiens
ttactagggttagttcaatccaaattggaaaataggtccagcattttaaaattctgtctgaaattttttattcttctgcctttgaattccacagatgatatttgccacatgcaatgagtgcttctctatttaacttaccctccaccattgtaaggcgtttgacttagctaaacgtataccttaaacttgaaactctcctcctcttggtttctatggcatcagacaagctgttttactcygtccctctctatgaagcactgctttgtcagttctgatggcttcatattctcttcccacagcaatgtatgaatgattcttcatgaatgctcactcctgacccttctcacttctctccatttctttctgtatttttgttttttatcctccccttctttctccctctttctgatacttcttccttcatggtgtcaattaacaactctcagggtgacaaatttatatctccaacccttatttctctccaaagaatcctttcatttttttagaacaaactgtttagccctttgtttggattttattgttacataaaaattaacatgtttaaaattggcccttataccacatctacccccaaaggcattaacaaaaacatatatcagcaaataaacgtatcattaatcaaacaaaa

SEQ ID NO: 872510 - DNA, 593 bp, Homo sapiens
attggcatcattccaaactactagtatgaaaatcagtttagggttgcaataatttcagttgtgcttcatgcttctgggcttgatgtgactgattcaccactttcagatgtggctaattctagcttactttgttccaggcggtgtggctacagcaaagcaaaacaagatccagaagaggaaaagatgcattttcataatgggcacagtaagcaaattgtaaaaaataaaaatagaataaaataggggacacyttattgttatttaagtttcttttcaggctacaagatttataataactgaccaaaatattgttttttttttttttaaaagtgttctatttgttacattcctgtaaagaatacgggcttgggtatttctggaaggctttaggcaatagctgaatgctttattcaattatttaaataatacttttgttataatcaaaataaaaactttttgcttaatataaagaactattatatttcaaataaaatttcctggaatattctaattcctagcaacacaatgagtagaaatctatcaataagtagcatcaccaggttaaataaataaaatttctcaggttttttttt

SEQ ID NO: 872511 - DNA, 654 bp, Homo sapiens
ttttgggctgaaacaatgagattttctagacataggattgtatcatctacaaacagggatagtttgattttctctcttcctatttgaatgccctttatttatttctcttgcctgattaccctggccagaacttccaacactatgttgaataggagtgatgagagagggcaaacttgtcttgtgctggttttcaaggtgaatgcttccagcttttgcccattcaatatgatgttggccgtgggtttgtcatatatggctcttattattttgaggtatgtttctgcaatacctagtttattaagcatttttaacataaatggatgttgaattttatcaaaagcctttccagcatctattgagataaccatgtggtttttgtctttagtcctgcttatgcaataaatcacaattattgatttgtgtatgttgaaccaaacttgcattccaggaatgaagcctacttgaccttagtggataagctttttgatgtgctrctggattcagtttcccagtattttgttgaggatttttgcatcagtgttcatcaaggatttaggcctgaactttttattgctgttgttgttgttgttgttgtacctctgctaggttttggtatcagaatgatgctggccccatagaatgacttagggagga

SEQ ID NO: 872512 - DNA, 780 bp, Homo sapiens
ctataggaggtcaaggtaatagctacaaattatcaggaaaggatttttccccatgtgctacacagaataagatgggcttttgttccttttcaccttgtatccataagaagatttttcacacttttatatatgctttaatcatctggtggtcctgactttgtgtgagagtgttaattcccatcaactcttttcaacatgtgtgggcccatgcccttctcttccaccttatatgtctcttaggcctcaatgactagcaaatctagctggagtggttgcttttgttttgtttttttattcccttcccacccccatttcatgccccatgagaatttatttattttgcagggagctcagataagggtttaaatggatttttaaatatatatatatatataatataartaatatatatataagtaaatataatttacttatatatacatatttattacttatattatatatatatatatatatctatatatatctatatatctatatctatatctatatctatatctatatatcatccagagttcctaagtattttagctggaggttttttggatgatctggtcccttggtactcagagtgttgtcctcaggttagcaataccccttgggtgcttattagaaatgcaggatctcaggccccaccccagacctgctgaatcacaatgtgtacgttaacaagacccttagataaagttcaataagacatcgccaaacagacacaatatgtttttaagattaatcattactgtatcctacacaaaaagc

SEQ ID NO: 872513 - DNA, 780 bp, Homo sapiens
ctataggaggtcaaggtaatagctacaaattatcaggaaaggatttttccccatgtgctacacagaataagatgggcttttgttccttttcaccttgtatccataagaagatttttcacacttttatatatgctttaatcatctggtggtcctgactttgtgtgagagtgttaattcccatcaactcttttcaacatgtgtgggcccatgcccttctcttccaccttatatgtctcttaggcctcaatgactagcaaatctagctggagtggttgcttttgttttgtttttttattcccttcccacccccatttcatgccccatgagaatttatttattttgcagggagctcagataagggtttaaatggatttttaaatatatatatatatataatataaataatatatatataagtaaatataatttacttatatatacatatttattacttatattatatatatatatatatatmtatatatatctatatatctatatctatatctatatctatatctatatatcatccagagttcctaagtattttagctggaggttttttggatgatctggtcccttggtactcagagtgttgtcctcaggttagcaataccccttgggtgcttattagaaatgcaggatctcaggccccaccccagacctgctgaatcacaatgtgtacgttaacaagacccttagataaagttcaataagacatcgccaaacagacacaatatgtttttaagattaatcattactgtatcctacacaaaaagc

SEQ ID NO: 872514 - DNA, 603 bp, Homo sapiens
agaaaagtcatgtcttacatggcagagggcaagacagtgtgtgcaggggaactccccccttataaaacaatcagatctcatgagacttaatcacaatcacaagaacaacatgggaaagaccaacccccatgattcaattacctcccaccaggtccctcccatgacacatgggaattatgggagctaccatgcaagatgagatttgggtggggacacagccaaaccatatcattctgcccttggccccttccaaatctcatgtcctcacatttcaaaaccaatcatgccttcccaacaatcccccaaaatcttaactcatttcaacattaactcaaaagtccacagtccaaagtcttatctgagacaaggcaagtcccttctgcctatgagcctgtaaaatcaaaagcaagttagttacgtcctagatagtatgtgggtaraagcattgggtaaatacaaccattccaaatgggagaaactggccaaaatgaaggggctacaggccccgtgcaagtctgaaattcaatggggcagtcaaatgttaaagctccaaaatggtctcctttgactccatctctcacatccagggcactctgatgcaag

SEQ ID NO: 872515 - DNA, 645 bp, Homo sapiens
aaccagaaaaacacacatcaaaaaaagaaaactacgggtcaatatccctgataaacattgatgcaaaaattctcaacaaaatactagcaaactgaattcatcaacacattaaaaagattattcatcatgactaaataggatttatcccagggaagcaaggatggttcaacatacacaaatcaattgatatgctccatcctatcaacggaatgaaggacaaaaatcatacaatcatttcaattgatgctgaaaaagtatttgataaagttcaacatcccctcatgataaaaaccctcaaaaaacttggtgtagaggaaacacacytcaatgcaataaaagccacatatgacagatccacaattagtatcatactgaatgggaaaaaattaatgcctttccgctaagatctggaacaagacaaggatgcttactttcaccactgctattcaacatagtactgggagagcaatctgattgctagagcaatcagaaaatggaaagaaaaaaagggcatccacgttaggaaggaataagtcaaattatccttgtttatagacgatgtatcatcttatatttggaaaaacctaaaaactccaccaaaaaaactattagaactgataaattcagtaaagttgcaagatataa

SEQ ID NO: 872516 - DNA, 578 bp, Homo sapiens
tcaaaaaaaagtaacgtttacctttgtgagatgaatatacacatatcttaaagcagcttctcagaatgcttctttctagtttttaatgtgaagatatttcctttttcaccataggcctcaatgcgctcctaaatatccgtttgcagattgtacaaaaagactttttccaaactgctcaataaaaagaatttttgaacactgtgagatgagtgcacacatctcaaagaagtttctcaggaaccttcagtctagtttttatgtgaatatatttcctttttcaccataggcctcaaagcgctccaaatatccatttgcagattctacaaaaagactgtttccaaaccactcaataaaaagaatttttgaacactgtgwgatgagtgcacacatctcaaagaagtttctcaggaaccttcagtctagtttttatgtgaatatatttcctttttcaccataggcctcaaagcgctccaaatatccatttgcagattctacaaaaagacagttaccaaactgctcaatcaaaacaaaggttcagctctgtgtgatgaatgcacacatcacaaagaagtttctca

SEQ ID NO: 872517 - DNA, 670 bp, Homo sapiens
caaagggaaatttcttagctgattcaggcctatggtgaaaaagaaataacttcacataaaaaccagacagaggcattctgagaaacttctttttcatgtgtgcattcatctcccagagttgaacctttcttttcattgagaacttcggaaacagtctttttgtagaatctgccaaaggatctatgtgagcccattgaggcccacggtgaaataggaaatatcttcacagaaaaactagacagaagcattctgagaaacgtctttgtgatgtttgcattcatctcagagagttgaaactttattttgattgagcagtttggaagcagtctttttgatatatctgcaaatggatatttggagcgctctgtggcttgtggtgaaaaactaaatatcttcatataaaatctagtgagaaactttctgaagaasttctttgtgatgtgtgcttttatctcacagacttgaacctttcttttcattgagcagtttggaagcagtctttttgaagtatatgcagagggatatttgggagcggtttaaggcctatggtgaaaaagtaaatatcttcagataaaaactagatagaagcattctgagaaagttctttgtgatgtgtacattcatcacacaaagttgaaaatttcttttgattgagcagttttgaaacagt

SEQ ID NO: 872518 - DNA, 661 bp, Homo sapiens
atatgccacattttctttattcagtctatcattggtgggcattttggttggttccaagtctttggtgttgtgaacagtgccgccataaacagacaggtgcatgtgtctttatattagaatgatttataattttgggtgtatatacccagtaatgggattgctgggtcaaatgatatttctagctgtagatccttgacgaattgtcacactgtcttccacaatggttgaactaatttatattcccacaaactgtgtaaaagtgttcctatttctccacaccctgtccagcatctgttgtttcctgattttttaacaatggcctttctaagtggtgtgagattgtatctcactgtggttttgatttccatttctctaatraccagtgatgatgtgctttgcttcacatgttcattggctgtataaatgtcttctttggtaagtgtctattcatatcctttgtccactttttgatggggttgttttttttcttgtaaatttgttctttgtagattctgcatattagccctttgtcagatggatagattgcaacaattttctcccattctgtgggttgcctgttcactctgataatagtttcttttgcactgcagatactgtttagtttagttagatcccatttgtcaattttggcttttgttgc

SEQ ID NO: 872519 - DNA, 439 bp, Homo sapiens
gaatgaaacaaatcaataaatttcaacacttaagttgacaaagatgtcaaagttatctgacaaagattttaaagcagctataaaaaatggttcaatgagcaattgtaaacctgcttgaagcaaatgaaacaatagaaagtctcagcaaagaaatagaagccataaagaaacaaatggaaattttagaaytgaaaagtacaacaaccaaaaaagcaatagaaaggctcaaaagcaagtggaagagacagaggaaagaatgaaagaaaatgaagatagcacaatagagactacccaatgtgaaaggaaaataaatctcaggacccacaaatcactaagccaaagggaaaattcaagctggaaaatgcatcaggcaaacctgcctcttattttattcctaaataagatagctacaaggataaagaagctacatccttccctc

SEQ ID NO: 872520 - DNA, 411 bp, Homo sapiens
caccctttcctacaccacccctttcctgcaccaaccctttcctacaccaaccctctcttcctgcctgctcatcattccctcttacacgtgtgtggtctcattcactctgtgctccactccctatccctatccctcacatgatctaacttacaaaccaggactccttctctttcacatgccccaatccttccaccatccccacacaaatcacctccctcaataaatacacaraagttggccaggagtggcagctcacccatgtaatcccagcacattgggaggcagaggcaggcagatcacttgaggtcaggagctcaagaccagcctggccaacacggtgaaaccctgtctctactaaaaatacaaaaaatagctgggcatggtggtgtgtgcctgtaatcccagctactc

SEQ ID NO: 872521 - DNA, 572 bp, Homo sapiens
atttaggttattttgaaatacatagtaaaatcactcaatctagtgcctaccacataccaattttcaaaaactgtagttttcctcccctggtacagtgcttctgtaactgttgtaccattacaatctgcaccaaaagcaattggagtttgtttaaaatrtgggtatccaggcccaccacacagtgtcagttatattacttttatctcttataatccatttttcttgattatattattttaaaatatatgtgacaccaactagaatggctaagatggaaaatacagacagtattaattgttggctaggatgtggagcagttgggactctcctactctgctcctgggggtgtgcactgctgtatttactaaagctgggcataactgaacccaagaattccaatcctaggcatattcccaatggaaatgtgtgcatgtgatcaccaaaagatagatattattaaaatgtttatagcagcactctttgcaatagctcccaactggaaactactaggtgcccatcaacagcagagtggactttttttgaagctgggatacaatgcagcaatgagcatg

SEQ ID NO: 872522 - DNA, 565 bp, Homo sapiens
aaaattattttcaacctaatattctacatccaacgaaactatcaatctaaaatcatggaaactggcaggcacgctggtaggatgaattactggctcatgcctggaatcccagcacttcgggaggctgaggagggtgggttgcttgagcctaggagttcgagaccagcctgggcaacatggtgaaacccattctccacaaaaaatacaagaattagctgggtgtggtgttgcatgcttgttgtccatgctacttgggggctgaggtgggaggatcgcttgagcccaggaagtgwaggctgcagtgagtccgatcacaccctgccctccagcctgggtgagacagcaagactctgtcttaaaaaaataataaaataaaaaaaattaagttttaaaaatagaatctggtggctcatgcctgtaatcccaacgctttgggtgggtgaggtgggaggactgcttgagcccaggagtttgagaccagcctgggcaacatagtgagattccatctacaccaaaattaaaaactcaaaaagaaaaaaaaagaatctgtaactaaaactcaggt

SEQ ID NO: 872523 - DNA, 629 bp, Homo sapiens
ctatcttatggggttcttatgaggcttagataagtaaaaagtacttagaatagcacttggcaaaaagaacttaatgagcggtagctatgattactgttgttagtggttaatgtggtttggcactgtgtgcccacccaaatctcatgttgaactttaatccccagtgttgggggagggacctgatgggaggtgattggatcatggggcaaatttcccccttgctggtctcatgatagtgagtaagttctcatgagatctggttgttaaaaagtatgtagcacctcccccttcgyggtctgtcttcctcctactccgacacgtggagaaggtgcttgcttccccttcacccttctgccatgactgtaagtttcctgagtccttccaaccatgcttcccatatagcctgtggaactgtgagtcaattcaacctcttttcttaatacccattctcaggtagttttttatagctgtgtgagaatgaactaatacggtggtccattgtagcagggacataagtttcaaaattatggaagaaaaagactgaatagtcagaataagtggatgacagatatgatttcatcgaaaacagatcccattgtggtatctcaattaggtctttaaagtttcct

SEQ ID NO: 872524 - DNA, 593 bp, Homo sapiens
aataatattaaaggaaatctaatttatgactcatggagacactactaaaatataaagctctttccccttctaaccaattctctcacactccagttttctccctaactttcctcttcctcatttctcacactctgcacagcaggtatcgtttttccaccttccctagtctatagccactttcctactggaagtggccccttgcaattctgctcttactcaccagccatgctgggtccctctggaagctccaagcccggtccccactgactcctcacagacagaagacctctgaacagcctcagcagtctagytctctcaagctgaccacttttctaccagaaatcctcgtggagaattttcaataagtaataatatctaccttgttacacatttgatcattcacgtatgctttcattcattcatccgtagcatggagaaaaataaaagttgctttaaaaaccaaaaacagatttccttttaaaggaaaagcaaatgaactttatttagaaaaatacagtatgttgggccattttggttgaaggaaaatagtcctgatgtgggcctcgtgttagccacaagaaccacaatgcttt

SEQ ID NO: 872525 - DNA, 666 bp, Homo sapiens
tggttccagttgttcctttccatgtttagtgcttcccttaggagctcttataaggcaggcctggtggtgataaaatctctcagcatttgcttgtctgtaaaggattttatttctccttcacttatgaagctcagtttggctggatatgaaattctgggttgaaaattctttaagaatgtggaatattggcccccactgtcttctggcttgtagggtttctgccaagagatctgctgttastctgatgggcttccctttgtgggtaacctgacctttctctctggctgcccttaacattttttctttcatttcacccctggtgaatctgattattatgtgtctttgggttgctcttctcaaggagtatctttgtggtggtctccgtattttctgaatttgaatgttggcctgtcttgctaggttggggaagtcctcctggataatatcctgaagagtgttttccaacttggtccattctccccatcactttcaggtacaccaatgaaaagtagatttggtctttacatgtagtcccatatttctcggaggctttgttcatttcttttcactcttttttctctaacgttgtcttcttgctttatttcattgagttgattttcaatctctgatatcttttcttccacatgatccatcagctattgatac

SEQ ID NO: 872526 - DNA, 599 bp, Homo sapiens
aaaaaaatagattttcataatgttgaaacaattgactaaatcatggggtagggtgcacaattagatatctattaattattatacacacacacacagcatgagagagagagatgataaggaattggctcacacaattgtggaggctaacaagtcccaagatctgcagttggcaagctgaagacctatgagagccaatggtgcagtttcagtccmaaggtcagtggacccaggaaaagctgatgtttcagctggagtccaaaggcaggataaaccaatgtcccagccataaggcaatcaagtaagaggaaattccctctcatgtaagggaggttcagactttttgttctattcaggccctccactgatgggatgagacctactcacattaggaaggacagcctgttttactcagtctacagattcaaatgttaatctcatccaaaacaccctcacatacatacctaagataatctttgaccaagtatttgggcactttatggtcagtcaggttgacacataaaattaaccttcataattttcaacatgaatcccaggttaattaaagatttgaaagtaaaaaggaaagtagaacacaaaag

SEQ ID NO: 872527 - DNA, 599 bp, Homo sapiens
aaaaaaatagattttcataatgttgaaacaattgactaaatcatggggtagggtgcacaattagatatctattaattattatacacacacacacagcatgagagagagagatgataaggaattggctcacacaattgtggaggctaacaagtcccaagatctgcagttggcaagctgaagacctatgagagccaatggtgcagtttcagtcccaaggtcagtggacccaggaaaagctgatgtttcagctggagtccaaaggcaggataaacyaatgtcccagccataaggcaatcaagtaagaggaaattccctctcatgtaagggaggttcagactttttgttctattcaggccctccactgatgggatgagacctactcacattaggaaggacagcctgttttactcagtctacagattcaaatgttaatctcatccaaaacaccctcacatacatacctaagataatctttgaccaagtatttgggcactttatggtcagtcaggttgacacataaaattaaccttcataattttcaacatgaatcccaggttaattaaagatttgaaagtaaaaaggaaagtagaacacaaaag

SEQ ID NO: 872528 - DNA, 599 bp, Homo sapiens
aaaaaaatagattttcataatgttgaaacaattgactaaatcatggggtagggtgcacaattagatatctattaattattatacacacacacacagcatgagagagagagatgataaggaattggctcacacaattgtggaggctaacaagtcccaagatctgcagttggcaagctgaagacctatgagagccaatggtgcagtttcagtcccaaggtcagtggacccaggaaaagctgatgtttcagctggagtccaaaggcaggataaaccaatgtcccagccataaggcaatcaagtaagaggaaattccctctcatgtaagggaggttcagactttttgttctattcaggccctccactgatgggatgagacctactcrcattaggaaggacagcctgttttactcagtctacagattcaaatgttaatctcatccaaaacaccctcacatacatacctaagataatctttgaccaagtatttgggcactttatggtcagtcaggttgacacataaaattaaccttcataattttcaacatgaatcccaggttaattaaagatttgaaagtaaaaaggaaagtagaacacaaaag

SEQ ID NO: 872529 - DNA, 576 bp, Homo sapiens
aagatggtctaaccctgaaaggtcttggtacttgtgtcaccctgggtgaacgcccagcacttttactttgtagggtttccaaaaccattataagaatgcagaaaggagcaaccaatccagattgaagagtgcctccctgaaagacataacctccgagctgagtctcaaagcacatgtaggggttactaaaggaaaaaagcagggggaagggagaagaggactagtggaagacacagtctaagtagaggcaatgacatatttaaaggtacatgcacatgaaagaygatgttttatttggagacttaaaacttatagaaaaagaataacaaagaataagctttctttccatggcatccatctgtcacatagggcgtatactttgtgtgcctcacttcctgtcattagattacaagctctaaggggacaaaaagtgcctcacttcttgccattagattacaagctccaaggggacctctcctatcttcatattccacagagcccttcacagattaggtgctcaataaatttgatgaataggacaatcagcagtatgatttaaacaagtcattaactcca

SEQ ID NO: 872530 - DNA, 576 bp, Homo sapiens
aagatggtctaaccctgaaaggtcttggtacttgtgtcaccctgggtgaacgcccagcacttttactttgtagggtttccaaaaccattataagaatgcagaaaggagcaaccaatccagattgaagagtgcctccctgaaagacataacctccgagctgagtctcaaagcacatgtaggggttactaaaggaaaaaagcagggggaagggagaagaggactagtggaagacacagtctaagtagaggcaatgacatatttaaaggtacatgcacatgaaagatgatgttttatttggagacttaaaacttatagaaaragaataacaaagaataagctttctttccatggcatccatctgtcacatagggcgtatactttgtgtgcctcacttcctgtcattagattacaagctctaaggggacaaaaagtgcctcacttcttgccattagattacaagctccaaggggacctctcctatcttcatattccacagagcccttcacagattaggtgctcaataaatttgatgaataggacaatcagcagtatgatttaaacaagtcattaactcca

SEQ ID NO: 872531 - DNA, 576 bp, Homo sapiens
aagatggtctaaccctgaaaggtcttggtacttgtgtcaccctgggtgaacgcccagcacttttactttgtagggtttccaaaaccattataagaatgcagaaaggagcaaccaatccagattgaagagtgcctccctgaaagacataacctccgagctgagtctcaaagcacatgtaggggttactaaaggaaaaaagcagggggaagggagaagaggactagtggaagacacagtctaagtagaggcaatgacatatttaaaggtacatgcacatgaaagatgatgttttatttggagacttaaaacttatagaaaaagaataacaaagaataagctttctttccatggcatccatctgtcacatagggcgtatactttgtgtgcctcacttcytgtcattagattacaagctctaaggggacaaaaagtgcctcacttcttgccattagattacaagctccaaggggacctctcctatcttcatattccacagagcccttcacagattaggtgctcaataaatttgatgaataggacaatcagcagtatgatttaaacaagtcattaactcca

SEQ ID NO: 872532 - DNA, 654 bp, Homo sapiens
tatgttgtttagcatatcagactgtgatacactagaaacagacagcaaggaaacctaaatatgactggttcaaactttaaatatttttctaagcccttttgtttcccaaaaccattatctggaatttgaattataatctagatttcatgacaaaatctcaggcagaattcatgaaatgccaaatmtgctggagtccctgatgactaattattaacttctcaacttagcaaaatattttgctatcttattagtttcctagggttttaataatacgtcatcatgaacttagcttaaaacaacagaaatttataccctgatagttcaggaggctagaagttcaaaatcaagccatgagcagggttggttccttctagaaacgccaagggaaaaattagtcccatctctcctctagcttatggtgacccctgacaatctttcgtgttgcttggtgttacttcactccaatctttgcctttgtctttatatagttctgtctgtctctgtgtgtcctttcctcttcttataaagaaaccaattattagatttaaagtctaccctaatccagtgtgatctcatcttgttttctctatttatctagcaaaaaatgacttcattttaacttaactaaatatatcagcaaaaactatttccaga

SEQ ID NO: 872533 - DNA, 680 bp, Homo sapiens
gcagacaattagccctcctgtggttgctcagttaaggactggcataggatttctgcattcttctataattcatagtgcaaaatttatggccattgtgttctgcctagaatcagaaaatttcctgctgtggtttacaaggagggttattaaccatggtgatgcctgattagtttcattgaattaataaaatgaacaagtctcaatgctttagcaactttaatacacacacaatacattacaatcccgcaagggcagggcaaggacagatgctaccatccactgagccayagcattgatctttattctgctttgaccaccaggctttactactatcctgagctccagacatgtgttcccaactgcctcctcaattaaatgtgtcccagcaaagactacacttaattttttattaatgtaaaaaatataggctgagcacagtggctcaggcctataatcccagtactttgggaggccgaggcgggtggatcacctgaggtcaggagtttgagaccagcccgaccaacatggagaaaccccatctctactaaaaatacaaaattagccaggtgtggcacatgcctgtattcccagctgctcgggaggctgaggcaggagaatagcttgaatcagggaggtggagcttgcggtgagccaagattgcacaccattgcactccaccc

SEQ ID NO: 872534 - DNA, 572 bp, Homo sapiens
ggctgtggtggtcacactttccctctcctcaccctccccattcaatctataatgtcctctaagtttcatattctgaacaatacttgactatatctttcctatccattcccattgccatgaaccttgttcttgaatgtactaaattttacctggactgaagcaattgtttcttaatttttacctttacctattttaaacttacataggtttacattgctaagtgttagaatttttactttttgctaatgctttaaatatattttcttagttaaaaaaaaaaatcyggcggtaggagggacccttcctatattaacctgtatcaaccacacagcttaataggattaagaattagaaatgtctatagtaacagcactttactattttgggaaattctcacccagtgaggttaagttacaaataatgttattggttgacaaagaaacttcctaaaaatacatttatctgaacaacagactgcacaaccagctccctcttcagacaatagattactcatcaggatttatagccctcgtggtacaatataaagtatatttagcctttgccccatgttg

SEQ ID NO: 872535 - DNA, 621 bp, Homo sapiens
caatattatattgtaattgctcctatggatgtggtttttcaatagaattaataagtactttaaaaaagtttcaatttcaatgatgtatatgattgatttttcttagaaaaagcatacatatattgataggtaataatatgaaaatcttctaaaggcattacaggaacacgaaaatgtaattaaatactcactaatttgtaatgttttatgtaagtggaacacatttaactgaaaattgcttttatataatactcaaacgmgactaaaaactttttaaccagcggagtaagtcttcaaattgataatctggactatattggaggagaaatttcaggcactcaaatatttgaaatgctacaaaatatttatataaactattatttaacaatttctgtttgtagagtgctatacagtaatcaatataaatgacatctcaagtctttctatagctttgaccacatttacctcctaattttaattattaatatgttggagcagtgcatacaactagattctgatcttcctttttaatgagtacaaatatgtgctttgagacagcattaaagaaagagcaccttgtaaaaattcaatgccaagagacaagatattcttgattctgaa

SEQ ID NO: 872536 - DNA, 639 bp, Homo sapiens
gccttgcctggctaagttttgttatattttgtacagatagagcctcgttgtgttgtctcctgttctcaaactcctggcctcaagggatcctcctgccttggcctcccaaaatgataggatcacaggcatgagccactgtgcctggctggggttgccagtcttgaatgggagacagacatggtgcaggtgaaagggaggaggccgtggggagcatgcttgtgaagaaagcttctgtctgagtcaccttcccaggagaagccgactgcatttcacaccacgtggtccagacacatcacacattgccacttggattctcatattagacctgaatttaaatctccattagagtggggcttccgtgttccttgcatgcatgacctcgggcaagttacttgattgccttccttaccctgaaccctggtgtcggcatctgtagaatggggatctcacactggataggatccagtgattgatgaggtggctgcccagcacacactaggcctcctttctgcacttctttcaaaggtcctggccagatgccaccttcttcacaaatgcctggcaggaattactcctcacttccatgggccaccatggccctccttctgtaaagctyttttggtccttgtctgtttctgc

SEQ ID NO: 872537 - DNA, 477 bp, Homo sapiens
gcatgtcatacatgatccagtttcctcctgttggtaggagcaaatgtgtaaatggcagtcaatgctagcccaggagggagatgaggaactctgacttgatcaagcactcatgatcattgcctttttctcactaatttcttcatttgtcaccaagtgtctttttaatgtattttgtacattcctttccagtcttttttatatgcaaattttttattagtttgtctttatrttttgggcagccatgctcattataatatcaaagattgcttcctttcctcagtacacctagcacaggcccttcctcagctactactatacagcccttacccatctattttttttttttctaatatactttcagccaggctcagtgactcatgcctgtaatcccagcactttgggaggctgagacaggcggagcacttgaggccaggagtttaagaccagcctgaccagcacacctgtaatcccaggtac

SEQ ID NO: 872538 - DNA, 477 bp, Homo sapiens
gcatgtcatacatgatccagtttcctcctgttggtaggagcaaatgtgtaaatggcagtcaatgctagcccaggagggagatgaggaactctgacttgatcaagcactcatgatcattgcctttttctcactaatttcttcatttgtcaccaagtgtctttttaatgtattttgtacattcctttccagtcttttttatatgcaaattttttattagtttgtctttatattttgggcagccatgctcattataatatcaaagattgcttcctttcctcagtacacctagcacaggcccttcctcagctactactatasagcccttacccatctattttttttttttctaatatactttcagccaggctcagtgactcatgcctgtaatcccagcactttgggaggctgagacaggcggagcacttgaggccaggagtttaagaccagcctgaccagcacacctgtaatcccaggtac

SEQ ID NO: 872539 - DNA, 568 bp, Homo sapiens
cgtgctgggagaaccactactctcctcaaagttgtcagacagggacatttaagtctgcagaggttactgctgactttttgtgtgtctgtgccctgcccccagaggtggagcctacagaggcaggcaggcctcctggagctgttgtgggctccacccagttccagctgcctggctgctttgtttacctaagaaagcctgggcaatgrcgggtcccactccaccagcctcgctgctgccttgcagtttgatctcagagtgctgtgctagcaatcagcaagactccattggcataagaccctctgagccaggtgcgggacacaatctcctggtgtgttgttttccaagcctgttggaaaagtacagtattaggttgagagtgaccctattttccaggtgcagtctgtcacccctttctttgactaggaaagggaactccctgaccccttgtgctttctgagtgaggcaatgcctcgccctgcttcggctcccacatggtgcactgcatccactgtcctgcacccactgtttggcactcccttagtgagatgaacccagtacctcagatgga

SEQ ID NO: 872540 - DNA, 568 bp, Homo sapiens
cgtgctgggagaaccactactctcctcaaagttgtcagacagggacatttaagtctgcagaggttactgctgactttttgtgtgtctgtgccctgcccccagaggtggagcctacagaggcaggcaggcctcctggagctgttgtgggctccacccagttccagctgcctggctgctttgtttacctaagaaagcctgggcaatgacgggtcccactccaccagcctcgctgctgccttgcagtttgatctcagagtgctgtgctagcaatcagcaagactccattggcataagaccctctgagccaggtgcgggacacaatctcctggtgtgytgttttccaagcctgttggaaaagtacagtattaggttgagagtgaccctattttccaggtgcagtctgtcacccctttctttgactaggaaagggaactccctgaccccttgtgctttctgagtgaggcaatgcctcgccctgcttcggctcccacatggtgcactgcatccactgtcctgcacccactgtttggcactcccttagtgagatgaacccagtacctcagatgga

SEQ ID NO: 872541 - DNA, 492 bp, Homo sapiens
cattctaaccatatttttgtactcatagaagttcaccatgtgaatttggggagacacaaacatttagaccatagtaggtatttatgtgccaagtactcatcttagtcctaggaatataacgggagacaagctaaacaaggtccctgcattcatggaatttacatttcactgggggaaattaataggataatacatatctttttttttttttgagatggagtctctctctggcycccaggctggagtgcagtggcgcgatctcagctcactgcaagctctgcctcctgggttcacaccattctcccgcctcagcctcccgagtagctgggactacaggcgcccgccactgcaccctgctaattttttgtatttttagtagagacgaggtttcaccgtgttaaccaggatggtctcgatctcctgacctcgtgatctgcccgacttggcctcccaaagtgctgggattacaggtgtgaaccaccacgcctggcc

SEQ ID NO: 872542 - DNA, 492 bp, Homo sapiens
cattctaaccatatttttgtactcatagaagttcaccatgtgaatttggggagacacaaacatttagaccatagtaggtatttatgtgccaagtactcatcttagtcctaggaatataacgggagacaagctaaacaaggtccctgcattcatggaatttacatttcactgggggaaattaataggataatacatatctttttttttttttgagatggagtctctctctggctcccaggctggagtgcagtggcgcgatctcagctcactgcaagctctgcctcctgggttcacaccattctcccgcctcagcctcccgagtagctgggactacaggcgcccgccactgcacccygctaattttttgtatttttagtagagacgaggtttcaccgtgttaaccaggatggtctcgatctcctgacctcgtgatctgcccgacttggcctcccaaagtgctgggattacaggtgtgaaccaccacgcctggcc

SEQ ID NO: 872543 - DNA, 618 bp, Homo sapiens
tggagctagattgcaaaagccttgggaaagcaggaagagttttgagcagtatttctgagatggagtctcctgtagtcaacaactgattgcatatggggtttgacagcgaggagttgggggtaacttctagccttctggcattgacgacgtggcaaatggtgtggcacttcaccaatatgaagtttacaggaaggaaccaggttggggtggaggaggagggacattagtatgtgattttttgaggggaaagatattgaatttttgttcatctctgtctattgcattctatccatctttggcatgccactgtgttttgaagcaaacactcaaaacacagtcyttaaggcactgtgagaattgcacatttcatgggaggcctctttggatttcatcaagaggaccaccctcatcaggcagtgtggggacttagatcctaaaactaatcagtgtagatggtttggtccctacagttacaacaggaataagagaacaaatggaatagaaatcccctccctcctcctctgtgttccattctcgctcattttcatgacaatctgaacttgcagtggctctcaggggatggtttagaaggaggattttctttgcccctcttttccc

SEQ ID NO: 872544 - DNA, 608 bp, Homo sapiens
ctcaaaatagcagaaagcttccttatgctgataaacagtatctacataaaatctacatctgacattatactaaatggtggaaaccgaaatgccttctctctaagactgggacaaagtaaggatgtttattcttataatttctattcaataccatactagaagttctagccagtacaataagacaaggaaaagaaattaaaatatgtattgaaaagaaaawaaaaactctctcaattgcaaatggcatgattgtctatgtataaaattagaaagaatctatagtctcctagaattaataagtgagtttagcaaggttatagaacacatgctcaatataaaaaaagtcaagtgtatttctatatgctactgtatagcaataaacagttggaaatcaaaattatgaaacagttccctttaacatagaaccaaaaaatgaaattcatagatataaatctaacaaaaatatattcagattgtctggtgaaaactataaaacatccatgaaataaataaatggaaatatgtactgtgtttgtttatgaattggaagagtcaatattgttaaaatgtcaattctctcataattgtcctataaattcaatgtaatc

SEQ ID NO: 872545 - DNA, 575 bp, Homo sapiens
gcatagtgctaagttatctcttattatttctatctaatcctgacagcaatcctatgaggtagacttatccccactttacaaatgagaaaactgaggcccaaagaagtaacgaagtttcataacataaaacatcaagtaaagaactaaactggaatccaattccagtctctctgactccagatcctgtactcttaayctctaatcctttaaagtccttcaaatttatttcatttgatcctcaacaacatcccttcgcaaatcatttattctccttaaagattatcttcttcccagcaaatccttgccaaattcttcaagaagccttccctgactacctcgccccaccatttaattatcctcagcagatgttttcttgtcacaaatcgtatattgccccacaattattctccaagatgttttagatgaatattctttatcttcccccaccccacagtcttattcattcattcacaagctaaaggaacacagatttaatgagcacctattatatgcccagcaattagcatgatgggtcactactttaaggagctcatagcaaattccctgagagcaga

SEQ ID NO: 872546 - DNA, 529 bp, Homo sapiens
tggctattattaaaaagtcaaaaaaacaaacagacgctaagtgaggctgtagagaaaatgacatgtttatgcactattggtgagaatgtaaattagttcagtcactttgaaaagtagtttggagatttctcaaagaacttaaaacagaaccaccatttgacccatcgattccattactgggtagastatatatccaaaagaaaataaattgttctgccaaaagacacatgcacttgcatgttcattgcagcactaatcacaatagcaaaaacatgcaatcaacctaggtgcctattaccatggattagataaagaaaaatatggtacatatatactatggaatactatgcagtcattaaaaacatcctgaaattatctcctttgcagcaacatggataaagctggaggccattatcctgaacaaactaatgcaggaacagaaaaccaaataccgcatgtgctcacttataagtgggagccaaacactgggtcctcatggatccaaacatgtgaacaacagacactggag

SEQ ID NO: 872547 - DNA, 633 bp, Homo sapiens
aatttatcttctgaatttgcacatctctttttaactttttttttttattttaagttccggggtacaagtgcaggatgtacaggtctgttacataggtaaagatgtgtcatggtggtttgctgcacctatcaacccaatacctaggtattaagcccaggatggattagctatttttcctgatgctcycccttcccccttcccctcactcctcacaggctctagtgtgtgttgttcccctccctgtgtccatgtgttttcattgttcagctcccacttataagtgagaatatgcgttgtttgtttttctgttcctgcattagtttgctgaggctaatggcttccagctccatccatgtacatcttctaaagtttcctttagttacagtctgctattggcaaaatacttaggttttttgtttgtctgaaaatatctttactttacccttgttccaaaaagatcttttccctaggtatagaactctaggtttgcagatgttttgtctcagcacaataaagatatctttccaccatgtatttactgatccataatataaatacaatacatagtgaagaaggttatttctgcatctgtggattagcacttttcatcagttacacaatattctgtcttta

SEQ ID NO: 872548 - DNA, 642 bp, Homo sapiens
ccagattcatttgtggagagaatggtaattgcaaggaatcaaagataatgggaaaattgcaagttaaattaatgggatgtataaggggtttcctacaggataagaatgacagattagaataaatattaggacaaactcaaagttaagcaaaaatgcctmttcctgttccctattgatctgtgttcattcctgacattaaaacttgtttaaaattcactttattcaataagcctcttcagaaaaatcagagaatcatgacagctagatatttcagataattcatccagccattcacaccttgaatcagttcaacagcatcccagccaactgggtgcctggcttatgtgtaaaacacctccagagatattcactgtgtcctgaagcaacatatgccacatttggtgaatttcatacatcagaaaagccttctttatatgaagctgaaatggatcttctatagcttcttcccactgagcctattctaccctcttagggtatcaaggctgatgcacacctgttctgctcagttctgtatgccttactttctcatactactgtattaaacaaattttgacactaacattatatactgtgctattataaattcatctcccctttcatcctcacagtggtaacagagtc

SEQ ID NO: 872549 - DNA, 575 bp, Homo sapiens
gtatcagctgtattgatcctgaggttggtgaatgaaagatgccctcactttaccactaatgctgattgcactaaccttgcactaatctttctaggtgagagttcagattctctgagagccaagctgtatcctcagagaaaaaaagatgaggagaatttaaagcacttggccaagggcctgggtttttcctcttctctgctgaccccaacatcaccaacatagaacatgtcagctccttcagttattagacagccagctctgaaaggtgcagaaactaaaaagcatttctaactataggagtctcagagtatttcagagcttcatgtcaccagaaacactatttgcttaggctaccccaaggagagccacttgattttgcaagaggctatctttttcartgggtcctgtcctttctctaccctttgtcacaaaccaccatcaattcctatattataattcctgtgtctctaaatcaatttctctctctctccctccctccttctctttctgcctccttctttacaaagcatgctgtctttcaattaacatagtgatgacctattgtcacccgttac

SEQ ID NO: 872550 - DNA, 614 bp, Homo sapiens
agtaagttagaagaggatagagtcagtgaattcttaattggttgaattatccagtataaattatggattaaaatcaactggagtgttgatggtctctgtccttggtcctgacctattcactgccaccaactacttgtattattaagacttctagaagtggtttgtatttaggagtggatctgagtcatctgagaagaatgtaaaaaaatagttgtttggatgtgccattggagattatgattcagtaggcataagatgggatgtgggacgtgggatgtgctctatgttaaagaagttaacctcatcaatctagtaaatgaaattaggttacagggtaaatgaatatcctcggtggctgaaatatggtctcaagtgacctgaataaattgaaataggggccaagtttaataaatggcattaagaataragataaatgaaaaggttgactttggagagtctaaaaacaacctgcacaagtccacgaaaagggagtgatcacttatgatcagtaattacagaaactatttagggaggattagctggctgcagggtacacacataccagcagagggctgtggctttccaacagagctaatgtcagctgaagtgcagga

SEQ ID NO: 872551 - DNA, 563 bp, Homo sapiens
gaaagaaataaagggtattcaattaggaaaagaggaagtcaaattgtacctgtttgcagatgataagattgtatatttagaaaaccccattgtctcagcccaaaatctccttaagctgagaagcaacttcagcaaagtctcaagatacaaaatcaatgtacaaaaatcacaagcattcttatacaccaataacagacaaacagagagccaaatcatgagtgaactcccattcacaattgcttcaaagagaataaaatgcctaggaatccaacttacaagggatgtgaaggacctcttcaaggagaactacaaaccactgctcaacgaaataaaagaggacacaaacaaatggaagaacattccatgctcatgggtaggaagaatcaatatcgtgaaaacggccatactgcccarggtaatttatagattcaatgccatccccatcaagctaccaatgactttcttcacagaactggaaaaaactgctttaaagattcttttactttcaacatgcctacatttttatagctgaagtgaatttcttttagatagcatattgttgg

SEQ ID NO: 872552 - DNA, 598 bp, Homo sapiens
ttatatgcattatttctccagtatctacattgtgctttacaaactgtatgctcatcacaaaagttgcaaatgaaaactctatattcctgtaggcactaatgcagaacattgctgcacaccctccatcagtgttgggtgtcatcctattcctccatcaggaagcttttcctaacattctggccaagcagggacatttcaagaggctgtttctcctcacttactgttgcaatagacctaattgggctggtaacaacagtggactcccttggtgacagaagagtggtaaacacccaagaggaacagttacaatttcaaacttgtaagagctgagaactgctaatttcctgccagcaagactgacatggctgctttttagttgacctcttcaagggaaacctcagaaggcccattgggagctttataatgtacggwgcaaagaggccctgaactgattttgttcaaggggaattttatttgtgtttatattggctactcatgtggagaggtgtttgtaaacacacagagaacttctgtgcaaagacatgaggttataatttcagactttactccctaaaggaggaacagagagcattatctg

SEQ ID NO: 872553 - DNA, 596 bp, Homo sapiens
aacaaaactgcaacagatgaaatgcaagcagaggaaagaccataaaagagaactaagctggtttgtagatgctcaacatccattggagtataaatacactatatataatggagaaatgttaaaaatgaaaaccattgtctttttttttttttttttttttttactgtgcatggaagtgagatgtaaagaaaaaaaattttccttttctgtgaatattgcttgagatgaagctgatgcagctgtgatgarattgtctgctatgattgttggggtcacaggactgacttccatgggtgccaagtgtacttgcccctgaaggagataaatttttcccactgccagttttctggaacagaaaatgaggatggaaaggcaggcctcgggttggttaaagaaggaactcctttctttgtaatgttgtcttgagtctactgtaggtattctcatatgcacttgcaacagtgctgggaagtaattttctgccacaaggaagcaggcttgcagctacacagggaagcaaactgcaaaagtcccataataataatcagggagcctgtaaaagcccaatgagactaattcaggaagcatggattcag

SEQ ID NO: 872554 - DNA, 617 bp, Homo sapiens
ctgttgcttacgcttaacctttttggcttgttctcttttctcctgggccaggacaacacacccttcagttttgtatcctaccatctttcagctttcctgtatttgttgcttccttcttttaaaatttattttcgttcttgaatttttttaagcaattgaatgtcaatagctttaggggtaccagtggtttttggttatatggatgaagtgtattgtggtgaagactaggatttaatgcactcatcacctagtgtacccaataggtagtttttcatccctcacaccccttccttcctcccccattctgagtctgcaatgtccattataccactctgtatgcctttgtgtccccataagcttagctcctgcttattagcgagaacatgtagtatctggtttttgattctcaagttacttcacatagaataatggcctccrgttccatccaagttgctgtgaaagacattaattcatttttaaatgtccaagcagtatttcatagtgtatatacaccatattttctttatccactcattggctgatacacagacacttaaattggttccatatctttgcaattgtgaattacattacaataaacatatgtgttcatgtgt

SEQ ID NO: 872555 - DNA, 642 bp, Homo sapiens
tttaaagtaggtgctggagttttccacttggttaaccagaggaagaatactccaggaagaagggagagcgagcctgaagcttcatgagggagggggaatagtgtgagatgaagtcacaggaagctagattaggaacatcctcgaggccaatgcattgaattaggttttgattctgagtgagaaaaggagccatcagtgggttggagaaaggtagtgaaataatcgaatttatctactgaagagatgaccctggccgatgtgttgagaataaactgtagakggtaaggtggaagcagggagatataggagggatctacacaagacagagatgctggagacctaccccagggtgacggctgtggagtaggtgagaagttgatcagattctgggcgtagtttgaagttagaaccaataggctcttttggcagcctggatatgaggagcaagagaaagagaccagtcagatataactcataggtttttggtttgggcagtggaaagatggaattgccaggaatttacttgggctaagctgcagaatgagtggtttggtggaaatgagcagttcagtcatagatggctgaggttgagttatctaccgtttgaccatatacgttgtgatttagaggatgcttctgagc

SEQ ID NO: 872556 - DNA, 688 bp, Homo sapiens
aaatttccatttgcaggcacatcccttgtgctacatgcacacttcatgcaagaagaccttggcttcccaatgtattagcactttagaaatacactttgttcttttgttattttcaatttaaggtactactttttgcatttagcagagtctggawtaagtgtaactggattagtcaattttactatagattactgttcaatttaagtcagttttcttttgcctgtgctctggaattaacataatgaaataagatctggcagtgaaaggaaaacaaaggccattttccaggttatatatgtacttttttatttttgaaacacacaaagtttcaattctgtcatgaaaattagtgctctcttatgacctcaaacaaaatacaatttcatattcttttttatcacacagcctgggaaatgaagttggctttaaccagaggaagctagtacatgccaatgaactttacttgattcatcaataaacattttaaaaactggtgggtttttgaatggcgaggacataagaagagaaccttggatggaggtttaagcagcttccatgaatggacactctgcggtatttaattggggtggctgaattgtaatgtgtaaattgccacacttgaattgaagcatggatactttatgaagccttggaaaacacacacctaattacatacataagcctttta

SEQ ID NO: 872557 - DNA, 679 bp, Homo sapiens
caagatgttagcccgttggcacctgatagaccgggcaggtctgtaagtgcaatacgttgctttgtaggtaagaaaaataaagcccagccaggtgccaatgtgacatggagttgggcctccagcccaggtctctgtgccccacatacatggtttaactatctgtattcactgtgcctttttactatctgtgcttctgatgctgtgacacctttgggtcttgctgaccctggagggactgcccttctcarggagaggggtttcctagagctcttaaaggactcacttgcaagttcacctttcttttcttttcttttttattataagttctagggtacatgtgcacaacgtgcaggtttgtacatatgtatacatgtgccaggttggtgtgctgcacccattaactcgtcatttacattaggtgtatctcctaatgctatccctccccactcctgccaccccatgacaggccccggtgtgtggaactcaaacaaatttgtaaaaaaaaagcaaattcacctttgaaatgcaaaatcatcagtacagagctcctaccccagcatctcctctgtggggctctcacactctgggctactatcctcctgccctgaccactcaagggctaggtaccagacatctagggacagccactgctccaaatgtgacctggagcagaccaaat

SEQ ID NO: 872558 - DNA, 679 bp, Homo sapiens
caagatgttagcccgttggcacctgatagaccgggcaggtctgtaagtgcaatacgttgctttgtaggtaagaaaaataaagcccagccaggtgccaatgtgacatggagttgggcctccagcccaggtctctgtgccccacatacatggtttaactatctgtattcactgtgcctttttactatctgtgcttctgatgctgtgacacctttgggtcttgctgaccctggagggactgcccttctcagggagaggggkttcctagagctcttaaaggactcacttgcaagttcacctttcttttcttttcttttttattataagttctagggtacatgtgcacaacgtgcaggtttgtacatatgtatacatgtgccaggttggtgtgctgcacccattaactcgtcatttacattaggtgtatctcctaatgctatccctccccactcctgccaccccatgacaggccccggtgtgtggaactcaaacaaatttgtaaaaaaaaagcaaattcacctttgaaatgcaaaatcatcagtacagagctcctaccccagcatctcctctgtggggctctcacactctgggctactatcctcctgccctgaccactcaagggctaggtaccagacatctagggacagccactgctccaaatgtgacctggagcagaccaaat

SEQ ID NO: 872559 - DNA, 663 bp, Homo sapiens
gaattgtacagtataaatagaaagcggtgacaaaagtaattcataccaatgcagttttttaaaaatatcccaacctgcctacacaactacttcctctctctgagatttatctcaaaagtggaattagattcctgtcttakctgtaaaaataaagccacaaagggcatcatgcatgagagagtaaatgtgaaactctgtgggggaaaatggaaacttcagatattattagggcctagctgccaatggtgattctctcaagattttattggcaggttgagtgaaagtgccagagtgtggatgcacaaattgtagtttaattggtgtgatttatagctaatggtgcatcagaaggaggaactaggaactgtgccttctaatttaaggcatagtacctaagactgcatccactaggtaagaaaaccttccttggcaaactcaaatattaaatcttcgctgaatttgtcttgttcttttatataaaaatcatggagccaggagctaaaataatatctaagtttcctctttgcctgacgccatccatgcaaaatgtgacttgcttcttcagcagcagcatgaaaacaaactaatacaccactattcctaggtaagtagagccacaatgggaagaccactaagggaatatggaggctcacagaggctagt

SEQ ID NO: 872560 - DNA, 676 bp, Homo sapiens
tcagattacagccaatcagggaagctcgcccagtgctggtgtccagaattttaagtatgacttcattacctatgcatgattgagtcattggccatatgactcagtcttcagcccttctcccatcccaagcagtcaggctcaaagccccaaccctcttatcacatggttgttctttctagcttgaccagatcccatcctgagtcatctccttaacmcaaactaatctaggagcccaccatgagtcaccttgtcagtataaactttcaagtgtgagccgaagggtcaccatgaataacgaagacccttctatcacttggcaaaacccaaagatttagaggctacctacctctcagaatctgataataaaagccagacaaatactgtttattgtacaagtcctcttctcagagtctcacatggttaaaattaaggtgttgggtagctgtgtcttcattgggtggctggattaatagagcttattttaagaagactcaggttgttggaagaactcatttctttgtggttatgtaattgaggtcctaattttcttgctagttattggctaaaggccactctcagcatctagtggttactcttgggtcctttccacatgacccatgccatttaatatgctccgtcaagtccagaaagaaagtctatgtgtatttgagtctgt

SEQ ID NO: 872561 - DNA, 676 bp, Homo sapiens
tcagattacagccaatcagggaagctcgcccagtgctggtgtccagaattttaagtatgacttcattacctatgcatgattgagtcattggccatatgactcagtcttcagcccttctcccatcccaagcagtcaggctcaaagccccaaccctcttatcacatggttgttctttctagcttgaccagatcccatcctgagtcatctccttaacacaaactaatctaggagcccaccatgagtcaccttgtcagtataaactttcaagtgtgagccgaagggtcaccatgaataacgaagacccttctatcacttggcaaaacccaaagatttagaggctacctacctctcagaatctgataataaaagccagacaaatactgtttattgtacaagtcctcttctcagagtctcacatggttaaaattaaggtgttgggtagctgtgtcttcaytgggtggctggattaatagagcttattttaagaagactcaggttgttggaagaactcatttctttgtggttatgtaattgaggtcctaattttcttgctagttattggctaaaggccactctcagcatctagtggttactcttgggtcctttccacatgacccatgccatttaatatgctccgtcaagtccagaaagaaagtctatgtgtatttgagtctgt

SEQ ID NO: 872562 - DNA, 663 bp, Homo sapiens
ctagtgtcaaagggtggtgctgtaagttataatgctttaaaaccaaattggctcctaagaaatatgtcattagattatcaagttgttgataaaatactggtggtaacatttattaagctcggaacataaacttatgaatcttatttttacagctttttccttccttccatttattgtgtaggcagtctcttcttgccatcatattttaagtaacaaattggaatacactatttattgactcagatgttctcagtgagtgctacagctattcccacaaaagcacgttttccagagaatctatgttaattctttatacasctcagatatttagatagtccagcaaaataaccacatcaaacgatcccatgactgatggatgaatttaaattataagattgctttcataactactgaattcttctatctggatatgaaaatagatattttctataaatcagagttagtatacatttcttagccaaatggctttccatttgttctgtgtcatctacaaataacatgttatcaaaaatctcactctactgaaatgaaagttttatgtctttagagagaattttttaaaaaatatcagtcaaagtacaaactccatgttaaaataaaatgttgttgaacaacaaatatttcttattataatagtaattt

SEQ ID NO: 872563 - DNA, 565 bp, Homo sapiens
agggttttttaacatgctacaattagttttttatccagtactcatcaattgagatcaatttacaaagtagccggacttggagtatcattccatactgtctctttagtttgtatcattacattcttattcatcatctaccctgtgacaataacggkgctgaagtctagagtataaaaataactaagacattttcactatcaaaatagcgtgagaactagtttggggaggcatgcataaacagataattttaaattaataaagtaaacatcgtgtagaaatagaaacaagatgcaatggagcatagaagaggaacctaaggaattggcctgctccattaagtgtgtgagtgtatgtgtgtgagcttcaaagaagagtttctacagcagattcttcctgggtttgatccttgaagtaaagaagaacatatgcatgtaaagaaaaggagtgaaggaattgctaagggagggagacgcatgagtgaagacatgggactgttaaattgtctcattaaaaactgaagttacagcagcttagtaatactagagcataaatttcaagacagtgg

SEQ ID NO: 872564 - DNA, 565 bp, Homo sapiens
agggttttttaacatgctacaattagttttttatccagtactcatcaattgagatcaatttacaaagtagccggacttggagtatcattccatactgtctctttagtttgtatcattacattcttattcatcatctaccctgtgacaataacggtgctgaagtctagagtataaaaataactaagacattttcactatcaaaatagcrtgagaactagtttggggaggcatgcataaacagataattttaaattaataaagtaaacatcgtgtagaaatagaaacaagatgcaatggagcatagaagaggaacctaaggaattggcctgctccattaagtgtgtgagtgtatgtgtgtgagcttcaaagaagagtttctacagcagattcttcctgggtttgatccttgaagtaaagaagaacatatgcatgtaaagaaaaggagtgaaggaattgctaagggagggagacgcatgagtgaagacatgggactgttaaattgtctcattaaaaactgaagttacagcagcttagtaatactagagcataaatttcaagacagtgg

SEQ ID NO: 872565 - DNA, 565 bp, Homo sapiens
agggttttttaacatgctacaattagttttttatccagtactcatcaattgagatcaatttacaaagtagccggacttggagtatcattccatactgtctctttagtttgtatcattacattcttattcatcatctaccctgtgacaataacggtgctgaagtctagagtataaaaataactaagacattttcactatcaaaatagcgtgagaactagtttggggaggcatgcataaacagataattttaaattaataaagtaaacatcgtgtagaaatagaaacaagatgcaatggagcayagaagaggaacctaaggaattggcctgctccattaagtgtgtgagtgtatgtgtgtgagcttcaaagaagagtttctacagcagattcttcctgggtttgatccttgaagtaaagaagaacatatgcatgtaaagaaaaggagtgaaggaattgctaagggagggagacgcatgagtgaagacatgggactgttaaattgtctcattaaaaactgaagttacagcagcttagtaatactagagcataaatttcaagacagtgg

SEQ ID NO: 872566 - DNA, 565 bp, Homo sapiens
agggttttttaacatgctacaattagttttttatccagtactcatcaattgagatcaatttacaaagtagccggacttggagtatcattccatactgtctctttagtttgtatcattacattcttattcatcatctaccctgtgacaataacggtgctgaagtctagagtataaaaataactaagacattttcactatcaaaatagcgtgagaactagtttggggaggcatgcataaacagataattttaaattaataaagtaaacatcgtgtagaaatagaaacaagatgcaatggagcatagaagaggaacctaaggaattggcctgctccattaagtgtgtgagtgtatgtgtgtgagcttcaaagaagagtttctacagcagattcttcctgggtttgatccttgaartaaagaagaacatatgcatgtaaagaaaaggagtgaaggaattgctaagggagggagacgcatgagtgaagacatgggactgttaaattgtctcattaaaaactgaagttacagcagcttagtaatactagagcataaatttcaagacagtgg

SEQ ID NO: 872567 - DNA, 584 bp, Homo sapiens
taaacagagatagtttgacttcgtctctttctgtttggtttccttttatttcccactcttgcctgattgctctggccaggacttccagtactatgaatagaagcagtgagatggtacatccttgttttgttctggttttcaagggtggttgcttccagtgtttgcccaattattatgatgttggccgtgggtttgtcatgaatggctcttattattttgggtgttattattttgccagaagttccttcaatgctcagtttgttgagggtttttaacatgaaaaagtgttgaattttatcaaaagcttttccycttctattgagataattatgtggtttttgtctttagttctgcttatgtgatgaattatatgtattgatttgtgtttattgaaccaaccttgcatcccagagataaagcttccttaatcgagtggattagctttttgctttgctgctggatttggtttgctagtattttgttggggattttcgcattgattttcatcaaggatattggccttacattttcctcttttgtggtgtttctgccgggttttggtatcaggatgatgcttgactcgt

SEQ ID NO: 872568 - DNA, 594 bp, Homo sapiens
tggttgtttttggatgaagagttctgtagacgtctattaagtcctgtttattaaaatctggatgctcctgtgttgggtgcatatatatttagaatagtcaggtcttcttgttgaactgagccattaccattatgtaatggtctttgtctgttttgatctttgtttgtttaacacctgttttgtctggagttagaatagcaatccctgcgtttttctgttttctctttgtttggtagattttcccccatccctttactttgaacctataggtgtcattatatgtgagatatatggggctcttraagacagcatacaataggatcttgtttctttatccaacctgccattctgtgccttttaattggagtatttagcctgtttacattcaaggttagtattaatatgtatggatttgatcctgtcatcatattgttagctggttattaagcagacttgtttgtgtggttgctttatagtgtcattgttctgtgtacttatgtgtgtttttgtagtggccagtaatagtcttttctttccatatttagcactcccttcaggacctattcatcccagggatgaagccaacttgatagt

SEQ ID NO: 872569 - DNA, 594 bp, Homo sapiens
tggttgtttttggatgaagagttctgtagacgtctattaagtcctgtttattaaaatctggatgctcctgtgttgggtgcatatatatttagaatagtcaggtcttcttgttgaactgagccattaccattatgtaatggtctttgtctgttttgatctttgtttgtttaacacctgttttgtctggagttagaatagcaatccctgcgtttttctgttttctctttgtttggtagattttcccccatccctttactttgaacctataggtgtcattatatgtgagatatatggggctcttgaagacagcatacaataggatcttgtttctttatccaacctgccattctgtgccttttaattggagtatttagcctgtttacattcaaggttagtattaatatgtatggatttgatcctgtcatcatattgttagctggttattawgcagacttgtttgtgtggttgctttatagtgtcattgttctgtgtacttatgtgtgtttttgtagtggccagtaatagtcttttctttccatatttagcactcccttcaggacctattcatcccagggatgaagccaacttgatagt

SEQ ID NO: 872570 - DNA, 612 bp, Homo sapiens
gcgacctgacaatgacttcatcggatgtttttggctttgaagctagagagaccatgagcctaggaatgtgggtgtcctctagaagttgccaagacaaggaaataaattctcccttaaagcctccaagaacgaaagcagttctgctgactccttgattttagcccagtgagacccctttggggcttctaattgccagaactaaaagaaaattatttttttcctgttttaggtcagtaaaatttttaataattcactacagcagcaataagaaagtaatatgtacatatattaactgacataactttactaccatgtttcaaagagaaaaaacagacctcttkgttaccttttcaagtaatcaaaatactgactttaaaagtagtaaaggaacacttattcatctcaagtccatgtatatagcagtctgaacattttagaataatggttctcaaactttagtgggcaccagaatcacccagagggcttataaacacagattgctatatacttcacccacagagtttctgattcactgggtctggggtggggaccaggactttgcctttctaacaactccctgggtgctgctgctgctgtgggcctgaggacaac

SEQ ID NO: 872571 - DNA, 575 bp, Homo sapiens
agaattgcctggaactactggactagaacagcttcactggttgagatgatgaagatgtgaaggctggaactgccaggagccatggctgctaccattagcagttctagcctgaggccaaagctagcacagaaggcagatccatgagaaatataaagaaatgagcctctaatgtaaatatagttaacctgctggatcaagctgtttcctaagctagttgcctctggccttcttagttaagtaaatacakagattatcttttatgcttcacccagtttgagtgggattttctgttagttgcaaatgaaagcatttttaaagaatccaaaaccccatgataagacatagataaaaccaggttctcccagttaaagtgatggtaagaaacttaagagtctcacccacaatgtactttcaatttctaaaatgtggcgcagatgaactttactatctagtttaattcttttattttacaaatggccaaaccatgattcaaagtgaatattaaaatattggcaatacacgtgaaggaatacaaacatgggtacaagtatattttttaaaaaaagcagatttca

SEQ ID NO: 872572 - DNA, 617 bp, Homo sapiens
tatgcagatagaaataagttgctaaattgttggttgacatctcatattgagccattttttttaactaggcagcattttttattaagcccgccactctgattaccattattttagtaactatacctagcgcaaccagcatctttctctttcagtttttctcaccacagacttaagaatatgtccccctacaatctttatatttctttctttttcctattctcagagatgaaaaggtgagtaaatacctaaacttcatttaacaacccaattttcaccacagtgccctactttggacattatkgagcacttcctcaatattattcactcttcctttgttctgtgtgtatatttctctcaacccagaattccacagggagacaacgtaaatggaaggcaggatctggctgtatctttggtcttggaagtaataatatcaaaatcccatctcttgaatatctagtttacagtgacagcaatactagtaacagtaatggatgacatgcactgagctcctcatgagcccttctaaactttgtgtatttgctagtgcacatgaaccacagaacaatgaagagaattaagttatgaagcagaagttaaccactttgcctagtgac

SEQ ID NO: 872573 - DNA, 577 bp, Homo sapiens
gagggcactaaggcctcaagggttaagtggctggtgacaagcacagagtgagtttgcggcagagcagggcccagaatccagggctccaggtgtccagcgcaaggctcttttgtggctcagagcagcctcctcactgattgtggattggtgcccagtaaagctcaaacaaggatagcttccaagccttgctagcaggtcagcctgctggctcttccaggagacctggaagtgttctctgagcttggggatgtcccctcttcagaccaaagtcttatagccaaaactcktctatttccagggtccctcaacaaaacctggggtcagtggggttgggggaagccgggacaggcaacggctatgcctggcatcctgaagctcttgagtgaggcctgcacacagaccagggtctgctgccaggacccaggctgaaacccaaacacccctgtctcagggtgcagtaccatgggggcatctcaattcaacatggattaggcatgtagatcctcagcttcaagggttcttggtcacgttttcccacctccttccttttcttgcttccttctttttaaactatcag

SEQ ID NO: 872574 - DNA, 577 bp, Homo sapiens
gagggcactaaggcctcaagggttaagtggctggtgacaagcacagagtgagtttgcggcagagcagggcccagaatccagggctccaggtgtccagcgcaaggctcttttgtggctcagagcagcctcctcactgattgtggattggtgcccagtaaagctcaaacaaggatagcttccaagccttgctagcaggtcagcctgctggctcttccaggagacctggaagtgttctctgagcttggggatgtcccctcttcagaccaaagtcttatagccaaaactcgtctatttccagggtccctcaacaaaacctggggtcagtggggttgggggaagccrggacaggcaacggctatgcctggcatcctgaagctcttgagtgaggcctgcacacagaccagggtctgctgccaggacccaggctgaaacccaaacacccctgtctcagggtgcagtaccatgggggcatctcaattcaacatggattaggcatgtagatcctcagcttcaagggttcttggtcacgttttcccacctccttccttttcttgcttccttctttttaaactatcag

SEQ ID NO: 872575 - DNA, 577 bp, Homo sapiens
gagggcactaaggcctcaagggttaagtggctggtgacaagcacagagtgagtttgcggcagagcagggcccagaatccagggctccaggtgtccagcgcaaggctcttttgtggctcagagcagcctcctcactgattgtggattggtgcccagtaaagctcaaacaaggatagcttccaagccttgctagcaggtcagcctgctggctcttccaggagacctggaagtgttctctgagcttggggatgtcccctcttcagaccaaagtcttatagccaaaactcgtctatttccagggtccctcaacaaaacctggggtcagtggggttgggggaagccgggacaggcaacggctatgcctggcatcctgaagctcttgagtgagrcctgcacacagaccagggtctgctgccaggacccaggctgaaacccaaacacccctgtctcagggtgcagtaccatgggggcatctcaattcaacatggattaggcatgtagatcctcagcttcaagggttcttggtcacgttttcccacctccttccttttcttgcttccttctttttaaactatcag

SEQ ID NO: 872576 - DNA, 373 bp, Homo sapiens
agctcctggattcattgattttttggagggtttttcctgtctctatctccttcaattcttctctgatcttagttatttcttttcttctgctagcttttgtattagtttgctcttgcctctctagctctttttattgtgatgatagggtgttratttgagatctttctagctttctgatgtggacaattattgctatgaatttccctcttaacactgctttagttatgctccagagattctggtacactgtctctttattttcattggtttcaaagaacttcttgattctgctttaatttgattttttaaccaggagtcattcaggagcaggttgtttaatttccataaaagtgtatagttttgagtgaattct

SEQ ID NO: 872577 - DNA, 639 bp, Homo sapiens
ggttattttgcacagcagttgatgcagtttgttcatagtgtcattggtctttatattttggtgtgtttttgccgtgactagtactggttttacctttccaaatttactgtttctttcaggagctcttgcagggcaggtctggtggtaatgaaatcactcaacatttgcttgtctggaaaagattttatttctcctaaacttatgaagcttagtttgactggatataacattctgggttgaaaattcttttctttaagaaygttgaatattggcttctgatctcttctggcttgtagagtttctgctgagaggtccacagttagtctgatgggcttccctttgtaggtgacctgacctttctctctggctgcccttaacagtttttcctttattttgaccttggagaatctgatgattatgtatcttggggttgctcttctcctagagtatcttaatggtgttctctgtatttcctgaatttgtatgttggcctgttttcctaggttgtggaagttcttctggataatatctttaagtgtgttttccagcttttttccattctcctcatctctttctggtacttcaatcaatcatagatcaggtctttttatgaagtcccatatttcttggaggctttgt

SEQ ID NO: 872578 - DNA, 609 bp, Homo sapiens
tctatgcatgtttgttgttccagcaacaaaattgaagttcagaaagtgaatgtctccagttgtattccttgtaagcagaccctgagatgagggcttgcgcaaaagtgatttttttaggaagcacccctgggaaaaccaggcaggatgggtggggaagtgaaaccaagaagggaaggagggtcagggagggtatgctgcgtagacaggtggcattgagcacaacctctctctcccctctcctcatcaatgcattggtactatcttaggttcctggaaataagcatgacctcaggaagagggaagaaccccagattaaaatgccattgagtttccaaaaacctagtggatgggggtgaggtggagtttgaaacagaaattaagatgggtggacaggtaaggacagttacatttcttgcacagcctattcatgtagagtccctcyggaataactttggctcagttactcaggggagatctggagatggtgtaggtcacacctcagacaacatttcttaataattttacagaattaagtcctaatttccgaggccatccactgtggggagtgaattaatttctcttctatgcatccagaatggtatcagtcct

SEQ ID NO: 872579 - DNA, 545 bp, Homo sapiens
tacaaggagattaatgctgttttcatgcctgctaacacaacatccattctgcagcccatggatcaaggagtaattttgagtttaagtcttattatttaagaaatacattttgtaaggctgtagctgccatagagagtgattcctctgatcaatctggacaaaataaatccaaacccttctgcaaagggctcaccattctagatgccattaaaaatattcgtgattcatgagagaaggtcaaaatatcaacatgaacaggagtttggaagaagttgattacaaccctcatcaatgacttggaggaagtaactgcagatgtggtgaaaatagcraaagacttagaatcagaagtggagcctgaagatgtgactgagttgctgctagctcatgataaaagttgaatggatgaggagttgcttcttatagatgagcaaagaaagtggttttttgagatggaatctactcctggtgaagatgctgtgaacaatgttgaaatgacaacaaaggatttcaaatgttatataaacttagtcgataaagcagca

SEQ ID NO: 872580 - DNA, 505 bp, Homo sapiens
ggtttattatcttgagagtgagctcctaataaaaggataagtttggtcccctttttctctctgtcttgtatgctttctcacttctcaccatgtgatactttctgccacattaaaagccaaaagaagaccctcaccrgatatagctcctcgatcttggacttcccagcctcttgaactataagctaaataaatttctgtagtattctgttacagagtagaaaacaagctgagacactcgggttttaatacagtatttttttaagtaggtgagtctataaagataatattattttccttagtgactaataaaggttggtcatgctatataccacagacatttgttgtttcatttatccaggagaggatatggatttcattaaaatttgtttatatttatttaataggtaataaaaggaggctgtaagatattggaaaattatacaaatttttatgctgatttaaagagttgagctggaacttgaatccagatctatctaaacttata

SEQ ID NO: 872581 - DNA, 601 bp, Homo sapiens
gtaaaatgttggcttctaagtgctattgttctctaaataccaaaaaacggacatgacctagggaaaacagaaatataagggatgctaaggggctaaatgtagttctagactttgaagaaagaaggctagaagacctaacagagattcagaattgtaactttgttagaaatatggagtatacattctgctgctgtatccccttgcaatttagtttcagagatcatagtgtgagtattggttttgatgggaaaatgatttggctggggtaagagaagctaacagartatgtttaccactgctttgaagacccatctccacaaaccactagggacccatgagacatctgaccaccagaactttagagactctgtgcttctagacttccttgtccaaaagatggcacagatggatgcagactctgaagaactaggtgtttattgccagaaacaaaaatagaaagtgtcaatgagattgatgaaagataggcagaagcagctcccagaacaaagaacttcatgagccagtttcctgcattgatactttgcactgcctttttaaagcataaaataaactttatttttagaacagttttaggttcaca

SEQ ID NO: 872582 - DNA, 673 bp, Homo sapiens
aattccaccttcctttgtgctccattactcaagacactgaagactccaaaaagtaggaggaaaaatgaccacattcaaggtgagtagagctcacctctcttgctattaaaattccatcttattgctcatattgtcatatatttttctctgtcttgggaagactcaaggaggaaatgggcatttgggacctgttgtgtgccagttgcttcctttgtctcttttktgttgactttgcatttggtttttggtttgggttttgttttgttttttactgttacattatggagtagaaaaattagtaggaatgaacagtgctcccacttcttcacctccttgctctcaaattagcctgatttttcttcttgtgctgttccttgtacattcataactgtatttgtattgatgatggagttccttatgtcgagagtgctctatacaccaagataacatgtccttctggttttcttcatacttgtccatcagatagttagtccccctttctgtggaggcccacattgcgcatgttggctccatttctcttagatgctccagggaccctctgacccacttcacccacctcctgagtcctctggccccaggaatgagctattatttaaggtgtcgcaatcagcggatcacacaccaagctcctgtgtttccgtattctgtcctt

SEQ ID NO: 872583 - DNA, 673 bp, Homo sapiens
aattccaccttcctttgtgctccattactcaagacactgaagactccaaaaagtaggaggaaaaatgaccacattcaaggtgagtagagctcacctctcttgctattaaaattccatcttattgctcatattgtcatatatttttctctgtcttgggaagactcaaggaggaaatgggcatttgggacctgttgtgtgccagttgcttcctttgtctcttttgtgttgactttgcatttggtttttggtttgggttttgttttgttttttactgttacattatggagtagaaaaattagtaggaatgaacagtgctcccacttcttcacctccttgctctcaaattagcctgatttttcttcttgtgctgttccttgtacattcataactgtatttgtattgatgatggagttccttatgtcragagtgctctatacaccaagataacatgtccttctggttttcttcatacttgtccatcagatagttagtccccctttctgtggaggcccacattgcgcatgttggctccatttctcttagatgctccagggaccctctgacccacttcacccacctcctgagtcctctggccccaggaatgagctattatttaaggtgtcgcaatcagcggatcacacaccaagctcctgtgtttccgtattctgtcctt

SEQ ID NO: 872584 - DNA, 651 bp, Homo sapiens
aagttacttatcagcttaaggagcttttgggctgagacaatgcagttttctagatacaggatcatgtcatctgtaagcagagacagtttgatttgctctcttcttgtttgaatacctttctttctttctcttgtctgattgcctctgccagaagttccaatactatgttgaacaggagtggtgagagagggcatgcttgtcttgtgccsgtttcaaaggggaatgcttccagcttttgcccattcagtatgatattggctatagtattcccacttttaatcaaatgtcaattaaggtgcaggttattcagaactttctggaaaagggacagagagtttccagaaccatataagataacttccaggccattgccatggtccacagccatggcatttgtaaactgtcatggtgcctgtaagagtatctttatgctatcgaccagtggggcaactagaggttgctttcattgccatttgctggttttggctgggttcttcactgcatctgttttgaccagaattttcttcaatcagcagggtattggctagaaaacaagtcctgctagccttctatctcatccctccccttagaaattacacactcttccttaatctttaggaggtttcagaagaacagaggtccatcttctgt

SEQ ID NO: 872585 - DNA, 651 bp, Homo sapiens
aagttacttatcagcttaaggagcttttgggctgagacaatgcagttttctagatacaggatcatgtcatctgtaagcagagacagtttgatttgctctcttcttgtttgaatacctttctttctttctcttgtctgattgcctctgccagaagttccaatactatgttgaacaggagtggtgagagagggcatgcttgtcttgtgcccgtttcaaaggggaatgcttccagcttttgcccattcagtatgatattggctatagtatycccacttttaatcaaatgtcaattaaggtgcaggttattcagaactttctggaaaagggacagagagtttccagaaccatataagataacttccaggccattgccatggtccacagccatggcatttgtaaactgtcatggtgcctgtaagagtatctttatgctatcgaccagtggggcaactagaggttgctttcattgccatttgctggttttggctgggttcttcactgcatctgttttgaccagaattttcttcaatcagcagggtattggctagaaaacaagtcctgctagccttctatctcatccctccccttagaaattacacactcttccttaatctttaggaggtttcagaagaacagaggtccatcttctgt

SEQ ID NO: 872586 - DNA, 651 bp, Homo sapiens
aagttacttatcagcttaaggagcttttgggctgagacaatgcagttttctagatacaggatcatgtcatctgtaagcagagacagtttgatttgctctcttcttgtttgaatacctttctttctttctcttgtctgattgcctctgccagaagttccaatactatgttgaacaggagtggtgagagagggcatgcttgtcttgtgcccgtttcaaaggggaatgcttccagcttttgcccattcagtatgatattggctatagtattcccacttttaawcaaatgtcaattaaggtgcaggttattcagaactttctggaaaagggacagagagtttccagaaccatataagataacttccaggccattgccatggtccacagccatggcatttgtaaactgtcatggtgcctgtaagagtatctttatgctatcgaccagtggggcaactagaggttgctttcattgccatttgctggttttggctgggttcttcactgcatctgttttgaccagaattttcttcaatcagcagggtattggctagaaaacaagtcctgctagccttctatctcatccctccccttagaaattacacactcttccttaatctttaggaggtttcagaagaacagaggtccatcttctgt

SEQ ID NO: 872587 - DNA, 651 bp, Homo sapiens
aagttacttatcagcttaaggagcttttgggctgagacaatgcagttttctagatacaggatcatgtcatctgtaagcagagacagtttgatttgctctcttcttgtttgaatacctttctttctttctcttgtctgattgcctctgccagaagttccaatactatgttgaacaggagtggtgagagagggcatgcttgtcttgtgcccgtttcaaaggggaatgcttccagcttttgcccattcagtatgatattggctatagtattcccacttttaatcaaatgtcaattaaggtgcaggttattcagaactttctggaaaagggacagagagtttccagaaccatataagataacttccaggccattgccatggtccacagccatggcatttgtaaactgtcatggtgcctgtaagagtatctttatgctatcgacmagtggggcaactagaggttgctttcattgccatttgctggttttggctgggttcttcactgcatctgttttgaccagaattttcttcaatcagcagggtattggctagaaaacaagtcctgctagccttctatctcatccctccccttagaaattacacactcttccttaatctttaggaggtttcagaagaacagaggtccatcttctgt

SEQ ID NO: 872588 - DNA, 646 bp, Homo sapiens
gaggcctattttaatatggtggaaagagaaaaggttttgaagtcagattttttcacactggcttcatcacttcttatatgtaggcaaagtagtcgatttcttttactgtcagtatcctcatcaatggaaacacagagttttcatatgcacacttataatttgtttgaagagtacagtgagataacatataaaatgcctggcatcctgtgagacatgtattcagttctccatcaatggtagcccttgtggttctttgaggaagagaggggaggtgaagaagtgtatatctcccccaaaaaacatcagaggcagctttgcacagagggtgataatgcagccttttaagacggtttagactttgataagtaaacctagaatggaaagcatttccaatggaagaaatagaataatytaaagtttcaggtgagaaatcaagagaccagtgtgaagtatataggtcagtttagtaataaaagaagaaagtatggtatagatgagctgaagccccagaattatcattagtatcagcaactatttcgtagaccacctactatatgaaagataatgtcccaagttatgagggagatacagatgggaattacatgtgatattagaaaccctacaagattacaggctcattaagagg

SEQ ID NO: 872589 - DNA, 589 bp, Homo sapiens
gggcaacagagcaacaccctgtctctaaaaataaaaaataagtaaaaacgtggaaaatgtatcattaaatagacctcgaaaaagacagttgtttacaataagagagctgaaataggaaggccacacctgggaacatacaggtggctcaaattttttgccattttgtgcacatggagtgggggttactgataaatgtttgcaagtaagccgacatataaatatggaatctgtgaataatgagggccaactttgtaagaggagagggctctgtccctaaagatgcacgttgctgggagcaggcctacctcgctgtgtaatgaacactgctgagtctaactgggcagactcttcttttttcacctgtagaaagtacagccatcagcgatggccacaggacttggtcagcatgatgacaaggactgcrctaaaatgacagacaactggagacaatttgttaaacaggatgggttcccgtggcaaactgggcaagtttaacaggtttctttcctttaggcctgacaccctctgctgagtaagtatccctaggagttagagagagagagagttaaaaaaaaaagaaaaagaaaaa

SEQ ID NO: 872590 - DNA, 590 bp, Homo sapiens
tgtttagtgacctttcatattagccctagggatctcctttaatattttttatactgctagtggtaaattctctcagttttctctgtgtcttaatttctctattatttttgaaaaatagttttgctagacacagaagtcttagttgatagtgtttttcttttcatggtttctgctgagaagtcttttgttaatctcactgagtactgattacacatgatgacttgcttttctcatgctgctttcaagggtctttatttttcaacagtttgactgtaatgtgtctcagtgtggatctccttagtttattctacacggtgttcattgaactaattggatatgtagattaatgtttgtcataaaatttgrtaagtttttgaccattatgtcctcaaatatttttatacccctttttctcttgcccctcattctggcactctgaatatgtgtaaaatagtgtgcctgatgaggttctacagatttctgaagctctacttatttatttttcttatattttctttttgaccttcagactggatactctcaattgatttttcttcaagttaaccgattttttcttttcgacagttcgc

SEQ ID NO: 872591 - DNA, 595 bp, Homo sapiens
gtaatttgttttggcagccccagaaaactaggacaggcccattgtaataggactttctttccaacctcttctcccttttatatcttcctaacatgctgtactcaaaccacactctaccttcatggatgcctcattgaatagtgtttttcgttatcatcctcatcatcatcatgatcaacatcataaaagctaacacactaccagcccttaatacctcctargtccttaaaatcatctctgcaatagcaaatgtgaatactcatcttataaatgaggaaattaagctgcagatatatgatccccaaattcatatgtctagccagacaaggagccagttttgaaacttgacaatctgttatgaatatcttagtcatttctcaattctactgccttcaactttcttctctagcttacaaactccttcttatgcttctgtatgctcttccacagtcttcccagatgctctctctcttttgctccttgaaaacatgcttcctctccttcccttctctgagatcctacaggcttacatttttctccctgtaccattgtcttccacctttaccttttatgaggtatttgtatattgtgctct

SEQ ID NO: 872592 - DNA, 672 bp, Homo sapiens
ctgttttatcagagactaggattgcaacccctgttttttgttttttgttttttttgttttttgttttttgttttgctttccatttgctttgtagatcttccttcatcccttcattttgagcctatgtgcatctttgcatgtgagatgggtctcttgaatacagcacactgatgggtcttgaytctttattcaatttgccagtctgtgtcttctaattggggcctttagcccatttacatttaaggttaatattgttatgtgtgaatttgatcctgtcattatgatattctctggttattttgcctgttaattgatgcagtttcttcatagcattgatggtctttacaatttggcatggttttgcagtggctggtaccagttgttcctttccatgtttagtgcttccttcaggagctcttgtaaggcaggcctggtggtgacaaaatctctcagcatttgcttacctgtaaaggattttatttctccttcacttatgaagcttagtttggctggatatgaagttctgggttgaaaattctttcttcaagaatgtagaatattggcccccactctcttctggcttgtacggtttcggccaagagatctgctgttagtctgatgggcttccctttgtgggtaactcaacctttttctgtggctgcccttaacaat

SEQ ID NO: 872593 - DNA, 565 bp, Homo sapiens
ctttatggaatgtgcagtgctttacgttattgttcaaaagtagttttccgtataatttcgaatgccagggaaatgtgttggtttagctcctgtttaggggactgaatgatgcaagttatagtttagtcaagttaaattaaagaacaaaccagtgtcggtgttgacatttgatccctataataccaaaccttgtttgattcttctgarttatttgtgttaacagaggtgatgttaatggcttccaccttccttttcatgcaaatgataatttcgtctttgccagttctgtgcctggaattgttgcatagatgtggataatgagggagaaggagaagcaaaagcaaccaaactaatttgacggatttacattggaaggacagagagctacctgcagaaaagaagagactagattatgaaagtaaggggagatgggcaagaaaaatgaagtctagctcaggacaaattttgagaaagcgtcagagtacattttgagagagaaggagaaagactggaagaattcattatgctgagatgagaaggactttgggatatagatagcaaacag

SEQ ID NO: 872594 - DNA, 565 bp, Homo sapiens
ctttatggaatgtgcagtgctttacgttattgttcaaaagtagttttccgtataatttcgaatgccagggaaatgtgttggtttagctcctgtttaggggactgaatgatgcaagttatagtttagtcaagttaaattaaagaacaaaccagtgtcggtgttgacatttgatccctataataccaaaccttgtttgattcttctgagttatttgtgttaacagaggtgatgttaatggcttccaccttccttttcatgcaaatgataatttcgtctttgccagttctgtgcctggaattgttgcatagatgtggataatgagggagaaggagaagcaaaagcaaccaaactaatttgacggatttacattggaaggacagagagctacytgcagaaaagaagagactagattatgaaagtaaggggagatgggcaagaaaaatgaagtctagctcaggacaaattttgagaaagcgtcagagtacattttgagagagaaggagaaagactggaagaattcattatgctgagatgagaaggactttgggatatagatagcaaacag

SEQ ID NO: 872595 - DNA, 618 bp, Homo sapiens
atagcagctccttgttccacccatctccagccctaacttttgttttccagaagtagccacttataatccttactgtcgtttcttctggcatttatttccatatttccaaagatcacatttactgtcttttttcttggtttttttttcaattttggatattatttatttactttgttcaatggaagatgaagatttagttctctatgccatccctctgcctcttccctaaacacacacacatgtcatctccccacttgccttttaaarcaacagcaccatttttagttaaatcagtattcagtgtcttgcattatataatcaggtaaatattattcaaagatgggccatgcaatatgatattactcattatctttttctacatttttgtagccagtaattccttcctttgtttcgtgttgtcatctgtacagctaatgctagttcttctgcagcttttctaacagagctataaagcacttctcaatatgaacagatacttcaggcaatctttcagattttgttttttcttagagttattcctcctggagccatctgtcctgttcttcctatgccagtcaagattgtttatgctgtaggcctgaggcatagctgttatcc

SEQ ID NO: 872596 - DNA, 616 bp, Homo sapiens
aaggagatgttaggagaatatggtaaatacataatgccaaaatcagcttctattgagaatttttttccaattgagcttaccacaggacatagatgagctaaaatttgacacatatataaggatctcaggaattaaggcatttaaaatatatgagaagttaatagtgagcagctggtgatattgaagttctctggaaatccgttcaagtagcagatctagttactcatgcaagcattggtagagcaattggtaacaagtgaccagcattagccaaaagtaacatcttgttaaaaagcrtctccttagttttcctatgaattataggcaactgaaatcaactttttgacatcctagatggtaggaaatagtgggacaccaagggttgaagggaggcaggatgtatttgattcaaaacacaaatggtttactgaaaggggtcctagaaaaatgttttacatggagataattgctctaggaggcaggaattaccttgttttcataattctattatttgagatcaatgttatgtttttatctcccacaattaaaaaaaacgaaacacataggagaatggaattgaactaatacaaatctgaaagcatctaggctttatcta

SEQ ID NO: 872597 - DNA, 439 bp, Homo sapiens
tttgctgaatcaatttatttaatcaaattcaaatcaattggttttgctcatggtttgaagatatggtgaaagttgatggagtaattgaaatcctaagcagtagcagagctgctgggtagaaatttcagacctccaggtgatccttgtgttccctcagaatcatcagtgaagttagctgttgtatagagagcaagcttgtccaacctgtggttcatgggtttcatgcagccyggggcagctttgaatgccaccccaaacaaatttgtaaactttattaaaatgctttgagattttttgcaatattttttgactcattagctataatcagtgttagtgcattttatgtgtggcccaaggcaattcttctgtgaggcccagggaagccaaaagattggacaccctcatatagaggctgaagccctttgttctggtgttgaca

SEQ ID NO: 872598 - DNA, 618 bp, Homo sapiens
tcaataatatttttgtttcagatctccatcttaacaacaaagtgatcagaaaatatactttttgtgatataaatcccttaaactgtgttgagattttctcaatggctcagtctctgatcaagttgtacaaatattctgtgtgtgctttaataatgcatgtattgttgctgttgtgagtgtactgttttgtcttttgtttaagtcaatttgttratgatgttgtgtagattttcttcatcttcactgacttttttcatgtttaatttactcattaatgaaagagatatgttaaaaaatttcccactatgattatgaatttggacattttctgtagttctgacaactttggatttatatattttgaggctgcattatttagtgcatactaattaggtttttaaatgttctgatgaaattattatcattgtgatatgatcatcattactggtaagtattttgcctaaacactttgcctaaataaattttactttagctgatgtcaatatatctacccaggtttattttggttagtatttgctgcattatatataaattttcatcttttttctttgacattcctgtatcactatgttttagatgtgtctcttgtaaatggca

SEQ ID NO: 872599 - DNA, 618 bp, Homo sapiens
tcaataatatttttgtttcagatctccatcttaacaacaaagtgatcagaaaatatactttttgtgatataaatcccttaaactgtgttgagattttctcaatggctcagtctctgatcaagttgtacaaatattctgtgtgtgctttaataatgcatgtattgttgctgttgtgagtgtactgttttgtcttttgtttaagtcaatttgttgatgatgttgtgtagattttcttcatcttcactgacttttttcatgtttaatttactcattaatgaaagagatatgttaaaaaatttcccactatgattatgaatttggacattttctgtagttctgacaactttggayttatatattttgaggctgcattatttagtgcatactaattaggtttttaaatgttctgatgaaattattatcattgtgatatgatcatcattactggtaagtattttgcctaaacactttgcctaaataaattttactttagctgatgtcaatatatctacccaggtttattttggttagtatttgctgcattatatataaattttcatcttttttctttgacattcctgtatcactatgttttagatgtgtctcttgtaaatggca

SEQ ID NO: 872600 - DNA, 618 bp, Homo sapiens
tcaataatatttttgtttcagatctccatcttaacaacaaagtgatcagaaaatatactttttgtgatataaatcccttaaactgtgttgagattttctcaatggctcagtctctgatcaagttgtacaaatattctgtgtgtgctttaataatgcatgtattgttgctgttgtgagtgtactgttttgtcttttgtttaagtcaatttgttgatgatgttgtgtagattttcttcatcttcactgacttttttcatgtttaatttactcattaatgaaagagatatgttaaaaaatttcccactatgattatgaatttggacattttctgtagttctgacaactttggatttatatattttgaggctgcattatttagtgyatactaattaggtttttaaatgttctgatgaaattattatcattgtgatatgatcatcattactggtaagtattttgcctaaacactttgcctaaataaattttactttagctgatgtcaatatatctacccaggtttattttggttagtatttgctgcattatatataaattttcatcttttttctttgacattcctgtatcactatgttttagatgtgtctcttgtaaatggca

SEQ ID NO: 872601 - DNA, 600 bp, Homo sapiens
ttctggtgttatatctttattaaatattcagaaaaattcaccagtgaagccaacttggtcttgtgttttctttctgggaagatttttaataacaagtttgttttctttaacagtgattagactcttctgttttttgkttttttgttttttcctatctgtcagttttggtaaactgaatttcaaggagtttggccatttcattcaaactgtcaaactcatcggcataaaatagtataataactgtttaaaagttataaaacagcatgaaacttggctgggtgcggtggctcatgcctgtaatccaagcactttgggaggccaagaagggtggatcacctgaggtcaggagtttgagaccagcctggccaacatggtaaaaccccatctctacttaaaatacaaaaattagctgggcatggtggtgcacacctgtaatcccagctacttaggaggctgaggcaggagaattgcttgaacccgggaggtggaggttgcagtgagccaagactgtgccattgcactccagcctaggggacaagagtgagactttgtctgaaaaaaaaaaagtatgaaacttgaaatgctttcttttatgtattt

SEQ ID NO: 872602 - DNA, 587 bp, Homo sapiens
gctgaagtcaggtgctgtagctccccaagggtggtattgcacacaggtggctacactgttctgaggtctcaggggcagcctcacccccagggttccactggacattgccctagtggaggcactctgtggtggccccatccccgctgctgtactgggcattctcttaatgccatcatattrggggagggactctctgtggagagacagagagtctctggagacagccctctccctgagttgcatgcctgcgactccaggtagcaccttccttcaaaatctaaggggaggcagccacaaccccgcagctcatgcactctgtgccctggtggagatgacaccacacagatgtagccttggcttacagcctgtgccatccagagaagtggcctgagccgcagtctggcgtgcttgagccaaagcttggaaggccaaggagtgctatactggaatatggggaatacaatcttgaaattgtttgccgccaaaaccttgaaattgtttgcattctgtgcctgtgatgggcagggaagatgtgaagatctgtgagatgccttcagagtcattcttccattgtcttgatgaatact

SEQ ID NO: 872603 - DNA, 582 bp, Homo sapiens
tgcacaaagggtgcataagactatgcttagtcacagtagagtgacgctgtcacctctttacctgggtagtcggcatctccagggtaaggcacatgtctgtttaagctctatgtctgcaggagccagcaagggagcacctcttcagaggcctcatgcaatacccaccaccctttattatactgataagtaaattccattttaatcaggtggcaggtagcaatgtgccactgtcctaggaaagcaatcatgattggcctaagccaatatgagcaacttgtcttttttttttttttttttttttttgaggtaaggtattgctcrttgcccaggctcgagggcagtggcatcatcatggctcactgcagcctcaacttccctgacaaagcagtcctcccacttcacctcctgagtagctggaactacaggtccacaccaccacacccagctaatatttttttggttttagagatggggtctcactatgttgcccaggctggtcttgaactcctgagctcaagcaatcttcctgtcttggcctccccaaattctggcattacaggcgtgagccactgtccctgacct

SEQ ID NO: 872604 - DNA, 523 bp, Homo sapiens
tgctccttaacttatggtggagtttcatcctgataaatctgtcataaattgaaaatatagtaagtcagaagtaattttctacttaatattttccatgtatgatgggattatactgaatgtgtactcagtatactgagtactgaatgtgtatggcttttgcactatcgtaaagatgaaaaattataacttgaatcatcataagtcagggatggtctgtatgtaagtgtrtgtatatatctcctacttcagtagataatgctaaaaaattttcccaaacaattgcatgaatttacactcccaaaagtgtacaatatgagagttaccattgccccacatccttgccaacccttggtactttccatttttagcaatctgatgagtatgtaatggtatccactatgacactgattggtttctacctctaaagaggtcgaggaccttttcttatacaattggagttcattggattttcttcttgtaaagtcacttttgaagtgattggccaattttgctattggattgc

SEQ ID NO: 872605 - DNA, 523 bp, Homo sapiens
tgctccttaacttatggtggagtttcatcctgataaatctgtcataaattgaaaatatagtaagtcagaagtaattttctacttaatattttccatgtatgatgggattatactgaatgtgtactcagtatactgagtactgaatgtgtatggcttttgcactatcgtaaagatgaaaaattataacttgaatcatcataagtcagggatggtctgtatgtaagtgtgtgtatatatctcctacttcagtagataatgctaaaaaattttcccaaacaattgcatgaatttacactcccaaaagtgtacaatatgagagttaccattgccccacatccttgccaacccttggtactttccatttttagcaatctgatgagtatgtartggtatccactatgacactgattggtttctacctctaaagaggtcgaggaccttttcttatacaattggagttcattggattttcttcttgtaaagtcacttttgaagtgattggccaattttgctattggattgc

SEQ ID NO: 872606 - DNA, 639 bp, Homo sapiens
ataaggataaaaacagttctgtgctgtttacaatcagggcagcccctagaataggggtgatgagtatgtggcattagggatgctgtgtcagacgctgaggcatctcttctcagtcctgacactttcatactgagccaggatacagcctcagaatctttcttaacagagctttaggtgtcccttccaaacccatcagtgtaggcactttggkgaaggcaggttgtcagccctgccttagggcttatgaagctggcgtaaatctgaggctggaaaaagctctgagctaggttataatcatgctgtgtcaaggacccactgtttgattctaggtacatttaacttctctggctctccctgctcttctctgggtagaatgaagggactaactaaagcgaggcagacatgaagtttggtgcagtagcaagagcctgctcttttacaatcaagcagggtgaatcttagaccttggcatcatcatttataaactatgttccttgagcagctcgtatcatccactctgagcctcggcatctccttctatagtagccagtttgtggtggtggtgtgggtgtcagagataatatagatgaaatagggagcttcgcatgcaagcaggggctctataattgttccctataa

SEQ ID NO: 872607 - DNA, 523 bp, Homo sapiens
ataataataaaaaaaaaaaaaaaaagaaattcccttctgctatcctagagacaacggccagccaatcagcttggctttgttgaatccttgctgcaggctgtgagaacctagcaccaaaaaaaaaaaaaaaaaaaaaaaaaaaaagaatctaggtttaaagaatagctctcctgtgttctggttttgaggtgtctcttgagcaattccttgaccagctggtatcatgggtcactccaaggggcgaggaacaggtttcaatgaggctttcgtatctccacrtccacaggtcacaaactatttcttgaaagatcctaatactgatttggctaatgtagaagtatccattttggccagcgatggagaacatttcaagcacaagaaattctcaaccaggccaaaattgctcttagagccatggggtcgggattaagactcctgttctgaaaccataatcaggcccagcatattagtgtttacaaaaccaaattctattttgaccccagataagagaagaacacagata

SEQ ID NO: 872608 - DNA, 629 bp, Homo sapiens
aaactacatgttcaaacatcatcagaaatctctctctctctctctgtctcagttggctccattttcttataagccttcgaatattgtttggacatttgccccccaccacccaatctcatgttgaaatttgattcctaaagtttgaggtggggcctagtggcaggtgtttaggtcattagggtagacccccatgaatggctcagtgtcatccccatgataatgaatgagttcttactctattagttcacatgagagcttggtgcttaaaagagcctggcacctttcccctctctctcttgcttcctcctctctcaccacgtgacgtgcctgctctcccttcatcttccaccatgattagaagcttccygaggccctcatcagaagcagatgctggtgccatgcttcttgtacagcctgaagaactgtgagtcaaataaacctctttcttttaaattactcagcctcagatattcctttatagcaacacaaaatggactaagacaccttcccttcagggtgacaaactggcctccagcagcactaagctttctctaatggagaaagagtgcttctctcccaatagtcttaagactggccctcattagctctgattggatcacttttggtta

SEQ ID NO: 872609 - DNA, 566 bp, Homo sapiens
ttcatcagggatattggcctgaagtgttctttttttgttgttgtgtctcttcctggttttggtatcagaatgatgctggcttcataaaattagttagggaagagtccttccttttcaattgtttggaatagtttcagaaggaatggtaccagctcctctttgtatttctggtagcattcagctgtgaatccttctggtcctgggctttttttggttggcaggctactaattactgtctcaatttcagcgattgtttgggtctattcagggattcaacttcttcctggtttagacttrgtagggcatatgcggtccaggaatttatccatttcttctagattttatagtttatttgcttggaggtgtttatagtatcctctgatggtagttgtatttctgtggggtcagtggggatatctcctttatcattttttattgtgtctatttgattcttctttctcttattttctattagtctagcaagtggtggtctactttttttttttttttttttagaaaaacagctcctggattccttgatttttttggagggtttttgtgtctct

SEQ ID NO: 872610 - DNA, 634 bp, Homo sapiens
gattctactttagtcataaatgtacatggtgtaccaagtgtgactgtgatttatataaagataacagcaaagaagacaaagaatacagctcagcacaaagaggaatatacaaagcaagaaatgcaacacagttctcagtagaagactccatatcaaacgtccaagctttcagtttagtccccacagagttagttccttccaataatgccatctgcctagcaaggtgcttycatcgggcagtttgctaagctggcttggcttttccttatagcttttggactcttgtagcacttttggaaaccctaggtatgtacttatctccccagcaggcacaagtaactggtcacaatctcagcaaattcctgtgcacttggtaatacattgttgctattacatgaatatctctatttttcaggtacttatcaagcctacagtctatcctttaaggaaattacatgtattctcattttaaaatgaatagcatgtatatgcctacatttaagagtcattaatatgaagaatccaaaatatatgtggcttaatctgactctcttcatcgtgttttagagatattttaaatcacagtacttttttttagtgagtcactgaaagatgtaaaaacagattttatagt

SEQ ID NO: 872611 - DNA, 634 bp, Homo sapiens
gattctactttagtcataaatgtacatggtgtaccaagtgtgactgtgatttatataaagataacagcaaagaagacaaagaatacagctcagcacaaagaggaatatacaaagcaagaaatgcaacacagttctcagtagaagactccatatcaaacgtccaagctttcagtttagtccccacagagttagttccttccaataatgccatctgcctagcaaggtgcttccatcgggcagtttgctaagctggcttrgcttttccttatagcttttggactcttgtagcacttttggaaaccctaggtatgtacttatctccccagcaggcacaagtaactggtcacaatctcagcaaattcctgtgcacttggtaatacattgttgctattacatgaatatctctatttttcaggtacttatcaagcctacagtctatcctttaaggaaattacatgtattctcattttaaaatgaatagcatgtatatgcctacatttaagagtcattaatatgaagaatccaaaatatatgtggcttaatctgactctcttcatcgtgttttagagatattttaaatcacagtacttttttttagtgagtcactgaaagatgtaaaaacagattttatagt

SEQ ID NO: 872612 - DNA, 650 bp, Homo sapiens
aatatgaggaaatatttatgattattttaaactcatatatgtaatttatttgattgacataaagttttgtaatgcattttgaaatagctgccaatgtgtgaacaacaagcttttcattaaaattctgttttcgtgttcattgttctttgtttgtatgcaaactcttagttgcctgaaaagtaaatttcaatattacatatatctgataaaaagtaattaggtagaatttgaacagaccagctatggtacctgcatytagcacatatctagatgagatactttcagagcttactctcaagttcaagtgattctcccacctcagccttctgagatgctgggattacagacatgagccactgtgcccagcccttcagtcactcttttgtgctttgtaacttatacacatgtcatatatatatgtcaaatatctcaaaataagaacataaaactaaaaagaaatacattggttttagagcctaatataaaataaaatactgtttcataaactaacctgagtacaaaggtaccccaatgtctaaatccttgtctctcagggagccatatgttcctaaagtttctgaaagtttcctcttccttcttcttttacctccccttctttctctctccttctcttcttcttcctttttatc

SEQ ID NO: 872613 - DNA, 650 bp, Homo sapiens
aatatgaggaaatatttatgattattttaaactcatatatgtaatttatttgattgacataaagttttgtaatgcattttgaaatagctgccaatgtgtgaacaacaagcttttcattaaaattctgttttcgtgttcattgttctttgtttgtatgcaaactcttagttgcctgaaaagtaaatttcaatattacatatatctgataaaaagtaattaggtagaatttgaacagaccagctatggtacctgcatttagcacatatctagatgagatactttcagagcttactctcaagttcaagtgattctcccacctcagccttctgagatgctgggattacagacatgagccactgtgcccagcccttcagtcactcttttgtgctttgtaacttatacacatgtcatatatatatgtcaaatatctcaaaataagaacataaaactaaaaagaaatacattggttttagagcctratataaaataaaatactgtttcataaactaacctgagtacaaaggtaccccaatgtctaaatccttgtctctcagggagccatatgttcctaaagtttctgaaagtttcctcttccttcttcttttacctccccttctttctctctccttctcttcttcttcctttttatc

SEQ ID NO: 872614 - DNA, 656 bp, Homo sapiens
agagagagagggaaagagagacagagaaattagagtccctgttttcatagagtttaatgtctattaaggaagaaagatgtgggggaaaatatttgttgagataattaatgattagttcttaaagctacagtacagggaaatctttatggcttgctgatcaaatctagcacaacacttgcttttgtaaataaagttttgttggaacacaactgtgctcattcattgatgcattgtctatggctgctttcaaagcccaaaggcagacatgaggagttgtgacagagtctcattgtctggcaaaggctaaattatttactgtctgttcatttatagggaaattactgattctccttcttcatgagattaaaagaaagaagagattccaggttcaagctgtgagtttaatatgtgcatataatttcactccytctaaaatttcactaaaacgactaaggaaaacataattaaaaagaaagagaagcataaaattaaggaggcaagcaggacagaggaacatgtaacaaatcaatgaaatattgggagctggaaaacagatggtcaagtggtaacagaattaacagaacaaagaatgctgaattctacgcaggaaatgaggatagttgagaaactgataaatgttttatattgcagcattc

SEQ ID NO: 872615 - DNA, 585 bp, Homo sapiens
caggctggtcttgaactcctgacctcaggcaatctgccagccttggcctcccaaagtgctgggattacaggcgtgagccaccacgcctggccctacatttctattcttaaaaatggaaaatacaatataaaaaatagtatttacaatagtataaaacatgtaaaagccttgtgatcaatttattgtttgttcaatgaagaaacaaatactataaaaattgctgaaataaagaaaaccctatttaaggacaataaataataaaggcaataaagccttaattagtgcataccatgttcattatttgatgactatattgctaagatatctacactctcattatgatatataatttcaaaacaatcccaataaaaataatatatattttttgttataattgacaagctgattctawaatttttatggaaacataatgaacctacaatagtgaaaatctactagaaaactaaagtgttttagggcacctcattaattacttgatatgagctagcttgatagtgtggcctatgtgataggaatagacagattaatggaaaaaactagagaatgaagaatgagatgacttta

SEQ ID NO: 872616 - DNA, 652 bp, Homo sapiens
atcactgaaaatattataactcgaaggtaaatttcaaaagaatagggagttctttaggactgctttgaagcaaaattgtttcacactgtgaaatcttttgcttaagcagacgaaagagtgggatcccaactaagagtgacttcaaaatttattcaaggattctcctttcaggtctgcctctcctcctatctttccctctttgagtagtcttatctcaatcccttagtttggtctatcttttcttctgtttcttggtatctgttaaggaataaattttgctctccaaaattcatatgctaacgttctaaccctcagtaccccagaatgtgactgtatttggagacagggtttttacagttaatgaaattaaagtgaggtcactgggatgggctcttatccagtactcaggtagtactatagggtmtggaggcagagaacctaaggctttacattattctttgtaatagtctacattgacttcctagaactaaataaaatataatcatgccccagtaacaagaggacagaggtttcccccattgcaccacccccctccaccttctgcattgcagatgagaaaaggaaagtatctctgattcatcccctcttgcaaccaattgctgatgacaggcgtagttttcatttgcataga

SEQ ID NO: 872617 - DNA, 401 bp, Homo sapiens
atgtgaacaagaccatgtagcgtgtgtctcacctgggagtcaaactctggtccttataactctagctgcatcatggtgactatcatgacttctgaggacactgggtggtggtaataggttctcaggttagacacagagaatgtgatgccagcaaaatctgtgaccctctcctctgggcaaagcaaygcccacacagtcctcttaggacagagacaataacgaaattacaattccaaccctagtaacctactccacattcatcatttccctaggttacataagaattccacgggttgtcatgggcagtgattctcatttttgaagatgaggggtctgaagtgtagagagctcttgaaactcaagtaagatcgcaatgctgttaagtaatgaagctgcccaat

SEQ ID NO: 872618 - DNA, 401 bp, Homo sapiens
atgtgaacaagaccatgtagcgtgtgtctcacctgggagtcaaactctggtccttataactctagctgcatcatggtgactatcatgacttctgaggacactgggtggtggtaataggttctcaggttagacacagagaatgtgatgccagcaaaatctgtgaccctctcctctgggcaaagcaacgcccacacagtcctcttaggacagagacaataacgaaattacaattccaaccctagtaacctactccamattcatcatttccctaggttacataagaattccacgggttgtcatgggcagtgattctcatttttgaagatgaggggtctgaagtgtagagagctcttgaaactcaagtaagatcgcaatgctgttaagtaatgaagctgcccaat

SEQ ID NO: 872619 - DNA, 635 bp, Homo sapiens
catctcctttgccttggaaggtaacctcatcaagtcatgttctattggctagaagcaagcaacaggtctatcttcactcaaggtggggggattatacaagggcatggatcagtaggggttataggtatgtctgctacacctctttgcttcattaaacctggtcttgcctaagtcacccaggattttctaattgatagtgatgataatcatttttctatcattyattgagggccaactaagttccaagcactgtgtacactgtaggctatggaatctatggaaactcctaagatatgggtattgttcccctcctccctatgtaacagatggggcatctgaaacttcaagagatggttgtcaaacccaggcagtccgacttcagagtgtgtacttttaacaagtattctaggctgtctccagttctaatttacctttctatatgtttgacctctattcagtattttattctatttgaagcttttttcattggctttataaagctatctttcatatttcttctcctccttctttggttgttcttctgagccttatcttgtcccactttcccacttaatgtcatcccgttttctacaaggcttcatcaatagcccttctctccctcactccttaggatt

SEQ ID NO: 872620 - DNA, 621 bp, Homo sapiens
tgcagatgactttggtacagcagtctgggatgcaggatctcacacatctggaactcctggagctgttctttgcccctcggtccatgacaaagggatggatcagcttccttaggggaatgataaccttggctagtcaaagcttgacttagagaatcactgagcaatgtcctgttgttcttccacgcagaccagcgtgttgatgtttatacaatatgtacacccctctgggctttcctgtagcctagaggcttgtattggatttgtctatcttctacattggacactgagctccttgtgggatggaaacatgtcttgttcatctttgtaactccagctcctagtccagrgcctaacacataatatatgttttgttgaaaaaataaatgaaccaggagagtctacaaagcattcattcaaagttctttattgagcatctactatgtactgaaccaagttctagcactgagacaagtcagtgaacaaaacaggcaaaaatctatgccctcatggtgcttacctactaccagatagttgaattaattttttgaatattttctttttctaaagaatgccaaaaacttattattttcctgttattattgcaaattcccttgtaagagt

SEQ ID NO: 872621 - DNA, 516 bp, Homo sapiens
ttataaggggagttcctccaaacaagctctctttcctgctgccatgtaagatgtgactttgctcctcctttgccttccaccatgattgtgaaatctccccatgtggaactgactccttgtggaactgtgagtccactaaaccttttattctttaaaaattacccagtctcaggtgtatgtttattagcagcatgagaacagactaatacataagmctttctgagaatggtgaggggtggctagagacagtggaaggaggttggaaagtgtaaagaaccagtggtgaaaagcaagcaggtagctgaagcacagtggttgggtttcatagaaaggaagactgccagaaacattcagggtagcatttatagggacttggatgtcaagcaataagtagggaagagagccgacagcaatgcaagccactggggatgtttgagtggcatcgttacagctggaccctgccttcagcttcaaggctcttcatagcttgaccctctgctgaatctcatttaccag

SEQ ID NO: 872622 - DNA, 603 bp, Homo sapiens
ttactctcttctagcccagatcattttggacaaaaatccagacatgtagattctaactgtggggtcgaacaggattcatttattctgtgatctcagatgagcctcttaacctctttgagtctatttccataactgtaaaatgcagaagaagaataactccatgtcatttaggggcttctctatgatcaaacactgcatgcagccttccatcattaaacatttactgaacacctactttctgccagaaatggtggataccaatgatggccagcaagtattgtgctattacatttcaggcacatgattctaattgatttacatggttgaatgcgtcgaattcccatcaacaacccagtcatgagcatgtcaccctagtactcattktacaggaaagaaaatggaagcagtggttaagcaaggtgcccacaagaacacaactatgaagcagcagactggggattacatagatttcctggttccagagcccgtaattataaataccaaaatgtctcttgactagggttatagaaaaataaaacacagctacatagcttctgcctttgagcttctgtcatctaagaagcagaaaggcttgcgaaccat

SEQ ID NO: 872623 - DNA, 631 bp, Homo sapiens
ctaaggagtgagggagagaagggctattgatgaagccttgtagaaaacgggatgacattaagtgggaaagtgggacaagataaggctcagaagaacaaccaaagaaggaggagaagaaatatgaaagatagctttataaagccaatgaaaaaagcttcaaatagaataaaatactgaatagaggtcaaacatatagaaaggtaaattagaactggagacagcctagaatacttgttaaaagtacacactctgaagtcggactgcctgggtttgacaaccatctcttgaagtttcagatgccccatctgttacatagggaggaggggaacaatacccatatcttaggagtttccatagattccatagcctacagtgtacacagtgcttggaacttagttggccctcaatraatgatagaaaaatgattatcatcactatcaattagaaaatcctgggtgacttaggcaagaccaggtttaatgaagcaaagaggtgtagcagacatacctataacccctactgatccatgcccttgtataatccccccaccttgagtgaagatagacctgttgcttgcttctagccaatagaacatgacttgatgaggttaccttccaaggcaaaggagatg

SEQ ID NO: 872624 - DNA, 397 bp, Homo sapiens
ggcagcttcattacttaacagcattgcgatcttacttgagtttcaagagctctctacacttcagacccctcatcttcaaaaatgagaatcactgcccatgacaacccgtggaattcttatgtaacctagggaaatgatgaatktggagtaggttactagggttggaattgtaatttcgttattgtctctgtcctaagaggactgtgtgggcgttgctttgcccagaggagagggtcacagattttgctggcatcacattctctgtgtctaacctgagaacctattaccaccacccagtgtcctcagaagtcatgatagtcaccatgatgcagctagagttataaggaccagagtttgactcccaggtgagacacacgctacatggtcttgttcacat

SEQ ID NO: 872625 - DNA, 397 bp, Homo sapiens
ggcagcttcattacttaacagcattgcgatcttacttgagtttcaagagctctctacacttcagacccctcatcttcaaaaatgagaatcactgcccatgacaacccgtggaattcttatgtaacctagggaaatgatgaatgtggagtaggttactagggttggaattgtaatttcgttattgtctctgtcctaagaggactgtgtgggcrttgctttgcccagaggagagggtcacagattttgctggcatcacattctctgtgtctaacctgagaacctattaccaccacccagtgtcctcagaagtcatgatagtcaccatgatgcagctagagttataaggaccagagtttgactcccaggtgagacacacgctacatggtcttgttcacat

SEQ ID NO: 872626 - DNA, 629 bp, Homo sapiens
tttgtatgcatttgtctatccatttattcaagaaacattttttgagtgcccattgtgctccagataacgtgacaggtcatagaaataccaacatgcatgaaacaaggctaattccatcaatgaactgaccaactgcaacaatcaagattttatatgtgttactgatcattaaatcctcaatgcctggaaaagcactaattcatagtaygtgattaatgaatatttttgaaataaatgaatgtactgaaagagttaggcaagtaaattatgctaaagccatcaaacctcatcccacccatccattactgtagcccttcatgaccagtgtcatgaagtaaatgaaggcaaagtccatttggctgaaagaagcataaaagattttattggtcatatgacatgtatcagatcacaggaatcaggtaaagccctagaccaaatctgactccacaggagatgttttcataaaattttatgaactctcctagtaagtacctgagaagttggaagactctggactctactgttttatgagttatagcatccctgcaagtttggtgctattattcttattttgcaaatgagaaaaccatgattcgctgaaattaagcaactatctgaggtcccaacca

SEQ ID NO: 872627 - DNA, 629 bp, Homo sapiens
tttgtatgcatttgtctatccatttattcaagaaacattttttgagtgcccattgtgctccagataacgtgacaggtcatagaaataccaacatgcatgaaacaaggctaattccatcaatgaactgaccaactgcaacaatcaagattttatatgtgttactgatcattaaatcctcaatgcctggaaaagcactaattcatagtatgtgattaatgaatatttttgaaataaatgaatgtactgaaagagttaggcaagtaaattatgctaaagccatcaaacctcatcccacccatccattactstagcccttcatgaccagtgtcatgaagtaaatgaaggcaaagtccatttggctgaaagaagcataaaagattttattggtcatatgacatgtatcagatcacaggaatcaggtaaagccctagaccaaatctgactccacaggagatgttttcataaaattttatgaactctcctagtaagtacctgagaagttggaagactctggactctactgttttatgagttatagcatccctgcaagtttggtgctattattcttattttgcaaatgagaaaaccatgattcgctgaaattaagcaactatctgaggtcccaacca

SEQ ID NO: 872628 - DNA, 629 bp, Homo sapiens
tttgtatgcatttgtctatccatttattcaagaaacattttttgagtgcccattgtgctccagataacgtgacaggtcatagaaataccaacatgcatgaaacaaggctaattccatcaatgaactgaccaactgcaacaatcaagattttatatgtgttactgatcattaaatcctcaatgcctggaaaagcactaattcatagtatgtgattaatgaatatttttgaaataaatgaatgtactgaaagagttaggcaagtaaattatgctaaagccatcaaacctcatcccacccatccattactgtagcmcttcatgaccagtgtcatgaagtaaatgaaggcaaagtccatttggctgaaagaagcataaaagattttattggtcatatgacatgtatcagatcacaggaatcaggtaaagccctagaccaaatctgactccacaggagatgttttcataaaattttatgaactctcctagtaagtacctgagaagttggaagactctggactctactgttttatgagttatagcatccctgcaagtttggtgctattattcttattttgcaaatgagaaaaccatgattcgctgaaattaagcaactatctgaggtcccaacca

SEQ ID NO: 872629 - DNA, 646 bp, Homo sapiens
attgtcatgaccccacctcattgagatatttgatccacacaatacagtgatttaaggcctgtgtgaatgtaaattactgctgttcatttttgtgctcctgcctgggaccagggaagaaattctccaaacatcctgctttccgagtttgaggacttactttaraaaagtactaccattggctttatacctatcattagctaaaccttctgtaaatggcatcattttgggagcaaggtaattgtcaggtcaggcctggatagacatatacctcctctgttatctgcaaggttgctttcaatctccttcttttccatctgtctacaggcatctcaatggtttatgttaaccttagaaaatagggcttgggtttagccacaggggatggaagatggccttagccacatggctgtggaagggaaggaggtagggatggccctagtcacactgggcctgtgtaaaagggccaaggagcacttgcccctccaagggcacttgtctctggggctgtacttgccacaaacctaatcctctccattacatagctctgcaggctaagttttcaggagacagcacagacggaaaagctccataaagctgttctgatcctcttagcactttgtgcaaggagcacagataagacttttga

SEQ ID NO: 872630 - DNA, 619 bp, Homo sapiens
aattccatatttataatgttggccacaacattatgattattctttctctgtactttagtatttttcaccatttgtgaagaaacattaaaacaagttaaatggtaaaaaacaaacaaacaaaaaaaaacagatgctggtgaggttgtggagaaatgggaatgctttcacactgttggtgggagtgtaaattacttcagccattctggaagacaatgtggtgattcctcaaaaacctaggagcagaaatatcatttgacccagcaatcccattactgggtatatacccataggaatataartcattctattataaagacacatgcacatgtatgttcactgcagcattattcacaatagcaaagacatggaatcaacctaaatgcccatcaatgacagattaaataaagaaaatgtggtacatatacaccatggaatactatgcagccataaaaaagaactagatcatgtcctttgtgggaacatagatagagctggaggtcattattcttagcaaactaatgcagaaacagaaaaccaaataccacatgttctcatttataagtgggagctaaatgatgagaacacgtggacacaaagagggaacaatagacactggggc

SEQ ID NO: 872631 - DNA, 677 bp, Homo sapiens
cactcaaaatcacaaaattacataaaaattgaacaacctgctcctgaatgacttttaggtaaataatgaaattaaggcacaaatcaagaagttctttgaaactaatgagagcaaagatacaatgtgccagaatctccaggatgcagctaaagcagtgttaagagggaaatttataccactaaatgcccacatcaaaaagctagaaagatctgaagttaacaacctaacgttgcaacaaaaagaactagagaaccaagagcaaacaaactccaaagctagcagaagacaagaaataaccaagattagagctgaactgaaagagatggrgacacataaaccccttcaaaaatcaatgaatgtaggagctgttttctgaataaaaaattaataaaatagatagactgctagctagaccaataaaaaagaaaagagagaagagtcgaataaatagaatcagaaataaggggaatattaccactgaccccacagaaatacaaacaatcatcagagaatactataaacacctgtatgtacataaactaggaaatctagaagaaatggataaattcctggacacatccaccctcccaagactgaaccaggaagacaatgaatccctgaatagaccaataatgagttctgaaattgagtcagtaataaatagcctatcaaccaaa

SEQ ID NO: 872632 - DNA, 647 bp, Homo sapiens
ggatctgctgagctagaccacttggctccctggcttcagccctttttccaggggagtgaatggttctgtctctctggcattccaagtgccactggggtatgaaaaacaactcctgcagctagctcggtgtctgcccaaatggctgcccggttttgtgcttgaaacccagggcctggcggtgtaggcacccgagggaatctcctggtctgtgggttgctgagaccatgggaaaagcatagtatctgggctggagtgcaccgttcctcagggcacartccctcatggcttcccttgtctaggggagggacttccccaaccccttgcacttcctgggtgaggcagtgccccaccctgcttcagctcaccctccggtggctacacccactgtctaaccagtcccagtgatatgagtcaggggcctcagttggaaatgcagaaattacccaccttctgtgttgatcttgctggaagctgcagactggagctgttcctattcagccatcttgccagtcactgtcactttactttgataattaaaatttccacactagatttaaccattgcacagattattagaatagttataaaagccaatttcaaagttaccattaaagaatatgcagataaatatgcactattgtcaggca

SEQ ID NO: 872633 - DNA, 639 bp, Homo sapiens
aaaaccataagaatgctcttttaaagtgagggcaatttcatgtagacataagaatgctatatggcaatttctatccaagaaagaaacaattatttctaatcaaatggcttaatgagaaattttatctagtcagcttttgaagaaatggagttttctaaatgagatgattaaattatagaacatgattctcagtaaatctaagaatcacaagcctactaagtaactacttctcacaagttcattacaaaaatccattaggtgtaatctctagaagtaattgttcttatygcaccttattgacaatgcatagtattgatttttcacaccttctatgattctttaatttatattcatgaaatgtccatcagcacagtctaaataaatttggcatataggcactaaaacaaataaatcgatgcaaagaaacattaattttgcattatccttattcgttaggcaagtaaaccatgagagttgtaaatgaaggtcaaaggttttgaaatgggtcaaaacccttgacctctagaccaatacctttcctattaaaaaaggctattttaaagttttaagtgggggaatttactaccaccaagatatcactttaaaagactacaaagaaaactctcaataaaaacattc

SEQ ID NO: 872634 - DNA, 683 bp, Homo sapiens
gaaccagctcacaatctgacctctctaaaactctcagtagaatagtagaataatagggtttggtttgattattttttggttggcttttcaaaggtagaaaatgttagtcttttcaaaaggacaaactcaggataccaagccaagagttttatatctgcactaatctggaattttatgatcaaagaccactgtaatttcttcagtggagactcacccagatatatcacttcagtgaaaggattaaatgactcaccagacagtaagccagtgccacctaaacccatcgatctatctaaatcctcaagtatacaatgaaaaaatagtcatgactatttactatctggaatataagagccctcttgttttttrtatttaagtcaccttaaataatttattttttaaaataggatggcaataaacattatgagaaactttaataagaatttaaggataataaactcaagaagttttactccatattttcctggttttgaaggtatatacatatactccaaatgagcattatcttttagataaaactaaatgctcatgatgaatctgaaacacaaccatcttgaaaacactaagtcgaaatttcaaatacatgtttaataggctctagcttatcataaattctggttttccttcctgaatttatatcatccaatccaacattttggaaa

SEQ ID NO: 872635 - DNA, 683 bp, Homo sapiens
gaaccagctcacaatctgacctctctaaaactctcagtagaatagtagaataatagggtttggtttgattattttttggttggcttttcaaaggtagaaaatgttagtcttttcaaaaggacaaactcaggataccaagccaagagttttatatctgcactaatctggaattttatgatcaaagaccactgtaatttcttcagtggagactcacccagatatatcacttcagtgaaaggattaaatgactcaccagacagtaagccagtgccacctaaacccatcgatctatctaaatcctcaagtatacaatgaaaaaatagtcatgactatttactatctggaatataagagccctcttgttttttgtatttaagtcaccttaaataatttattttttaaaataggatggcaataaacattatgagaaactttaataagaatttaaggataataaactcaagaagttttactccatattttcctgrttttgaaggtatatacatatactccaaatgagcattatcttttagataaaactaaatgctcatgatgaatctgaaacacaaccatcttgaaaacactaagtcgaaatttcaaatacatgtttaataggctctagcttatcataaattctggttttccttcctgaatttatatcatccaatccaacattttggaaa

SEQ ID NO: 872636 - DNA, 489 bp, Homo sapiens
ttataattataaaatgacattctgaaaactgaacaatttccttttctacaatagatgttagttccaacaataaaatttcaaagttaagaaattttcaaaattaagaaaaatcccaatttgaaagaacaagttatttatttatttatttatttatttwttttttttttttttgagacggagtctcgctctgtcgcccaggctggagtgcagtggcgggatctcggctcactgcaagctccgcctcccgggttcacgccattctcctgcctcagcctcccaagtagctgggactacaggcgcccgccactacgcccggctaattttttgtatttttagtagagacggggtttcaccgttttagccgggatggtctcgatctcctgacctcatgatccgcccgcctcggcctcccaaagtgctgggattacaggcgtgagccaccgcgcccggcctaagttatttattttgaaaaaaacattatcatagacc

SEQ ID NO: 872637 - DNA, 598 bp, Homo sapiens
cacagtggctcatgcctgtaatcccagcactttgggaggccgaggcaggcagattacctgaggtaaggagttcaagaccagcctggccaacaggtgaaacttaatctctactaaaaaatacaaaaattagccaggtgtggtggcaggcacctgtaatcccagctactcaggagtctgaggcaggagaattgactggacctgggaggcagagaytgcagtgagccaagatcatgccactgctctccagcctgggcaacagagcgagactctgtctcaaaaataaataaataaaataaaataaaataaaattatgtttgtaatggactaatataaaatttcacttgcattgcctgagcataaactgacaatggagaaaactaccccagtaagttcaaggtgaaaaagggattttaaaatttctaattatgacgggttatacacaaagtatatcattagaattaactatagggcctaacctacacaaagtatcttcctgatcaccttaaatggtccaaatcatcctaatgataaataccacattttactttctcttttctcattctcccctacaactcctcaccttctaggagatctcgcg

SEQ ID NO: 872638 - DNA, 690 bp, Homo sapiens
agatttgggtaggtaaaggaaaaagggggttgttctctggtgggcaggagtgggggctcacaaggtgctcagtgggggagtttttgagccaggatgagccaggagaaggaatttcacaaagtaatgtcatcagttaaggcaaggacaggccattttgttttcttttgtggtggaatgtcatcagttaaggcaggaasaggccatttaaatatcacttcttttgtgattcttcagttgcttcaggccctctggatgtatacatgcaggtcacaggggatatgatggcttagcttgggctcagaggcctgacactgagaatgctacaagctcccactacctttcaacttggtctttgttgcacatgccaggactaagcaaatgctctgaggacaaaagcagaggcaaatgtggggcttgcatagctgcactagtgtacattctttccagcaatcttcccttcaagtcccacttggattgtttttttctttaacaactttggttgctttaagtattttacctagcttctatgcttactattgattggaaggttagtacaagctcctccattttgctcagatgttggatgtagtttctgcttatccacaagtgtcccaaagccccaagggactggtttaggatttatcctctgtcacctggatgatcacaccagacttctaactggtctctgct

SEQ ID NO: 872639 - DNA, 608 bp, Homo sapiens
aagtcctacatctagaaataaaagaagaataactaccattataaaaatatgtgaaagtatctcactggtgggacagataaacaaaagagaaaggtaaaggaatcaaaccttatcactacgaaaaaccaccaaactgcaaagataaacaataaatccaaaacctaaaaatataactaccatatgttccagtaattccactactgggtatgtatccaaaggaaagaaaktcagtgtatttaagaaatggtggctgggtgtggtggctcacacctgtaatcccagcactttgggaggctgaggcgggcagatcacctgaggtcaggagttcaagaccagcctggccaacatggtgaaaccctgtatctactaaaaatacaaaaattagccaggcattatggtggatgcctgtaatctcagctacctgggaggctgagacaggagaatcgcttgaacacaggaggcagaagttgcagtgagccgagactgtgccattgcactccagcctggggaacaagagtgaaactccatctcaaaaaagaaaaaaaaaagatgtctgtgctcccatttctgttgtagcagtattcacaagagccaaaatatggaatcaa

SEQ ID NO: 872640 - DNA, 608 bp, Homo sapiens
aagtcctacatctagaaataaaagaagaataactaccattataaaaatatgtgaaagtatctcactggtgggacagataaacaaaagagaaaggtaaaggaatcaaaccttatcactacgaaaaaccaccaaactgcaaagataaacaataaatccaaaacctaaaaatataactaccatatgttccagtaattccactactgggtatgtatccaaaggaaagaaagtcagtgtatttaagaaatggtggctgggtgtggtggctcacacctgtaatcccagcactttgggaggctgaggcgggcagatcacctgaggtcaggagttcaagaccagcctggccaacatggtgaaaccctgtatctactaaaaatacaaaaattagccaggcattatggtgratgcctgtaatctcagctacctgggaggctgagacaggagaatcgcttgaacacaggaggcagaagttgcagtgagccgagactgtgccattgcactccagcctggggaacaagagtgaaactccatctcaaaaaagaaaaaaaaaagatgtctgtgctcccatttctgttgtagcagtattcacaagagccaaaatatggaatcaa

SEQ ID NO: 872641 - DNA, 627 bp, Homo sapiens
aagttgcttagggtgagtcagtgactgagtggtaagtatttatgtaaaaagtactataaaaccgcaatgtaaggctgggcacggtggctcactcctgtaatcccagcactttgggaggccgaggcaggcagatcacctaaggtcaggagttcaagaccagcctggtcaacatggtgaaaccccatctctactaaaaatacaaaaattagccaggcatggtggtgggcgcctgtaatcccagctactaaggaggttgaggcaggagaatcacttgaacccaggagagggaggttgcagtgttgcagtgagccaagatcgtgccattgcagtccagtctgggtgacaagaccaaaactctgtctcaaaaaaacaaaacaaaacaaaaaaaaccccmcaatataagataagaaatagtacattgtatggggcacctactgtaattgaagcttgcaggtctagaagttgctctgggtgagtcagtaagtgagtgatgagtgaatgggaaggcctagaacataactgtacactactgcagactttataaacactgtacgcttaggctacgctaaatttataaaaactatttttgcttcaataataaatcaacttcagcttactttaattttc

SEQ ID NO: 872642 - DNA, 609 bp, Homo sapiens
gattgggactgatgaaagggttgccattttaaaatgaaacccatcctaaaataggagccacaaagatgcagggttgcggtgaggctggtaatatgtgaagagtgaacaagaaaccataaagccatatgagattattaggtgtggaaaaatatgagctaaaataaggatcatagctgggcatggtggctcatgcctgtactcccagcattgtgaaaggcctaggcaggcaaatcacttaaggccaggagttcaagaccagcctcgctaacatggcaaaactctgtctctactaaaaatacaaaaattagccaggcatggtggcrcaagcctgtgatcccagctactcggaaggctgaggcaccaaaaatttcttgcaactgggaggcagaggctgcagtgagctgagattgcgccactgcactcccgtctgggcaacagagcaagacggtctcaaaaataataatgaataaaaaattaaaaaataaagaacatcatagataaatagcaggtggattggatcttatgatgcttttgagatacagaattttaatatttttgtgcagttaaaatctctagaacttttcctttgtgctttctagtgctttcatg

SEQ ID NO: 872643 - DNA, 607 bp, Homo sapiens
ctacgaatcttctctgagtggcaaaaaccagaggtttttggagctagggctgcagttaagttgccaaggggcagagatgtaaacagttcctggtttagttaaaatattttaatttttatttttttaagcctggcctttgggtgaaggagtaaaattaggcactggggtctgggtagggggaggatactcatggrcgagtatgcaaccctagggccacagcacccaaactgtaggggaagaggcggggcgagaggggacgaagtagagacagcaagagactcacttttgaaaggcactttcggttagaaagcattctcacatgcttatctcatcgcacacagtatcctttctgctggtctccagcatctacagacgttaaaggcccaagaggagggccaccttcacacgagattccgaggagggcctcgctacccgccagttcccgcgcctcggcagtccgccgcgagcgtacgtcactcgcccgccgccaatcggcgcccggcaggtcacctctcctcccagggcccgccgccccgcccgccgcccaggccgaggccgccagtgcccgccggccgcttccgctcccggcgcaggcgcggcagcttgg

SEQ ID NO: 872644 - DNA, 607 bp, Homo sapiens
ctacgaatcttctctgagtggcaaaaaccagaggtttttggagctagggctgcagttaagttgccaaggggcagagatgtaaacagttcctggtttagttaaaatattttaatttttatttttttaagcctggcctttgggtgaaggagtaaaattaggcactggggtctgggtagggggaggatactcatgggcgagtatgcaaccctagggccacagcamccaaactgtaggggaagaggcggggcgagaggggacgaagtagagacagcaagagactcacttttgaaaggcactttcggttagaaagcattctcacatgcttatctcatcgcacacagtatcctttctgctggtctccagcatctacagacgttaaaggcccaagaggagggccaccttcacacgagattccgaggagggcctcgctacccgccagttcccgcgcctcggcagtccgccgcgagcgtacgtcactcgcccgccgccaatcggcgcccggcaggtcacctctcctcccagggcccgccgccccgcccgccgcccaggccgaggccgccagtgcccgccggccgcttccgctcccggcgcaggcgcggcagcttgg

SEQ ID NO: 872645 - DNA, 581 bp, Homo sapiens
tcccaggttcaagcaattctcatacctcagcctcccgagtagctgggattacaggcatgaaccaccatgcccggcttgtatttttggtagagacggggttttgccatgttggtcagcctgttctcgaactcagcctcccaaagtgctgggattacagatgtgagccacctatgcagaatataatcgaaaatctattttttcaatgcctgcaattttttttcttataagayttcccacaggtgctaaaatagtcagagacatttaaaaaatactgaggacacaggaatgtgttttacgtgatttgacatggaggggcgattcctaaaaatagaactagatgcctattctaagcagcatgctgcatcagatgctgcaagcaggcttcagtgctgaggccatcacttggcagcaaatttagatttctctttccaaacttaggtcatgttctcttttgatgtttattatttttaaactgtttaatttgccctctacagtgctaatttctggtagaagaaaagtttgagaacttgcaaattaagtacttttttttcttgcagaagataccagtgagatagtctaca

SEQ ID NO: 872646 - DNA, 581 bp, Homo sapiens
tcccaggttcaagcaattctcatacctcagcctcccgagtagctgggattacaggcatgaaccaccatgcccggcttgtatttttggtagagacggggttttgccatgttggtcagcctgttctcgaactcagcctcccaaagtgctgggattacagatgtgagccacctatgcagaatataatcgaaaatctattttttcaatgcctgcaattttttttcttataagacttcccacaggtgctaaaatastcagagacatttaaaaaatactgaggacacaggaatgtgttttacgtgatttgacatggaggggcgattcctaaaaatagaactagatgcctattctaagcagcatgctgcatcagatgctgcaagcaggcttcagtgctgaggccatcacttggcagcaaatttagatttctctttccaaacttaggtcatgttctcttttgatgtttattatttttaaactgtttaatttgccctctacagtgctaatttctggtagaagaaaagtttgagaacttgcaaattaagtacttttttttcttgcagaagataccagtgagatagtctaca

SEQ ID NO: 872647 - DNA, 590 bp, Homo sapiens
tcctttctttgtttatgtgattactctgaacttcccacccttctttactgcctacctgtcgaatgctttttctaatagttctagtcatcgataatcatccttgggtttgactcacgttgtgattgatgaaatcttttttttgaactacaaatrggaaaagcatccacttttttctttgaacacttaaatcacatgatagcattatttattataaaatcactaatactctctaaatgtcttgctgaaataatttagttcagtagtccctttcctttcatgtgtatttagactagattccttaaagaaatcataatttcttttagaagaatacttgtcacacacaccaaaaaacaacccaaagtgattgtgttgagtgaaaagaacaaggtgagaaattgtgaatgtatttaatagtattgcatcttcattcgttctctcaaaagaatatttgctgaatatttactatgtgacagttactgccgtaggagctggtgatatgacaaggaacatacaagatgggatctttgccatcaagttgcacgcatgtatacgtacatgcatatgtgcatatgcatagacatagagtaaaa

SEQ ID NO: 872648 - DNA, 590 bp, Homo sapiens
tcctttctttgtttatgtgattactctgaacttcccacccttctttactgcctacctgtcgaatgctttttctaatagttctagtcatcgataatcatccttgggtttgactcacgttgtgattgatgaaatcttttttttgaactacaaataggaaaakcatccacttttttctttgaacacttaaatcacatgatagcattatttattataaaatcactaatactctctaaatgtcttgctgaaataatttagttcagtagtccctttcctttcatgtgtatttagactagattccttaaagaaatcataatttcttttagaagaatacttgtcacacacaccaaaaaacaacccaaagtgattgtgttgagtgaaaagaacaaggtgagaaattgtgaatgtatttaatagtattgcatcttcattcgttctctcaaaagaatatttgctgaatatttactatgtgacagttactgccgtaggagctggtgatatgacaaggaacatacaagatgggatctttgccatcaagttgcacgcatgtatacgtacatgcatatgtgcatatgcatagacatagagtaaaa

SEQ ID NO: 872649 - DNA, 729 bp, Homo sapiens
agaacacatggacacctagacacatggaacaacacacactgaagcctatcagaggatggagggtaggaggagggagaggatcagaaagaataactaatgggtactaggcttaatacctggatgttgaaataatctgtacaacaaactatataacaaagctacagtaaccaaaacagcatggtattggtacaagaacagacgcacaaaccaatacaacaaaatagagaacccagaaataagaccacacacatacaactgtctgatcgaacaaaaacaagcagtggggaaaggattgcctatttaataaatkgtgctgggagaactggctagccataagcagaagaatgaaactggaccccttccttacaccatatacaaaacttaagatggattaaagacttaaatgtaaaaccccaaactgaaaaaccctggaagacaagctatgcagtaccatttgggacatagacatgggcaatgatttcatgaaaaagatgccaaaagcaattgcaacaaaaccaaaaattgactaattaaactaaagaacttttgcacaacaaaataaatgatcaacagagtaaacagacaacctacagaatgggagaaaatttttgcaatctacccatctgacaaaggtctactatccagcatctacatggaacataaacaaattaacaagaaaaaaaaaaccattacaaagtggacaaaggacaagaacagacacttctcata

SEQ ID NO: 872650 - DNA, 607 bp, Homo sapiens
tggttggctatatattacacacatttaattattcaatatgatccctgcagaaacaagatgatcctggaagataatatttaactactacaaatgtaatcaggtagtagacttgattgcattcactgcgccagggtatgtccatgctagagcagattagcatggcctcaaatatgtgtgagaagtgtaacccctgatttggcaagtgtattattattattattatttattgtactttaagttctagggtacatgtgcacaacgtgcaggtttgatacatagatatacatgtgccatgttggtttgctgcacccatcaactcatcatttacataggtatttctcctaatgctatccctctccccacaccccaccccccaacaagccccagcatgtgaygttccccgccctgtgtccaagttatctcattgttcaattcccacctatgagtgagaacatgcagtgtctggttttctgtccttgtgatagttggctgagaatgatggtttctctgtctctttcagttctgctctgatcttagttgtttcttgccttttgctagcttttgaatttgtttactcttgcttctctagttcttttaattgtgatgt

SEQ ID NO: 872651 - DNA, 637 bp, Homo sapiens
cctgttagtgctgcttttgctgcagcccataatttttggcatgttgcatattcatattcatttgtcttgaggtatttgtttccattttgttttcttctttgacacaaagattgttcactagtgttttgtttcattcccacattctgtaaattttcaagttttccttttgctattgatttctactttcatccscttgtgatctgagaagatacttattctgatttcaatcttcttaaatttgttaacttttatttttatgatataacatttgatctgtcctggagaaagagctgtgtgaacttgagagcaacacgcattttgctgctgttgagtggaatatttcgtgtatgtatgttaggtccatttggtgtttagtatgattcaaactctctgttttcttattgatcttctgttgggatattttatatattattgaacatgtgacattgaagtctcctaccatcattgtattgatatctatttctccgtttagttcagtcactgtttgctttatatacttatgtggtcagatgttgggtgctcagatgtcatacctttctggtgcattgactgttttatcataacataaagactttgtctactgtgacactttttgacagtctattttgtctgatat

SEQ ID NO: 872652 - DNA, 632 bp, Homo sapiens
caccaaccaaatgttggtgagggtgaagagaaaaggaaacacacacgattggtggggatgtaaattagttcagccactgtgaaaagcagtttggagatttctcaaagaacttaaaacaattaccatttgacccaaccatcccacttctgggtatacgctcaaaggaaaattattcactctatcaaagagacacaagcatttgtatgttcattgtgaaactattcacaatagcaaagacatggatggaatcaaccttgaagcccatcaatagtagattggatttttaaaaatgtacaccatggaatactatgcagtcytaaaaaagaatgaaatcatgtcctttgcagaaacatgaatgaagctaaaggttattaccctaaggaaataatgcaagaaccagatgatatatatgcatctcttacacgcatatattaaatcactgcttaatgttttttcttgttttatatgaaacaagaaaagtttataaggtacaatgtaccttaaaatatgtaccatttgtgtatatcaattaatgtaattcactgcacgtatacaacgtataatgatcatatctaactagcaagctcatcacctgaaacttttaaaatacaaaaagtaacccatgttagcga

SEQ ID NO: 872653 - DNA, 532 bp, Homo sapiens
ctgacttggcaattggcaggatgatactactattcactgagaggagagacataaaacagggtacaaatttgaaaggaagaatgtacaggggatggtaacaaattgagttttagacatgttgagtaagaggtacctgtgaaacatcaaagatattaagtaggcttttggcttagtgggtttgacagtgacttgggagattttagttgtagacagatattgggagtcattgggtgtataatacttgattctgtctcattaggaatgggagaatagaaatatcaagtatacttttaagttatttttgaataaaggtattatgtttaatttgcatgacaaatctgtaagaaayctctaggacagggaaacattattgcacatagaagtggctagtggcttgaagggttgcctaatatgtaaagacatccaaatttttaaaaggtggagtaggtagagggaaattttaacttatttttttaaatatggcaagaattgtcagattgggttaaaaaatcaagacccaactctatatgct

SEQ ID NO: 872654 - DNA, 630 bp, Homo sapiens
gtcttctgaaaatgaatgagtggatgattaaataaataaaactaaaattcagaaaagtaaatgtctcccaaaccctagttctatgaaagtaagccagcagcacttgatgaagaggtcacaagaagtataaagtggttttgatcaaaaggccttaatattcccctaagcttggctaaatttgagacaagcttcttcctgacttgaagctcctgacctctcttttcttagagcatttagtttagataattttacattgtaaattatttatctggtcgtttgagatgtaaatcttctcccagccacctgccaggtttataacccaggaatgcttttcccaaggacctgggccctttctttgtgtgtgtgtgtgtgtgtgtgtgtgtgtgtgtgtgtgtgtgtgtgtttccrtaggctttagattttttttattttcataggttttttgaggaacaggtggtatttggttacatgagcaagttctttactggtgatttgtgagattttagtgcacctatcacccgagcagtatacgccgaacccgatttatagtcatttttccctcatcctcttcacatcccttccccctgagtccccagagtccactgtgtaatcttatgcctttgcgttctc

SEQ ID NO: 872655 - DNA, 570 bp, Homo sapiens
tcacctaaggaccaaaggaaactcactccccagttttctttcttctgaggtctcaatgtttccactcttttcttctctcagtacacaggcaggactgttttgtcctgccctttgggtaggtatatgaaacaacagctttggggcaagtcactcatacagtaagtgattctccaggtacaaatctctctccatcatattttgtactacaatttaaaaaaaccaattgttccttccagagctgtgactcaraaaacaaaatggctttgacttaataggcaaaaactgttctctgctttaggcccgtccagaaggtcttgtacctcaccctacccctataatcctttcagtctccctacagtgccccttagacgtgtagagcacggaatgtcccttcccttcttttggtaacatcatcagccattcctttgggaaagcacccttctcctttttcaggagttgagatggatcctaacgctccatctacccaaactcagatacaggcacacatctagggttggctgaactgagctctttcttcccctggtggagctgatgagtccaaagatagat

SEQ ID NO: 872656 - DNA, 458 bp, Homo sapiens
gtttagtgactgccctgttggattttggacttgcatggggcctgtagtccctttgttttggctaatttctcccatttggaatgggtgtatttacccaatgcctctacctccattgtatctaggaagtaactaacttgcttttggttttacaggctcataggcagaaaggacttgccttgtctcagatgaggctttggacttggacttttgagttaatgctggaatgggtcaagactttgrgggactgttgggaaggcatgattgcattttgaaagtgaggacatgaaatttgggaggggccaggggcagaatgatatggtttgactttgtccccacccacatctcatcttgaactgtagttcccataatccccatgtgtcgtaggaggaactcagtgggaggtaattaaatcatgggggtggttacctccatgctgttctcatgatagtgagtgagtt

SEQ ID NO: 872657 - DNA, 681 bp, Homo sapiens
aagaagaggagaaaagacaccatcattttcattttcattttcatggccctcttatgggccttcattctgaggtccctcgggcccatggtgttgagctgcaaattcctgatatgtctcatcaaggacagaattaaaaggagcagtgagatcagggacagaagaaaggaaattaagtagatcaaactgacaagaatccagaggctacaatatagaattttacttacatctaaagaccaagttgagtttctttcatamattgtgtagatgttaatccacaagtcactaagtccacctgttaatgcaaggttgaaaaacagtaagagcaaggaccccagtgggagttcaagtagcgttctgctaattctccatctcagccagatgaagcatgggtgggaaaaataggtattttaaagaagtagaaaacactaaggcagcaagccaggtaactaagtgattggtcagtgcccaaaaaatatgaataaattttattagtttattgaaggcatatagatgtggccataatgctgttacaaatgaatcaagtagtattatccaaagttgactgattgtggagatagccaggctggtgaggatgcagttgtctaataagatcatttgactcctcaccagtcaatgcagttaactagtacaatgaacccattccctaacattcagattatg

SEQ ID NO: 872658 - DNA, 644 bp, Homo sapiens
ctaataaaatgtgagatgaatgccttcacccacacaagtgatggaattctcggctttcaaacagtgatacatgaaatcaaacattcagctaagatagctcattccacttctccataaatttatttttcatttccaactttctccaggggctagattaaaggtcatgtggaatcatatggatgaagaaattttcctgccaaattagctcctccaggttgttccacacccttgggtaaatggtaagcttattaggaagctgcatgacatttgtcattacatgggcttttcaattcattgcaaatttcttgttctaagaggaagtctttagtttatgaaattcttaaaagcactcaaattgtgattaacatactaatcataattgtcattagctgaggaggccaggtgcagtagctcatgcctataatcccagaactttgggaggccaaggcaggaggatcgcttgagctcatgagtttgagataagcctgggcaacgcagtggracctggtctacaaaaaatcaaaaaatcgattaagagggtgtggtgtcatgaaactgtagccccagctacttgggaagctgaggcaagaggattgattgagccagagagtttgaagttgtgaagttgctatgatcttgctgct

SEQ ID NO: 872659 - DNA, 644 bp, Homo sapiens
ctaataaaatgtgagatgaatgccttcacccacacaagtgatggaattctcggctttcaaacagtgatacatgaaatcaaacattcagctaagatagctcattccacttctccataaatttatttttcatttccaactttctccaggggctagattaaaggtcatgtggaatcatatggatgaagaaattttcctgccaaattagctcctccaggttgttccacacccttgggtaaatggtaagcttattaggaagctgcatgacatttgtcattacatgggcttttcaattcattgcaaatttcttgttctaagaggaagtctttagtttatgaaattcttaaaagcactcaaattgtgattaacatactaatcataattgtcattagctgaggaggccaggtgcagtagctcatgcctataatcccagaactttgggaggccaaggcaggaggatcgcttgagctcatgagtttgagataagcctgggcaacgcagtgggacctgktctacaaaaaatcaaaaaatcgattaagagggtgtggtgtcatgaaactgtagccccagctacttgggaagctgaggcaagaggattgattgagccagagagtttgaagttgtgaagttgctatgatcttgctgct

SEQ ID NO: 872660 - DNA, 636 bp, Homo sapiens
atatgtggaatcctaccagtcaagttgtgctgtgtacaattctgctatttctgaggcttagtattaagatgttatcatcccaaatataacacacttctgctaataacagtttggtcagtagtaaaggaattatttttgccttctgccttatgtgctttatttctttgtcttataattcttgtcaatttaaagattttaatttatcagacattgagatgtatcttgaaattgatgacatgtaaaagttttattagaggtattttctttcttagcaataaataatagttgatagtgtcttcgatctaatgaaatataatataattataattagtttagaaataaagttggagtcaggaagtgcaaatttttgtcatcatcagtgcaatgtcctggggttaataawaacatacagcttctgtgatagcaagcattcacttggagcctggccacacttggaaatgagtttcacagtccagccaagattgccatgttttatatgaaatgataatgaagtggcttcacttttaagactgtattcttattgcttccaaatgaacactgccttgtgcccaccactcattcccaggcttttaactcataaaaatgctgtttgtacaaaagagagaaaaggcccaa

SEQ ID NO: 872661 - DNA, 634 bp, Homo sapiens
atatggatttctgatagttgtgattcactactggaaaacatgtaaacctctgaaatatggcataatcttcacttccaccctgtcatgctagtttttgtcttaccactaggtgacatgaacaatcaagactatatttacccttgatttaaaggaaccaaaatgtgtggggatggtgggaaccaatggtgagtggatagatattatgagaaggttggtagtcagataaacgtgttatggaggagtgatgaaagtgaagcagcaagaatggtcagcaagcgtgggttgcattggagttgcaccttggggtgagaacagacaaactacttggaaagtttgctgtaagctttctagatgtgggatgaaagtattattaagttgaaagtattattgttaaggagatttgctgctaaaaaataaattattaaatcatttgactggttacattaactttctcattgattcacctttctccaccctctcttrcattccatccttccttcattcagttgcccaagcttctgttttcattgaaattacaaaagcaatatatagccacctcaagagttcagatgtgaaagttttatgtcaatgaatatgaacatttttacagctcaatacatatttctaaattgta

SEQ ID NO: 872662 - DNA, 612 bp, Homo sapiens
atttgccatggaatcattccaaagcagtgagggtgggctctcccgtctgtaatgtacccccttccatcctctctcttacttcatttcctgtgcttttatttctttgaattgttggctctgcctaaatgcagaacagagtagactgtagaaatagttcttggcccacttcagaaaccagcatcaatttagttgaagcattcttaatctgttttctggataatrtagtccatgaatctggtaatctgtttccatctccctactctgattagaagcttttagttaaccctatctttcaccttcccttgcctggttcaggtcgcttcagtctgcacattttcaagtgcactagagggatgtgggaagttaagcaaaagcctggtgtatgacatcattatctgattttggagcttgagcaagcatcacctactcatatacagaacatgcccaggtaggcacacatacaaacacacacatatacacacagggaccagagaatggcttctaaggggctaacttccttcccagaagcctccatttcacacttcaagtagcagctgtgtctccattgcaaaccagggattccgggtctctgttcatctcataaggagcacc

SEQ ID NO: 872663 - DNA, 622 bp, Homo sapiens
tataaaacactactgacttttttatgttgatttgtatgctacatctttattgaatttgtttatcaaattcaaacttgataaaaacaactttttggtggcatctttagggtttttttatatataagattatgttatttgcaaacagggacaattcaacctcctccttttcaatttagatactccttatttctttctcttgcccaatttctctagctagaacttccagtactatgtttaatgcargtggtaaatgtgggcatccttgtcctgacccaggtcttaaatgaaaagttttcaatttttctctgttcattatgatgttagctgtgggtttatcttgtatgacatttaatacataaactaaaaataaaatgtcaggcccctcagccaactgaatggaccttcttttggccacggggaccccagagaagctttaaaaactgagtttttggtcatgatgagataggaggttggacaggccttgttatactcatacccttttatggtttagacaaaaactggtcagtattaatgttaaaatagagattataagactgactggaatggactatttatggtaagaagataacaaactgcaaaaacacttaatgccatgccaggc

SEQ ID NO: 872664 - DNA, 638 bp, Homo sapiens
caacaattggtaagcagacagccaaatcatgaatgaacttccattcataattgccacaaaaagaataaaatacctaggaattttattttatacaaataaaaagagaagtgagggatctcttcaaggagaactgcaaaccactgcaaagatatcagagatgacacaaccaaatgaaaaaacattccatgctcatggataggaagaatcaatsttataaaaatggccatactgcccaaagcaatttatagattcgatgctatttttatgaaattatcagtcattcttcatggaatttaaaaaagactattttaaaattcatatggaactaaaaaaagagcctgaatagccaagacaattctaagcaaaaagaacaaaactggaagtatcatgctacctgacttcaaactacactacaaagctacagtaaccaaaacagcatgctactggtacaagaacagacacaaacaccaatggaacagaacagagaacccagaaataagaccacacatctacaactacttgatctttgacaaacctgtcaaaaacaagcaatggagaaagattctttattcaataaatggagctgggagaactggttagccatatgcagaaaattgtaactggaccatttccttaca

SEQ ID NO: 872665 - DNA, 670 bp, Homo sapiens
atttccttcagcagtggtttgtagttcttgaacaggtccttcacttcccttgttagctgttttcctaggtattttattctctttgtaacaattgtgaatgggaggtcacttattatttgcttctctacttgtctgttgtcggggcacaggaatgcttgggatttttgcacattgattttgtatccaaagactttgctgaagttgattatcatcttaagaaggctttgggctgaaacaatggggttttctaaatataggatcatgttatctgcaaagacaatttgacttcctctctttctacttgaataccctttatttctttctcttgcctgattgccctggccagaacttccaatactatgttgaataggtaygatgagagagggcatccttttcctgtgccacttttcaaggggaatgcttccagcttttcctcattcagtataatattggttgtgcatttgtcataaatggttcttattattttactgtatgctccttcagtacgtagtttgttgaaagtttttaacacaaataaatattgaattttatcaaaggccttttctgcatctattgagataatcatgtagattgggctttagttctgtttatgtgatgagttacatttattgatttgtgtatgttgaaccaaccttgtatcctggggatg

SEQ ID NO: 872666 - DNA, 670 bp, Homo sapiens
atttccttcagcagtggtttgtagttcttgaacaggtccttcacttcccttgttagctgttttcctaggtattttattctctttgtaacaattgtgaatgggaggtcacttattatttgcttctctacttgtctgttgtcggggcacaggaatgcttgggatttttgcacattgattttgtatccaaagactttgctgaagttgattatcatcttaagaaggctttgggctgaaacaatggggttttctaaatataggatcatgttatctgcaaagacaatttgacttcctctctttctacttgaataccctttatttctttctcttgcctgattgccctggccagaacttccaatactatgttgaataggtatgatgagagagggcatccttttcctgtgccasttttcaaggggaatgcttccagcttttcctcattcagtataatattggttgtgcatttgtcataaatggttcttattattttactgtatgctccttcagtacgtagtttgttgaaagtttttaacacaaataaatattgaattttatcaaaggccttttctgcatctattgagataatcatgtagattgggctttagttctgtttatgtgatgagttacatttattgatttgtgtatgttgaaccaaccttgtatcctggggatg

SEQ ID NO: 872667 - DNA, 609 bp, Homo sapiens
ggaaaagaccaagaagtatatgttctgaattctaataaaaatggaagaaaatacaattattaaaaatcaccgggagccaagatggctgaataggaacagctccagtctacagctcccagcgtgagtgacgcagaagatgagtgatttctgcatttccaactgaggtaccagattcatctcactggggagtgtcggaaagtgggtgcaggacagtgggtgcagtgcatcgagcgtgagccgaagcagggcgaagcatcgcctcactcgggaagtgcaaggtgtcagggaattccctttcctagtcaaagaaaggagtgacagatggcatctggaaaattgggtcactcccaccctaatactgcacttttccaatggtcttagcaaatggcacaccagaagattatatcctgagcatggctcrgagggtcctatgcccacggagtcttgctgattgctagcacagcagtctgagatcaaactgcaaggtggcagcgaggctgggggaggggtgcccaccattgctgaggcttgagtaggtaaacaacgtagccgggaagctcgaactgggtggagcccaccgcagctcaaggaggcctgcctgcctctgta

SEQ ID NO: 872668 - DNA, 638 bp, Homo sapiens
cctggcccaggaaaccatttttccctcctagacctctgggcctgtgatgggaggggctgctgccaagttctctgagatgccctggagacattttccccattatcttggtgattagcatttgactcctcattacttaagcaaatttctacagccagcttgaatttctccccagaaaatgggtttttcttttcttctgcattgtcaggctgcaaattttccaaacttytatactctatcttcacttgaatgctttgcttagaaatttcttctgccaggtaccctaaatcatctctctcaagttcaaagttccacagatctttagggcaggggcaaaaagccatcagtctttttgctgaagcagagcaagaatgacctttactccagttcccaacacatttcccacctccatctgaggccaccttagcctggacttcattgtctgtattactatcagcattttggtcaaggccattcaacaagtctctgggaagttccaaacatccccacatctttcttcttctgagccctccaaactgttgcaatctctgcctgttacccaattgcaaagtcactttcacattttcgggtatctttacataattgccctattctctgcagtaccaacgtactgtgttagt

SEQ ID NO: 872669 - DNA, 443 bp, Homo sapiens
ggtctagtgagaatgaattccatcggcatttgtttgtctggaaaagactctttttttcctctttcatttatgaaggataattttactgaatacaatattcttgtctgccagtttatttctttcagtactttgaatatattataccgttctcttccggcttacaaggtttttgctaagaaattcaccgttagtttgatgggatttcctttatakgtactagaggcttttctcttgctgttttaagaatgcattctttctctttcattttagacaatctgactataatgtgtcactcacgtaaaagaccctctgtgttgtctcttcttgtgaaccactgagcctcctgtattttaatgtctaatacattattagacttggaactttaaatatattatcatattaaataggtgttctaatatttcctttgtttctttgccctcaga

SEQ ID NO: 872670 - DNA, 609 bp, Homo sapiens
gaggttatagccaagtataatcgcaccaccgcactccagcctgggcggcagagccagaccttgtctcaaaaaaaaaaaaaaaaagaaaagaaagaaagaaaagaaaataacatttcttattcaccactttagaattctatctttcccttttttacaatcctatatctacccaatcactcaatttatctagctataactttgctgcttttctttttttgaaacagggtctctctgtgtttcccaagcwggagtacagtgacacaaacatggctcactgcagcctttacctcccgggctcaagtaatcttcccacttcagcctcctgagtagctgagtagcatgtgcatgccaccacgcccagctcatttttttttcttttttttttggtagagatgggaccttgccatgttgctcaggctggagtgcagtggcgcgatcttggcttactgcaacctctgcctcccaggttcaagcgattctcctgcctcagcctcccaagtagctgggattacaggcatgcaccaccatgcccagctaatttttgtattttttagtagagacggggtttctccatgttggtcaagctggtcccgaactcctgacctcagg

SEQ ID NO: 872671 - DNA, 600 bp, Homo sapiens
aggcttggggctcacaagagctgcagggctgaaagctgaatgtctgcagatggaaagatggcggtctttctgcactgacctctgcctggtcatccaacagcaaagctgccagttcacatgccttagtcacaaatgcagagctctggttagctttctcataccaagttttttttttttcttttgtgaaaagtgaaacataaaaaattgcagagaataccatgaccacatgtgacacagacttatcacatatattgccatttttttctattctctttggatatattttttaaagaaataaaatatcaggccagcatggtggctcatgcctgtaatcttagtactttgggaggcaaaggcgggcagattgcttgagtccaagagtttgagaccaacctgggcaacatggagaaaccctgtctctacaaaaaataaaaaaataagccaarcattgtgcacacgtctggtgtcagctacttgggaggctgaggcaggaggataacttgaccccgggaggtggaggttgcagtgagctgagatcatgccactgcactccagcctgggtgacggagtcagaacctgtctcaaaaaaaaaaaaaatat

SEQ ID NO: 872672 - DNA, 579 bp, Homo sapiens
gcttaactttttaagaaatgaccgaactcttttttcaaagtggctgttctattttatattttcatcaacaaaatatgagggttccggtttctctacagttttcttcaacaagattcaagtcaaataactaccatgctagtacatgtggccttttactctggaaaactgaatcagggatgggcccttggctgataggtgctctgccaggaaagctctgcccatgaggactgacagaaatcaattggggatcctctctctggyaaatttgatataaagaaggaataaagtgcttgatgaaaatatatgcagaaggaagcagagacacagaaatgctgagtcccatgaaggcagagcactagaggagagcttggtgaactgctccagccatgagggaaccggatctgcactggaccttgacggatctcccctctgacacagcctctcctcttctccatctgaaacccttccactgtttcttctaaagtagtccctgatgatcagcaagttctcccatgtctttactgtctccttgacctatcttatgtcttctctagaacttgcctttctgtccctaagaga

SEQ ID NO: 872673 - DNA, 585 bp, Homo sapiens
tcagcctgtgctgtttcaggatctccccacagtggaagtataatgacagtgttagtatgtctttccattattgcagaaactctattttttaaagtgcctttagcaggattctgggaattcactgtaggttaacagtggggctctcaccacttagaattcttttytcctaatgaaaggaatctgaacccttgaactctgtcagggtcttaggcatgttccctgggcctgattttcatcctcagaaaatggaggtcagatacatgtcaagaataaaagaaaggtcaaatgagagtagtcaaagactttgcacacatccagatgacgttaatgtttgaccatggtgtctagaacctgctaggcagttggtgagtgagtggatgaacaaatgaatgaatgagtaaatagtgagtaaatataatagtaaatattcagggaagctattgattatatgcatggtaataccttactttcaacgtgttcacctgaggaaaacggtgattgatataaaaagtgtaacaattctcagcctgctcctttcccaagtgattagggcaatataatttgttaatgtattgttcataaaga

SEQ ID NO: 872674 - DNA, 626 bp, Homo sapiens
ccaaatcaggagatcaccattgatacaataatgttatttaacctacagaacttattcagatctcactatgtgtccgaattatatccattaaagcaaaggaaaattttggatcatatttgtgttgctatttctctttagtttcctttaatctggaatagttccagtctttttgtccctagtaacattgacattttttaagtatgctggccagttttctgtttgtttgtctttagaatgtccctgaatttgagtttgtctggtgttttctcatgattaggtgtaggttctgcatttttggcaggaatacattcttggcacagaggtgatgctatgtctttcacagtgcatcatacaacgggaggcacagacatgtgccattgatttatcccacttctattaaggttacttagttaaggtggtgtctgtcaggtttatccaatgtaaagtcactaatttttctttttaattamaaaataacttgtggggagatactttgaaactatgcagtaaatatcccgccacttatcaaactttcaccactggttttggcatgcattgatgattcttccatgaactgataattatcacaatgctgaatgatgacttttctaattctgtcatttctt

SEQ ID NO: 872675 - DNA, 554 bp, Homo sapiens
aaaaataatagtaagttactcaaaaaagctgtatatgaggcagggcacaatgacttttaaattactatagaggccgggtatggtagctcacgcctgtaatcccagcactttgggaggcagaggcgggaggatcacgaggtcaggacatcgagaccaccctggccaacatgrtgaaaccctgtctctattaaaaatacaaaaattaggtgggtatggtggcacgtgcctgtagtcccagctactcaggaggctgaggcaagagaatcgcttgaacctaggaggtggaggttacagtgagcccagattgtgccaccacactccagcctggtgaaagagcgagactccattctcaaaacaacaaaacaaacaaatgaaaaaaaaaaactacaaaaaatcaccatagaaacaaaaagatactaactgtctaacatgtgcacgggtctacaattctttaacagcaaacaaaacatggcaatagtcaacgcttccacaataacagtttcaaaaatgtgagggctcaactcttctaaattctatctgaataagatgaacaa

SEQ ID NO: 872676 - DNA, 656 bp, Homo sapiens
agataattgcaatcctactgcacatttttttcacaagttggttttcccccactttttatgggtgtctatccaagagaaactagataagcacaggaaatatgtacagaatttttcactgaatgtctgtgtgttttagtttttttaaaaaaggaaaacatcctaattgtccctctgttgtacaatgtttacataaatgtgatttattcattcagtgggatgctatcaatgctatctagcagttaaaatggatcaataagatctacacatatttatagcacctaagttgttttttttttaactgcatttaggccaaaggaagcaaagaatatraaataatattttttgtatgtgagagagtaggctttctgcttgcttctatttaatattgttcccttgataatataaaatattgaataatttgatatacgaaacatcttaacgttatcactggtgggggaaaaacaatgtttcagtattttcattgtctaaatctctgctctgccttcagctcatgtgatgaacactgcaatgcaggagaattctgcaatccatgagtttgtgaaaatgttgacttaatttagtgtctaaatcctgcatctgcagttagcaaaaagattcaggatttagacattaaattaagtcaacatgtccacaaa

SEQ ID NO: 872677 - DNA, 595 bp, Homo sapiens
ccaagattacttaagccactacactgtaattatctcactattgattacttactgattttctgtctcttttattttgattctatgcataggtaggccctcgacgggactggttagtgtataatccagctttgtctggtcttcgaatgctatagttttacatgaaacaaaaataacagcatcataatagacagctcaaagcatattatcacctttctaagtatctgcatgtctaactctgtcaagattaatctctctctgttccccagctgcttctgaaacaggcctggtcttaaatctcaaccctatgacttcattgcttactcctagagccatctctacaaaaatttatttgccaaacctaaggagtaaggaaagctataaaaagaaagttatataagatggaccatgtgtaaataatcacgctaagtatataatgtttacaagaaagkggtaaggcattttaagaataaaatcacatcaaaacctatttgtccatgggaaccagactgcagagtaatgtgtgtttgggtttggaggtgatagatccaaccctatgacaacagtgaataaaggttgttggtaatttagtaccaga

SEQ ID NO: 872678 - DNA, 613 bp, Homo sapiens
aactttaaaggaaaatcttgggaatgaattgtccgtaggagcttaaaagctttgagatatttctgagaacctagaaggacatacacaggtataaggctgagtacctgtccagggctgtgcctgctcagggaaaacctgagaggccctaaacactcacctttggtcaatcttgaggctctgcagaaacaggaagtgaagtctaatgcagagttgcagatgccttgatgattgttgaaagtatgtctcaacacacacatagagtccctcagcaaagacagaagattggttaggaatgaatagatgaccactgagttactctactaagttaacaaagcagagacttcagtggctgcatacagcaaagaatgtgtactttacaggattattccagaatagtcatcaaacaaacacaactacagcaagaaataactgcaarccctgggtaagaccgtaagtgcattcccagagttgccacattaccatgttcaaaatatccagttcttaaataccacgacattcaaaggcacaaaaaaacagtggcccattcaaaggggaaaaagcaatcaatagcaactatttctagagaatcctagatgttgaacttactagacaa

SEQ ID NO: 872679 - DNA, 619 bp, Homo sapiens
actagatctttcacacattgatggtagggatgcaaaatggtacagccactttggaaacagtttggcaacttcttataaagttaaacctagtcttacatggtccagctgaccaaacacgtgaaaacttaacgtcaacacaaataattgcacaaaaatgcttatatcagcattattcataattaccagaacccaagatgtcyttaatacgtgaatgaataaattgtggtgcatgcatacaacggaataccattcagcaataaatagcaatcaactataaatccatacaataacatagatgaatcttaaatgtatattggtaagtgaaatgagccaatctgaaaatattacatgttgtaaactttatgtgacactctaggaaaggcacaactacagagacaataacagattcagtagctttcaggggattgtggggagtggttgaatagatgaagtacagggaattttttatgatagtgaaactattctgtatgatactgtaatgatggatatgagacggattgcatttttcaaagcccatggaacattataatacaaagagtgaacattaatgtatacaaataaaaatcaatttaaaaatctgggtatcggagcatggaat

SEQ ID NO: 872680 - DNA, 617 bp, Homo sapiens
cctgtgtccatgtgttattgttcaattcccacctatcagtgagaacatgcagtgtttgcttttttgtccctgctatagtttgctgagaatgatggtttccagtttcatccatgtccctacaaagggcatgaactgttcatttctatggctgcatagtattccatggtgtatatgtgccacattttcttaatccagtctatcgttgttggccatttgggttrgttccaagtctttgctgttgtgaatagtgccacaataaacatacgtgtgcatgtgtctttatagcagcatgatttataatcctttgggtatatacccagtaatgggatggctgggtcaaatggtatttctagttctagatttctcagtataattttttaatgtgtagtgtagatggagaattgtctgatctgaaattctctttgtgagtctagactttggtatttcttttcttatttatatgtttattctttcatattctgttgaaatagggctttcctagagtccacatattctcaggaacctgtaagtatcttatgcttcattatctgtaaatataataggtttctatgatagttctaagattgatatttctctccaatacagtcttttgtttt

SEQ ID NO: 872681 - DNA, 641 bp, Homo sapiens
ctgcttggttctgagacctggccagccccatagggtgggcatgcagggccctgcacaccaaagaacaaaggaccacagccaacaagcatccactgcacccaatgctgggctcagcactgggctggctctgggagtcagggtgcagggcgaagatgsaagagacatgagccccacagacacagaacagccatgagagtaatcagtgacagaagcccagaggggcggggcggggcggggcaagaaaatggcatgtgagcaagggggcaggtgagaggcttccagaagggcgggactgtggaggaatgacacattcatgctcccatccaaagggagcagcttctattcagcaagagctgcttgacatctggcaggaattggcacctagggtggccaggtcttctgattttttctagagaaggcagaaatgcagggtgtgtatgtgtgttatgtgtgcatgtgtgagagagtgtgtgcatatgtgtgagagtgggggtggggggtctcctgatttttcaaatattgactgaaggctcagtaagttttgctgcatcgagtccccgggctgcccctccaccctctgcaacagagacccacccagggaccaattgatgcgattcagaaggcggtgggtgactgggctg

SEQ ID NO: 872682 - DNA, 641 bp, Homo sapiens
ctgcttggttctgagacctggccagccccatagggtgggcatgcagggccctgcacaccaaagaacaaaggaccacagccaacaagcatccactgcacccaatgctgggctcagcactgggctggctctgggagtcagggtgcagggcgaagatggaagagacatgagccccacagacacagaacagccatgagagtaatcagtgacagaagcccagaggggcggggcggggcggggcaagaaaatggcatgtgagcaagggggcaggtgagaggcttccagaagggcgggactgtggaggaatgacacattcatgctcccatccaaagggagcagcttctattcrgcaagagctgcttgacatctggcaggaattggcacctagggtggccaggtcttctgattttttctagagaaggcagaaatgcagggtgtgtatgtgtgttatgtgtgcatgtgtgagagagtgtgtgcatatgtgtgagagtgggggtggggggtctcctgatttttcaaatattgactgaaggctcagtaagttttgctgcatcgagtccccgggctgcccctccaccctctgcaacagagacccacccagggaccaattgatgcgattcagaaggcggtgggtgactgggctg

SEQ ID NO: 872683 - DNA, 542 bp, Homo sapiens
tggtattatattctgaagtagtatagagcatctgaaacactaaatttttagaaaatcttcgtgtcgtggactaaacctttgattttaggcctgtgccccattgtaccattggagaactgagatgaaacaggagcgagagcctgttggaacatgctttcttcaagatggaacaaagactgttgagtatgctccatgtagatcacgtatgtataggatattgtaccagcttttaagaagaggggtgggaagcctagtttgtkaaaaatatgtgtgtgtgggtgtgtgtgtgtgtgtgagagagagagatattaaaagatatagacatattatgatgataacaaaatgaaaacaatcctactaatgtaaagatattacaaatgtgaagtaaacaggtttactttttctaagaactcattttcatcttccttcgttagtataataatagttactacctgattttaagaatctgtatttttgatgactaacagtcaaaagatgcttagttgaacttctcttaacagagaagatgtagaccccacaac

SEQ ID NO: 872684 - DNA, 544 bp, Homo sapiens
ccctatctgtacaaattattgagtaataatagtatctcttataggattggtataaagacttaaaaagttaatgtcatgtaaaatgctttagcataatacctgactcagagtaaaggcttaataaaccctagctgatcttactgtcagaatcartaatattactatttgtaatataattaccagacttaacaaatgggagaagtattaaccatctgcaggaataagtaccagagcctgcatcaaaatagtttatattcaacatgaagtctttaaattggcaaaagcactcagtttaatatatacctgttaagaaaattttaagagacagtcatggtttttagctggatactctgggaaaccaaataaagcagataattgtacagtatgataatcaaaaaaaggatgtctttataaatagcttgaaatagttccccagatgcaacttgaataaaggaaataaatagccgacttgctctaacttgaggttagagcagaattccttagtctgattcactggatgctggaaacccctgccccacatttt

SEQ ID NO: 872685 - DNA, 601 bp, Homo sapiens
gtgggatgtgagcctgaaaatggaagctagtaagtctgtacagtaaactgagaccccttctacctgctcttttctcttgtttacagttagacttattgccctcccagctggaggatctttctccagagaaccagaaaagacccagaaaaaatatttcagatattagcatttggtttcttgtcaggcttgtcacacattcaccttagggagaagctcactagtcaagcctgctatatgagtttcttagaactgctgtaacatgactacaaactgggtcacttaaaacaacagaaatttattctctyagagatctggaggctagaagtctgaaattagtgtcaagcagggccatgctccctccctctgagactgtagggaagaattcttccttgccttgtcctagtttctggtggcatctgtcaatccttggcattctttggcttatatagcagtgtcactctgtcttcacatttccttcactttgtgcctgtgtggtccttattaaggcaccagttattggatctagggcctaccttaatctagtatgatgtcatcttaactcattacatctgtgaagacctacgtccaaataaagtcaaat

SEQ ID NO: 872686 - DNA, 521 bp, Homo sapiens
gtggcgggcacctgtaatcccaacttctagggaggctgaggcaggagaatcattcgaagctgggaggcggaggttgcagtgagccgagatcatgccactgcactccagcctggtgacaacagcgaaactccatctcaaaaaaaaaaaaaaaaatgaagccagccacaaaagagtacatagtgtgtgattctatttatttatttaaagttgaaaaagaaccaaaattatagtgttcttgtttgcatacttacatattataatgataaaaaaaagaaacaagcagagagcttctggaacacygacaatgttcgtggagtttttcagcctaggtggtggttatgaattattactataattcgtaaggctatacatttgtttcatgctgttttctgtgttacatttcataataaaagagtccatacatttcaaataaaaataagcactttgggaaaagtaaattactctgtaaatcaccctttttgaaagcataaaaaccacttagttggttcataacaggatta

SEQ ID NO: 872687 - DNA, 694 bp, Homo sapiens
attcctcaattcccctttcccccagctcctaacaaccaccattctcctctctacttctgtgagtttgactattttagatacttcatatacatggaatcatgcagtatttgtcctgtgagtgtgttatctcacttagcataatgtccttcaggttatccataatttttgcatctaaatctaattcatctctgtttgttaaacttctcctcactgaatggtttattaatccactctacaaatgaatattgagtaccaaccatattccaagtgctattgtaggtgttgagcatagcgcaatgaaaaaaacaggcacaggtttctgctcttataaagctgacattctagtgtgggagtggtaggcaataagcaggataaataaagaagatttatagaatattaatgaatacatgttacagaaaacatgtaaaggaaagggagacaggaaatctaggggaagaggaaagktgcttgaattttacacggggtaagcaagtaaagtttcaccaggtaaaggtaataaaatagtgagccatttagttttttggagttgatcattccaggtagaagaatgggataagtcttgagggcaaaatatgcctggtatgttcaagggacaaaaagaagatagtgtaactaaagtggaattagcaaagaggaggttaggatgagatcagagaaaaaaagctggttttgc

SEQ ID NO: 872688 - DNA, 604 bp, Homo sapiens
aaaggcagaggcagtgggtgagaggctttcagttgcccctggaggctctgtccggggagttactgaactgctactggcttgatagctttggcagtgggtggctggatgctcaggcccggaggacctgcctagtgaggagatatgggaccaggcctttatgtataagcctggccgcttttccgtagggctgctgtagtgtgctggtggcctgctgtagtcactagytgcttcagatttttcagtacctggaggtatcacaagtgaagtctgtgaagcagcaaagatggtgccaacaccttcctctgggagctctatcccagggaggtttgaaacctctgtcagccagagaacaccatcagggctagctggagaccctggttggaagattccaccaggtgatgaggaatgggtttggggacctgctcaaaaaagcaatatgaagtggccatatttcaaatccatatgaaaaataagtaaatccccacttcacaccattcaggaaaagaagactagatacattaaatacttatatatgaaaaataaaacttagaaattattagaagaaaataaacaattaaaaacctagcattaaaattacttttat

SEQ ID NO: 872689 - DNA, 554 bp, Homo sapiens
acttttaaagaacattaatttttttcaaactattccaaactattgaagagaaggggcttcttcctaattcattctatgatgcccacttttatttaacacagtactggaagccctagccagagaaatcaggcaagtgaaagaaacaaaaccattcaaactggaacagaggcytaagcttcacctcccatcagatcagaagtggcattagattctgcacatatacaccatggaatactatgcagccataaaaaatgatgagttcatgtcctttgtagggacatggatgaagctggaaaccatcattctcagcaaactatcacaaggacaaaaaaacaaacaccacatgttctcactcatacgtgggaattgaacaatgagaacacttggacacaggaaggtaaacatcacacactggggcctgttgtggggtggggggagggaggagggatggcattaggagatatacctaatgcaaatgacgagttaatgggtgcagcacaccaacatggcaaatgtatacatatgtaacaaacctgcatgttgtgcacatgtac

SEQ ID NO: 872690 - DNA, 542 bp, Homo sapiens
  misc_feature 427: n = A,T,C or G
tgttgtgcaactcaaaaacaaaagaaagactaacaactccaaattacgtataagtagggtgaaagaaaaagtgaaaaaaaacagaatattttacaccatacacatgagcaaggttaaaaatttgacaatactaagtatttatgaaaaatgggaatatttttatgggagtgaatattcatacaactttggaamcaatattggaaatatatggtaaagttaacaaaatacacacctgatgatacagaaatttcacttttaattatacatttagaaatatttattaaatatttaaaacaaatatttatttaatatttaatatttatattaattaataattaatataaatatttaataaatatgcctaagaatgcatattcaagacatattttagagtattcatagcctcattgttcattatgctaataanaggcgaccaactcagcttccattattaggacaataggttaataattgattgaatactctaaacgttaaatgaataaaatagagttacaagtgtcccatgttattgagttgtataa

SEQ ID NO: 872691 - DNA, 611 bp, Homo sapiens
attactgggtatatacccaaaggactataaatcatgctgctataaagacacatgcacatgtatgtttattgtggcactattcacaatagcaaagacttggaaccaagccaaatgtccaacaatgatagactggattaagaaaatgtggcacatatacacaatggaatactatgcagccataaaaatgatgagttcatgtcctttgtagggacatggatgaaattggaaatcatcattctcagtaaactatcgcaaggacaaaaaaccaaacaccgcatgttctctctcataggtgggaactgaacaatgagaacagtgagaacaaacacatggacacaggaaggggaacatcacactctggggactgttgtagggtggggggagaggggagggatagcattaggagatatacctaatgctaaatgactagttaatgggtgcagcatgccagcatggcacatgtatacataygtaactaacctgcacattgtgcacatgtaccctaaaacttaaagtataataataataataaaaacccagttaattcaaaaaaaaacagttgttatatcaaatcctgtcatagtttttattttgtctataacctcaagtta

SEQ ID NO: 872692 - DNA, 615 bp, Homo sapiens
tctgttggggaatttgcagtcttggcaaggctaatcaacacttgctaattatcaagatcaagttttttcttgtggttgttgtggtttttctctagatgaagtcttgctctgtcacccaggctggagtgcagtggcacaatctcggctcactgcaaactctggctaccgggttcaagcgattctcctgcctcagcctcctgattggctgggataacaggcacacaccaccccgcccggttaatttttgtgttcttagtagagatggggtttcaccatgttggccaggctggtctcgaactcttgaacttgtgcttctgcctgcctcagcctcccaaagtgctgggattacaggcgtaagccaccaaacccggcccaagatcaagtttacaaggaccatcttcctaacaaggtgagaagataatgtctatgatagcaytggcattagtatttcagaggtgttcacacgccgaactcctcctccctactaccatcctaaaaactttcagagctttctttctgtttctcattgttccatgttattccacgaacttgctgcttttaaagcctttgcacatgctctttcctctgagtggaatagggctttgctctctcatt

SEQ ID NO: 872693 - DNA, 603 bp, Homo sapiens
atctttcatggtggtaggcaaaagagcatgtgcaggggaactcccctttataaaaccatcagaccttgtgagacttattcactatcatgagaaaaacatgggaaagaccttccctcatgattcaattacttcccactgkgtccctctcacaacacatgggaattgtgagagctacaattcaagatgagatttgggtggggacacagccaaactatatcattctgcccctgccccctcccaaatttcatgtcttcacattttaaaaccaatcatgccttcccaacagtcccccaaagtcttaactcatttcagcattaactcaaaagtccacaatccaaagtgtcatctgagacaaggctagtcccttccacctatgagcctgtaaaataaaaaaaaagtcacttcctagatataatgagggtacaggcattgggtaaatagacacattccaaatgggagaaagtggccaaaatgaaggagctacaggatctatgcaagtctgaagtccagcaggacagccagatcttaaagctctgaaatgatctcctttgacttcatgtctcacatcccagtcatgctgatgcaagaggtgggctctcttgg

SEQ ID NO: 872694 - DNA, 603 bp, Homo sapiens
atctttcatggtggtaggcaaaagagcatgtgcaggggaactcccctttataaaaccatcagaccttgtgagacttattcactatcatgagaaaaacatgggaaagaccttccctcatgattcaattacttcccactgggtccctctcacaacacatgggaattgtgagagctacaattcaagatgagatttgggtggggacacagccaaactatatcattctgcccctgccccctcccaaatttcatgtcytcacattttaaaaccaatcatgccttcccaacagtcccccaaagtcttaactcatttcagcattaactcaaaagtccacaatccaaagtgtcatctgagacaaggctagtcccttccacctatgagcctgtaaaataaaaaaaaagtcacttcctagatataatgagggtacaggcattgggtaaatagacacattccaaatgggagaaagtggccaaaatgaaggagctacaggatctatgcaagtctgaagtccagcaggacagccagatcttaaagctctgaaatgatctcctttgacttcatgtctcacatcccagtcatgctgatgcaagaggtgggctctcttgg

SEQ ID NO: 872695 - DNA, 603 bp, Homo sapiens
atctttcatggtggtaggcaaaagagcatgtgcaggggaactcccctttataaaaccatcagaccttgtgagacttattcactatcatgagaaaaacatgggaaagaccttccctcatgattcaattacttcccactgggtccctctcacaacacatgggaattgtgagagctacaattcaagatgagatttgggtggggacacagccaaactatatcattctgcccctgccccctcccaaatttcatgtcttcacattttaaaaccaatcatgccttcccaacagtcccccaaagtcttaactcatttcagcattaactcaaaagtccacaatccaaagtrtcatctgagacaaggctagtcccttccacctatgagcctgtaaaataaaaaaaaagtcacttcctagatataatgagggtacaggcattgggtaaatagacacattccaaatgggagaaagtggccaaaatgaaggagctacaggatctatgcaagtctgaagtccagcaggacagccagatcttaaagctctgaaatgatctcctttgacttcatgtctcacatcccagtcatgctgatgcaagaggtgggctctcttgg

SEQ ID NO: 872696 - DNA, 671 bp, Homo sapiens
tgctggtgaatctaccgttctggggtctggaggatggtggccctcttctcacagctccactagttagttccccagtagggactctatgtgggggcttcaaccccacatttcccttctgcactgccctagcagaggttctccatgagggccccgcccctgcagcaaaattctgcctggacatccaggcatttccatacatcctctgaaatctaggcagaggttccaaaacctcaattcttgatttctgtgaacccacaggattaataccatgtgtaaactgccaaggcttggggcttgtacccaatgaagycatggcctgagctgtaccttggtcccttatagccatggctagagcagctgagacatagaggaccaagtccctaggtggcacacagcaggggggcctggcctggcccatgaaaccatttttcccctagtcctctagatctgtgatgggagggctgccacaaagatatctgacattccctggagacattttccccattgtcttggtgattaatactcgtctctttgttacgtatggaaacttctgtggcaggcttgaatttctccccagaaaataagattttcttttctattgcattgtcaggctgcaaattttccaattatggtctgcttcctcttgaacactttgttccttagaatttttt

SEQ ID NO: 872697 - DNA, 595 bp, Homo sapiens
aggatggactatacattgggacacaaaataaatcccaaaaagtttattaaacaaagtttttaaattatactttaagtactagggtacatgtgcacaacatgtaggtttgatacataggtatacatgtgccaagttggtttgytgcacccgtcaactcgtcatttacattaggtatttctcctaatgctatccctctcccaggcctccaccccccgagaggtcccagtgtgtgatattctctgccctgtgtccaagtgttctcattgttcaattccctcctatgagtgagaacatgtggttttctgtccttgtgataatttgctgagaatgatggtttccaacttcatccatgtcaccacaaaggacatgaactcatccctttttatgggtgcatagtattccatggtgtatatgtgccacattttctttatccagtctatcattgatggacatttgggttgttccaagtctttgctattgtgaatagtgccgcaataaacatacgtgtgcatgtgtgtttaaaagtagcatgatttataatcctttgggtatatatccagtaataggatagctgggtcaaatggtatttctagtt

SEQ ID NO: 872698 - DNA, 664 bp, Homo sapiens
gttatgaaatttttttcacagcaggatgactatggtcaaaaacaatgtattgtatatttcaaaataagagagtaactttcaaatgtctcatcataaaaaagataggtaaataaggtgatggatacgttaatggcttgatttaatcattctacattgtatacatgtatcaaaatattacactgtaccccttaaatgtatatagttataatttgtaaatttaaaatattaattcaaaaatataagcaccatgttcaagatggtttgtttcctaaatatctgaaacatttttgggttttctgcactgccttctcattgaattgttaagaactattttcaagtttatcagtttattccctgtcttattctggtatagmatttgtcatattaattgcagttttattttttaattacattttttatttctaaaatatttgccactttatttattacacccaattattgtcatttcagtttttttcccacaattattttcttattttttcctggaaatacctttattaccatttaatacattcatatcatgtgtattttaatgttttataaaataaattttatcttaatgttatgacatcatattttaattttatcattaaattttttcacatatgaaattttacactgagggtttatttttgttacaagt

SEQ ID NO: 872699 - DNA, 652 bp, Homo sapiens
tgagaaaaagtgatataacttcaatatgctcttccctctatcttaggatgcccacccttggaacccagacactgctatgaggaaacaagcgactagctcccacttatgtgtgagaacatgtggtaggcattttctgttcctgcattaattcgcttaggattatagcgtccagcttcatccatgttgctgcaaaggacatgattttgttctttttatggccacgtaatattccaagrtgtagatataccacattttctttatccaatccactattgatgggcacctaggtcaattccatgtctttgctattataaatagtgtggcaatgaatataccagtgaatgtgttttttttggtataatttatttatatatacctattttcctttaggtatatatccaagaatggaattaatgggtcaaatgggggttctgttttaaattctctgagaaatctccaaactgctttccacaggggacgaattaatttgcattctcaccaacaatgtataaatgtactctttgtttctgctaccttgccagcagtggttttttgactttttaataataaccattctgactggtgtgaaatggtatctcattgtggtttttgatttgcatttttctaatgatgattgatgatgaacattttt

SEQ ID NO: 872700 - DNA, 652 bp, Homo sapiens
tgagaaaaagtgatataacttcaatatgctcttccctctatcttaggatgcccacccttggaacccagacactgctatgaggaaacaagcgactagctcccacttatgtgtgagaacatgtggtaggcattttctgttcctgcattaattcgcttaggattatagcgtccagcttcatccatgttgctgcaaaggacatgattttgttctttttatggccacgtaatattccaagatgtagatataycacattttctttatccaatccactattgatgggcacctaggtcaattccatgtctttgctattataaatagtgtggcaatgaatataccagtgaatgtgttttttttggtataatttatttatatatacctattttcctttaggtatatatccaagaatggaattaatgggtcaaatgggggttctgttttaaattctctgagaaatctccaaactgctttccacaggggacgaattaatttgcattctcaccaacaatgtataaatgtactctttgtttctgctaccttgccagcagtggttttttgactttttaataataaccattctgactggtgtgaaatggtatctcattgtggtttttgatttgcatttttctaatgatgattgatgatgaacattttt

SEQ ID NO: 872701 - DNA, 652 bp, Homo sapiens
tgagaaaaagtgatataacttcaatatgctcttccctctatcttaggatgcccacccttggaacccagacactgctatgaggaaacaagcgactagctcccacttatgtgtgagaacatgtggtaggcattttctgttcctgcattaattcgcttaggattatagcgtccagcttcatccatgttgctgcaaaggacatgattttgttctttttatggccacgtaatattccaagatgtagatataccacattttctttatccaatccactattgatgggcacctaggtcrattccatgtctttgctattataaatagtgtggcaatgaatataccagtgaatgtgttttttttggtataatttatttatatatacctattttcctttaggtatatatccaagaatggaattaatgggtcaaatgggggttctgttttaaattctctgagaaatctccaaactgctttccacaggggacgaattaatttgcattctcaccaacaatgtataaatgtactctttgtttctgctaccttgccagcagtggttttttgactttttaataataaccattctgactggtgtgaaatggtatctcattgtggtttttgatttgcatttttctaatgatgattgatgatgaacattttt

SEQ ID NO: 872702 - DNA, 623 bp, Homo sapiens
atacaatttaggtttgcacatgcaacgatgtccaaaaagaaaatcattgtatgtttatacatgcaataatggtttagcctactgttcccaggctacaacctgtagagaatgttaatgtactgaatactgtaggcaactgtaatacaatgataggtatttgtgtatttaaatatatgtaagcatacaaaggcacagtaaggatacagtataaaagacaaaaaaaaaaaaaaggtacattttcatagtgcattctactaagccagtcttgctttgctataaagaaataccgaagactgggtaattgatatagaaaagaggtttaattgactcacagcttcttcgggctgtgcaagcatggtgctgccatagcttggtttytggggaggctttggggagcttttattcagggaagaaggagaacccggagcttgtgcattacatggtgaaagcaggagcaagagagagagtagtaggtgggggaggtgtcacacacttttaaatgacaagatcccatgtgaactcagagcaagagctcacttaccatcaccgggggaatggcacaagccattcatgagggatctgcccccacgatccaaatacctcccaccaggccccacctccaa

SEQ ID NO: 872703 - DNA, 589 bp, Homo sapiens
ggatgacactgaagtacaacttgattgtaaaactagttttgtaactagataaatatccttattcatttaacttttatttgtatttataaataataattgggccaggagtggtggctcattcctgtaatcccagcactttgggaggctgaggcaggtggatcacttgagctaaagagttcaagaccagcctgggcaacatggcaaacccccctctctaaaaacaaactacataaattagatgagtatggtggtgcacatctgtagtcccagctacttgggaggctgaggcatgagaatcacttgagctcagaggaggtggagtttgcagtgagctatgattacaccacttcactccagccagggctacagascaagatcctgcttaaaataaataaatgagtaataaaaataataattgtaccagagttaacattcctaatgcttatatattgtaggctttgaattaaatttgttaagtaaattctcattcctgaaaactctaccctgaggtatgcattattattatccatcacattttatagaagatcaaacttctgtagcaaatgagcttgaattcacaattttagta

SEQ ID NO: 872704 - DNA, 645 bp, Homo sapiens
taataatgaaaaattaaaaagatattctcaaggaggttatattccagttgaagacagacaatacattttaaaaatacatatgtaaatgcattacatatcacaggataatgaacaccaaagataaaaataaagcaagagacagaattaggatgtaataagaaagatacattgcttactaatagagaattgtcaggaatgggtgcacttacaagtggtatttaagtagagataccacagtggccagaaaggctacaatggaatggaatgaatggggtggccagaaaaygaaaacttcaatatgaatagatgtggaacacgcaggataggacaaagcgtggatccacaacttgccattacttcccttgatattggctagtctcccagtacagcactggcagggatcattattgctacctcttgatatcctaggaactttgtagtcatcctcagaaatgttgccaagctcatggattgctttgctaatattgcttcccagatctttgcaaatgacgaatcagccttgtaggggcacaaagaattgaaaatcattttcatagcatgtatacgcatcctaaagtgttaaaattattgaaacatatccctagtcaggagccaatggattgtactatattgttctggtcattg

SEQ ID NO: 872705 - DNA, 578 bp, Homo sapiens
aattcactcaaaaccacacaactacatggaaacttaacaacctgttcctgaatgactactgggtaaacaatgaaattaaggtagaaataaataagttctttgaaaccaatgggaacaaagacagtgtaccaaaacctctgggacacagctaaaacagtgtttagatggaaatttatagcattaaatgcccacaggagaaagcaggaaagatctaaaatcgacaccctaacatcacaattaaaagaactagagaatcaagagcaaacaaattgaaaacctagaagaagacaagaaattactaagatcagagcagaactgaaggagacagaggcacgaaaaacacttcaaaaaatcaacaaatccaggagstgtttttttgaaaagattaacaaaatagatagactgttagccagactaataaagaagaaaagagagaagaatcaaatagacacaataaaaaaagataaagggggtatcaccactgatcccacagaaatacaaagtaccatcagagaatactataaacacctctatgcaaataaacaagaaaacccagaagaaatggataaatttctgga

SEQ ID NO: 872706 - DNA, 619 bp, Homo sapiens
atctttgttggtttaaagtctgttttgtcagagactagtattgcaacccctgcttttttttgcttttcatttgcttgatagatcttcctccgtccctttattttgagcctatgtgtgtctctgcatgtgagatgggtctcctgaatacagcacaccgatgggtctggagtgtttatccaatttggcagtctgtgtcttttaactggggcatttagcccatttacatttaaggttaatattgttatgtattaatttgatcctgtcattgtgatgttagctggttattttgwccagcagtttcttcatagtattgatggtcttcacaatttgacatgtttttgcagtggctggtactggttgttcctttccatgtttagtgcttccttcaggagctcttgtaaggcaggcttggtggtgacaaaatctctcagcatttgcttctctgtaaaggattttatttctcattcacttatgaagcttaatttggctggatacgaaattctgggttgaaaattcttttctttaagaatgttgaatattggcccccattctcttctggcttgtagggtttctgccaagaggtttgctgttagtctgatgggcttccctttgtgggtaa

SEQ ID NO: 872707 - DNA, 606 bp, Homo sapiens
atgaccagtgatgatgagctttttttcatatgtttcttggctgcataaatatcttcttttgagaagtgtctgttcatatcctttgcccacattttcatggggttgtttgctttttttcttgtgaatttgtttaagtttcttgtagatttttaatatgagatttttgtcagatgggtacactgcaaaaattttctcccattctgtaggttgcctgttcactctgatgatagtttcaggcaggaactggttatttggaaaaattaacaatataggcagctagccagactaataaggaagaaaagagagaagaatcraatagacacaataaaaaatgataaaggggtatcaccactgatcccacagaaatacaaaccaccatcagagaattctataaacacctctatgcaaataaactagaaaatctagaagaaacgtgtacattcctggacacacacactctcccaggactaaaccaggaagaagtcgaatcccttaatagaccaataacaagttctgaaattgaggcaataattaatagcctattaaccaaaaaagcccagagccagacagattcacagccgaattctaccagaggtacaaagagga

SEQ ID NO: 872708 - DNA, 599 bp, Homo sapiens
gctctgcataaaggaattatctggccacaaaagtgaataccaccaagatttggcaactctaatctaaggatagtgccatctttcttatcagacattagttcagaaacgagcacatgacagattctggccattgacttaaaagaaaacattggatgtcatcttcagaaacagttcttcctcactcyttttttttttttttttttttttgagacggagtctcgctctgtcgcccaggctggagtgcagtggcatgatcttggctcactgcaaccttcgcctcccgggttcatgccattctcctgcctcagcctcccaagttcttcttcactcttaaacaacaaccataagaagcagacaacagagtggagtgacaccaaagacctgagtcctttaagatgtgcttcagttcatgttccacccaattgtaaaacctgcctgatctctcagcatcggcttatgtgaactaacactctgttttgtgtttgggtttcagttatttgcatctgcaaacacctaactgacacaagtgtgatgggtcgataaggtttaagttggctctgggaagatgagtgaacactgagaagcgtgaacagctaaga

SEQ ID NO: 872709 - DNA, 657 bp, Homo sapiens
ccaaatgaaaccaaccagaacagacttacccaggaccatgtagctgtcaccatctgaggccacttacctggcccccaaaaggccctaatggccctcagtgccattccaccctgacctggttctctctctgccccctaccatctgatgccatccacacttgtactgccctggcacatcctgagggttcagacctagccgtttttcctctccaccttggatgttcaaaagaagagtacctgtcctaattgaaaagtttggctaaagtagacagctttcacattagagggtgatgggccttgggccarctctgattaaagacactgtcctggtgtttgccgtcaggatagggcctggaaactggcaggagaagactcttgtgaccattttggatcccttcactgacagtaggtgataaaaggaccctctggcccccactcttaatgtaactgcatttgtgttatgtatgtgtttccatttgtgctcttttaaaattatgtctgtacgtatattaatatattatgtagttacacacatacacacacacacacacacacacacacacacacacatatatatattctgcacaactccagtctcaactcagttatccctcttctgtatgtccaagttctcttgtgggcatctgcaagtgatggc

SEQ ID NO: 872710 - DNA, 642 bp, Homo sapiens
gtggcaaagatacagacaccccatttaaaccctaatttttgtggtgagtcaattgtgggctggtagcaagaagacaggttcattatatatacttccatgtgttcctttctctaatataggttctgaacaatgacgggtcaagtctggacgtgggccaactttattctagacaatttcccagaaaagttgaaaataaagacctgggacataaattggaacctgaattaacaatctcatgggacagagtggtagcctggtacaggggtctgaacacatcagaagaaatataaataaatagaggaattttaaaccagcaaacaatcactaaagtgagaaaagagattaaactcattttagccataccaagtctcaataagatttactacacacatgtcttttctaagtaagttactrccagatatcatgttgcatattaagcaaggaaatcaaggcagaggaaaaaaataagatgtagaaaacagtgcatcttcactaacatcctagcgaataaaagtcccaaagcccagttttatatagaggaatttaaatggtcttcaataccgttatcattaatcataatcatttgtacaaatatttgtacaatatttattgtccacttattatattcaaggtgctgtttaa

SEQ ID NO: 872711 - DNA, 613 bp, Homo sapiens
tggataggaagaatcaatatcttgaaaatggccatactgctcaaagtaatttatagattcaatgccatctccatcaagctaccaatgactttcttcacagaattggaaaaaactactttaaacttcatatggaaccaaaaaagagcccgcatagccaagacaatcctgggcaagaagaacaaagctggaggcatcacgctacctgacttcaaactatactacaaggctacagaaacaaaacagctcagtactagtaccaaaacagatatatagaccaacggaaccgagcagaggcctsagaaataacaccacacatctacaaccatctgatctttgacaaacctgacacaaaaaagcaatggggaaaagattccctatttaataaacgttattggataaactggctagccatatgcagaaaactgaaactggacaccttctttacaccttatgcaaaaatcaactcaagatggatcaaagacttaaacataagacctaggaccataaaaatcctagaagaaaatctgggccataccattcagtttgtaggcatgggcaaagacttcattactaaagcaccaattttggcaacaaaagccaaaattgacaaatg

SEQ ID NO: 872712 - DNA, 640 bp, Homo sapiens
ggcaacctacagaatgggagaaaatgtttgcaatctatcaatcacctgacaaagggctaatatccagaatctacaaagaacttaaacaaatttataagaaaaaaaacatcaaaaattgggcaaaggatatgaacagacacttctcgaaagtaaacatttatgcagccaacagacatatgaaaaaatgctcatcaycactggtcattagagaaatgcaaatcgaaaccacaatgagataccatctcatgccagttagaatggccatcattcaaaagtcaggaaacaacagatgctggagatgatatggagaaataggaatgcttttacaccgttggtaggagtgtaaactagttcaaccattctggaagacagtgtggcgattcctcaaggatctagaactagaaataccatttgatccagcaatcccattactgggtatatacccaaaggattagaaatcattctactataaagacacatgcacacgtgtgtatattgcagcactattcacaatagcaaagacttggaacctacccaaatgtccatcaataatagactggataaagaaaatgtggcacatatacacaatagaatactatgtagccataaaaaagaatgagttcatgacttttgcagggac

SEQ ID NO: 872713 - DNA, 624 bp, Homo sapiens
atgtccctacaaaggacaggaactcatccttttttatggctacatattattccatggtgtatatgcgccacattttcttaatccagtatatcagtgatggacatttgggttggttccaagtctttgctattgtgaatagtgccacaataaacatatgtgtgcatttgtcttcmaaaattttctcccattctgtagattgcctattcactctgatggtgttttcctttgttgtgcagaagctcttcagtttaattagatcccatttgtctattttggcttttgttgccattgcttttggtgttttagtcgtgaagtccttgcccaagcctgtgtcctgaatggtattgcctaggttttcttctagggtttttatggccttagatctaacattgaagtctttaatccatcttgaattaatttttgtataaggtgtaaggaatggatccagtttcagctttctacatatggctagccagttttcccagcaccatttattaaatagggaatcttttttcctatttcttgtttttgtcaggattgtcaaagaccagatggttgtagatgtgtggtgttatttctgaggcctctgttttgttccattggtctatctctgtgttttggttc

SEQ ID NO: 872714 - DNA, 623 bp, Homo sapiens
ctgccttgtcctctgttgcatgagtcgattacttggttgccgtctcagtttcactgtcattttcagaagacttcatttagctggtcttaggaactttaaattactatttccctatgtgcctcctaatttctgtccatttgcttgtgaaacattgggaacaaaaagcattgaagtctctgtctctaaaattactgactgagatttggtatttaacagctatgagcaataagattagatagatgtggttatgttttgttgcagctatgcccactatgtgtgattaagaggcattaggatagaaatcagggaacttttctctttgctatttcatttcatttatacgctataaataaataaataaataaataaataaataaatccgtcttctagcacttctttcctgtcttcgattcargcaaatcagctttgcttatccaatccatgctgccgctattgcgcagaacctgtttgttctggtcattcccatctaaatcctcttcatttcctttacttcattcaacatttcttttgttggattccatgttgtggtttatgagattcatggctcagctcatttatattattcagatagtgtgaataagagaattcaattttcgtcaggg

SEQ ID NO: 872715 - DNA, 644 bp, Homo sapiens
agcatgttctcgaaaaggtatatgctatcaaaataccaataatattcttcccagcagtaaaaaaaaagtattaaaatttctataaaaccacaaaggaccccaaataaccaaaacaatagtgagcaaaaagaacaaaactaaaggcatcagattgcctgacttcaaaatatactacaaagctatagtaacccaaactacatgatactggtatgaaaacagatacatagaccaaataaatggaatagggagtccagaaataarttcatgtatttacagccaactgtaaatacaattttgacaaaggcaccaaggacatacacttgggaaaaggcaccctcattaataaatggtgctgggaatactagatatccatatgtagaagaatgaaactagacccctatctctcaccatatacaaaagtcaactcaagatggattaaaacttaaacataagacctgaaactataaaattactagaggaaaacggaggggaaatggtctagaactttggtctaggcagagattttatggcccagccttcaaaagcacaagcaacaaaaccaagaaaagacaaatggaactataccaaactaaaaacagcttctacacaacaaaggaaacaatcaacagtgttaagatacaatc

SEQ ID NO: 872716 - DNA, 629 bp, Homo sapiens
aggttagtttgttgcaatatatttttatttacaaaaaacagcctgtgggacagatttggcttatgaccacagtttgtcaattcctgatgtacattaagtacttaataagtaagaaccactactatcaggacctaatgtgtctttccttactgagtgttttgattctgtaatcctagtacaaattaagccgaaactaatctaacatttggcaatcatatttggaggtttaatttrcgttcctcccataagttctcccatacaaatagtacaggaaaattatatgagccaatatagtgaatctattcctggcagggctaggatgctgaagtttgagaattttaatatctcattctctttttcctgcttaattgtaatgagtgaagcccctaatattttaacttctaccttatctagtatctaaaataattataatctagtcatgaagcatgctacagactctaagtgggtccgaaattaagaagtccccataaactcactgtcctgaggcaaagcctgagaactcaagtctttcaagactttctctaagatacactaatttctctaagatatactaatttctccaaaattcactgtctttgtgttttgattatctctatagcttgccaggt

SEQ ID NO: 872717 - DNA, 648 bp, Homo sapiens
cttattcctttctattgttttgtctttttttactttatgtgagtttattttacacttattgcatttcattagaatactgtggttgttgctgtttttgtttatgtatttttagcacagatactttaatcttttaatgtcagcagatttgaaagtttgttttgttttttccaggcctagatgaaattagatgttagggtatagaaaactgaaacgagaacattttatacttttccttttagtttagagagycaaagctgcgcgcgtgcacgcacacacacacacacacacacaattttctttcaaagttcaaaagtatttttctagcctgaagtaaccaacctggaaacagaaaaaaatagaaagaaaaaaataagaatatattaagttcatgtcactatgctagatctcattactcaaattatctcattttatctttagaatgatcctgtgaggctagttacactagttctgggcaacactcaatctctaccttttggaaaccctagggatcaatttagaaacctttgcagtggtgctcacaagaaactaaacgacattgctcattgttctccccagtgcagaccccaaatgacttcttccttgtttgatattctacgttacagggaatgacatcattaagctggcact

SEQ ID NO: 872718 - DNA, 621 bp, Homo sapiens
tcttctgaaatccagacttgtgtagccaatgctgactcattatttccaacggaatactaaaaactcatgtcaaactgctgtaccagaattttctgtgctttaaaaaaacgttttacacacatgctctcctctatctcaaggaatgacaactctatccatccaggtgctgaggttaaaatctttggagtcattyttaaggtctctccatctccacagacaaaaaatgcttttggctctatctttaaaatatatacagaatgttaccacttctcactgcttctactgctagcgactctgaccaaggcatcctcaactcttacctgggttattgcattagattcttacctagtcttcctgctggtatatttgtcctgctacaatctattcacacagcaactgtatgatactttaaaatgttaagctagattacctcactcctcctaccaaaataaaagttaaagtttttaccataaccttcaaggccatggtatctggtccctgattacctctgacctcatcacctattatttgtcctcctcgctcattctgttttaggaacactagcctccttgtttttgcttgctcatgataggcatattcctgcctcagggtcgtcacaaa

SEQ ID NO: 872719 - DNA, 598 bp, Homo sapiens
catccgggttacactgatacaagaggtgggttctcatggtcttgggcagcgctgctcctgtgactttgcagagtacagcctccctcctggctgctttcatgggttggcattgtgtctgcagcttttccaggcgcttggtgcaagctgttggtggatctaccattctggggtctggagacagtggccctcttctcacagctccactaggyagtacctcagtagggactctgtgtgggggctccgaccccacatttcccttatgcactgccctagcaaaggctctgcacgagggccccaccgctgcagcaaacttctgcctgggcatccaggtgtttccatacatctgaaatctaggtggaggttcccaaacctaaattcttgacttctgtgcacctgcaggctcaacaccatgtggaagctgccaaggcttgaggcttccaccctctgaagccacaggccaagctgtaccttcaacccttccagccacggctggagtggctgggatgcagggcaccaaggacctatgctacacatagcacagggaaccttggcccagcccacaaaacaactttttcctcctgggcctctgggcctatga

SEQ ID NO: 872720 - DNA, 699 bp, Homo sapiens
catcgtaagaatttttataattaatgtgacgaacaggagaagcacaaaagcatatgtctgtgggtgtcaatgggtacttgcacacctgtattttatattgtggattatgtttttcttgtgatagtagattagtgaaaggtgctgtcatatacacatgtatataaattaatgtctatattgttattgatccaactggcaagatcaagttcccaggtaacacttctactagataatagaacaaatattagcatgctgtggttgttgtcaactaataggcattgggtcacagatagattttcttgtttctagttgttcataaaaacattcactgactatatctgacattatttgtaatagatgtgtggacaaagatcaccaygacagaaattgacagttaagacacacacacacacacacacacacacacacacacacagacagtaattgtttaaatttttcaaagcacacatactgaaattttaattataatatatttatattaacaaaatatactagtgataaatatatattttctgtaaggtttataatagttttcttccaccacctccccgctccccactttaacaacaacaacaaaaatctaccacttgttatataggtaggttttaaaattaccagagatgattttgtctgatgattttatcttgtatctgataacctggttttaaaatattcaca

SEQ ID NO: 872721 - DNA, 616 bp, Homo sapiens
accccactccctgaaaattcctacctttagatttcaccacccgtcattcctagtttattgtccattttctgcaatattactctgtcttagcacttgtgttatacacacatatattcacatacatgcagatatgaaaatgcatatatatgcacatacatatgtaaaacacatatgtagaatctatatgtagataatcttccaaacactctgacctatcatctctgtgacctcaatcctctctccaaatgattttgtcttccactctaccttaaccactttctatctagatctccaaagatattatattttgtaactgcaatatttctacgacctcaaattcatgcaccatctctctgaccacratatcttaactttccagttcactccctccagcactcccaatacgaaaaatcctttgacctcaccaagtcttcctattcctttatctaagagcttcatttctgttcctcacccatttgaagtcctgtgttccctttttatatagcttaaattccacagcaaacatattaatcacttctttgcatgccagcttaacttcctgacccttctcattgtttgcataattcacatgtcaaaactcttgtttaatccaatt

SEQ ID NO: 872722 - DNA, 630 bp, Homo sapiens
acctgccagagctatttagagagtgtttgctttcttaccatgaaaatcaaaatcgccttgttaccccatttttctatatactgtaaattaattcaaaaataatcacaaaccttatagttaagcccatctcccacagtcccataaaatgtctgaaacttyggcccaattttaaattaatcttatctaagtgtacataacatacatgctcaaatgtacatatttagtaatagtaacaacaaaattaaaaaatggtttcaaatagaaaaaaaaatagtgaaaggggtagctaaaaatagctaaaggtgtgactaaaattagctaaaaaaaatagctaaagggaatttgtgttaaattttaatacacagacacacatatacatattttattctattattataatttgactttctaaaagattttcttctgctttacaaagaaaaaccaaataatctgacaaagtggtgtaactagatgtgtctgccatgcagaatgtttaaaaggaaggtcttagtttgagtgcaagtgttttgaaccatgagttacaaaatggatatgtggcttatctccagctgggattcatcaagggagcttgtgccagtcacttcttttggtccttcagttggcccatct

SEQ ID NO: 872723 - DNA, 591 bp, Homo sapiens
aaagaaaaaccaaataatctgacaaagtggtgtaactagatgtgtctgccatgcagaatgtttaaaaggaaggtcttagtttgagtgcaagtgttttgaaccatgagttacaaaatggatatgtggcttatctccagctgggattcatcaagggagcttgtgccagtcacttcttttggtccttcagttggcccatctgaaacatcccaggyatggatgagaggagggtaagggctgaggtcctttggatccctggcctactagaatcatctccagaatatatgccaagacattattctctcccaattcggtgtatttttctaaagggaagaccaaacatctgagtgttataaaagaaaaaatattatagggcttgaatacactcatgtctgaccattaatttatttggtcattcagcaaatgctcattgaagttgatgctatggcctgagactatgacagaaggttaaagtgtgtgaggggacacacacaagtaatcaatgacagtatgatgtgatcaacaatattataagcagcaagcagagtccttagcaaacaaagacgcaaattgcagaacccttttgaagcagat

SEQ ID NO: 872724 - DNA, 604 bp, Homo sapiens
caactaattagatgaggaagccaaaagtttggtctccagccccaggtacatccctatctcctctgtattctgaaagattatgaataggaaggaagctcaaatacgaagatgcagaaaaaggaagtgggaagaaaggacaggatggtcagaggtgccactgggaggttcttgtgtgggtagttgaggatttaaactaaaagtcccatcttggagaaaaatgccaaagaaagccaagttggtaaatccaaaagcgtgggtcagccatgggaaagagaagcgtaagcctcctctcacaatgcctaagtgtgggggctgtgattcagatgatgtgtctggttcgggagcccttgcccttttctatctctcttcaaggtttctagtcagyatcccactgcacattgtgtagttaaatattttgcaccatatccctcaatacccctcctggactttctcatctatgcattgggacagataataatttttgacaaaaagaggagagggactgtaagatttacaaggaggggtgtagaaaattggtaagcactgctaacactgattcacacttttgctgaaaacctgtttaaatttcttttttaagtttcat

SEQ ID NO: 872725 - DNA, 602 bp, Homo sapiens
cacagaatacagagattatctagtgagggtagtgaggatgatgacggtatgaagaccataaatgacaatagtatcatttcatgatattttcagatgttataaggttataaaaggttttggagggaggtctgacttaaagactgtgcttcagtgtactaaaattattttcacttcctctgtaccataatcacttccacttattttgcagttattcctgtcatgaactgttgaaaggacttctcacattatctcaaacaatcctcaaaacttccatgaagtagataggtcatcctaattttatacatgaattgttcataaaagaaagaaatttaaaaatgggcaatgcaaaaatggtttcatatgtataataatgttatcatgtaaagttatccgtgatatatgtatatcatgttagacatgatacatgtaatgtaattgctgctactgccwatgactagttcctttgtctgcagaagtcagcatcttacctagcctagaatacactttcaatatgcatctttatatagaaaagacaaatgcatggataaataaaaatgtatatatattattgaacctgagtttttagggtggaaaaaaataca

SEQ ID NO: 872726 - DNA, 654 bp, Homo sapiens
agccaggtgtatttcagaaaatgctattctagaaaagaattctatcagtcagagaggtgaatgtgacaagggaggcaagtcagggagacggcagtgtgacctgcaatggccagctttgaaggaagaagtcatgagccaagaagtgcaggcagtccctagaagctgagaaaagyacagaaaatccttccatggagtttccagaaaggaatgcagtcctgctgacaccttgtctttagtccagtgagacctatctcgaatctgacctacaaaaccataagatggccaaataggaacagctctggtctgcagcatccagcgagataaatgcagaaggcaggtgatttctgcatttccaactgacgtacatagctcatctcactgagactggtcagacagtgggtgcagcccatggaggatgagccaaagcagggtggggcatcgcttcacccaggaaatgaaagaggtagggttactccctcccttagacaagggaagctgtgagggactgtgccttgaggaacggtgcactccagcccagatactatgcttttcccacaatcttcacaacccacagaccagaagattcccttgggtgcctatgccaccagggccctgggtttcaggcacaaaactgggcagccatttgggcagaca

SEQ ID NO: 872727 - DNA, 654 bp, Homo sapiens
agccaggtgtatttcagaaaatgctattctagaaaagaattctatcagtcagagaggtgaatgtgacaagggaggcaagtcagggagacggcagtgtgacctgcaatggccagctttgaaggaagaagtcatgagccaagaagtgcaggcagtccctagaagctgagaaaagcacagaaaatccttccatggagtttccagaaaggaatgcagtcctgctgacaccttgtctttagtccagtgagacctatctcgaatctgacctacaaaaccataagatggccaaataggaacagctctggtctgcagcatccagcgagataaatgcagaaggcaggtgatttctgcatttccaactgasgtacatagctcatctcactgagactggtcagacagtgggtgcagcccatggaggatgagccaaagcagggtggggcatcgcttcacccaggaaatgaaagaggtagggttactccctcccttagacaagggaagctgtgagggactgtgccttgaggaacggtgcactccagcccagatactatgcttttcccacaatcttcacaacccacagaccagaagattcccttgggtgcctatgccaccagggccctgggtttcaggcacaaaactgggcagccatttgggcagaca

SEQ ID NO: 872728 - DNA, 582 bp, Homo sapiens
gggtatatacccaaaggattataaattattctgctatgaagacacatgcacatatatgtttattgtgacactgttcacaatagcaaagacttggaaccaactcaaatgcccatcaatgatagactggataaagaaaatgtggcatatatacaccatggaatactatgtagccacagaaaaggatgagttcatgtcctttgcagggacatggatgcagctggaaaccatcattctcagcaaactaacacaagaacagaaaaccaaacactgcatgttctcactcataagtgggagttgaasaatgagaacacatggatgcagggaggggaataccacacactggggcctgcctggggtggggggctaggggagggacagcattaggagaaatacctaatgtagatcatgagttgatgggtgcagccagccaccatggcatgtgtatacctatgtaacaaacctgcatgttctgcacatgtaccctgaacttaaagtataataataaaaaaaattccatctttaccttctcccatgtattacatacaccctgactgatttgatactaattttctttgcatttgt

SEQ ID NO: 872729 - DNA, 582 bp, Homo sapiens
gggtatatacccaaaggattataaattattctgctatgaagacacatgcacatatatgtttattgtgacactgttcacaatagcaaagacttggaaccaactcaaatgcccatcaatgatagactggataaagaaaatgtggcatatatacaccatggaatactatgtagccacagaaaaggatgagttcatgtcctttgcagggacatggatgcagctggaaaccatcattctcagcaaactaacacaagaacagaaaaccaaacactgcatgttctcactcataagtgggagttgaagaatgagaacacatggatgcagggaggggaataycacacactggggcctgcctggggtggggggctaggggagggacagcattaggagaaatacctaatgtagatcatgagttgatgggtgcagccagccaccatggcatgtgtatacctatgtaacaaacctgcatgttctgcacatgtaccctgaacttaaagtataataataaaaaaaattccatctttaccttctcccatgtattacatacaccctgactgatttgatactaattttctttgcatttgt

SEQ ID NO: 872730 - DNA, 582 bp, Homo sapiens
gggtatatacccaaaggattataaattattctgctatgaagacacatgcacatatatgtttattgtgacactgttcacaatagcaaagacttggaaccaactcaaatgcccatcaatgatagactggataaagaaaatgtggcatatatacaccatggaatactatgtagccacagaaaaggatgagttcatgtcctttgcagggacatggatgcagctggaaaccatcattctcagcaaactaacacaagaacagaaaaccaaacactgcatgttctcactcataagtgggagttgaagaatgagaacacatggatgcagggaggggaataccacacactggggcctgcctggggtggggggctaggggagggacagcattaggagaaatacctaaygtagatcatgagttgatgggtgcagccagccaccatggcatgtgtatacctatgtaacaaacctgcatgttctgcacatgtaccctgaacttaaagtataataataaaaaaaattccatctttaccttctcccatgtattacatacaccctgactgatttgatactaattttctttgcatttgt

SEQ ID NO: 872731 - DNA, 586 bp, Homo sapiens
gatcatgtgaaaaaaactggcatagaaacttccactagaaagagaaaggggattctcagatttgcaaaggacattattttagttatgatccacctaggttggctttttctcaataccctaacataataatcctaactaaaaatgttgatcactaatcagtgtatttgatggtgagtcttgaatttattaaattaatcatctaatttcttttccaggtcccaattcacatttacatgtaatcaaaaagcagacttaaagatatcattttaattattcatctgatatggtttggatctgtgttcccacctaaatctcatgttgaaatgtcaacctcaatgytgaaggtggggcttggtgggaggtgtttggatcatggggctggtttctcatggtttaacaccacccctggtgccgtcgttgcgatagtaagtgctcctgagatctggttgtttaaaagtgtgtggcacctcccggctctccctcttcctcctgctcagacaagatgaagtgatggctcctcctttgccttctgtcactaagtttcctgagccttccctgaagctgatgctgccatgattcctgtaca

SEQ ID NO: 872732 - DNA, 586 bp, Homo sapiens
gatcatgtgaaaaaaactggcatagaaacttccactagaaagagaaaggggattctcagatttgcaaaggacattattttagttatgatccacctaggttggctttttctcaataccctaacataataatcctaactaaaaatgttgatcactaatcagtgtatttgatggtgagtcttgaatttattaaattaatcatctaatttcttttccaggtcccaattcacatttacatgtaatcaaaaagcagacttaaagatatcattttaattattcatctgatatggtttggatctgtgttcccacctaaatctcatgttgaaatgtcaacctcaatgctgaaggtggggcttggtgggaggtgtttggatcatggggctggtttctcatggtttaacaccacccctggtgcygtcgttgcgatagtaagtgctcctgagatctggttgtttaaaagtgtgtggcacctcccggctctccctcttcctcctgctcagacaagatgaagtgatggctcctcctttgccttctgtcactaagtttcctgagccttccctgaagctgatgctgccatgattcctgtaca

SEQ ID NO: 872733 - DNA, 586 bp, Homo sapiens
gatcatgtgaaaaaaactggcatagaaacttccactagaaagagaaaggggattctcagatttgcaaaggacattattttagttatgatccacctaggttggctttttctcaataccctaacataataatcctaactaaaaatgttgatcactaatcagtgtatttgatggtgagtcttgaatttattaaattaatcatctaatttcttttccaggtcccaattcacatttacatgtaatcaaaaagcagacttaaagatatcattttaattattcatctgatatggtttggatctgtgttcccacctaaatctcatgttgaaatgtcaacctcaatgctgaaggtggggcttggtgggaggtgtttggatcatggggctggtttctcatggtttaacaccacccctggtgccgtcrttgcgatagtaagtgctcctgagatctggttgtttaaaagtgtgtggcacctcccggctctccctcttcctcctgctcagacaagatgaagtgatggctcctcctttgccttctgtcactaagtttcctgagccttccctgaagctgatgctgccatgattcctgtaca

SEQ ID NO: 872734 - DNA, 516 bp, Homo sapiens
tcctgagatctggttgtttaaaagtgtgtggcacctcccggctctccctcttcctcctgctcagacaagatgaagtgatggctcctcctttgccttctgtcactaagtttcctgagccttccctgaagctgatgctgccatgattcctgtacagcccacagaacrgtgagccaattaaacctcctttcttaaacctcctattactttatagcagtgtgagaaaaaacaaatacagaaaattggtaccaggagttgtgtattgctataaagatacctgaaaatgtggaagcacctttggaattgggtaatgggcagaggttggaagagtgtggagggctcagaaggtgacaggaagataagagaaaatttggaacttctagagatttgttgaatggttgtaatcaaaatgctaatagtcagtgaaggccaggatgaggaggtctcagatggagatgaggaacttattggcaacggagcaaaggtcacatttggcaaaaagcttgtttggattatgcc

SEQ ID NO: 872735 - DNA, 652 bp, Homo sapiens
aagtcatatgttctaggcaaagtttagaggacaaggacaagtcaaaatctctagagggaacaaggaaaagcttcccagcttgatagagaacagacaggaggcatataagatctaatttttacagagaatggaccacctggtgtggtctcatacccataatagtttggcatcttaaacatggaaaagaaggcatgattttgccccaaatatcctttatctgacacctaacgcattgctccccagcctagctgctaccttttgattgtgtaccagtgacaagcactttacaaattagggttacacacaagcaaagtaaaaatgcattcaggtcacagacagagaataactgaaaaacttacagacaaatytgagtttatcacaaacaaatggcttaattgtctaacctgttttaggctgataaaaagtgactggacttctcacactgggtttcacagacagaaccaacagacaagccaatgctaaaaaacttgaagcaaggagagtgagttggtttggatctggattttcttgaaataatgaaaacagaaagagtgaagacagcatggtgaggaggtggtaggtactcacgaatggttaaatccatcacttgggaggccaagcagaagacaggatgctcatacatttctctctt

SEQ ID NO: 872736 - DNA, 662 bp, Homo sapiens
ttaactagaaagccaagagtctagactgatataaataaaggaaagaataaattcttcagtgaaaagggaaaattcttccttatgatgggaagccaactaataaatgtagaaggaatgacagtattggaaaacaaccatttagcaaccatcacaataatcattgatttggacaagaaacatattgatgggtgcamaaacatgtggttaatgacttcaaactacactacaaggctacagtcaccaaaacagcatggtattggtacagaaacagacaaatggaacagaacagacaactcagaaataagccctcacatctataaccatctgatctttgacaaacctgacaaaaacaagcaatggggaaaacattccctatttagtaaatggtgctgagagaactgtctaacaatgtgcagaaaattgaaactggaccgattccttataccttatacaaacattaactcaagatggattaaagacttaaatgtaaaactcagaactataaaaaccttagaagaaaatctaggcagtaccattcaggacataggcacaggcaaagattccatgaaaacaacatcaaaaacaatggcaacaaaagcaaaaattgacaaatggggtctaattaaactaaacagcttctgcagagcaaaagaaactattat

SEQ ID NO: 872737 - DNA, 662 bp, Homo sapiens
ttaactagaaagccaagagtctagactgatataaataaaggaaagaataaattcttcagtgaaaagggaaaattcttccttatgatgggaagccaactaataaatgtagaaggaatgacagtattggaaaacaaccatttagcaaccatcacaataatcattgatttggacaagaaacatattgatgggtgcaaaaacatgtggttaatgacttcaaactacactacaaggctacagtcaccaaaacagcatggtattggtacagaaacagacaaatggaacagaacagacaactcagaaataagccctcacatctataaccatctgatctttgacaaacctgacaaaaacaagcaatggggaaaacattccctatttagtaaatggtgctgagagaactgtctaacaatgtgcagaaaattgaaactggaccrattccttataccttatacaaacattaactcaagatggattaaagacttaaatgtaaaactcagaactataaaaaccttagaagaaaatctaggcagtaccattcaggacataggcacaggcaaagattccatgaaaacaacatcaaaaacaatggcaacaaaagcaaaaattgacaaatggggtctaattaaactaaacagcttctgcagagcaaaagaaactattat

SEQ ID NO: 872738 - DNA, 634 bp, Homo sapiens
gcaagagcttagcatcaaacaggcttagacctcacaaagccattcctagcaacaaacaggaagtaaaatgcacagatttaacaatatgagacgttggtagagtaagtcagtatttaccaggttgactgcgttatgcagtatagaaaattggtctatttgtgaatattgtgtaatttcatatacaattgtttaattataatttcattttaraaacaagctgcttagctgggtgtggtggcgagggcctgtagtcctaactactcaggaggctgaggtgggaagattgcttgagcccaggagtttgaggctgcagtgagctatgtttgtgccactgcactgcagcctgggtaacagagtgagaccatgtctctaaaaaaaaaaaaaaaaaaaagtaataataaaaattaaaataagctgccatctctaacatacattatacagattataaatgagtctaacatgctatggagggaaaaaactcatgtaggcctagttcatactaacaaaactgcagtctgaaaacaagtggttaaagggatatcccttgcctcaaatgttttcactattttttctctaaaattatgagagtagttgcctaagttctccagttctctatgtatgtgtagctatagat

SEQ ID NO: 872739 - DNA, 634 bp, Homo sapiens
gcaagagcttagcatcaaacaggcttagacctcacaaagccattcctagcaacaaacaggaagtaaaatgcacagatttaacaatatgagacgttggtagagtaagtcagtatttaccaggttgactgcgttatgcagtatagaaaattggtctatttgtgaatattgtgtaatttcatatacaattgtttaattataatttcattttagaaacaagctgcttagctgggtgtggtggcgagggcctgtagtcctaactactcaggaggctgaggtgggaagattgcttgagcccaggagtttgaggctgcagtgagctatgtttgtgccactgcactgcagcctgggtaacrgagtgagaccatgtctctaaaaaaaaaaaaaaaaaaaagtaataataaaaattaaaataagctgccatctctaacatacattatacagattataaatgagtctaacatgctatggagggaaaaaactcatgtaggcctagttcatactaacaaaactgcagtctgaaaacaagtggttaaagggatatcccttgcctcaaatgttttcactattttttctctaaaattatgagagtagttgcctaagttctccagttctctatgtatgtgtagctatagat

SEQ ID NO: 872740 - DNA, 601 bp, Homo sapiens
ccatgtaattaaaatgccctctgggtcaatagaatcaaatatttaaaccaattaatgaaataaataattatacacatctatcactgtatacagtaaaataaatattatttgcattgttctttagtcagtgaacaacgacctcctcttttcttgagttgatatgaaagttgcaaggtcgacagttaactcattaaagaaaaaaatcatagagattaagataagggataattacatagttttatgtgtatttacctgaaatgttgttaaatattaactactcttctacgcttttttttttttttttttttgagacggagtcttattctccctcccagtctrgagtgcagtggcgccatcttggctcactgcaagctccacctcccgggttcatgccattctcctacctcagcctcccaagtagctgggactacaggtacctaccaccatgcctggctaattttttgtatttttagtagagagggggtttcaccgtgttagccaggatggtctcgatctcttgacctcgtgatccgcccacctcagcctcccaaagtgctgagattacaggtgtgagccagcatgcccggcactcttctactct

SEQ ID NO: 872741 - DNA, 590 bp, Homo sapiens
catgaactgtccttggctttttctgtacctcaaatctaccatgatgctaacaagttttcctctgctattttgttgttattttcagtgacgttcaccagacatggcctgactgctatctcttttcttctatccatatccaagattctcgattgacctgtgaattgactgctcttgagttaatgctgaatcctggtccaagtggttgcttttagagggaagtcagatcacgaggggcagcatctctgctgagagggctcccttctatataaaactctctgaccagccagtgttccttaaacagaggagcaaacatgtaagctgatatgcacygtctcctctttttatcaatgagggctttcaggtactttttcacgcatcttaaaaatccaggactgtatctggcacttgaaaagttccaaccaagtcaggtaattttctatctttttatactaattttactaggtaattaactacaacacacatatatatttaaaaatatgtttatcgtaaataacaattactatgtattatggaatattcgtttttcacacttatttaatacatcagtttatatacatttcttcatggtc

SEQ ID NO: 872742 - DNA, 613 bp, Homo sapiens
gaaccctttatcattatataatacccttctttgtcttatttttctgttgttggtttaaagcctgtttaatctgaaataagagtggctactcctgctcacttttgttttctgtttatatatcttttttcttctaatttactttgagtctgcagctgcctttagccagtaagtgagcctcttacatgcagcagatggttgagttctggaatttttgtttgttttctttgttttgtcttcttttgttttrttttttacagtttccactctatgtttttagagtagagcattcaagtcatttatattcaaggataatgttgataggtgagattttatgtttatcatagtgttgttagctagttgccttgtggtttcattgtgtagttgctttatgttatctgtgagctttgtatttctgtcatcttttatgatggtgtgggtcattctttcatttccatgtgtagactgcacatttgttggtggtctggtctagtggtgacaaattcccttggtgtttctttgtcggggaaaggttatatttctccttaatttatgaagcttagtttggcagaacacaaaattcctggctggcttttttgtttctttaagtgggcta

SEQ ID NO: 872743 - DNA, 613 bp, Homo sapiens
gaaccctttatcattatataatacccttctttgtcttatttttctgttgttggtttaaagcctgtttaatctgaaataagagtggctactcctgctcacttttgttttctgtttatatatcttttttcttctaatttactttgagtctgcagctgcctttagccagtaagtgagcctcttacatgcagcagatggttgagttctggaatttttgtttgttttctttgttttgtcttcttttgttttattttttacagtttccactctatgtttttagagtagagcattcaagtcatttatattcaaggataatgttgataggtgagattttatgtttatcatagtgttgttagctagttgccttgtggtttcattgtgtagttgctttatgttatctgtgagctttgtatttctgtcawcttttatgatggtgtgggtcattctttcatttccatgtgtagactgcacatttgttggtggtctggtctagtggtgacaaattcccttggtgtttctttgtcggggaaaggttatatttctccttaatttatgaagcttagtttggcagaacacaaaattcctggctggcttttttgtttctttaagtgggcta

SEQ ID NO: 872744 - DNA, 613 bp, Homo sapiens
gaaccctttatcattatataatacccttctttgtcttatttttctgttgttggtttaaagcctgtttaatctgaaataagagtggctactcctgctcacttttgttttctgtttatatatcttttttcttctaatttactttgagtctgcagctgcctttagccagtaagtgagcctcttacatgcagcagatggttgagttctggaatttttgtttgttttctttgttttgtcttcttttgttttattttttacagtttccactctatgtttttagagtagagcattcaagtcatttatattcaaggataatgttgataggtgagattttatgtttatcatagtgttgttagctagttgccttgtggtttcattgtgtagttgctttatgttatctgtgagctttgtatttctgtcatcttttatgatggtgtgggtcattctttcatttccatgtgtagactgcacayttgttggtggtctggtctagtggtgacaaattcccttggtgtttctttgtcggggaaaggttatatttctccttaatttatgaagcttagtttggcagaacacaaaattcctggctggcttttttgtttctttaagtgggcta

SEQ ID NO: 872745 - DNA, 681 bp, Homo sapiens
agttgaatttgtaaccatccatggggagtatggcccaagcaagaataatttttatttagaaaaatgtaaagatgtttgaattgttttataatttaaatttttaaatttgaaattttaattttaaaaaataaaaagaaaatattatgatgtattttgaatctaggtgttgcggaacaaattcatacctactaaaaattcagattgtcttctgagagttaaactctagaccaggagtgggcaaagtatagcccataagggcaaatctgccacctggttttataaataaagttttactggaacataaccacacccaggcacttatatattgtctattgctttcacactacaatgtcaggattgaggagctgtaacacagactgtatggcccacaaaacctaaaatatttactgtctggtccttcacagaaaaaaagaacaaaatctgtcaatccttgcactagaccaacagaaaatgggtgcgggcagccttcccctgaaagactccagatggtttcccatcagcagaacacctcagagccttccygagcaggtgaacagatttgagacctatgtgtaacatgattgaaacactggatatatatgaggcgtggccttctgtctgaaatctttattacttcctgtttttgaattctagaagcttttcctggaataccaagctact

SEQ ID NO: 872746 - DNA, 570 bp, Homo sapiens
gacccaaatgacaaggagccagaaaaacaattctgttaatatgagaaaacaaggttcttcaacacctgcaaaagatcataccagctcaccagcaatggatccaaaccaagacaaaatctctgaattgccacaaaaataattcagaagatcaattattaagctaatcaaggaggcaccagagaaaggtgaagtccaacttaaagaaatcaaaaacatgatacagaatatgaaagaaaaattcttcagtgaaataaatagcataaataaaaaacaatcacaacttctggaaatcaaggacacacttagggaaatacaaaatacagtgaaaagtctcagcaatagaatcgaacaagcagaagaaagaacttcagasacagaatacaaggctttcgaattaacccaatccatcaaagacaaagaaagaagaattttaaaaaatgaacaaagcctgcaagaagttagggactacgttaaatgtccaaacctaagaataattagtgttcccaaagaagaagagaaatccaaaagtttggaaacatagttgagagaataattgaggaaaccttccct

SEQ ID NO: 872747 - DNA, 536 bp, Homo sapiens
gcattcaggcaagagaaagaaataaagggtattcaaatagcaagaaaggaagtgaaattgtctctgtttgcagatgacataattgtacatttagaaaactctatcatctcaacccaaaaacttcttcagctaataagcaacttcagcatagtctcaggatacaaaatcagtgtgcaaaaatcacaagcactcctatacaccaacagtagacaaacagccaagtcatgagtgaactcccatccacaattgctacaaagagaatataatacctaggaatacatcttgcaagagatrtgaagcacctcttcaagaactaccaaccactgctcaagaaaataacagaggacacaaaaaatggaaaagcattccatgctcatgggtagaaagaatcgatatcatgaaaatggccatactgcccaaagtaatttatagattcaatgctattcccatcaagctaccattgactttcttcacagaattagaaaaaagtactttaaatttcatagggaaacaaaatagagctcatatagccgaga

SEQ ID NO: 872748 - DNA, 644 bp, Homo sapiens
ctggcagagctggggttccaattagtgtcagtcccagcaatgtgccagcagacaggggaagtgttgaaggtcatctgagcctgtagggtaaaaataagtataaatctcagtggatattttaagggaagctttgtctttgctgctgcacaaacacaagagctgtgtgtacaaaaataacagggattgtgagtttacaaagtcacatgtcatgcaaagcaaaagcaaagaggcagactcacatccaaggtggacagtctggtgggtgcataaggccatttcaggatacacacagagaaaacacgagaataagcagtgtgaggttttgggaaagagccaattttagttaaaaaatggaggaaaaactrgacattgcacaatgttagacattagccctaccattcttgcgagcctcttgtgcaggaggatgattagtgtctccgtcctgctcaatgtggactccaagttctttcccacccctaagaaacacccatcaggatgagctgagagatcagccagaaggagcagagcttccttggctgagataaattgttctagggtcaggagagtgaaaggggagaagaaaaacacatacaggggttgaactcctccagctgaagaagaggcatagaggagacttaccactg

SEQ ID NO: 872749 - DNA, 644 bp, Homo sapiens
ctggcagagctggggttccaattagtgtcagtcccagcaatgtgccagcagacaggggaagtgttgaaggtcatctgagcctgtagggtaaaaataagtataaatctcagtggatattttaagggaagctttgtctttgctgctgcacaaacacaagagctgtgtgtacaaaaataacagggattgtgagtttacaaagtcacatgtcatgcaaagcaaaagcaaagaggcagactcacatccaaggtggacagtctggtgggtgcataaggccatttcaggatacacacagagaaaacacgagaataagcagtgtgaggttttgggaaagagccaattttagttaaaaaatggaggaaaaactggacattgcacaatgttagacattagccctaccattcttgcgagcctcttgtgcaggaggatgattagtgtctccrtcctgctcaatgtggactccaagttctttcccacccctaagaaacacccatcaggatgagctgagagatcagccagaaggagcagagcttccttggctgagataaattgttctagggtcaggagagtgaaaggggagaagaaaaacacatacaggggttgaactcctccagctgaagaagaggcatagaggagacttaccactg

SEQ ID NO: 872750 - DNA, 644 bp, Homo sapiens
ctggcagagctggggttccaattagtgtcagtcccagcaatgtgccagcagacaggggaagtgttgaaggtcatctgagcctgtagggtaaaaataagtataaatctcagtggatattttaagggaagctttgtctttgctgctgcacaaacacaagagctgtgtgtacaaaaataacagggattgtgagtttacaaagtcacatgtcatgcaaagcaaaagcaaagaggcagactcacatccaaggtggacagtctggtgggtgcataaggccatttcaggatacacacagagaaaacacgagaataagcagtgtgaggttttgggaaagagccaattttagttaaaaaatggaggaaaaactggacattgcacaatgttagacattagccctaccattcttgcgagcctcttgtgcaggaggatgattagtgtctccgtcctgctcratgtggactccaagttctttcccacccctaagaaacacccatcaggatgagctgagagatcagccagaaggagcagagcttccttggctgagataaattgttctagggtcaggagagtgaaaggggagaagaaaaacacatacaggggttgaactcctccagctgaagaagaggcatagaggagacttaccactg

SEQ ID NO: 872751 - DNA, 651 bp, Homo sapiens
ctggatcaacctctagttctgtctttaggtctttgaggaatcaccgtactatctcccacaatggctgaactcatttacactcccaccaacagtgtataaaagttccttattctccacaatctcaccagaatctgttatttttttcactttttaataatagtcattctgactgatataataaggtatctcatagtggtttgggtttgcattgctctaatgattagtgatgttgagcttttcttcatatgctccttggctgcatgtatgtcttcttttgaaaagtgtctgtctgttcatgtcctttgcctacttttgtacattttttttcttgtaaatttgtttaagttccttataaattctggttattagacctttgtcagaagcatagtttcaaatattttctcccattctgtaggttgtctatttactctgttgatagtttcttttgctgtgcagaagccctttagtttaattarattccacttggcaatttttcctttccttgcaatagtttttggcatctttgtcatgaggtatatgcctgtgcctgtgtcctgaatggtattgtttaggttgtcttccagggtttttataggtttaggttttacatttaagttttaattcatcttaagttaatttttatatatagtg

SEQ ID NO: 872752 - DNA, 617 bp, Homo sapiens
attcataaatctacagtcgaaattctcatcagagacaaagcaagtcccttctgcctatgaacctgcaaaatcaaaagcaagttagttacttcctaggtacaatgggggtacaggcgttggtaaaaacacccattacaagtgggagaaacygtccaaacctaagagtctacaggccccatggaaatccaagatccagaggggcagtcatatagtaaagctccaaaatgatcttctttgactccatgtctcacatccaggtcacactgatgaaagaggtgggctcctatgacctttggcagctctgcccctgtggttttgcagtgtacaggcccccttccggctgctttcatgggctggcactgagtgtctgtggcttttccaggtgcacagtgcaagctgttgatgaatctaccattctggggtctggaggatgttggccctctcctccctgctccactagccagtgctccagttgggactctgtgtgggggctccaaccccacatttcccttctgcactgccctagcagaggttctccataagagctccacccctgcagcagacttctgcctaaacttccaggcattttcatacatcctctgaatctaggcagtcgt

SEQ ID NO: 872753 - DNA, 643 bp, Homo sapiens
actcttccccaactcattctatgagactagcatcctcctgataccaaaacctggcagagatacaataaaaaaggaaacactaggccaatatccttgatgaatattgatgcaaaaatcctcaacaaaatacttgtaaacagaatccagtaacataaaaagctaatccattgcatcgagtaggctttatccctgggatgcaaggttggttcaacatatgcaaatmaataatgtgattcatcacataaacagaactaaagacaaaatccacatgatcatctcaatagatgcagaaaaggcttttggtaaaattcaacatccctttatgttaaaaactctcaataaagtacgcatcgaaggaacatacctcaaaataacaagagacatttatgataaacccatggtcaacgtcatcctaaatgggcaaatgctggaagcatttcttttgaaaaccagcacaagacaaggatgccctctttcatcattcctattcaatatagtattggaagttctggccagagcaatcaggcaagataaagaaaaaaagagcatccaaatagaaagagaggaagtcaaactatccctatttacagatgacatgattctgtatctagaaaaccccatagtctcagcccaaatgttattt

SEQ ID NO: 872754 - DNA, 595 bp, Homo sapiens
aataaacaacttcagcaaaatttcaggatacaaaattaatatacaaaaatcactagcattcctatactctgatatggcttggttctgtgtccccatccaaatctcatcttgtagctcgcataattcccacgtgttgtgggagggacccagtgggagatgattgaatcatgagggcrggtctttcctgtgctgttctcctgatagtgaatgggtctcacgagatctgatggttttagaaatgggagttttctgcacaagctctctttgcctgctaccattcacataagatgtgacttgctcctccttgccttccaccatgattgtgaggcctccccagccatgtggaactgtaagtccaataaacctctatcttttgtaaattgccctgtctcaggtatgtctttatcagcaacatgaaaatggactaatacatacaccaaaaacaacaaggctgagagccaaataaggaacacaatcccattcacaattaccacaaaaagaataaaatacctagaaatacagctaaccagggagggaaaaatctctacaatgagattacaaaactctgctcaaagaaatgaaagatgacataaac

SEQ ID NO: 872755 - DNA, 595 bp, Homo sapiens
aataaacaacttcagcaaaatttcaggatacaaaattaatatacaaaaatcactagcattcctatactctgatatggcttggttctgtgtccccatccaaatctcatcttgtagctcgcataattcccacgtgttgtgggagggacccagtgggagatgattgaatcatgagggcaggtctttcctgtgctgttctcctgatagtgaatgggtctcacgagatctgatggttttagaaatgggagttttctgcacaagctctctttgcctgctaccattcacataagatgtgacttgctcctccttgccttccaccatgattgtgaggcctccccagccatgtggaactgtaagtccaataaacctctatcttttgtaaattgcccygtctcaggtatgtctttatcagcaacatgaaaatggactaatacatacaccaaaaacaacaaggctgagagccaaataaggaacacaatcccattcacaattaccacaaaaagaataaaatacctagaaatacagctaaccagggagggaaaaatctctacaatgagattacaaaactctgctcaaagaaatgaaagatgacataaac

SEQ ID NO: 872756 - DNA, 637 bp, Homo sapiens
taaaagctacagcaacaaaagcaaaaaattaacaaatggagtctaattgatctaaagagcttctgcacagcaaaagaaaccatcaacagactaaacagacagcttacaaaatgggagaaaacttttgcaaactatgcatctgccaaagatgtaatatccagcatctattagaaacttaaattttcaagtaaaaaaacaaacaactccattaaaaagtgggcaaaggagatgaacagacacttcaaaagaagatatacgtgcagccaacaatcataagaaaaaaagctcaaaatcactgatcattagagcaatgcaaaccaaaaccacaatgagatcacctcacaccggtaagaatggctgttatcaaaaagtcaaaaaataacaggtgytggcaagattagagagaaaagcgtttgcttatacactgttggtgggaatgtaaattagttcagccattgtggaaagcagtgtggcaattcctcaaagaactgaaaacagaactaccattcaacccagcaatcccattactgggtatatacccagaggaataaaagttattctgatataatgacacatgcaggcatgtgttcactggagcactattcataatagcaaacacatggaatccacctaaaca

SEQ ID NO: 872757 - DNA, 584 bp, Homo sapiens
ttaatataaaacaaaattaacagggccgggcgtggtggctcacacccgtaatcccagcactttgggaggccaaggcgggcggatcacgaggtcaggagattgagaccattctggttaacacagtgaagccctgtccctactaaaaatacaaaaaaattagccgggcttggtgcaggtgcctgtagtcctagctactggggaggctgaggcaggagaatggagtgaacctgggaggtggaggttgcagtgagctgagattgcgccactgcactacagcctgggcgacagagcgagastccatctcaaaaaaaaaaaaaaaaaaaaaaaaagaaaagaaaaaaaattaacagatctctcatatatgaaatacgtaatatttctccccaaacccccaatatcatattgctttatggtgtcaggctcagcattttgtcatctaaatcaggtttaggtgcaaatgaggatccttagatgcagttctacctccaaacacccaatatttaatgatgtaacagtaatagtaaaattacagtatacaagctagttaaaaagtggggaacatatggcacataacaaccactgac

SEQ ID NO: 872758 - DNA, 660 bp, Homo sapiens
ttatggaaagaactgattggataagatgaggatatctgactccaaagtacccaatttataggctaggtaatgtcccatggaatgtcctagtatgagaggattttttcaataaagatgattgtgattaactggatcaactcagtaatttgaacttgagatgcaaagagactcactaatacaggcagaaacgtaatgaacagtgccaatttgcagatgccaaaaagtaaaaatgctcataagtaagcagaagctgtgaagagtgccttttgaaagacttttataatacagaggaggtgtgtggtttataggaataatgaaaataccrcacattggttggaactgagtcactattatggagagattactagtacacggattaacaagcagtggcttctaatagacaaggctagaaaccagtccccagaaccatcttggtcctgagtgatcttgtttttgaactatatgccagtttcctccaatctcactatacttgtttctgttccttgcatcatgtctggcaggatagcttttcctgattccagtgagtttaattttagcattttattttaagggaaacaaaaacaacaataacaatttttttttgaattgaaggaacatgaatgtgtttctgttccttgcaattaaaactattgcaaaggg

SEQ ID NO: 872759 - DNA, 705 bp, Homo sapiens
tctgggggtggagccaagaaatctgtgagttaataaccccccaggtgatcctgttgcacactcaaagaactactgagttagatcggagattttcatatctggctgtgcattaaaattaccgacactggggttgataaaggctttaaaaatcaccagtgtccaggtacagctctagactaattaggccagaaactctgtgtgcagctgaggactctctcggctctactgggctaaagggattaaggaagctgtgtcattacagaagacagatggcattcaaatttccagaatctttcccagatgcccacaaggacctgtccatggtccttaaagtcttagcaaggaacagaggggagggaagccacacctgtgttgtcatggccaagccggactttccacaggtctcccagatccagcgtctccaccgtgaagatttcaatgctgtccctctcaaacttatcgctgtttgtcttggaggacttcaggagggtcattcctgtggatcagatgaccccagcatgactggctggacctgaggyctttcaagcctagtcagacccaaacctttaatcccttttcaaaatgaccaaatttctgaacttccaccaaatttagactgtgcaattatcatccattggccacctttgcacagtgggcattttaaaaaattttttatttcaatagcttttggggtacaggtggttt

SEQ ID NO: 872760 - DNA, 592 bp, Homo sapiens
acctgaattcaagtcgtggaggttacagtgagccgtgtttgcaccactgcactccagcctgggtgacagagtgagatcttatctcaaaattaaattaaattaataaattgaattaaaataaaaaaatgaacttcatttgtcaacataagttcgtcaagtttaatccattattaactgaagaaaaatgggtgccttttaaagatttgataataaaatgaagtccaaaggagccaaatcargactataaggtggatgcctaatgatttcccatcgaagctatggtaaaattgtgtttgtttaatgagaggagtaagtaggagcattattgtagtgggcaaggactctacagtgaaactttccaggcatttttctgctaaagtatggctaactttctcaaaacactctcataattagcagatgttatcgttcattggcactttagaaagtcaacaagcaaatgccttgaacattcaaaaaacttttgccgtgacctttaatgttaactggtccacttttgctttgactgaaccacttccaccgcttggtagccattgctctgattgtgctttttcttcaggattatactggtaaa

SEQ ID NO: 872761 - DNA, 592 bp, Homo sapiens
acctgaattcaagtcgtggaggttacagtgagccgtgtttgcaccactgcactccagcctgggtgacagagtgagatcttatctcaaaattaaattaaattaataaattgaattaaaataaaaaaatgaacttcatttgtcaacataagttcgtcaagtttaatccattattaactgaagaaaaatgggtgccttttaaagatttgataataaaatgaagtccaaaggagccaaatcaggactataargtggatgcctaatgatttcccatcgaagctatggtaaaattgtgtttgtttaatgagaggagtaagtaggagcattattgtagtgggcaaggactctacagtgaaactttccaggcatttttctgctaaagtatggctaactttctcaaaacactctcataattagcagatgttatcgttcattggcactttagaaagtcaacaagcaaatgccttgaacattcaaaaaacttttgccgtgacctttaatgttaactggtccacttttgctttgactgaaccacttccaccgcttggtagccattgctctgattgtgctttttcttcaggattatactggtaaa

SEQ ID NO: 872762 - DNA, 637 bp, Homo sapiens
gagaccagcctgggcaacacggcaaaaccctgtctctagtaaaaatacaaaaaattagccagatgtggtggtagcacacctgcagtctcaggtacttgggaggctgaggtgggaggatcacctgagcctgggagtctgaggctgcagtgagttttgattatgccactgcattccagcctggatgacagagtgagaccctgtcttaaaaacaaacaaacaaacraacaaaactcctttgtctatttgcacataaacaaaatagataagcccttgtggcttcaactaaacttcatgtaatccacgaaaaccattacttacagcctcaatcccgaccttgctgcaaaggccgtcttgtctcaggatgatagctgcaaactgccaaatttgttgatgcttctggtgaactagtcctctgttctctacttggttcctcagacattatagacattcctactgactgagattttgttactgtcactctcttatattacagttcactgttatatcaccctgcatcctgccactctactatctctaccagaagaaggggaatttcacagttcttttccttttcctaacctttgttaggaaactttctgttcctcactaagatttattagagactctcattgagaac

SEQ ID NO: 872763 - DNA, 617 bp, Homo sapiens
atgcttttacccttatccaggtgcttgctagaataaccccttgaggacaggcaatgtattttctatctctttacatatttcatggtaaagagcctggcaaagtgaagaccacacttaccaggattagaatagtgaataagatctttagaactggaacttagagagccctcaatctgtgaaactcacagttttgaaagcatttttaaatctcagattaatgcrttggcagatcaacggttggaaaaattcaagaccactgtgtatatatcaggtcagtggtgatataaccataatcctctttttgtgaacctcagtggggaatctgagagacagacttctactctgactccacagctggcttgaagccccagaatgaatatacaaatggacagtgtctaaatgtcacatggaaagagattgctgacctacaacctccgcagcaaccagccacgaagccaaaccatcacctctgtagcagtggacccagaaaggtcaagactttgttaataactgctaagttctttaaatgtgcccttgctttcaactcaagaccaactagagcaaaccaaatatgctccccaaatcaatcacaaaagatgccctcttcttaggcatcc

SEQ ID NO: 872764 - DNA, 617 bp, Homo sapiens
atgcttttacccttatccaggtgcttgctagaataaccccttgaggacaggcaatgtattttctatctctttacatatttcatggtaaagagcctggcaaagtgaagaccacacttaccaggattagaatagtgaataagatctttagaactggaacttagagagccctcaatctgtgaaactcacagttttgaaagcatttttaaatctcagattaatgcgttggcagatcaayggttggaaaaattcaagaccactgtgtatatatcaggtcagtggtgatataaccataatcctctttttgtgaacctcagtggggaatctgagagacagacttctactctgactccacagctggcttgaagccccagaatgaatatacaaatggacagtgtctaaatgtcacatggaaagagattgctgacctacaacctccgcagcaaccagccacgaagccaaaccatcacctctgtagcagtggacccagaaaggtcaagactttgttaataactgctaagttctttaaatgtgcccttgctttcaactcaagaccaactagagcaaaccaaatatgctccccaaatcaatcacaaaagatgccctcttcttaggcatcc

SEQ ID NO: 872765 - DNA, 678 bp, Homo sapiens
tagctgtgcagggtggtgcatgcctgcggtccagctactcaggaggctgaggtgagaggattgcttgagcccaggagtttgggggaaaagtgagctatgatcatgccactgtgctccaacctgggcaacaagcaagatcctgtctctaaaaaaatttaaaaattttaaagtgagatgatggacaccagctacagaagtcaggtcttccacacttcttcttaattgcattatgggaatctccccaaactacctcactacaccattagtaaaaataggtcctggaaaaatctttacaagagacatgtcttcatcttaaatgaatgaggactgtgagtgacagaacgtttactcagcagagtgacaggaaargtagtgtgcatttgcccacgaagttatagctacagcatagacttctggtggcaaagcaagcactgacatcctaggggtggtttttgcagagttcatgcaaatgaaacatgagcagtgactgttgtagggctttgaatcaacaaagtgatatgccagtaattaggtttcaactgactcagatcccattctaggcattaattgggagaaaatatgcagattgctagttaagaatagaacagttatagttccatagtcattttctttctgttcatcaatttgtttgatttcttgtgtggcaaacacttgctc

SEQ ID NO: 872766 - DNA, 678 bp, Homo sapiens
tagctgtgcagggtggtgcatgcctgcggtccagctactcaggaggctgaggtgagaggattgcttgagcccaggagtttgggggaaaagtgagctatgatcatgccactgtgctccaacctgggcaacaagcaagatcctgtctctaaaaaaatttaaaaattttaaagtgagatgatggacaccagctacagaagtcaggtcttccacacttcttcttaattgcattatgggaatctccccaaactacctcactacaccattagtaaaaataggtcctggaaaaatctttacaagagacatgtcttcatcttaaatgaatgaggactgtgagtgacagaacgtttactcagcagagtgacaggaaaggtrgtgtgcatttgcccacgaagttatagctacagcatagacttctggtggcaaagcaagcactgacatcctaggggtggtttttgcagagttcatgcaaatgaaacatgagcagtgactgttgtagggctttgaatcaacaaagtgatatgccagtaattaggtttcaactgactcagatcccattctaggcattaattgggagaaaatatgcagattgctagttaagaatagaacagttatagttccatagtcattttctttctgttcatcaatttgtttgatttcttgtgtggcaaacacttgctc

SEQ ID NO: 872767 - DNA, 722 bp, Homo sapiens
aaggacctgaatacaggggctgggggcgctgaggaacggaggccactaatacaatcaaaccagttgattttatcagcagattgtttctcttactttgtaccctcaaagcattcacccagctagtagctattcccctcataacttgaagcttctttttccactcactgtgactctacacaatgctatttctgttggattcttggggctgttgatgtccacaaacatcagtgttttccattggagtaccattgttatttgagcagagaaaattcttcatttatatgaaactattgcttgggtggcaaggaatttgacttccctgactcctgccctctaaatgccaataacacttcccagtttgaaaatgctccaacagggagggaggcttcaaataagcaagtggagagggctagaatgatccatgtgacatcagcatcaatttatgtttatcttgatatagatacatacagggacatacagaaatgttcagctgagagagcctagaagcggcagcacaccaggagcaaaaagcamaatgagcgcccagatctttgtttctaacaccattctctgagaaaaggaaccagagttctttggtgaaatcactcacctaggactggcagagaaaatatacaagatgaatctggagcatactttagtaccagaaagtaaatgttaggaaacaaacaaaagccccacaatgatgggggcatgtcagaaga

SEQ ID NO: 872768 - DNA, 672 bp, Homo sapiens
ttctttcacaaatagcttcagcaaaagtggcagaaactaattgataatcttacccaggctcaatactccaggattacttgatcgaaattcttccccttaagaccgcttctcttccccaggctacccaggcctcaggctctttggctgatttgctctgtgctaagggaarcccagatctccatgtctttggtgagcagacagatgggaagggccacagttgtacagcattgtcaaaaatgatatcataaagttctacttttgatttttaaatagaatctcaagagaaagtattttcccactcagccttgtgtgatgtcattcacagcagaagcacacagccctcattcgttatgaactgctagctgtaccacaatcagcccccttcagatgtaactgcccacaggtcaagagaaagcagtcagtcttaaacttggcttgaatagtcaactgagtttttgctgtccctgggccctcaaatccctgctttcatgctgtgtcagaactaggaaggagaagagccagcaaaaaattaataatttcagaataaaaactatagagttatttatcctaaaagaaactaataaaataaatacacactagttagactaatctagcaaaagacagagaaagtacaaatattgattgtggtttggtaaagaggaaagaattgca

SEQ ID NO: 872769 - DNA, 707 bp, Homo sapiens
gacgtatcacaaaataataagagctatttatgacaaacccacagtcaatatcatacttaatgggcaaaaaccggaagcattccctttgaaaactggcacaagacagggataccttctgtcaccactcctattcaacatagcgttggaagttctggccagggcaattagggaggagaaagaaataaagggtattcaattaggaaaagaggaagtcaaattgtccctgtttgcagatgacatgattgtatatcagaaaaccccatcgtcttagctcaaaatcttgttaagytgataggcaacttcagcaaagtctcaggatacaaaatcaatgtgcaaaaatcacaagcattcttatacaccaataacagacaaacagagagccaaatcatgagtgaactcccattcacaattgtttcaaagaggataaaatacctaggaatccaacttacaagggatatgaaggaccttttcaaggagaactacaaaccactgctcaacgaaataaaagaggacacaaacaaatggaagaacattccatgctcatggataggaagaatcaatatcatgaaaatggccatattgcccaaggtaatttatagattcaatgccatccccatcaagcttccaatgactttcttcacagaattggaaaaaactactttaaagttcattaggaaccaaaaaagagcctgcattgccaagtcaat

SEQ ID NO: 872770 - DNA, 645 bp, Homo sapiens
aacacattcaaaagctagcggaaggcaagaaataactaaggtcagagcagaactgaaggagatagagacataaaaaaacccttcaaaaaatcagtgaatccaggagctggttttttgaaaagatcaatgaaattgatagactggtagcaagactaataaagaataaaagagagaagaatcaaatagatgcaataaaaatgataaaggggatatcaccaccaatcccacagaaatacaaactaccatcggagaatactataaacacctctacacaaataaactagaaaatctagaagaaatggataaattcctggacatatacaccctcccaaggctaaaccagraagaagttgaatccctgaatagaccaatcacatgctccgaaactgaggcaataattaatagcctaccaaccaaaaaaagtccaggaccagattcacagccgaattctaccagaggtacaaagaggagctggtaccataccatctgaaactattccaatgaatagaaaaagacggaatcctccgtaactcattttatgaggctagcatcatcctgataccaaagcctggcagagacacaacaaaaaaagaattttaaaccaatatccctgatgaacattgatgtgaaaatcctcaataaaat

SEQ ID NO: 872771 - DNA, 645 bp, Homo sapiens
actttgggcattaaggatgccaaaattcatgttgaagattcttcaaggggtgcatttttttttcctggtgtagacactggatacatgtgctttctggatcctctcccttcaattgtacaaagcttagcagaagtcacttggcaagtctaagactaactgtggctgatcacctgcacctatttgtctcaatgtgatgcctgagccctgtggaattgtttctacttgcttcatagatctggggaaaaactatggttgcacttcttgtatttttccaaataattgttcgagaggaccacttttcttattaacagaaagtccagaatcactgttaattccttttccacaacactaattttccacaaccttgagggtttgattaatttgggaaggggggctggggttagcactgcttccaaatgccaagtacaaagcaaaccagaatagtggttgagtccmccgctgcccttgcttcttgctgctgcattcagttgtcagatggttggtgaatggaccactgtctgtccagggctcactagtgccctcttagaatcctaggctgaaactcttcatttcacacccatgtggccagaggcttttctaaaaggacaaccactgagctaagatatatggtgattctggcttcag

SEQ ID NO: 872772 - DNA, 494 bp, Homo sapiens
tctgtggtcatggtgatgttagcccctagttttgaggtaatggcctcccccagcttcagaacatgctctaagcctgtttggaacatatctcaggctagggacagcttgagactaagtcagcccaggcaatacagtgatgcttctcatctgtttggtcagtgctgagtggagacagagtggatcagacgatcctaggagaccccttcctcatactgctctggttctrtccctgaagtgatttctgaagatgttggccatcaggcataaaaactcaaattgggccaggaacagtggcttaatgcttgtaatcccagcactttgggaggccaaggcagccaatctcttgagcccaggagttcgagaccagcctggcaacatggcaaaaccctgtctctacaaacaatacaaaatttaactgggtgtggtagggaatgcctgtaatcccaggggaagtggtgtatgtaagggtggaagtgtagataggggtagccagg

SEQ ID NO: 872773 - DNA, 494 bp, Homo sapiens
tctgtggtcatggtgatgttagcccctagttttgaggtaatggcctcccccagcttcagaacatgctctaagcctgtttggaacatatctcaggctagggacagcttgagactaagtcagcccaggcaatacagtgatgcttctcatctgtttggtcagtgctgagtggagacagagtggatcagacgatcctaggagaccccttcctcatactgctctggttctatccctgaagtgatttytgaagatgttggccatcaggcataaaaactcaaattgggccaggaacagtggcttaatgcttgtaatcccagcactttgggaggccaaggcagccaatctcttgagcccaggagttcgagaccagcctggcaacatggcaaaaccctgtctctacaaacaatacaaaatttaactgggtgtggtagggaatgcctgtaatcccaggggaagtggtgtatgtaagggtggaagtgtagataggggtagccagg

SEQ ID NO: 872774 - DNA, 622 bp, Homo sapiens
ctcttctcagtaaacacatcttccatgagtaagctggacatatttcacaatctttaataattctcagatctgcatctccagtgagacctctctcctgaaactcagagctgtgtccaactatttacagtatactttcatttgagtgccttaatggaacctcaaatttttccagcgctaagctggctgtcaccatctctcccaccacacatggcaatagcaaccacaataatgacaaccacaacaaatcaattttacctcatgtattttccatttaaggcctggaaaaaccaaccactcaaattagctccttccttcaatctacacatagagttgattactaactcgtaaagawtctgtttccttaatttccttaatctttctctcatctatctctgtctcttgctcccagggccatcttgtatgcttgtcctcctccctgcaatgattatgagagccttgacaacagacattgtctaacttacagctaaaacctttttttttttaattttttttttgtgtgtgtggagacagggtcttgctctgccattctggatggagtgcagtggcacaatcatggatcactgcagccttgaactcctgggctcaagtgatccttctgcct

SEQ ID NO: 872775 - DNA, 613 bp, Homo sapiens
gtgagaacatgtggtgtttggttttttgtccttgcgatagtttgctgagaatgatggtttccagcttcatccatgtccatacaaaggacatgaactcatccttttttatggctgcatagtattccatggtgtatatgtgccacattttcttaatccagtctatcaytgatggacatttgggttggttccaagtctttgctattgtgaatagtgccacaataaacatacgtgtgcatgtgtctttatagcagcatgatttatagtcctttgggtatatacccagtaatgcgatgcagcccagcattattacctacatatcggtttccagatgagtgatagaagagctcttcagaagaaaaagccagctacccaatagaaaaaatggcaatagttacggacaggaacgtcacaaaataaacctaaatgaccaataaatataaaaaagatgcctaaagaaacagtagagacactgtttcacactttagttgcctgggatttttatttagagattgtcacacatggagagaaaagtaaagcgacactgtcagaatacacatttatacaacccctggaggcaatttaacgctgtctagtagagttgaagatatgtatc

SEQ ID NO: 872776 - DNA, 490 bp, Homo sapiens
tcatcatcaaaataacaatttgggcttatacacagcagattgaatatatatgcatttacctcttcttcctcctgaagcaatgagaaaatggcattaaatgaataaaaataaacattgtatgagagtttttttttttgttgagactgagtctcrccctgtcacccaggctggagtgcagtggtgtgatcttggcttactgcaacctctgcctcctgggttcaagcgattcttctgcctcagcctcccaagtagctgggactacaggtgtatgccaccacgccaggctaatttttgtatttttagtagagatggggttttgccttgttggccaggctggtcttgaacttctgacctcaggtgatccacccacctcggcctcctaaagtgctgggattacaggctggagccaccgcgtccggccagattttttgttttgttttgagatggagtctcactctatagcccaggctggagtgcaacggcactgtta

SEQ ID NO: 872777 - DNA, 580 bp, Homo sapiens
tgtaagtctccaatttatggatttctatcattcactgttaaatacctaactgatatacctgcctcacaggattcttatcaagattagaagataatccatgtcaatagatttcaaatgtagatagaatgtatttccctatcacctgagtcctgctgtatatctacatgtgtaggtatatgtgtgtatgtatgcatgtgtgtgtgtgtgtgtgtgtgtctrtttataagctgttataaagtattttatacaacctcaccgtgacttctaaaagtcaaggactttgtattattactctctgtgtcacaggtgccaagcatactgcctgcaaccaagcatcttcatgaattgaaaatgtaccctgaagggagtatatataaagtgtaagagttggtgcaaatgcaaagacttagaacatcattgttattttaggatactgcgaactgaacctaagaaaatctaaaataaacaaaatatcaccttctccatgatttctgtaacaaggaacagttattgtgactgcatggataaatgttatgtatttcatcttagtcattgaactgattctatttcaaatgtaaat

SEQ ID NO: 872778 - DNA, 651 bp, Homo sapiens
caagacattatcttttaaatattcattcctctgataatgctgttgttgagctgtgtgtttttaaatataaaatatatgtgcatgtcttttgcccattttctatttggccattttttaattgatctgtaggtagattttatacgttatgcatattgtccctttatctatcacatatttttagaaaattttccctgtttgaaattagtctttctttaatatggtatcctctgtcatacccagggtgctgatccaacaatttgagtggcctgtctctccatccttcacttctctcatgacatgtatggttgtgtggctcttgttcactctccctgtcatcctcctgaaagttttttgttgttgttcattctcctgcaggccagcctgtggatgaatctctgcttaagtcatggaacasatgcacgcccagctgttccactgaagattttctgttaagagctgattccacaagctactgggcagcatgttatgttgagctcattctatgaaatggtaccaaagatgtttagatggtggcatctaaaacccaaccactatctgtcaggcacaggctgcatgcacagatcttcatgcagacttccatggagctctaacagaatagactcaatatgattttttttaatacattagcac

SEQ ID NO: 872779 - DNA, 651 bp, Homo sapiens
caagacattatcttttaaatattcattcctctgataatgctgttgttgagctgtgtgtttttaaatataaaatatatgtgcatgtcttttgcccattttctatttggccattttttaattgatctgtaggtagattttatacgttatgcatattgtccctttatctatcacatatttttagaaaattttccctgtttgaaattagtctttctttaatatggtatcctctgtcatacccagggtgctgatccaacaatttgagtggcctgtctctccatccttcacttctctcatgacatgtatggttgtgtggctcttgttcactctccctgtcatcctcctgaaagttttttgttgttgttcattctcctgcaggccagcctgtggatgaatctctgcttaagtcatggaacacatgcasgcccagctgttccactgaagattttctgttaagagctgattccacaagctactgggcagcatgttatgttgagctcattctatgaaatggtaccaaagatgtttagatggtggcatctaaaacccaaccactatctgtcaggcacaggctgcatgcacagatcttcatgcagacttccatggagctctaacagaatagactcaatatgattttttttaatacattagcac

SEQ ID NO: 872780 - DNA, 631 bp, Homo sapiens
accatgcctggctaacttttaaattttttgtagaaacagggtctctctatgttgcccagggtggtctcaaactagtgggctcaagcgatcctcccaccttggcctcccgaagtgttggaattacaggtgtgagccaccatatcctgcctcaatggtagtctaataaagacaatttgtaatccaaacttgaaaaaatatcaactcagttctcttacatttatgtttaataaatgttgcagggagatgaactcagaactttgtatcttagaatatttgcagtttcttcttattatagttatttgggtctttgtctcatcatctactctatgagcctcyggtggaaggagactgtgatttcaccattgtggtatcctttgcagtgcgagttcccagtatatcatttgccaaaccctggtcccaaaatatgctcctccagggagaaatggtccatgatataataagcttgggaaatgttgcacactcactatggcctctctaagtgctttccaactcgcattaactcactgaatgcactgaaaagctaggtagaagaaaatcttcacaatctatatgtctgtcaaaggattaatatccagaatctgcaatgaactcaaatcagtaaaaaaagaca

SEQ ID NO: 872781 - DNA, 655 bp, Homo sapiens
tggcgggaggtgaaaggcacttcttacatggtggcagcaagataaaatgaggaagatgcaaaagtagaaacccttgataaaaccatcaggtttcataagacttgttcactaccatgagaacagtataggggaaacgggcccccatgattcaaattatctcctactgggtccctcccacaacacgtgggaattatgagagtacaattcaagatgagatttgggtgaagacacacaaccaaacaatatcaaatgttattaaggatttctacaagcttaatagaagactaggatatgagcacaaataataataatacaaagtacaaggtattaaatggcacagactgcactaattgaaatgcattggatgaaagacagaagtcactttagcagggtaatcaggacagtcttcacagaggagatgctatttcagcaaaagcttgaaaaaggagttgaaattggactttcagagatgaagagaacaaggggttctcagacaatctgcygctcttcctcttgcaaataaccccactgccatgaaattctcaatccacagcatttaagagctgccctcctctcatcttactatgaaaaaactgacacccagaaagaggagttagccccagcttataaggttggttagtggcaagtccaagct

SEQ ID NO: 872782 - DNA, 575 bp, Homo sapiens
tcataatgactctacacgatactgaaatggtatctgaatattaacaactaaattctgaccagttatgatttaaaacatttagctatttattgattgttatttttttaaaaacttggaatgtgcattatatgtatatttaactataaagtcactgaacatttaattaacatatgtcctgtttttcaatcattactaggagtaatctttatagaaatacaagtagcaaccattaccacaaatgaattctcataagaaacagttattcaagtctttttctctctctctttgtcaaacgcatgtgcacacacacacacacacacacacactttgtatgcctgtggattgtgtgagagagagaatgagcctgtaaatacagaattatatcagaattcttgtagcaaataagctatcaggaaaattgagccaacttagtmttggtcttgtgaaggacattttctcttttctgacctagtcttttctattaagtgaaagatgtcacacaatgaccactcatctatttttgatggatacatgaattgtacattacatggaaagaagagagaaaataatcctaa

SEQ ID NO: 872783 - DNA, 659 bp, Homo sapiens
acttttcattctatttatctatcatatttttattggtttgtattccattgactactatatgcaccgaccctcagcaaattcattcaatagagaggagagattatatctccactgtatcagtggagctgcttaggaacatttctcccgcttcttgcatgtattttgtcctatttgtacattgtattttatgagctgctttagaatagtagaataactttcctttatatggtatagaacttttgatatatctcaaataaattttttaaaaatgatcaattgaaatgtatgttctcatactgtatgtgcaaatatcagtagtacaaacactaaggattaatgaaaatgaaaatcctaatatattaaacttagaaaaatagactaaatatttactgaaaagaaacagataaccaaaatttcgtgatacacaatgaaaagccttgagacattaaagaggactttcactgcctttgatgatgtcatcctttacctattargttcttctagcatggtaactagaactaaacttttaacttccttttaaaccacacactgaatgcatctgtgaaaaagacctgcatactacaagataactttaattacatatcttctgtggggtccgtgcttttagtttagtataggtttatgcaaagtgatactat

SEQ ID NO: 872784 - DNA, 581 bp, Homo sapiens
tattgtaagccacctaacattgtagcaaaatgtattgctactgtttgtggtgatgatggtgtaaacaaatttgctcttctttcagtgatactaaagtacacatacaattgtgtgcagtacatagtattagataatgataaactctgttactggtttatttgttttatataytacaatttttatcattagaattaccccttctacttatggaaaaacagttaaatctgtacaatagcctcaagcaaatctttcaggaagtattacagaaagaagcatcattaccataggaaataacaactccatgagtgtaattatctctgaagccttttcagtgggacaagatgtggaggttcagacagtaatattgattatcctgacctcatgttgacatagtctaatgtgtttgtttgtcttttttttgttttttgtttatttttacaagaaaggtttacaacataaaagaaaaaaaaaagaaataccgaagtggttccccaaggcaccaatttaaagtgtatatgtgcagtgcagggttactggaccaaggcacagtgtaaacagcgaaattttattttttgttttct

SEQ ID NO: 872785 - DNA, 608 bp, Homo sapiens
ataaagaaaaagacccaatggtatactgaatttaagagccccatcctacatgcaaggacacccataggctcaaaatgaatggatggaaaaaaaatctaccatgcgaaaggagaacataaaaaagcagaggtggcaatcctaatttcagacaaaacasactttgaaccaacaaaactcaacaaacacaaggaaggtcattacataatggtaaaaggttgaattaaacaaaaagacctaattatcctaaatatacatgcacccaacacaggagcacatagatttgtaaaacaagttcttagagacctacaaagagacttagatttctacaaaataatagtggaagacttcaacaccctactaacagtattagacagatcattaaggaagaaaattaatgaagatattcagaacttgaactcaatacttgatcaaatggacctaatagacttctacagaacgctctatccaaaaatgacaaaatatactttcttctcattaccacatgacacatactgtaaaatggaacacacaatcagacataaaccaatcttcagcaaatttaaaaaaaaaacactgaaatcatacaaacgacactctcagacaacagt

SEQ ID NO: 872786 - DNA, 608 bp, Homo sapiens
ataaagaaaaagacccaatggtatactgaatttaagagccccatcctacatgcaaggacacccataggctcaaaatgaatggatggaaaaaaaatctaccatgcgaaaggagaacataaaaaagcagaggtggcaatcctaatttcagacaaaacacactttgaaccaacaaaacycaacaaacacaaggaaggtcattacataatggtaaaaggttgaattaaacaaaaagacctaattatcctaaatatacatgcacccaacacaggagcacatagatttgtaaaacaagttcttagagacctacaaagagacttagatttctacaaaataatagtggaagacttcaacaccctactaacagtattagacagatcattaaggaagaaaattaatgaagatattcagaacttgaactcaatacttgatcaaatggacctaatagacttctacagaacgctctatccaaaaatgacaaaatatactttcttctcattaccacatgacacatactgtaaaatggaacacacaatcagacataaaccaatcttcagcaaatttaaaaaaaaaacactgaaatcatacaaacgacactctcagacaacagt

SEQ ID NO: 872787 - DNA, 568 bp, Homo sapiens
gtaccttgcccattgtagttgagaaatgataaataggaatgactgaaaaaaaatacatttgaaaacagcttgaacataagaagaagcttgagatatttataatatggacacttgtttttttcctaaagcaaagctattactattagttagagattatgtagattttaatttctttatagaagacaaaataaaactagtagattaaaaaagttagttcctgccactattcttcccccaacaagatatctggrgactgagtgccagaatgagcaaagaaagattcaaggaccaagactggtggaatcctctcactccagtattcttagagtcttgcttaggcttgaagcataacactgttgtcacatcacttgacaatgcatttacggaataagattcagtgagaaagaacaaacaagaagtgattatatcctttaaagagctttctcagaggcatcggctagtatcttgtttgcttctcatttgccagagttgcatcaagtagcttctcccaactgctcaggaaattgggaagtatagttttctcaacattttcataccaccacaaaca

SEQ ID NO: 872788 - DNA, 654 bp, Homo sapiens
atctgtattcatgtcctgaaagtttatgcaagtaaaattagcataatgacatttaagttatttcatgtttatgtgcatgcatttactggacattgctattttttacaaccttacattttaaatttctacttttcatccaagaactctctcaaaatgtttgacttaccttcttttgtttttacatttttctgttcttcaattttttcattcatccaacatatacttaaatatctaagttttaaggtaactatatgtgccggtatatttgcctataaatcatcatgcacatagaaaacacttttagaagcttcctctttcataccaaattcaaaccatawggtctaaaggaagtacttagaggttgtggtatacacacatttattttactgaaaactgaaaataacgcagacaaaaggatgaaacttattgggaattggtatgatatataagatatctttcactcagaaaaaaagtaagaatataccatactaagttcattttcttcaaaaatttggatcctttcattttctagggctgcatatcctttttcctaaagaggaactccacattttataagttgcagttcccataaagactagatctgtccctagttttgatgaactatacctgggaaaccagaggtatggcaatcct

SEQ ID NO: 872789 - DNA, 654 bp, Homo sapiens
atctgtattcatgtcctgaaagtttatgcaagtaaaattagcataatgacatttaagttatttcatgtttatgtgcatgcatttactggacattgctattttttacaaccttacattttaaatttctacttttcatccaagaactctctcaaaatgtttgacttaccttcttttgtttttacatttttctgttcttcaattttttcattcatccaacatatacttaaatatctaagttttaaggtaactatatgtgccggtatatttgcctataaatcatcatgcacatagaaaacacttttagaagcttcctctttcataccaaattcaaaccataaggtctaaaggaagtacttagaggttgtggtatacacacatttattttactgaaaactgaaaataacgcagacaaaaggatgaaacttattgggaattggtatgatayataagatatctttcactcagaaaaaaagtaagaatataccatactaagttcattttcttcaaaaatttggatcctttcattttctagggctgcatatcctttttcctaaagaggaactccacattttataagttgcagttcccataaagactagatctgtccctagttttgatgaactatacctgggaaaccagaggtatggcaatcct

SEQ ID NO: 872790 - DNA, 633 bp, Homo sapiens
tgacatgccctgtagacattttccccattgtcttggtgactaactttcagctccttgctacttatgcaaatttctgcagccagcttgaatttctcctcagaaaatgggattttcttttctatcacattgtcaggctgcaaattttctagacttttatgatctgttttccttttaaaactgaatgcttttaacaccacacaagtcacatcttttttttttggggagtctcactctgtcacccaggctggagtgcagtggggtatgatctcagctcactgcaacctccccctcctgggttcaagcaattctcctgtctcggcctcccgagtagctgagactacaggcrcacactaccatgtccggctaaaaagtcacctcttgaatgctttgctgcttagacatttcttttgccagataccgtaaatcatctctctcaagttcaaagttccacaaatctctagggcaggggcaaaatgccacaagtctctttgctaaaacataacaagagtcacctttgttccagtttccaacaagttcctcatgtccatctgagaccacctcagactggattgcattgtccatatcactatcagcattttggtcaagccatagaacaagtctctagggagttcc

SEQ ID NO: 872791 - DNA, 646 bp, Homo sapiens
gtcctagtcagagcaatcagacaagagaaagaaataaatggcatccaaatcagtaaagaaaaagtcaaactattgctgtttgctgatgatgtgatcgtatacctacaaaaccctaaagactccatcaaaaagctcctagaactaatatacgagttcagcaaagtttcaggatacaaaattaatgtacacaaatcagtagctctgctatacaccaacaaggaccaagctgagaatcaaatcartaactcaacaccctttacgttagctgcaaaaaaaattaaatacttaggaatatatctaaccaaggaggtgaaagactgctacaaggaaaactccaaaacactgctgaaagaaaacatagaagacacaaacaaatggaaacacatcccatgctcctggaggggtaaaatcaatattgtgaaaatgaccatattgccaaaagcaagctacaaattcaatgcaattcccaccaaatattcccatcattcttcacagaactagaaaaaacaatcctaaaattcatatggaaccaaaaaagagcctgcatagccaaagcaagactaagcaaaaagaacacatctggaagcatcacattacctgacttcaaactatactataaggccatagtcaccaaaatatcatggtg

SEQ ID NO: 872792 - DNA, 646 bp, Homo sapiens
gtcctagtcagagcaatcagacaagagaaagaaataaatggcatccaaatcagtaaagaaaaagtcaaactattgctgtttgctgatgatgtgatcgtatacctacaaaaccctaaagactccatcaaaaagctcctagaactaatatacgagttcagcaaagtttcaggatacaaaattaatgtacacaaatcagtagctctgctatacaccaacaaggaccaagctgagaatcaaatcagtaactcaacaccctttacgttagctgcaaaaaaaattaaatacttaggaatatatctaaccaaggaggtgaaagactgctacaaggaaaactccaaaacactgctgaaagaaaacatagaagacacaaacaaatggaaacacatcccatgctcctggaggggtaaaatcaatattgtgaaaatgaycatattgccaaaagcaagctacaaattcaatgcaattcccaccaaatattcccatcattcttcacagaactagaaaaaacaatcctaaaattcatatggaaccaaaaaagagcctgcatagccaaagcaagactaagcaaaaagaacacatctggaagcatcacattacctgacttcaaactatactataaggccatagtcaccaaaatatcatggtg

SEQ ID NO: 872793 - DNA, 545 bp, Homo sapiens
gctgggccagactctgcctgccacagagctcaggcagagatgactgcaatatcacagagcaggtttcaaaggtttgatttattagagtgaaattgatctatctgaggagctcagagtccagtataaaggttttcagtgattcctataccaccatttcaataaaagctttccagttcttaaaagcaaaaacactcaaggcaggtgaagttgcactttttttttttttttaatatcgatggctgaggactcatgcccttcctgaagaatgaacacttaaatctttcacactctcaatgagaactagcaaagcaaagcagtttcctctaggtaagaatttagattrtatttttttcttctgcaagatccagagtttcagaatcttctaccacccacatactcatccatccatccaccttaatgtgccttgtcttcattgtctaatatgagccagactctgttaattggtttattccactttacagatgaagaaatgtagtctgagaattcttaaataacttgttcaggtcccatatttaataagtggt

SEQ ID NO: 872794 - DNA, 608 bp, Homo sapiens
ctatgtattggacaaagtggtaatatccagcatctgtgaggaacttaaacaaattcacaaggaaaaaccaaacaacaccattaaaaagtgggcaaatatatgaacacacacttcttaaaagaatacatacatgaggccaatgagcatatgaaaaacagctcaacatcactgatcattagagaaatgaaaatcaaaaacacaataagacaccatctcacaccagtcagaatggctgttattaaaaaggtaaaaaatcacagatgctggcaaggttgtggagaaaaaggaatgcttatacactgttggtgggagtgtaaattagttcaaccattgcagaagacggtgtggtgattcctcaaagagctaaagacagaaataccatttcacccagaaatcccattactgcatatatacccaaakgaatataaattgttctgttacaaagacacatgcatttgtatgttcattgcaccactgttcacaatagcaaagacatggaatcaacctaaatgcccaccaataatagactggataaagaaaatgtgatacatatacaccatagaatactgtgcagccataaaaatgaatgagatcatgtcctttgcagg

SEQ ID NO: 872795 - DNA, 600 bp, Homo sapiens
tgtgatgaatcacatgtattaatttgtgtatttcaaacaaactttgcatcccaggggtgaagcctacttgatcgtggtagataagctttttgatgtgctggtggatttggtttgccagtgttttgttgaggacttttgcatcaatgttcatcaaggatgttggcctgaagtttttgttgttgttgtatctctgccaggttttggtatcaggatgatgctggccttatggaatgagttagggaggtatccctcctcctcaattttttggaatcatttcagtaggaatggtaccagcttttctttgtatatctggtayaattcagctgtgaatccgtccggtcctggacttttatttgttggtgagctatttattactgcttcaatttcagaagttgttactggtctgctcagcgattacatttcttcctggttcagtcttgggagggtgtgtgtgcgtaggaatttatccatttcttctagattttctggtttacatgcatagaggtgttcataatattctctgatggttgtttgtatttctgtggggtcagtggtaatattccccttatttctgattgtttatttgaatcttctctcttt

SEQ ID NO: 872796 - DNA, 600 bp, Homo sapiens
tgtgatgaatcacatgtattaatttgtgtatttcaaacaaactttgcatcccaggggtgaagcctacttgatcgtggtagataagctttttgatgtgctggtggatttggtttgccagtgttttgttgaggacttttgcatcaatgttcatcaaggatgttggcctgaagtttttgttgttgttgtatctctgccaggttttggtatcaggatgatgctggccttatggaatgagttagggaggtatccctcctcctcaattttttggaatcatttcagtaggaatggtaccagcttttctttgtatatctggtacaattcagctgtgaatccrtccggtcctggacttttatttgttggtgagctatttattactgcttcaatttcagaagttgttactggtctgctcagcgattacatttcttcctggttcagtcttgggagggtgtgtgtgcgtaggaatttatccatttcttctagattttctggtttacatgcatagaggtgttcataatattctctgatggttgtttgtatttctgtggggtcagtggtaatattccccttatttctgattgtttatttgaatcttctctcttt

SEQ ID NO: 872797 - DNA, 599 bp, Homo sapiens
ttctgccttaatttcattatttactcaaaagtaatcgtgtaggctgggtgcagtggtttgtgtctataatcccagcactttgtgaggctgaggcaggtggatcacttgaggtcaggagttcaagaccagcctggcaaacatggtgaaaccctgtctttactaaaaatacaaaaattagctgggtgtggtggcacgtgcctgtagtcccagctacttgggaagctgaggcacaagaatcactttaacccaggaggcagaggttacagtgagctgagatcacaccgctgcactctagtctcaccaacagggcaagactctgtctcaaaaaagaaaatgtcatcttattagtctgttctcacattgctatwtggaaatacccacccaagactgagtaatttataaagaaaagaggtttaattgactcagttcaatatggctggggagtcctcaggaaacttacaatcatggtggaaggggaagcaaacatatccttcatatggtggcagcaaggagaagtgccaagcaaaaggggggaaagcacctaataaaactatcagatctcatggtgaactcacttactatcacaagaacaacagcag

SEQ ID NO: 872798 - DNA, 622 bp, Homo sapiens
ctcaaagcattgatcacattctgggcttatcttgcttattcattcgtgtgcttgataaatgtctggctcctcctctagaatgtaagctccatgaaggcagcaacctcatcagtgatcccctaacatggggtctgacatatggtgggtatagaatgaatcactcatgaaaacatctcagcaaggatgacagacattaagactttcatcagaaaaagttgaagtccagtgttgggtagagagaaacttacctcaacgtcttaccaatatgaatatgtattatatacatataaacaaatgtatacacacatgtataaaaatcacagactaacatatatacatatgtacctatgatttatacatatttaaaacatacatgcatgtacatatacaaatgatattatacaaaatttcaagtrtgtacaaaagtagagagaagagtatgatgaattccccccaaggctccatcaaccagccttaacagtcatctcatggttaatcttgtttcataaacacagcttctcatttttctctctgtctggattctttcaaagcaaattccagacatcatgcttttctctataattgtaatgtatactctaaaaaataaaagcaatcataattc

SEQ ID NO: 872799 - DNA, 619 bp, Homo sapiens
catgtgttgtgggagggacctggtgggagataatttgaatcatgggggtggtttcctacacactattctcgtggtagtgaacaagcctcacgagatttgatgattttatcaggggtttccacttttgcatctccctcatttctcttgccactgccatgtaactagtgcctttcacatcccgtcatgattttaaggcctccccagccatgtagaactgtaagtccaattaaacctctttttcttcccagccttaggatgtctttatcagcgtgtgaaaatgaactaatacagtaaattgataccagaagtggggtactgctgaacagataccygaaaatgtggaagcaactctggaactaggtaacaagcaggtgttggaacagtttggagggctcagaagaagataggaaaatgtgggaaggtttggaacttcccagagagatttgttgaatagctttgcccaaaattctgatagtaatatggacaataaagtacaggcctgggtggtttcagatgtaaatgaaaaacttgttgtgtactggaataaaggtggctcttgttatgttttagcaaagagactggcggcattttgcccctgccctagagatttgtggaattt

SEQ ID NO: 872800 - DNA, 599 bp, Homo sapiens
cagacaataatcaataagtatttaatacaagaatgcatacattggtcaggtgcaatggctcacgcctgtaatcccagcactttgggaggccgaggcaggtggatcacttgtggtcaggagtttgagaccagcttggccaacatggtgaagctccacctctactaaaattacaaaaaaattagctgggcatggtgacacacacctgtaaccccagctgctcgggaagctgagacaggagaattgcttgaactcgggaggcagaggtttcagtgagccaagwtctcaccattgcgctccagcctgggcaacagagccagattccatctcaaagaaaaaagtgcatacatgaatgaaggtgaagtcaacacatgagcaaagtacaagagaaaaacagagtgatctgcattgctataaaatgatcagcagctaatttccttccagagaaaataatttttaaaaaaaaactcaaacacagattacagttttaaaaggctgaatttctcttttctaaccactatagtttttgaaggctgaattttctctcttctgactactacagtttttaaagactgaatttctcttttctgaccactaatttc

SEQ ID NO: 872801 - DNA, 599 bp, Homo sapiens
cagacaataatcaataagtatttaatacaagaatgcatacattggtcaggtgcaatggctcacgcctgtaatcccagcactttgggaggccgaggcaggtggatcacttgtggtcaggagtttgagaccagcttggccaacatggtgaagctccacctctactaaaattacaaaaaaattagctgggcatggtgacacacacctgtaaccccagctgctcgggaagctgagacaggagaattgcttgaactcgggaggcagaggtttcagtgagccaagttctcaccattgcgctccagcctgggcaacagagccagattccatctcaaagaaaaaagtgcatacatgaatgaaggtgaagtcaacacatgagcaaagtacaagagaaaaacagagtgatctgcattgctataaaatgatcagcagctaatttccttccagagaaaataatttttwaaaaaaaactcaaacacagattacagttttaaaaggctgaatttctcttttctaaccactatagtttttgaaggctgaattttctctcttctgactactacagtttttaaagactgaatttctcttttctgaccactaatttc

SEQ ID NO: 872802 - DNA, 553 bp, Homo sapiens
aggcactaaaatggcactactttgggctcgagaaacacagagtgaacacaacacacaaaagttgctatcatggagtttacaagctagtgtcgggaggcaatcaacaaaaagaagaaaaaaatttagtgttatggaaaaataaagcaggaaaggtgaatggaaagtgctggggtggagagcaattttaaattgggaggccaagtaaagactcaataaacagawgtcacttacaccattacctgacaaaggtgaggggatgtaccatgtggagatctagggaaaagacagttcgaggcaagagagaacaagttcaaggggcaacggtgtggccagggcatggcgcagaatggactaacggaaggataccaagaatgaggtcagagaggcctgggctagattgtgcaggaccttgccactataaagagttctgctttcactatgagtgacatgggaagccactgaaaggttctgagcagtggaatgacatgaaatgacattttaaaagtctcacagtggccactgtgttaataatggggaggggggagtggaagca

SEQ ID NO: 872803 - DNA, 601 bp, Homo sapiens
agtttttattttatgatttgtaatttataaataatgtctggcttagtcaggaattatgttaataagcattgttttcttatacacatgtctaatttcttgtttgacattaatatacattcacctgccataccataacacatccctcctggagagccccctaccagtggtactccccctgtcacctacagagtgtttttgctaatagtttggaatcatcycagggcctccagcccagctggggcttgagtttgagaaagcagaaggcaaagccactgactcagtcccagaccatcaggatacgaactcataacccaagagtgtggagctgagtcttgcctcctgaaagcatccagaaacaaagccattcaactatacccaacttgcaccacaatcaaatcctcaagggcaataaagatcataaaaatgaaaagccccatccaaagtacagcaacttcaaaggataaaggaacatcagctctcacagatgagaaagaacctatgcaagaactctggcaactctaaaagccagagtgtcttcttaccaccaaatgattgcactagctcctcagcaatggattctaaccagattgaaatggtgaaa

SEQ ID NO: 872804 - DNA, 748 bp, Homo sapiens
tccctggcccctcctaaatctcatgtccttacatattttaaaagcaatcatgccttcccagcagttctccaaagtcttaattcattacagcattaacttaaaagtccacagtccaaagtctcatccaagacaaggcaagttctttccacctatgagcctataaaataaaaagcaagttagttatttcccagatttaatgggggtacaggcattgggtaaatgtagccattccaaatgggacaaattggcttaaacaaagggactacaagcctcatgcaagtttgaaatccagtggggcagtcaaatcttaaaggtccaaaatggtctcctttgaccatgtctcacatccaggtcatgctgatgcaagaagtgggctcccatggtgttgggcagctctacccctgtggcttttcaggatacagccttcctcctgactgctttcatggtctggcaatcagtgtctgtggcttttccctgtgcatggggaaagctgttggtggatctaccatcctggggtctggaggatggtggccctcttctcacagctccaatatgtggttccccagtagggactctgtgtggggtctctamctccacatttctcttctttactgccctagcagaggttctctatgagggcaccacccctgctgcaaacttctgcttgggcatccaggcatttccatacaactactgaaatctaggtggaggtccccaaaatcttttacttatttatgtatttatcatt

SEQ ID NO: 872805 - DNA, 422 bp, Homo sapiens
ggaattcaagatcagcttggataacttagttagaccccgtcactacaaaattagttaaataaaagatgaaaggaaattacttttggcctggtgcactggctcattcctgtaaaactaacactttgggaggcggaggcaggaagattgcttaagcccaggagtttgggaccaggctgggcaacaaaatgagactgtcactacaaaaaaaaattaaaaattagctgggtatagtggtgcacrcctgtagtcccagcaacttgggaggatttttttttttttttgagatggagtctccctctcttgcccaggctggagtgcagtggcatgatctcggctcactgcaacctctgcctcctgggttcaagcaattctcctgccttggctgcccaagtagctgggattacaggcacccaccaccacca

SEQ ID NO: 872806 - DNA, 422 bp, Homo sapiens
ggaattcaagatcagcttggataacttagttagaccccgtcactacaaaattagttaaataaaagatgaaaggaaattacttttggcctggtgcactggctcattcctgtaaaactaacactttgggaggcggaggcaggaagattgcttaagcccaggagtttgggaccaggctgggcaacaaaatgagactgtcactacaaaaaaaaattaaaaattagctgggtatagtggtgcacacctgtagtcccagcwacttgggaggatttttttttttttttgagatggagtctccctctcttgcccaggctggagtgcagtggcatgatctcggctcactgcaacctctgcctcctgggttcaagcaattctcctgccttggctgcccaagtagctgggattacaggcacccaccaccacca

SEQ ID NO: 872807 - DNA, 656 bp, Homo sapiens
gatatgaaataatgaaactaggtgaaataatgaaatgagatgaaacgaaataatgaaatgaaattgaaatgagatgagaagaaatgacgagatgaaatgttgaaatgaaaggaagaaatgatgagatgagatgaaatgatgagatgaaaaattatgagatgaaaatatgagatgaaatgaaatgagatgatatgaaatgacataatgaaataaatgagattagatgaaatgaaatgaaatagtgaaatgaaatgatgaaatgatgaaatgatgaaaatgaaatggagatgagatttgatgaaaagatgagatgatatgatgagatgggatgggatgagataaaatgatgagatgaaatgatgagatgatgagatgaaatgatgaggtgaagtgatgcactgtcacgtgtgtgtctattctttttcccarccaacaaaaattataattcattaattttaattttatttaacaatactcttaagagttgaaggaaaaatattatctacattatgggttacaatctaagtataaataatacataaatatattaaaacttacaaagaatatgttttggaatcgaatataccatgcttctgtgatgacagttatttcatgctggttgtcacaattttacgtgaaaaactaatgaaaaagtg

SEQ ID NO: 872808 - DNA, 605 bp, Homo sapiens
gtactatcagtgttatgataagatgagtacatggttttatgggagcatttaagaaagatactttagttcttagactagggtcatggaagacaaggaggaatttacaagcaacatgaaaggggtgggtacatttaggcaagaaacagcatgtgccaaagccccaaggcaagaaagaatataaagttagataactacaaatagttttaaatggcatactttagcacacatggagagtaataactacagctaaatccagagagcaaggtaacaccacttccagaacttcaagaaccatataagggaatttggacttacctaggaattttgagggtatatttaaaatattctaactgagaatggagatgacataatcatatttcaaccctgaaaatataaatcttttttgaagrgcatagagtaagtatgccacataagaatgtggagaaagtgggtaattgagcatattatattgactaattcagagatgggttatgtgcatgtggactgactcattatctaagttgttttctgttactcgtatgtaataatttattttttttatctatacctttcaaagttaaggtgcacagtgaaagaaatctctg

SEQ ID NO: 872809 - DNA, 654 bp, Homo sapiens
tctactaaaaatacaaaaattagctgggcatggtggcacacgcctataatcccagctactcaggaggctgaggcagcagaatcatttgaacctgggtggcagaggttgcagtgagccaagatcgtgccactgcactccagcctgggcaacagaacgagagactctgtctcaataaataaataaatagtgctgggaaaactgaatagccacatgtagaagaatgaaactggatccctaattctcaccctatacaaaaatcaactcaagatgtatcaaagacttaagacctgaaaccaaaaaattctagaagataaccttggaaaaactcttccaaacatcagcytaggcaaagaatttattactaagacttcagaagcaaatgcaacaagaacaaaactaaataaatggaacctaattaaactaggtgaagtaactcaggaatgggaaaccaaattccatatcttctcatttataagtgtgagctcagctatgaggacacaaagacatatagagtggtatcaagaactttggagactcagaagtggggagagtaggaaggaaatgagagacaaaaaaaactacatatcagatacaatgtatactatttggcttatgggtacattaaacctcagaattcaccactatacaattcaa

SEQ ID NO: 872810 - DNA, 654 bp, Homo sapiens
tctactaaaaatacaaaaattagctgggcatggtggcacacgcctataatcccagctactcaggaggctgaggcagcagaatcatttgaacctgggtggcagaggttgcagtgagccaagatcgtgccactgcactccagcctgggcaacagaacgagagactctgtctcaataaataaataaatagtgctgggaaaactgaatagccacatgtagaagaatgaaactggatccctaattctcaccctatacaaaaatcaactcaagatgtatcaaagacttaagacctgaaaccaaaaaattctagaagataaccttggaaaaactcttccaaacatcagcctaggcaaagaatttattactaagacttcagaagcaaatgcaacaagaacaaaactaaataaatggaacctaattaaactaggtgaagtaactcaggaatgggaaaccaaattccatatcttctcatttataagtgtgagctcagctatgaggacacaaagacatatagagtggtaycaagaactttggagactcagaagtggggagagtaggaaggaaatgagagacaaaaaaaactacatatcagatacaatgtatactatttggcttatgggtacattaaacctcagaattcaccactatacaattcaa

SEQ ID NO: 872811 - DNA, 631 bp, Homo sapiens
tttctttaagttccaattccaagtcggctcagattttatttctatccctcttactgcctaatcccttgattacagccacttacccacaaaggattactttgttttttagttttgtttttttgttttttttttttgagatggagtctcacgctgtcaccaggctgcaatgcagtggcgcgatctcggcacactgcaacctctgcctcctgggttcaaacgattctcctgcctcagtctcccgagtagctgttactacaggcrcgtgccaccatgctgagccaatttttgtatttttagtagagacagagtttcaccatgttggccagtatggtctccatctcctgaccttgtgatccgcccgcctcggcctcccaaagtgctggaattacaggtgtgagccaccgcacccagctgaaggattacttttataatagtaataaactacacaaactaatctgccttccaatttattgtatagtattgcatagttcctccttttctaatcagagcacagttaaattcacagggctgaaaatcttcccatgttcctccttgctgagtgtgatttatgtaaccttgtattttgtgccacaaactctgaactttgggaatgaaacttatggctctcagt

SEQ ID NO: 872812 - DNA, 641 bp, Homo sapiens
ctttgtggttttatctacctttggtctttgatgatggtgacgtacagatgggtttttggtgtggatgtcctttctgtttgttagttttccttctaacagacaggaccttcagctgcaggtctgttggagtttgctagaggtccactccagaccctgtttgcctgggtatcagcagtgatggctgcagaacagcagatattggagaactgcagatgctgctgcctgatcgttcctctggaagttttgtctcagaagagtacctggccgtatgaggtgtcagtccgcccctacttkggggtgcctcccagttaggctactcgggggtcatggacccacttgaggaggcattcttcccattctcagatctcaagctgcgtgctgggagaagcactgctctcttcaaagctgtcagagaagtacatttaagtctgcagaggttactgctgtctttttgtttgtctgtgccctgcccccagaggtggagcctacagaggcaggcaggcctccttgagctgtggtgggctccacccagttggagcttcctggccgctttgtttacctaatcaaacaactaactcatcaatggtgggcgcccctcccccagcctcactgccgccttgcagtttgatcttggactgctg

SEQ ID NO: 872813 - DNA, 641 bp, Homo sapiens
ctttgtggttttatctacctttggtctttgatgatggtgacgtacagatgggtttttggtgtggatgtcctttctgtttgttagttttccttctaacagacaggaccttcagctgcaggtctgttggagtttgctagaggtccactccagaccctgtttgcctgggtatcagcagtgatggctgcagaacagcagatattggagaactgcagatgctgctgcctgatcgttcctctggaagttttgtctcagaagagtacctggccgtatgaggtgtcagtccgcccctacttgggggtgcctcccagttaggctactcgggggtcatggacccacttgaggaggcattctkcccattctcagatctcaagctgcgtgctgggagaagcactgctctcttcaaagctgtcagagaagtacatttaagtctgcagaggttactgctgtctttttgtttgtctgtgccctgcccccagaggtggagcctacagaggcaggcaggcctccttgagctgtggtgggctccacccagttggagcttcctggccgctttgtttacctaatcaaacaactaactcatcaatggtgggcgcccctcccccagcctcactgccgccttgcagtttgatcttggactgctg

SEQ ID NO: 872814 - DNA, 564 bp, Homo sapiens
ggattcagtcatttccacctgactggcagtagatatggatagcatgatgaatggatgtttcactgtctcatggtttatatttagaatattctctcaatagaatgaattactgtaggaagctctgtaattgggattctatctgttagaagtacagactacccattttatccaaacagtcagtattcatgtagtactgaaaacaatggtagcacattgtttttgaaagtacaattgcaagaatacttatgcttagctattagtttcaaaaaatgaaccagggatctaaggcagcatttctagtcccttttcttggtcaaagcattataaaagtgctatatagayagtacacataagtttaagctgcagattttactgtttttaattcagtatctacattgtaaacataaaacaacaaatgatacaacatcaagaagtccatggtagttaaattaaagttaagatacacttacatgtctaatataacataaataggtcttaaaagtaatactcataaaaaagaaataaaacttggaaaaattaaaatactaagttttggaaataatt

SEQ ID NO: 872815 - DNA, 662 bp, Homo sapiens
aatgaccttagatatgagttttctcactaggtgttataaaatgcgctagaagagaaaaaaacacagaacaatctatttataaaccatataatgagaataaggtaccctttatctaatttgcaatccataatagaaactataattgtctatagttagaggaaaataacttatatttgcttatcaattgtaccttgaagggctctgtayttaattaaatgtccaatgacaaatctgattccaccaattgcatctttagaatcagagattgatagaagccacagagtcaggggaaccatttgccacaacagtgaaatgtgggattgatgtcacttcagcctgggatggtttatttgaaaatggtaagcctctggtagcatcaataatgccatgttattatcttttggcatttatgcatatactcctgatagtgcagtccattgagtattgaattaaagagatttcaagtcctgtccttcactagaatatagcttttcttgaagtgttaatgcaaaaaaaaaaaatgtaaagacaaagaaaacttgtaatcccaaatttttctgtaccagaacatgtttatataggtttaccaagggaaagagagggagaaatacattggatttaaggtagaacctgttcatatcaagactgtttataaatgacac

SEQ ID NO: 872816 - DNA, 547 bp, Homo sapiens
caccttgaattgtataatccccatttgtcatgagaggagctgattgggaggtaattcaaacatgggagcatgtttttcccatgctgttctcataatagtgagtaagtctcatgaggtctgatggttttataaaggggagttcccctgcacatgctctsttgcctgctgccatgtaagacgtgtcttgcttccccttcaccttccactatgattgtgaggcctccccagccatatggaactaactatgagtcagttaaacctctttttttttataaattacccagtctcgggtatgtatttattagctgcatgagaacagactaatacagtcagcctcactctacaaccttcatcactatttggcttacttactatagcagctaaggtcttattaaatccatacccattccatttttatccttagttacctcttccttcatgtcagtatctttcactatgcatttgtccaatctgcgtcatcacattaagggaaagcttgcgtgcctcttgcattcatttttttcttcttctaagagtgtcatacacc

SEQ ID NO: 872817 - DNA, 656 bp, Homo sapiens
ataattctcatgtgttgtgggagggacctggtaggaggtaatttgaatcatggggacagtttcccccatactgttcttgtggtagtaaataagtctcacgaggtctgatggttatatcaggggtttccacttttgcatcctcctcattttctcttgccaccgtcatgtaagaagtgcctttcacctcccgccatgattctgaggtctccccagccaaggagaactgtaagtccaattaaatctctytttcttcccagtctcaggtatgtctttatcagcagtgtgaaaacggactaatacactatcattaaaaaccaagacaaagcccatttgctttgtttttagtactgaacaggaacagtcctgccattcaggagtctcactgacacgtgcttgggaaatgaattatgtttctttcttcttctagctgtggattcatggcctcactatatgcaactaagctgtgtatccatggcctcactataagtaactaaaatgtacaggctcagagggccctgctttcaattcttttctgtaaatttacagaggaaagaagacagaattcttactctagctaactggaactagagctgagttaaaaaaaaaatgaattgtgacaaatgcaaactctaagtagcatggtactgtcagtggta

SEQ ID NO: 872818 - DNA, 481 bp, Homo sapiens
gtaatccaaattacaaatctgtgtttaaccagatgacaactaaggtcaagatctgaatcttctaacagcttgatccagacctttagtgagaccctgccagcctttgagacttccctcagcatctgagttgacacagagaagtattaaatatcctggacygtgtctgagagtctgctcctaaataaggctcatttcttttaaaaccatggattaatttcattaagcatgcaagagttctttagaaactttcttgtgtgggctgtagctcattttcattactgtgtttttctccccccgaccactccatcacttaggacaattcattagaaaatccaacagaatttatttgaagtaaccaattaatcctttgagatgcaacaattaatatgcaaattgtatcacattaagaatctcaggaggaatgaattaaattgaaaaatacaacccttcagaaattaaaaaagatattgtttttccatct

SEQ ID NO: 872819 - DNA, 614 bp, Homo sapiens
ctagactatactgtaataccaatcttactaagataaatttagtgtcagcctggtaaaatatcattctgccttatttgcataaactaattttcccttgtttccacaacctttcctcattgctccctattcttagtagggatgccarttaagaaatgtacacatagagcaagacctttcagcagaattaactctttaaaggaatcagtgaatgtgagtgaaaagaagactgggattgtcttattaagagaatgaaaacgccgtaaaaaaaaaaaggttgttaaacccactggtggttctgggagtggctggttctttcataagaacagtttggtatactgggtcatgctagaattcgcctgcctcagcctaaatggattgagtccatttgcagaaaacagaggaaaagtacgctgtttccactggtttcaacttggagcaggattgtctgttggtgtctcagcatggggccttcttcactctccctggaagcaaggcccagaaacataaaggctatgttttctagactccttgtaagtagtgctctgatttagggtcttctaacgagagacacttgcacgagaaggtggaagagaaggcactgttattgctctgga

SEQ ID NO: 872820 - DNA, 593 bp, Homo sapiens
ctcacagtccccatttttgcttcgttgtggctaggctcactttctgtcttctggattctgttcatttgcattctctcagcagttccttgagatgtcagggattgcttaaaatgcacagaacagagactttgcttctggccactctttcacattcaaaacaaagtataaacactatccattctaaacatagaagaaagagctaagcttttccaacaccttggagtcataaagaaaagaaaataagtgttctttcctgagattcttactctgtttgtagatgtcttacttgatttttaaaggagataaacctggaytgaatcagcagtaacatttagatgtcctttagatggttcacccttaaccataaaggacagacacaccagccttggttagtgtttcttcatcactgaccatttttagcatattgtactaagttgtaaaatgtgaaagtatgtatctggaaaaaaaatgtttctggcacgattgttttcttaagagttgtaagctgtatgtatggaaataacatgtaaggaaaacattatattcaatttagtgttcatgattagatatccattttagctgagaccaaattt

SEQ ID NO: 872821 - DNA, 568 bp, Homo sapiens
aaatattgggtttcaatttgttgggagggtattgtatgaattaattcaagtattcaacaaatttgtactgggtatctaccatgtgctataaaatatctagaaactgtgctggtagctgtatacacacacacacacacacacacacacacacaaaatccttaatgtcaygaagcttacattctcacgaacataggcagaatgtaaataaccatttcatccaaatacatagaattatttctaagttgtctaatatcctagaaatctatttatccaattcaagcaagacattgtataggtgaacaaaataaaatgcaatctcttaaagagagaaaaaaacacagaactgacatttcccaaacccgagcttaagagagaatacacaaaccaaaccagaagattctggttttttttttccagttttccagcctttaactttaactccccaacattattctccaaagattagtgatgaggcaacacaagctaatgtgaatttattacatcctggtctctatttcaagttgttttaaagattatcatacattttctctttcttttattctttgag

SEQ ID NO: 872822 - DNA, 602 bp, Homo sapiens
tggctatgtgggctcttatttgtttccatatgaattttaaaatagtgtttactactcctatgaagaatctcagtggtaattttataggaatagcattaaatctattaattgctttggacagtatagccatttttacgatatagattcttcctatccatgagcatgagatgtttttccatttgtttgtgtcatctctgatttgagcagtgttttttagttctcattgtagagatctatcacctccatagttacctgtattcgtaggttttttattctttttgtggcaattgtgaatgggatagcatttctgatttggctctyggcttgactgttgtttgtgtataggaatggtactaattttggcacattggttgtgtatccttagactttgctgaatttgtttatcagcttcaggagcttttggaccaagactatggggttttctagatataggatcatgtcgtctccaaacagagatagtttgatttcctctcttcctatttggatgtactttcttttttctcttgcttgatttgccctggccaggacatccaatactatacctaataggagtggtgagagagggcatccctgtctcatgc

SEQ ID NO: 872823 - DNA, 599 bp, Homo sapiens
gtttaaaactcagaatgcaaatctgttggaagtcatgcttgtcagaaagttccaaagtcccaaattcccacttttagattattatttctcttttttttattatactttaaagttttagggtacatgtgcacaacgtgcaggttagttacatatgtatacatgtgctatgttggtgtgctgaacccagcaactcgtcatttaacattaggtatatctcyaaatgctatccctcccccctcccctcacccacaacaggccccaggtgtgatgttccccttcctgtgtccatgtgttctcattgttcaattctctcctatgagtgagaacatgtggtgtttggttttttgtccttgcgatagtttactgagaatgatggtttttagcttcatccatgtccctgcaaaggacatgaactcatcattttttgtgtctgcatagttttccatggtgtatatgtgccacattttcttaatccagtctatcattgttggacatttattaaaaactaacttcttgagaaatatgtcttattggcccaagaataaaacatcagttttatagtcgacaacctgtgtttgagtcccaactctgccacattc

SEQ ID NO: 872824 - DNA, 750 bp, Homo sapiens
aaatgcatagaagggttctgggtagactcaaattacaaagcctactgcaccagggaggcaggggagagggaggcaagcaagaagagagctaggtgagggagcccaagcagtcctcctggcctgaagctaggaaaggggcaaggccatggcaagaaaatcagtcaacagagkagtcaggtgtggcatggtctctaaatgcttcttttattttcaaggctttaataacatcaaaaggcaatccatggtgttctcaggctagaacttggggatcctccctccagctaaaatagacagcaggcggcagacaagagaattattgaaaattaaagaatgagactttttaagaaacatgcctggtcttatgccatctgcagctgactcaaccagagggagaaaaactcatcctttaaaaaatgaaaatgataccaagacaatccaatgagaacaaaaatactgtgttcaacacgtggtgctggaaaaactagacaatccacatgcaaaaaatgaagttagattcctttcttataccatacacaaaaaattaactcaaggtgaataatagacataaatgtaagagctaaattataaaactcttaaaagaaaatatggggataaactttcatgatcttgatttaggcaaagcctgcttagacatgacagaaggtgatcaaagacaaaagagataaattggattttatcaaaattaaaaacttctgtggttcaaggacaccaccagtaaagtaaaagaac

SEQ ID NO: 872825 - DNA, 557 bp, Homo sapiens
gttgacaaagacagagttatctattttgtgtgccaaagtacagtaatacatttgtgaaataatcaactttttgaatatgtttggctagtctgatatcttaaaaggatttgacaagatactgagaacatattaccctatcttcaatacagtatagttgtagagattttttaaaaattatttttagaatcctatttaaaaaatctatggctgaagaaaaagaaatgtcaaaattttaattcacctgattgaaaaaartaatgcagtaaagtcatatatgctagaggcttgtcagtataattgtgaactgagaaattttgctattgataaaagcactattctagagagtacttcattagagaaaactgaaatacccaattgcatattttttctcttttagtctgcagctcatttgttgcattaaaactaactttgtgtttgtgcgtgtgtgtgtgtgcgtgtgtgtgtgccataactaaagatattagtcgacatagaattaatctaatttccttttttttggcattccaatttttttgtgaacttaatcagaaaaacaa

SEQ ID NO: 872826 - DNA, 652 bp, Homo sapiens
acaccttagtggggccattttgggcaactgagtggtttggtgttagataagtgtcactgaatgggagtagcaaaggttcaaacttgagcatgggagatgtcacagagctgcttctggccaactctggcaagggcactcaatagtcagtcctgggagcctagcagcttggctgtgggtgtgtttgaaagagatctcaggtcgagattaattcttggcagctggtgaatctatcagctgtatctctattagactttaacaggaataattgaatttttcttaarctaatgtttgctgtttgttgttgaagatttctgtaaataagagatactgttctccctgatcatttatcttcagagtggaatcacttttagttgagattaggttttaaggcaaaaatttatttgatttaccttttgaagctttttagcaggcactttgttataaaatataagcaatgtgtagctcaagatagctgtctttttcttaagtattgggatgagtcatattttctttatctgattgccagcagatggagttggcttatacttgagggccatagttttttctggaaaacatgtctctttaaatgctgaggtcatactcctacactacactcagtgtaacaagaagctcatataataggagttactta

SEQ ID NO: 872827 - DNA, 636 bp, Homo sapiens
aacccataaaaaaccacgttcccctgaaagaatctgtaagaacaaatgtaaattatttcttcctctaagaatgctaataaagaaaatttttctgatttgcagtcatcaattagaaaatatatctgataactgttataaatccatctcattcaaatkttaagcaatatatacattcctgactttttccttgccaaaaaaaaaataagctgaaggtattctagaagtcagtatcttctaggaaaactgttaactataaaaagaagaagcatgcacacttcttccatgagctgcctctaggccctaggtgggacagggatcatgatgtctttggactcctcacctgatacttaggtcatagctcccgcttaggagaaagttttcctcctcacacaggaagagggcccggacactcccagcatggcctcggaattcaacgggtatcgctttcacttgtatgatgtccagaagatggatctttcgattagatgacacagctatcagatctcccccggaatagtggatgactcggttttgatcccacctgagtgccaggggaaaaggattatccatgaaagaagagtcagtgtccctcctgggactgacttagccccatgacttttgcctacagcagtggtg

SEQ ID NO: 872828 - DNA, 636 bp, Homo sapiens
aacccataaaaaaccacgttcccctgaaagaatctgtaagaacaaatgtaaattatttcttcctctaagaatgctaataaagaaaatttttctgatttgcagtcatcaattagaaaatatatctgataactgttataaatccatctcattcaaatgttaagcaatatatacattcctgactttttccttgccaaaaaaaaaataagctgaaggtattctagaagtcagtatcttctaggaaaactgttaamtataaaaagaagaagcatgcacacttcttccatgagctgcctctaggccctaggtgggacagggatcatgatgtctttggactcctcacctgatacttaggtcatagctcccgcttaggagaaagttttcctcctcacacaggaagagggcccggacactcccagcatggcctcggaattcaacgggtatcgctttcacttgtatgatgtccagaagatggatctttcgattagatgacacagctatcagatctcccccggaatagtggatgactcggttttgatcccacctgagtgccaggggaaaaggattatccatgaaagaagagtcagtgtccctcctgggactgacttagccccatgacttttgcctacagcagtggtg

SEQ ID NO: 872829 - DNA, 636 bp, Homo sapiens
aacccataaaaaaccacgttcccctgaaagaatctgtaagaacaaatgtaaattatttcttcctctaagaatgctaataaagaaaatttttctgatttgcagtcatcaattagaaaatatatctgataactgttataaatccatctcattcaaatgttaagcaatatatacattcctgactttttccttgccaaaaaaaaaataagctgaaggtattctagaagtcagtatcttctaggaaaactgttaactataaaaagaagaagcatgcacacttcttccatgagctgcctctaggccctaggtgggacagggatcatgatgyctttggactcctcacctgatacttaggtcatagctcccgcttaggagaaagttttcctcctcacacaggaagagggcccggacactcccagcatggcctcggaattcaacgggtatcgctttcacttgtatgatgtccagaagatggatctttcgattagatgacacagctatcagatctcccccggaatagtggatgactcggttttgatcccacctgagtgccaggggaaaaggattatccatgaaagaagagtcagtgtccctcctgggactgacttagccccatgacttttgcctacagcagtggtg

SEQ ID NO: 872830 - DNA, 579 bp, Homo sapiens
atactgttataattagatattaatattcaatgaagattaacttttattcatgttaaaatctttaggtgattattttattagaaaattacatcttattaataaaatgttattaacttgtattagaaatatgtttcagacaagtcaatactgaggtgtaaatttaaatatattttacataaatttcactcaatttttttagtaaattaaatgttcagaaaaatagtaaagtttagatttaggtattacatggcmccgtgtctttcttcggttttaaatggtctgtagtgataaaatctgtcaggaccatcagccttcctggatttccaaaatgtcattttaattctaaaaactgaaaaacagtaaaaaaaaaaaaaatctggattcttttgccaaaaaatttcaatttatgaaccactgggtactaataaaaataatttttaaatatagtgatattaatgctaaagaagataataatatactgttttacaaaaggagaaaaacctcattttatgacagaaacaaatttgagacccagctttcaaacttaaaaaaaaaaaaagaaaatgattaattgataag

SEQ ID NO: 872831 - DNA, 658 bp, Homo sapiens
atctcaatattatggttctagggaaatcctaaatgtaaggcaaagcagttctcacggaaaaaatttagatattactagttgagttttttgaaacacattgaaggtgcctaagtttgaatttgagtctctcttagatttccttcaaaatttaaaaaaatagaaaaactctaagattttattgtgtttttaaatcagagattctccaatttaggaggagaaagaggactttgyattaggttgaagtatcagtaatctgtgaagccttttgtgaaccatgtatgtttcttcccaagaaagtataatctctgatggaagcgcttgccattattgggaagagcccctgccttgtcaggtatgtaggatttagtggtcgtaaagtgagaaaaaggatggacagatcttgagctccagtgataacatcaaaacacttcagtgcttctatttcctcattgtctctccttagatgaaattaaataaaaaatcaaaacaatgtcaagatgaatttagtccactaagtgactggctgctggatctttgaatggggtaataatcttgatatcggtattttaagatattctcaattttgtttcactaataaagccaatactggattattctttacacagtatttgagaagacattctcaaaccattatgaa

SEQ ID NO: 872832 - DNA, 656 bp, Homo sapiens
ccccaaaaagagaaaagggtcattgacaggtatcattagatttcctatgtcactgtttcttgaaaactggagaaaatgtagaagtgaggtttttattgtgggaaattaagggaaaaaatgtattctacttttcttatgtctttagttaaaattatttttattttctgtgcccttgaacattagtagagatatgacacctgttccttggactaatgtgatgtgtatttagttcaagaagatagccaaagaagtatttttaaaaaatcttcagtggggatgtagcacattttgctatttgagatgggtggggagcagaaccaggacagttccactggcactcagaaaacttcatgactaaaagcagttctcattcagcaggcataacaatgcgaaacctgaaaactcacatgatcaatttgaaaaatcaaactacatggtagcactttcttataaaatcaatcaacagatatctacagagttcttaatccatattatcactatgttaagtgmtatgagaaatgtagaaaaatatcaaacacaattactataatgtaaaaaagcctgaaatttcattagaggattaatttctagtaacacaaaataataatactctacaaacaaacaagttacatgcagtaaatgatgctatagataaa

SEQ ID NO: 872833 - DNA, 614 bp, Homo sapiens
aaatgagaccaccataccacatggagaggaagggaagccctccagctccccgccattgtatcatacaaatagattaaatctcaaactgtcctgcaaagtaacaaggaacctggaagaacacaagcacagtcccccggaggaagtccttggtgaatgagaattcctccaccagataggagaaatctttgttcccagtgggtggcatgaagcctggctcctcgtccaggtgggtgtagcatagcggggatgcccttctcatcagtgcagtggctgatggcaggagccttcctcctgatgcccttttgaatatacatgaggatgggtaccttttttgtgtgtgtgtgatggagttttgctcttgttgcccaggctggagtgcaatggtgcaatcttggctcactgcaacctccgcctcccgagttccagcaagcctcctgcctcagcctcccragtagctgggattacaggcgcccaccaccacgcctggttatttttttttgtatttttagtagagacggggtttccccatgttggccaggctggtctcaaactcctgacctcaggtcatccgtccgccttggcctcccaaagtgctgggattacatgcacgagcc

SEQ ID NO: 872834 - DNA, 621 bp, Homo sapiens
ataatatctaaaagctaggtgagccaaatggaagtagcataagcaatgcaaacttcctcttttattaagtgaatattgatgcaatattatagattattttcaggctaccagatagaaagggacacgtgatccttttttctcgagaattatatattagtattcagaaagaaaaaaatcctaatatatcatttatgcacaggttggaggttttcatggattccttcctctgtgaagtccttgctcttcacagacactcttcggtgtggatttttctagtggtgagaaggcacaggtgacaagatacaggaaattatggaggacacacaagcttgtcccaaacatcagaattcctacacgatttttattttttttaatttttatttatttwtttttttacttttttaaaaatgtaatttaattttattattattatactttaagttttagggtacatgtgcacaatgtgcaggttagttacatatgtatacatgtgccatgttggtgtgctgcacccactaactcgtcatttagcattaggtatatctccaaatgctatccctccccgctccccccactccacaacagtccccggagtgtgatgttccccttcctgtgtccaag

SEQ ID NO: 872835 - DNA, 645 bp, Homo sapiens
gactacaaagcaaatagctaacaatactatgtcaggaagaaaatctcacatatcaaaattagccttgactgtaaaggacctaaaggctccatttaaaagacatagagtggcaaattggattctaaaacacaaaaaaaaacaaaaagacaaccatctgctgccttcaacacacccatctcacatataatgtcacccacaggytcaaagtaatgggatggagaaagctctatcatgaaaatgaaaaacaaaaaaaaaaaacagcaagtgtttctatttttgtatcttgtattaaacagactttaacagtaaaataaaatacaaagaaggacattatataatgataaaaagttcaattcaacaaaaagattaaactatcctaaatacatattcactgaacatcagagcacctagatttataaaataaatactactagacctatgaaaagagatagacagccatacaataatagtgagggacttcaacacctcactgacagcactagataggttactgaggcagaaaactagcaaagaaactctgtacttaaactggactcttaattaagtggacctaatagatgtctccagaatactccacccaacaaccacagaatacacatttttctcatctgcacatggaatatt

SEQ ID NO: 872836 - DNA, 610 bp, Homo sapiens
acgttgatataccattaacaatgacaaatagctgtctctttgaacccagatcattcatagttcttaatcttttaattaatataaaggaatataaaaaattagactataatgaattgtgattttctttccatttcattttttataaaagtctgggtatgctgtttyccaaaagagacagtaaagatcctctcaggctgggtgtagtggctcatgcttgtaatcccagcactttgggaggctgaggtgggtggatcacctgaggtcaggaatttgagaccagcctgaccaacatggcgaaagctcatctctactaaaaataccaaaagtagctgggcatggtggcgtgtgcctgtagtcccagctatttgggaggctgaggcatgagaatcacttgaatctgggaggtggatgttgccagtgagccaggatcacatcactgcactccagcctgggcgacagagtgagactctgtctcaaacaaaacaaaacgaaacaaaacaatcatttctacactctttttaattctgcatctttggctgagatcgactattgaatcaatacatcaaggaattaatcttatcttgccaaggaaacagccctgttgatctaa

SEQ ID NO: 872837 - DNA, 594 bp, Homo sapiens
tttttagggagaaaaatgggggaaaaactgccaactggaagaaggttggtataattcatgtaactataaaaaggataggaagagatctgaggcttagaaacaacagaaggacaaatgtatttaggacaatatctgtaaggagctcctgccatttccagtttctgcttctctccatgcatttagctttgttttcctctactttggtggatctcagttgggagacagtaccctccaagggacatttggcaatgtctggagacatttttggttgtcactgctggggaatgctactggaatctaatgggtaagaggccttggatactgctaaacattctataatgcacaagataagcccccactcctaaccccatgccaacaagcaattttctagcccccaagtattcatagcaccactgttgagaatctctgatctactccatacctattccttccatatrttcagtaacatgaaatcttcagtttcaaaggcactcatctgataacctcaccatcagaaaaagcctgaaattgtccctctactttcaattttaaaattccccaggaaggaatccaattgctttcttgagttaatta

SEQ ID NO: 872838 - DNA, 624 bp, Homo sapiens
catttatgacagtacgtatagtttatttccctctaaatgttctcttcccttttcttgatgagggtcaatatcagcctatttcttccacatataaggaaaactttttgtctactaaatcatcactctttaaccttctgcttttcccgtagtatacccaaagttgagcttcacctgaatgtcagtatgctaaaggtttcctcatttataataactttaatagcattatatgtcactattaattcacgtagcttgcttacattcctaaaaacgttttaattttagtgttgcctcactcacatctgtcttcattcctccrgctactatccctacccttcatcatttactctacggcataatatcacctacatcctaatcaaaataaagcaatggcctcaatgctatggccccttcctgacaggtaaatttgtgggttcagcaacctttgaaatgcccccataaaagcaacttcaaacatttaaaaatgtgtattcacaaactcacataaattttttggtggtgtgatgctgagacccaaatgcaatgatttaatgttgcacagttaatctgtgagaaactgtatctattacttaggtactgactataacaatgctaataccaagcttt

SEQ ID NO: 872839 - DNA, 627 bp, Homo sapiens
ttacttttggagagacaacttctacttgatcctccaagtcttaacattgcattttttaaagctccagttagtatatatttaattttcaagaactttttattcctctctggatatccttttgtaatcactgtggccctattttatagatgaaatattctctcaaatctatttgagaatgttaattagaaatatttttggytctgttctgtcaattatctctatttcttttttttttcttttttttttttttttgagatggagtctcactttgtctcccaggctggagtgcagtggcgtgatctcggctcactgcaagctctgcctcctgggttcacaccattctcctgcctcagcctcccgagtagctgggactacaggcagccaccaccacacctggctaattttttttctactttttttcagtagagatgggttttcactgtgttagccaggatggtctcgatctcctgacctcgtgatccacccacctcagcctcccaaagcgttgggattacaggtgtgagccaccgcgcccggccaattatctctatttctttcaggttcagtttttctgatactgtatcttggctattctcttaaatgttatagacttttcttgattatcca

SEQ ID NO: 872840 - DNA, 627 bp, Homo sapiens
ttacttttggagagacaacttctacttgatcctccaagtcttaacattgcattttttaaagctccagttagtatatatttaattttcaagaactttttattcctctctggatatccttttgtaatcactgtggccctattttatagatgaaatattctctcaaatctatttgagaatgttaattagaaatatttttggttctgttctgtcaattatctctatttcttttttttttcttttttttttttttttgagatggagtctcactttgtctcccaggctggagtgcagtggcgtgatctcggctcactgcaagctctgcctcctgggttcacaccattctcctgcctcakcctcccgagtagctgggactacaggcagccaccaccacacctggctaattttttttctactttttttcagtagagatgggttttcactgtgttagccaggatggtctcgatctcctgacctcgtgatccacccacctcagcctcccaaagcgttgggattacaggtgtgagccaccgcgcccggccaattatctctatttctttcaggttcagtttttctgatactgtatcttggctattctcttaaatgttatagacttttcttgattatcca

SEQ ID NO: 872841 - DNA, 627 bp, Homo sapiens
ttacttttggagagacaacttctacttgatcctccaagtcttaacattgcattttttaaagctccagttagtatatatttaattttcaagaactttttattcctctctggatatccttttgtaatcactgtggccctattttatagatgaaatattctctcaaatctatttgagaatgttaattagaaatatttttggttctgttctgtcaattatctctatttcttttttttttcttttttttttttttttgagatggagtctcactttgtctcccaggctggagtgcagtggcgtgatctcggctcactgcaagctctgcctcctgggttcacaccattctcctgcctcagcctcccragtagctgggactacaggcagccaccaccacacctggctaattttttttctactttttttcagtagagatgggttttcactgtgttagccaggatggtctcgatctcctgacctcgtgatccacccacctcagcctcccaaagcgttgggattacaggtgtgagccaccgcgcccggccaattatctctatttctttcaggttcagtttttctgatactgtatcttggctattctcttaaatgttatagacttttcttgattatcca

SEQ ID NO: 872842 - DNA, 647 bp, Homo sapiens
aaaatgaaacacatctttataatgaaggcagtcatcacctagaagcaaaggttggtaggcaaatatacaactgccatgcagggtgttcaataccatgataaaggaatgcacagcagtctaaggaaacagtttaggcaaatatgctgagtcatgaaagtcctgaagtagtgacagagagtaaatattttaaaaaagaggactttcctatccccaaaataaatctataattaacatcagtagtgtactttccccaacattcacttgttcagaaatatatatatatatatatatatatatatatatatatayacacacatatatatatatttgtcatcttctcttttagaaaattatgtttctcaagagtttcacattatgattccattattctgtttttcactgatctggaactttccataatggtcacgtctcactttcaaagtaatcattttcatttagtttattattttggattgcgcgtggaggatggagaatgcagagaccaagttagaagacagagaagcaggagcattagtgagtcaccgtcaacttgatcaatctgtcctagaggccctggaggctacttgagccagctatattttgataactgcaaatccttttcattttgcctttctgccttcctcttg

SEQ ID NO: 872843 - DNA, 553 bp, Homo sapiens
atatgtatacatgtgccatgttggtgtgctgcacccattaggtaaaggcctttttaggcatctttaaagtggtgttcattgggggaagctaagtaaagcatacagaaaaactctctgcactgtatttttgcaacttctagtgagcctgtgtttaaaaacaaaaagttatttataaaactgctaacaattcatttttaatctcaaataatcaataagtaaaatttatccaactcaaagaacagatcaaatacagtcatatcaaaataagttaattaatttttccaagaaactataacatatcacaaaccataataacaaagactcatccccaaagatatgggttccaaayttcattacaatgaatttcacaaaaagtatgtaaaaagcctaatagcaatgatcacagctactgcattggaggaatatctccagaagaaatacagttttgtttttgtttttttgagacggaatctcgctctgtcgcccaggctggagtgcagtggtgcgacctcacctcactgcaacccccacctaccaggttcaagcaattctc

SEQ ID NO: 872844 - DNA, 655 bp, Homo sapiens
tcatctttctttatttttcactttattcactgtaatctgaccgaatctcctttatttagaaacattatccataaacggtttttaagttttagaaagcactctacatgcagtacattgtagaatacactcttttccaaaatatgctttattttcctaatcaatagccatagacttttttacatayagcaagatcaggatggctttgtttgtccaggggcccacactatgcaaacagcttaactgggtgatcttaaggggatatgtctcctaggcttgagtttcttaatatttaacaggcagttttaaaattcattagatcagggattcttggccagaaggcatcggcccccaggaggtctgcggacggaggttcatgatgccactgaatgtaagtgccaagtttggtgggtgcatatgtgcatttttcttggaggagggtccagagctttcatcagtgcctcaaaaatagtgtgtggtccaaaactgaatacataatgttcccctgcggaagatgattcataaggtcagagacagccttaagtttttaagagtgatgatgtgactaagtccctgtcctaatgatgtacagtcttgttgaaaaaagtccagtgaaaagtcaagaatagtcatatcaacagccttctttgccttaagc

SEQ ID NO: 872845 - DNA, 609 bp, Homo sapiens
agaatagccatttttataaataaatcttgtaggccttaactacttcagcaatatgtgggtgaccaaaaaagctcactgccccctcaagaagcttttctcagggattccttaccaagaaagtgcctgcgtgtaacaaaaggaaaagttccaagtttaaagaataggagaggttagaaacagagggaaaaagaagtgaaaggcatgaagtctaggagtgctcacaagggcagccttcctactgagtttagcttgcccagtgaatcctaaggcttcaaatcctttcatttagagtttgaacatttttaatttactctctagatatgayaggaaaccaaggttggtcctactgatattctagaattgccacattctgcctgcaatagacttccggggccagcctgtgagcttaacaccgtttataaccccatttcagtatacaaggaactccacagtcacagctgctattagacccattaaatttattagtgttagtcatttgcaattggtggcaatctctattttattttttccctttccaaatgaaaataatgggccttttcaagaaagtataacaaaatcttgcatatcagtatgcaacagtaatagtta

SEQ ID NO: 872846 - DNA, 609 bp, Homo sapiens
agaatagccatttttataaataaatcttgtaggccttaactacttcagcaatatgtgggtgaccaaaaaagctcactgccccctcaagaagcttttctcagggattccttaccaagaaagtgcctgcgtgtaacaaaaggaaaagttccaagtttaaagaataggagaggttagaaacagagggaaaaagaagtgaaaggcatgaagtctaggagtgctcacaagggcagccttcctactgagtttagcttgcccagtgaatcctaaggcttcaaatcctttcatttagagtttgaacatttttaatttactctctagatatgataggaaaccaaggttggtcctactgatatyctagaattgccacattctgcctgcaatagacttccggggccagcctgtgagcttaacaccgtttataaccccatttcagtatacaaggaactccacagtcacagctgctattagacccattaaatttattagtgttagtcatttgcaattggtggcaatctctattttattttttccctttccaaatgaaaataatgggccttttcaagaaagtataacaaaatcttgcatatcagtatgcaacagtaatagtta

SEQ ID NO: 872847 - DNA, 635 bp, Homo sapiens
ttttaaaaaagtgacctatgttgtctctcatagcttatgacaactccaattttgacacgtgtttgaaactagtgatctttagattatataaaatcaacttcactctttctccctgttcaaacctcaaactctggttacttttaggcttactgctcccttgttaattatttataatgaactatggagctataggcttgctttagtgtgttaacctttatttgtgtcttgtttcaggcatttgtatattgttttctcatctggagagtgagctgcactgttttccttcagtgctgtttagaagagctttcggagaccagaaacatgttctttttgcattacccaatatggtagcactagccacatatagcttttgaccacttgaatggggctagagcagtggaagcactgaaattttaatawtttttttcttttccttttctctctctcttttttttgtttttgtttttttttttgagacggagtctcgctctgctctgtcacccaggctgcagtgcagtggcctgatctctcctcactgcaatctctgcctcccaggttcaagcgattgttctgcctgagcctctcgagcagctgggattacaggcgcctgctaccacaccctgttaatttttgct

SEQ ID NO: 872848 - DNA, 600 bp, Homo sapiens
accacctttcctctggtgtgattgaactgctggtaaattagtggtagaagaaaactaataaactgagaaaaaatacacttattttatgtagtataatttttgcttaattaataactgaaataagaaatttaatgaagatagtatttcgcttctgaaattaaaagtttttaaagccaccttttattagttgacttacctattttcatctaataatacctaaatggcaccatccccaggaaattacaaatttatatggccaagagcttttcagtgaagtaaccatgaatcctaatctcctctttttcttgaacttagaaagagattaaatacccattcagttaactgatttatttcccttcytcaaggctgcacaaaggagctatctgaagaagaaaatgtaataacccaaggtccctgtctaaaagaatttggggatttattagattgagcagaaaggatttttcctttcatccaatgaacttttcttatttcttgtggctgttcgttattcttatgtatgggataaagctatgcataaccttaaaatgcagacaactattttgaggaatattattctgatataattcataaacagtggaa

SEQ ID NO: 872849 - DNA, 637 bp, Homo sapiens
ttccttcaattctatttttcctatagggtcttcagtgtaagttattctacacaaggttttcaggagcactggcatatgggcacttttgagcaagtgattcctctataaagatttctttttctgctactttgtcaaatttatctctgaatataaacaaatcccattctgaaatctcgggttaagatactgagtacactctatgtgagcccaggctaagtacctcttttttgtttgttggcaatgcatttgtggagatttcaggatattttgaaaagtcaatttgtgtctctgcacgtgagctgggtttcctgaatrcagcacactgatgggtcttgactccttatccaatttgccagtctgtgtcttttaattggagaatttagcccatttacatgtaaggttaatattgttatgtgtgaatttgatctttgatcttgtcattatgatgttagctgtttattttgctcattagttgatgcagtttcttcctagccttgagggtctttacactttggcatgtttttgcagtggctggtaccagttgttcctatccatgtttagtgcctccttcaggagttcttttagggcaggcctggtggtgacaaaatctctcagcatttgcttgtctgtaaagtat

SEQ ID NO: 872850 - DNA, 562 bp, Homo sapiens
agagaataaaatacctaggaatacaacttgcaagggatgtgaaggatctcttcaaggagaactacaaaccactgctcaatgaaataatagaggacacaaacaaatgaaaaaacattccatgctcatggatagaaagaaacaatattgtgaaaatggcctaactgcccaaagtaatttacagattcaatgctatccctgtcragctaccaccgactttcttcacagaattggaaaaaactactctaaacttcctatggaaccaaaaaaagcccacatagccaagacaatcctgggcaagaagaacaaacctggaggtatcatgctacctgacttcaaactatagtacaaggctacagtaagcaaaacagcatggtactggtaccaaaacagatatatagaccaatggaacagaatagaggcctcagaagtaacaccacacatctaccaccatctgatctttgacaagcctgacacacacaagcaatggggaaaagattccctatttaataaatgatgttgggaaaactggctagtcatatgcagaaaactgaaactggacccc

SEQ ID NO: 872851 - DNA, 562 bp, Homo sapiens
agagaataaaatacctaggaatacaacttgcaagggatgtgaaggatctcttcaaggagaactacaaaccactgctcaatgaaataatagaggacacaaacaaatgaaaaaacattccatgctcatggatagaaagaaacaatattgtgaaaatggcctaactgcccaaagtaatttacagattcaatgctatccctgtcgagctaccaccgactttcttcacagaattggaaaaaactactctaaacttcctatggaaccaaaaaaagcccacatagccaagacaatcctgggcaagaagaacaaacctggaggtatcatgctacctgacttcaaactatagtacaaggctacagtaagcaaaacagcayggtactggtaccaaaacagatatatagaccaatggaacagaatagaggcctcagaagtaacaccacacatctaccaccatctgatctttgacaagcctgacacacacaagcaatggggaaaagattccctatttaataaatgatgttgggaaaactggctagtcatatgcagaaaactgaaactggacccc

SEQ ID NO: 872852 - DNA, 596 bp, Homo sapiens
gggctattgtgcctggtaataatatattatttctccagcttcagacttaaaatgtgatagtaaaaattaatagagtaaagactatttttctcctttcttgtgcatttttactatactacatttgtcatgagaatagtaagaagttacacacattaaacagctctcttatgagctatgatgattagtagtttgagcatcagcaaaagggtgtggataatcctaacaattcagtagagagccttagactattctcttgaattctaagcacccttaactccatgaatttgtsatgtgaacgtaggctttggagtcagacagagaaaacttaggcaagttatttaaccccactgatctcctcataaaacggaaataatgagatagaactcatagggtcattgggtggattataataatggaatgttgcagagaaagtccttaacaagtacctgacacaaaatagtattcatcaatattccttaaaggagcagatcgtaatgaataagtttaaatcagtgttctaaaccctggcttgcatcagaatcaactgtggaacaattttacaatagagatgccaaaccctatcttaagagatattt

SEQ ID NO: 872853 - DNA, 596 bp, Homo sapiens
gggctattgtgcctggtaataatatattatttctccagcttcagacttaaaatgtgatagtaaaaattaatagagtaaagactatttttctcctttcttgtgcatttttactatactacatttgtcatgagaatagtaagaagttacacacattaaacagctctcttatgagctatgatgattagtagtttgagcatcagcaaaagggtgtggataatcctaacaattcagtagagagccttagactattctcttgaattctaagcacccttaactccatgaatttgtgatgtgaacgtaggctttggagtcagacagagaaaacttaggcaagttatttaaccccactgatctcctcataaaacggaaataatgagatagaactcatagggtcattgggtggattataataatggaatgttgcagagaaagtcyttaacaagtacctgacacaaaatagtattcatcaatattccttaaaggagcagatcgtaatgaataagtttaaatcagtgttctaaaccctggcttgcatcagaatcaactgtggaacaattttacaatagagatgccaaaccctatcttaagagatattt

SEQ ID NO: 872854 - DNA, 589 bp, Homo sapiens
tgctgcaaataatagagaacagcaatgaaactttcaggggtggctggggggtgtaggcttttagttccaaaaatacaccataggcggcctacctcacctagaaataccatcaaacccacacagtggccatgcctgacttctccataamctgaatcaagccaagtatatataatgacctccgccggatacattctctacaggtgagtggggtaaactggcactgcggtcctggcatggtggagagtgcaatcaccaaggtgtctggagccttggagtcttagctatcaagaggtgtagctagctccagctacatcacgctcttcaggcctggtgtcttctctgtaaaacgagagggatgaaacagattttctataaggcacctctcggctctaaaatttaagattccaaagtgtactttacatacatgacagaatcttgtgagaggatcaacagctctgccaggacttgagtctcaagagaaagaatgccaaatttaatcccttggggtgatgcgggcgctaactgttgaaacatgctaggtgccgtcaggttccaggtactacgttgtgctatgcgctgcctccgcaac

SEQ ID NO: 872855 - DNA, 623 bp, Homo sapiens
tttatattattctctgatggtagtttgtatttctgtgggatcagtgttgatatcccctttgtcattttttattgtgtctatttgattcttctctcttttcttctttattagtcttgctagcggcctatcaattttgttgaccttttcaaaaaacaagctcctgaattcattgattttttgaaggtttttttgtgtctttatctccttcagttctgctctgattttagttatttcttgccttctgttagcttttgaatgtgtttgctcttgctttactagttatttttattgtgatgttagggtgtcaattttagatctttcctgctttctcttgtgggcatttagtgctataaatttccctctacacactgctttgaatgtgtcccagagattctggtatgttgtgyctttgtcctcattggtttcaaaaaacatctttatttctgccttcatttcattatgtacccagtagtcattcaggagcaggttgttcagtttccatgtagttgagtggttttgagtgagtttcttaatcctgagtcctaatttgattgcactgtggtctgagagacagtttgttatgatttctgttcttttacatttgctgaggagtgctttacttc

SEQ ID NO: 872856 - DNA, 457 bp, Homo sapiens
tctctttcctcaagcaggaggagtctcttcccttagccacagctgagaatgtgctgggtgacacctgaaaccacaatggctctgagtcttgcccatggcctacagcaagtactgcctggctaccactgcagattattcagagcygaaaagctctttagttagcaggtaatggatcctgccaggactaattccttcccttcaaggcaatgggttaccttctggcccagggcatgttcagaaatgtcttccaaaaggtagggcctgaaatgggggcctctagactctgcctgatgccctattctactgtggctgagctggtatctaaattccaacaaaaagtcctctttactctcttctctcctcaagcagagaaaagaagtctctcccagagctgtgaggtgtactacctaggtttaggggagcagtgatgcaaacactccctttgcctccccagctg

SEQ ID NO: 872857 - DNA, 457 bp, Homo sapiens
tctctttcctcaagcaggaggagtctcttcccttagccacagctgagaatgtgctgggtgacacctgaaaccacaatggctctgagtcttgcccatggcctacagcaagtactgcctggctaccactgcagattattcagagctgaaaagctctttagttagcaggtaatggatcctgccaggactaattccttcccttcaaggcaatgggttaccttctggcccagggcatgttcagaaatgtcttccaaaargtagggcctgaaatgggggcctctagactctgcctgatgccctattctactgtggctgagctggtatctaaattccaacaaaaagtcctctttactctcttctctcctcaagcagagaaaagaagtctctcccagagctgtgaggtgtactacctaggtttaggggagcagtgatgcaaacactccctttgcctccccagctg

SEQ ID NO: 872858 - DNA, 560 bp, Homo sapiens
ccttccaccttgattgtgaggctgctcaactatgtggaactgtgagtcaattaaacctctttcctttataaattcccagtcttgagtatgtctttattagcagtgtgagaacagactaataaaaccagggaaagaatcaatatatctaagagttggtgattttttttttttttttgaggtggagtctcgctctgtcacccaggctggagtgcagtggtgtgatctcggctcactgcaacttccrcttcccaggttcaagcaattctcctgcctcagcctcccgagtagctgggactacaggcacctgccaccatgtctggctaatttttgtatttttagtagagatggagtttttccatattggccaggctggtctcaaactcttgaccttgtgatccgcccacctcagcctcccaaagtgctgggattacaggcgtgagccactgtgcccggccagagttggttttttgaaaaaaaaaaaaaattcaacaaatccttagctagactaagaaaaaaaagagaactcaaataaaatcaaaaataaaagtgaagaaattaaa

SEQ ID NO: 872859 - DNA, 560 bp, Homo sapiens
ccttccaccttgattgtgaggctgctcaactatgtggaactgtgagtcaattaaacctctttcctttataaattcccagtcttgagtatgtctttattagcagtgtgagaacagactaataaaaccagggaaagaatcaatatatctaagagttggtgattttttttttttttttgaggtggagtctcgctctgtcacccaggctggagtgcagtggtgtgatctcggctcactgcaacttccacttcccaggttcaagcaattctcctgcctcagcctcccgagtagctgggactacaggcacctgccaccatgtctggctaatttttgtatttttagtagagatggagtttttccatattggccaggctggtctcraactcttgaccttgtgatccgcccacctcagcctcccaaagtgctgggattacaggcgtgagccactgtgcccggccagagttggttttttgaaaaaaaaaaaaaattcaacaaatccttagctagactaagaaaaaaaagagaactcaaataaaatcaaaaataaaagtgaagaaattaaa

SEQ ID NO: 872860 - DNA, 566 bp, Homo sapiens
aagacttaaatgtaaaacccaaaactataaaaaccctagaagaaaatctaggcaataccattcaggaaataggcatgggaaaatatttcatgatgggagatgacaaaaacaactgcaacaaaagcaaaaattgacaaatgggatctaattaaactaaagagyttctgtacagtgaaagaaactccattatagtgaatggacagcctacagaatggaagaaaacttttgcagtgtatccatctgacaaagttctagcatccagagtacaaggaacttaaacaaatttacaggaaaaaaaaacaaacaaacaaccccataaaaaagggtgcaaaagacatgaacagacacttcttaaaagaggatatgcatttgccaacaaacaccaaaaaaagaagctcaacatcattgatccttaaagcaatgcaaatcaaaaccacaatgaggtatcatctcacaccagtcagaatgcctgttactaaaaagtcaaaaacagatgctggcatgatgtggagaataaaaaatgctttttgtgggagtgaaaattcatctaaccattgagacaatga

SEQ ID NO: 872861 - DNA, 615 bp, Homo sapiens
tcaataaacataatccatcacataaacagaaccatgacaaaaaccatataattatctcaataaatgcagaaaaggccttcaacaaaattcaacagcccttcattctaaaaactctcaataaactaggtattgatggaacatatatcaaaacaataaaagctatctatgacaaacacacagccaatatcatactgaatgggcaaaaactggaagcatyccctttgaaaatgggcaaaagtcaaggatgccctctcttaccactcctattcaacatagtgttggaagttctggccagggcaatcaggaaagagaaagaaataaaggtattcaaataggaaaagaggaagtcaaattgtctctgttgacagatgacacgattgtatatttagaaaacaccactgtctcagtccaaaatctccttaagctgataagcaacttcagcaaaatctcaggatacaaagtcaatgtgcaaatatcacaagcattccaatacaccaataacagacaaacagagagccaaatcaggagtgaactcccattcacaattgctactaacagaataaaataactaggaatacaacttacaagggatgcgaaagacctcttcaaggagaa

SEQ ID NO: 872862 - DNA, 541 bp, Homo sapiens
tcagtgctctgtggggacttagagaacttttgtgtctagctcagggattgtaaacacacaaatcagcaccctgtcaaaacagaccagtcagctctctgtaaaacagaccaattagctctccataaaatggaccaatcagcaggatgtgggtggggctagataaaggactaaaagcaggctgcctgagccagcagtggcaacsgactccggtccccttccacactgtggaagctttgttcttttgcgctttgcaatatatcttgctgctgctcactctttgggtccacactgcctttatgatctgtaacactcaccacgaaggtctgcagcttctctcctgaggccagtgagaccacgaacccactggggggaatgaacaactccagatgggaggaaggaacaactccagatgcgccgccttaacagctgtaacagtcacggggaaggtctgcagcttcactcatgaagccagtaagaccacaaacccaccagaaggaagaaactcctaacacatctgaacatcagaaggaacaaactccag

SEQ ID NO: 872863 - DNA, 541 bp, Homo sapiens
tcagtgctctgtggggacttagagaacttttgtgtctagctcagggattgtaaacacacaaatcagcaccctgtcaaaacagaccagtcagctctctgtaaaacagaccaattagctctccataaaatggaccaatcagcaggatgtgggtggggctagataaaggactaaaagcaggctgcctgagccagcagtggcaacggactccggtccccttccacactgtggaagctttgttcttttgcgctttgcaatatatcttgctgctgctcactctttgggtccacactgcctttatgatctgtaacactcaccacgaaggtctgcagcttctctcctgaggccagtgagaccacgaacccactggggggaatgaacaactccrgatgggaggaaggaacaactccagatgcgccgccttaacagctgtaacagtcacggggaaggtctgcagcttcactcatgaagccagtaagaccacaaacccaccagaaggaagaaactcctaacacatctgaacatcagaaggaacaaactccag

SEQ ID NO: 872864 - DNA, 589 bp, Homo sapiens
actttttaaaatattgtgaagagtactttttatgttacgtatatcttacaattaaaagtgaaaaaagacatgaactaaatatataaagataaaaattgtgtgcacatgatgacttaaaatgtgtagaataaaaaaattaaaatcctaggaaaaaaatacacatattaagtctattttttttgaggagtagagttgtggttactttttaaaatttttcatttatatactttctaagtagttcacaataaaggtactacttttatagtaacataaacttaaggccaggcwcgatgactcacgcctgtaatcccagcactttgggaggccaaggtgggtggatcacaaggtcaggagttcgagaccagcctgactaacatggtgaaaccccatttttactaaaaatacaaaaattagctaggcatggtggtccacacctgtaatcccagctactcaggaggctgaggcaggagaattgcttgaacccggaaggcagaggttgcagtgagccaagatcgtgccattgcactccagcctgggtgacagagcaagacgccccatccaaaaaaaaaaaacttacaaaaatgcacaa

SEQ ID NO: 872865 - DNA, 588 bp, Homo sapiens
tcttgatagtggtctatcaattttgttaatcttttcaaaaaaaccagcttctagattcattgattttttgaagggatttttgtgtctctgtctctttcagttctgcttgatcttagttatttcttgccctctgctagcttttgaatgtgtttgctcttgcttctctagttcttttagttgtgatgttagggtgtgaattttagatctttcctgctttctcttgtgggcatttagtgctataaatttcccgctacacactgcttgaaatgtgtcccagaggttctggtatgttgtgtctttgttctcattggtttcaaagaacatctatatttmtgccttctttcgttacgtacccagtagtcattcaggagcaggttgttcagtttccatgtagttgagtggttttgagtgagtttcttaatcttgagttctagtttgattgcactgtggtctgagagacagtttgttatactttctgttcttatacatttgctgaggagtgctttacttccaaccatgtggtcaattttggaataagtgcgatgtggtgctgagaagaatgtatattctgttgacctggggtggaga

SEQ ID NO: 872866 - DNA, 604 bp, Homo sapiens
agttagtaaatgtctgtggcaccaatctccatgttctgattctgtgtcccagtgagggtctacactgggaactgcctgctggcctgtggggaattgttcgctttcctctgttgtcatcctgtcattgacctgactgagataccagagatcgccaaactcttggggctgcagttatggtggcacttctctcatttggggttagtgtctgatctagcagtaacattctatctctccatgtcagatcaaaggattgtcctaacccttgtaaaacatcaatatagccatcagggttatctgagtatttacctargtctattttaatttgcttcaagtctgacaggaaaaaaagtacatacactctgactgggccaaattctccagaatacatcttaggggcatttttgccttgggaggaatgtttcccatcgctttggaggtccctttgtggtcgtcaaaatgttaccaggaggtccttgttcttagagctcccaagagggtggcgggctgcttccaagatgtcagcaagcctcttgttctctgacctgaggttcttggcctcacggattccaagaaatggaatcttgggctatgcagtgagtgttat

SEQ ID NO: 872867 - DNA, 623 bp, Homo sapiens
aaaaaaagcaagcttaattttctcgcttcaaataagctttgtttaactgcagtattagaagatttttttaaagtacaggcatatcttgaagatattcaggttcagttctagaccactgcaataaagtgaattacaataaaaccagtcaaataaattttttggtttcttggtgcacataaaagcaatgtttacattatgctgtagtctagtaagtgtgcaatagcattatgtctaaataatgttcataccttaatttaaaaatacttcattgataaaaatgctaatgatcatctgagccttcagtgagtcataatctttttactgatggaggagcttcctgcaatgttgatggctgctgactgagcagggtggtggtggaaggttggagtggctgtggcaatttcttacgataagataacaataatatttgcaacactgrtttgactcttacacaaaagatttcactgaggcatgagttgctgctttattcacattgaaacttctttcaaaattagtcaatcttctcaaacccttgtggctacttcatttatcaaccatgcttatgtaatattctaaatcctttgttgtcatttcaccaatgtttgtagcatctttaccagcag

SEQ ID NO: 872868 - DNA, 632 bp, Homo sapiens
tatagactttatttggattcatcagttttgccactaacatcattttctgtcccaagatcgaagcaggatgccactttacgttagtggtcatgtctccttagtctcctcaaagtgtgatagtttctcagtctcatcttatttttcttgcccttgacagcttggcaagagttgtaggtgtgtttccaccataatttatgattatccatgccttttcttccctgttattatcttggtattgtagaggaaaaggggggaaagcttcgtttttatcctttgaatgtttgctgaaaatgacctgacaaaaggcagattaatagaagaaaaaggcatacaaaatttatttaatgtgcagagggtgagggttcatagcagtgtgattacccaacaacttaatggggtacagatgcttatttacccttcacagggaacaggggagatggggaacattggtaattctttagaggggtaataagtggttattaagragaataaagggacctggaagacagaatttaacttgtaaatgattctctttggaatctgaatgatcctgagagtcaggaattatcttgtaagaaagtccatcgaggtgtgattgcattcttcagtgttcttttctgtgatagacaatg

SEQ ID NO: 872869 - DNA, 664 bp, Homo sapiens
tgagacaaatggtacttctgatttaagttatttgagaaatctccaaattgttttctacagtggctgaactcatttacattcccaccaatagtgtaaatattcattttctctgcagcctcaccagtattttttttttttttaccttttaataatagccattttggccattttgactggtgtgagtggtatctcattgtggcttttgatttgcatccctctgataattaatgmagttgagcattttttatattgttggccacttgtttgtcttcttttgagacatgtctgttcatgtcctttgcccatttttaaataaagtcctttgtttattgcttgttgaattgttagggtttcctatagattcttgatattagacctctgtttgatacagagtttgttaatattttgtcccatttggtaggttgttggtttacattgctgatagtttcttttgcctttgcagaagctctttagtttaattagattttacttgtcaatttttttgttgcaattgtttttgatgaatttgtcacaaattcttacccaaggtttatgtccagaatgttgtttcccagattttcttctagtattcctacaagtttgaagtcttataattaaatctttaattcatgttgatttaatttttgtatatgatgaaaggtag

SEQ ID NO: 872870 - DNA, 574 bp, Homo sapiens
acttctcagtaatttgactaaggtcaagaatctgattacttttcatactaaacgtatctgattacttttcatactaaaagtatctgattactgttagtagatactaatttataaattgtattttcgctagagggatatcatttattttggaagaaataaatgatctcttcaatctctaacttgatgactaatctaatagaaagttcccacacaataataatgggagactttaacaccccactgtcaacattagacagatcaacgagacagaaagttaacaaggatatccaggaattgaactcagctctgcaccaagcggacctaaaagacacctacagaactctccgccccaaatcaacagaatatacattcttctcarcactacaccacacttattccaaaattgaccacatagttggaagtaaagcactcctcagcaaatgtaaaataacagaaattataacaaactatctctcagaccacagtgcaatcaaactagaactcagagtttaaaaacttaaaaactcactcaaaaccactcaactgcatggaaactgaacaacctgctcctgaa

SEQ ID NO: 872871 - DNA, 659 bp, Homo sapiens
atgtaaagcattcctatttctctgcagcctcaccagcatctgttgtttcttgactttttaataattgccattctgactggtgtgagatggtatctcattgtggttttgattcacatttatctaatgatcagtcatgttgagctttttttcatgtttgttggctgtatagatatcttcttttgagaagtgtgtcttcatatccttgcccactttttgatggggttgtttttttctttaaatttgtttaagttccttgtaaattctggatattagacctttgtcagatgagtagattgcaaaaatgttctcccattctgtaggttgcctgtttgctctgatgatagtttcttttgctgtgcagaagctctttagtttaattagatcccatttgtcaattttagyttttgttggaattgcttttggcactttcatcataaaatctttgcccgtgcttatttcctgaatggtattgcctagattttcttctaaggtttttatgttttgggttttacatttaagtctttaatccatcttgagttaatttttgtataaggtatataaggaagggtccagtttcagttttctgtatatggctagccagttttcccagcaccatttattaaatagggaatctttcccagcaccatttattaaatagg

SEQ ID NO: 872872 - DNA, 644 bp, Homo sapiens
aaaaatacaattgatgaactgatgaatgcaaaaatgcattagagtgtctcaacagcagaattgattaagcagaagaaagaattcatgacatggaagataggttatttgaaaatacacagtcaaaggattaagaagaataaagaaggcttacgagatttagaaaatggcttcaagaaggcaaatctaagtgtcattggacttaaagaaggagtgagaggtagggatacaaaatatattcaaagaaatgataacagagaacattccaaatttagagaaaaatatgaatatccaggtataaaaaggtcaaagatcacaaagcagagtcaatcaaaataacactatcccagggcatttaataatcaaactctcaaatgtcaaggacaaagaggattctacaaacagcaaaagcaaagcaaataacatatcaatragctatgatacatttggcagtagacttctcagcaagctatgagagagtgtcatggaatattcaaagtgctaaaggcaaaaaaatttctaaccaagaatatagtagtgagaaaaactgcctttcaaacatgaaggagaaataaaaactttcacaaacaaagttaagagtcttcatcatcataactgttttacaagaaatgctaataagagtcctt

SEQ ID NO: 872873 - DNA, 633 bp, Homo sapiens
atcaaagcatccaaatatttacagcagatattaatacagctaaagggagagagaaagaacagtacaataatagtgggggacttcaacactccacaatcagcaatagatagatcatccagacagaaaatcagcaaagaaacattggaataaaactacactgcacaccaaatggacctacttgacatttacaaaagattgtatccagctgctgcagagtatacatacttctcattagcaccaggaacattctytgagatagagcataggttatgccacaaaacaagtcttgacaaattccacaatatttgaatcatcttttctgactataatggaataaaaccagaaatcaaagacaaaagaaacattagaaattgtacaaataacatggaaattaaatgacatgctcctgaacaaccaatgggtcagtgaagaaattaagaaggaaattaaaagatttcttgaaagagaaagcaggaaagataaaaaattgacaccctaacatcacaattaaaagaactagaaaagcaagagtgaacacattcaaaagctagcagaaggcaagaaataactaaaatcagagcacaactgaaggaaatagagacacaaaaaagtcttcaaaaaattaatgaatcc

SEQ ID NO: 872874 - DNA, 657 bp, Homo sapiens
cctcagggatctagaactagaaataccacttgacccagccatcccattactgggtatatacccaaaggactataattcatgctgctataaagacacacgcatgcgtatgtttattgcggcactattcacaatagcaaagacttggaaccaacccaaatgtccatcaatgatagactggattaagaaaatgtggcacatatacaccatggaatactatgcagccataaaaaatgatgagttcatgtcctttgtagggacatggatgaaattggaaatcatcattctcagtaaactattgcaagaacaaaaaaccaaacaccgcatattctcactcgtaggtgggaattgaacaatgagaacacttggacacaggaaggggaacatcacaytctagggaccattttggggtagggggaagggggagggatagcattaggagatatacctaatgctaaatgacgagataatgggtgcagcacaccagcatggcacatgtatacatacgtaactaacctgcacattgtgcacatgtaccctaaaacttaaagtataataataataaaataaaaaaaaagatttcttgaaaaaaggaaatgtaaacaaaacaccccaaataaaacctaaaatatacaacaacagcagtactaatttatagca

SEQ ID NO: 872875 - DNA, 612 bp, Homo sapiens
aaccatcagatcttgtgaggtttagtcactatcaggagaacagcaagggaaagacccacccctatgattcgattaccttccaacgggtccctcccacaacatatgggaattatgggagctgcaattcaagatcagatttcagtggggacacagccaaaccatatcattatgcccctggcctctcccaaatctcacgtcctcacattttaaaaccaatcatatcttcccaacagccccccaaagtcttaactcatttcagcattaactcaaaagcccacagtccaatgtctcatctgagacaaggcaagtcccttccacctatgagcctgtaaaatcaaaaacaagttacttgtttcctagacataatggaggcataggtatttgttaaatacagccattccaaatgggagaacttggccaaaacaaagaggctacaggccccacgyaagtctgaaatctagcagggcagtcaaatcttaaagctccaaaatgatctcctttgactccatgtcaaacatctgggtcatggtgatgcaagaggtgggttctcatggtcttgggcaactctgcccctgtggctttgcagagtaaagcctccctcccagctgcctt

SEQ ID NO: 872876 - DNA, 633 bp, Homo sapiens
aaaaatcacaagcattcctatacaccaagaaaagacaaacagagagccaaatcatgagtgaactcccattcacaattactacaaagagaataaaatacctaggaatccaacttacatgggatgcaaaggaccgcttcaaggagaactacaaaccactgcttaacgaaataaaagaggatacaaacaaatggaagaacatcccattttcatgggtaggaagaatgaatatcgtgaaaatggccatactgcccaaggtaatttatagattcaatgctatctccatcaagctaccactgactttcttcatagaattggaaaaaactactttaaatttcctatggaaccaaaaaagagcccgcattgccaagacaatcctaagccaaaagaacaaagctggaggcatcacgctacctgacttcaaagtatactacaaggctacagtaaccaaaacagcatgatactggtaccaaagcagatatatcgascaatggaacagaacagagccctcagaaataacaccacacctctacaaccaactgatctttgacaaacctgacaaaaacaagcaatggggaaaggattcccagtgctgggaaaactggctagccttatgtacaaagctgaaactggatt

SEQ ID NO: 872877 - DNA, 564 bp, Homo sapiens
attgcctctatagatgcagaaaaatatttgaaaaaaattaacatattggccataataaaactttctataaactaggtatagaagaaatttacctcaaagtaataaaagccaagtatgacaagcccacagctaacatcattcaaaatagtgaaaaactgaaagtttgttstccaagaccaggaacagacaagggtgcccactccaaacacttctatttcccatagtaccagaagtcctaaccaaagaaattaccaagaaaaagaaataaaagtcatctaaatttgaaagtagaaacaagttctgcttgttgatgacacaatttatatattttaaaaaatataaagactccaccaggaaaaagaactactaaaaaaagcaaagttgtaagatactaaatcagcataaaaaatcagtcaagaaagtggcatcaccaaaatggcagagtagaagtcatctggcccacctttcccttcagaaaaccaaaaacaactattcggtgccatccttatcccaaggaatatcccggaactcaaaacggagacagttatgatccttggggccaag

SEQ ID NO: 872878 - DNA, 578 bp, Homo sapiens
cagaatgtacaattttcacagagggatcctcagaagctaatgaacccaagtttgtcattttatagataaggaatctgaggccagaaaaaggagggggaattatttaaaaccatcaggccagagaagaaattagcctagttcttctgacctttagtctagtggaatgtcaggatctcagccttaaaatagaatcttccaaattgccacacctgttgtgtactacttttgatggttattatctttggcagtgcttccttgacatgaatgaattctacatgaattttgaagttgttttagaatatattttatacattattcataacatatttatgtagcttgttttaaagccaagagaaacctagagcaatagcttctgctttttggctgygaccctacattttatatcttatacacacatatatgtaaaaattgtacattatatgaataattgaaacatgttttctgaaatagtacttgtccttactctgtgtgacacactttggtattttctattttcatttactctgttctattttgttaaaaatattctggttatgaaccatctaaattgatttcat

SEQ ID NO: 872879 - DNA, 566 bp, Homo sapiens
aatcctcctacctcagtctcccgagtagcggagaatacaggcatgcaccaccacacccggctggctggtgggtagttagtggtagtggtgcaaagtcatgagattttggatgtaatttgaaggttgaactggtaccatttgtggtgggatttgatgtggggttaggagagagaggagtcaaggatgattccaggacttttggcttggatattagtcagggttctccagagaaacagaaccaataatatatgtgtgtgtatgtgtacatacatgtagasacagagagggaaggagattattttaaggaattgggtcacatgattgtagaggctgctgacaagtccaaaatctatagagtgggccatcaggctaaagacccagggaaaagccagtgtgtagtccgaggccatctgttggagaattccctcttgcttgggggaagtcagtcttttgttctgttcaggccttcaactgattggatgagacccacacttatggaggccaatcttctttactcgaagtctactgatttaaatattcatctcgtccaataaaaagaaaagaaa

SEQ ID NO: 872880 - DNA, 578 bp, Homo sapiens
tggaatagtttcagaaggaatggtaccagctcctctttgtacctctggtagaattcacttgtgaatctgtctggtcccaggttttttttggttggtaggctattaattactgcctcaatttcagaacttgttattggtctattcagggattttagtcgtggtggggcgggggkgtgtgtgtgtatgtgtccaggaatttatcaatttcttctagattttctagtttatttgcgtagaggtgtttatagtattctctgatggtagtttgtatttctgtgggatcagtggtgatctcccctttatcatttttttattgtgtctatttgattattctctcttttcttctttattagtatggctagcggtctatcaattttgttaatcttttcaaaaaactggctcctggattcattgattttttgaagggcttttcgtgtctttatctccttcagttctgctcttagttatttcttaccttctgctagcttttgaatttgtttgctcttgcttctctagttttttaattgtgatcttaggatgtcgattcaatgtctttcctgctttctcctgtgggcatg

SEQ ID NO: 872881 - DNA, 607 bp, Homo sapiens
acaaacttcattgggggaggagtggagcatcccatgcacgtccactgaaaacatttcagagatgcccagaatctctagctaggctgacttgtgatagtctttttttctactgaaagcagtccattaagattggaagaggtagttacttcttcaaatgtgccaacatcaacacagagctactagaaatgtgacgaattgggaaactatattacaccaaaaggaaaaaacraagtcttcattaactgacctggacaaaaaatatagatctataaactgcctgagcaataattaaaaataatcataaaagtcactaagctacataagaacacagaaaattaagtgatacgaggaaaacaatacataatgaaaattagaatatcaacaaatatatagaaactattacataaaacaaattctagagcagaagaataccataactgaatggaaaaattcaatagagagcttcaaaggcagacttgatcaagcagaaaaaggaatcaataaaattgacgataggtcatttgaaatttctagtccaggagtgtaaaaggcagaaatagtttttttgaaaactgcagaaagcttatagaacttataggacacagct

SEQ ID NO: 872882 - DNA, 593 bp, Homo sapiens
ctgaagcagaatatcatacttccctccagttccccccataaagctacagaacagtgcagatgggctggctgactttaaggcaagtcagagggccccagtactagcaatgtgttttctatctctcttaaaattctgctctgtgaagcggtgagtcatctctgacatggaatccagaagtctaagtcttcagtctacctaccccacctaccccaattcccctgggcaggttcctaaaagataactacacaaaggagcagccaacctagttaaaacttttaaatactttgagatatttccyacaaaactagtgttggcaactagtaaggtaggctgaacaatgtagagaaatgcttttgcctaggtcttgggaagatttcattaatccacagttatagcagcccatgagcctcccacttccattttctgaggacctgttcctgccttggactctgaggatgaaaaatgcccattcagggaaggccatgctgagatagttcaagccagtcaaagaaatcaatatctgttttaatgcttagcataaggcagagcaattttccagcagaagtagcactgacccctctcataacttgcaa

SEQ ID NO: 872883 - DNA, 608 bp, Homo sapiens
aaatctaaggatgctctaccatactaaaatcaattaatgtaacatgccacattaacagaataaaggggaaaataatatcaatcatcttacttgttgcagaacaaaatttatttcaacatcacttgattcaaaaagttaaagctaggaaacaaagaaaactatttcaacataataaaattcatatataaaaaacacagttaacataatcaatggtgaaagactaaaagcttttcttctaaaatcaggaaaaagacaaggatgtctcctttcataatttttattttattttattttattcaattttatttttatagtatgggaagtcctagttaaaagagttaagcaaaaataaataaataagtaaagtagaagtcttccaaattggaaaggaagcagtaaaattgtgtctgtttgcaaatggcattatcttaaatgcagaaaacttgaaagattccacsaaaaatacccctaatagaacaaataaatgaattcagcaaattgtaggacacaaaatgaatatgcaaatattacttgtgtttgtatacattaacaatgaacaattcaaaaagaaattcatttacaagttcaaaaaataaaacatttagaaa

SEQ ID NO: 872884 - DNA, 640 bp, Homo sapiens
gaagatgcaagtaggggccattttgacaagggatggatttatgatggttaattttatgtgtcaacttgactgggctaaggcacgtctagatagctggtaaaacactatttctgtaagcgtgttcccagaagagatcagcactcgwattggtgaatcaattaaagtagatggcctggttcaatgtatgtgggcatcatccaagcagatgagggcctgaatagaacaaaacaacagacgaaatataaattcactctgcttgagctgaggcattcaacttctgccctcggacatcagttctcctgcgtctcaggatttcagactcagactagggtttataccatccatgggccgcctaattctcaagcctttaaacctggaccgaataataccactgactttcctggttctccagtttgcagatggcagatcatgggagttctagcccccgcctaaccatatgggccaattgctgtaataaatctcctcttatttatctgcatccatatctatatctatatcttactgattctttctgaagaaccctgatatagttgtataactgtaaatttaccaaaaatcactaaattttacacactttaaatgggcgaattatatggtatgtaattgtaacttgataatg

SEQ ID NO: 872885 - DNA, 640 bp, Homo sapiens
gaagatgcaagtaggggccattttgacaagggatggatttatgatggttaattttatgtgtcaacttgactgggctaaggcacgtctagatagctggtaaaacactatttctgtaagcgtgttcccagaagagatcagcactcgtattggtgaatcaattaaagtagatggcctggttcaatgtatgtgggcatcatccaagcagatgagggcctgaatagaacaaarcaacagacgaaatataaattcactctgcttgagctgaggcattcaacttctgccctcggacatcagttctcctgcgtctcaggatttcagactcagactagggtttataccatccatgggccgcctaattctcaagcctttaaacctggaccgaataataccactgactttcctggttctccagtttgcagatggcagatcatgggagttctagcccccgcctaaccatatgggccaattgctgtaataaatctcctcttatttatctgcatccatatctatatctatatcttactgattctttctgaagaaccctgatatagttgtataactgtaaatttaccaaaaatcactaaattttacacactttaaatgggcgaattatatggtatgtaattgtaacttgataatg

SEQ ID NO: 872886 - DNA, 640 bp, Homo sapiens
gaagatgcaagtaggggccattttgacaagggatggatttatgatggttaattttatgtgtcaacttgactgggctaaggcacgtctagatagctggtaaaacactatttctgtaagcgtgttcccagaagagatcagcactcgtattggtgaatcaattaaagtagatggcctggttcaatgtatgtgggcatcatccaagcagatgagggcctgaatagaacaaaacaacagacgaaatataaattcactctgcttgagctgaggcattcaacttctgccctcggacatcagttctcctgcgtctcaggatttcagactcagactagggtttataccatccatgggccgcctaattctcaagcctttaaacctggaccgaataataccactgactttcctggttctccagtttgcagatggcagatcatgggagttctagccccygcctaaccatatgggccaattgctgtaataaatctcctcttatttatctgcatccatatctatatctatatcttactgattctttctgaagaaccctgatatagttgtataactgtaaatttaccaaaaatcactaaattttacacactttaaatgggcgaattatatggtatgtaattgtaacttgataatg

SEQ ID NO: 872887 - DNA, 569 bp, Homo sapiens
tggcctggttcaatgtatgtgggcatcatccaagcagatgagggcctgaatagaacaaaacaacagacgaaatataaattcactctgcttgagctgaggcattcaacttctgccctcggacatcagttctcctgcgtctcaggatttcagactcagactagggtttataccatccatgggccgcctaattctcaagcctttaaacctggaccgaataataccactgactttcctggttctccagtttgcagatggcagatcatgggagttctagcccccgcctaaccatatgggccaattgctgtaataaatctcctcttatttatctgcatccatatctatatctatatcttactgattctttctgaagaaccctgatatrgttgtataactgtaaatttaccaaaaatcactaaattttacacactttaaatgggcgaattatatggtatgtaattgtaacttgataatgttatttttttaaagtaccaatagcctaatacacataaaaaagctatttacagatataaaaaagggaaaacctcatttatactagtagcagcaacaac

SEQ ID NO: 872888 - DNA, 560 bp, Homo sapiens
acttcttcaaaaggagaatacaccctagaaatcgtctgctgaactagaaaacaagaagactgttcaataagccagtctgtcatcttgctcactgaaggaacaagtatatgtatatacaattttttgttagtagtttttcaggtttcactaccaattaaagtacactaaagatagagaaaatgcaatgaactamatagatttgaaaatgcatgttgattttgggaagttatataaaattagttttaaattttctcaacttttccaatatatgggggaaaaaagttttgaaagccaactaattccatgagttctatggaatggaaacactgatataaattttgccttgaaagaaattagattttctgattaattggtataagttttaaataagatatagcaccttacacttctgttacacttagtttaaaagatatgagtacaataatgttgagacattattcttggcaccacaatacagtaaatagtttaaatgcctaaccaaaatagctattttaggaagctggcataacaacctgtgaatgtcatgccttccgaaatgg

SEQ ID NO: 872889 - DNA, 560 bp, Homo sapiens
acttcttcaaaaggagaatacaccctagaaatcgtctgctgaactagaaaacaagaagactgttcaataagccagtctgtcatcttgctcactgaaggaacaagtatatgtatatacaattttttgttagtagtttttcaggtttcactaccaattaaagtacactaaagatagagaaaatgcaatgaactaaatagatttgaaaatgcatgttgattttgggaagttatataaaattagttttaaattttctcaacttttccaatatatgggggaaaaaagttttgaaagccaactaattccatgagttctatggaatggaaacactgatataaattttgccttgaaagaaattagattttctgattaattggtataagttttaaataagatatarcaccttacacttctgttacacttagtttaaaagatatgagtacaataatgttgagacattattcttggcaccacaatacagtaaatagtttaaatgcctaaccaaaatagctattttaggaagctggcataacaacctgtgaatgtcatgccttccgaaatgg

SEQ ID NO: 872890 - DNA, 535 bp, Homo sapiens
agtctcatctgagacaaggctaatcttttcacctatgaacctgtaaaaaataaaaacaagctagttacttccaagatacaatggaggaatgggcattgggtaacaatttccattcctaaaggaagaaatcagtgaaaagaaaggggttacaggccccatgcaagttcaaaacccatcagggyagtcattaaatattaaagctttaaaataatctcccttgacttcatgtctcacatgaagccctgtaagattgcttagcttagagtcagagaagttaatgtcctcaagggcaactctcaatcatcagcaaaaaattctgaggcatattccacactgtgtcatagaattttcagcagaaataagccctagcttcccacataagttatcagcccaataatgcaccatttattcttttatcatccttaccccaaaatgctacatttaatcctccttcttgtttaatgaactcaattcccataataaattgcctgcagtgattgacttttctccagatccacatttaaactattaacaa

SEQ ID NO: 872891 - DNA, 650 bp, Homo sapiens
tttgatcatctgtctagtgttgtcagtgaggagtccccaatattattgtgtggctgtctttttgtaggtctagaaatacctgttttattaatctggatgcttcagtgttgggtgcttatatgtttaggatagtttatcttcatgttgaaatgaattcattatcattatgtaatgtccttctttgtccttttttactgtcgttggtttaaggtctgttttatttgatrtaataatgatgactcaccctttttttgttttccattcacatgatatatcctcctccaaccctgtctttgaaccagttagtatcattacaagtgagaggggtgtcttgaagataaaagatggatgggtcttttttaaaatccaatttgccactctgaaacttttaattgggaagtgtagacaattgacattcaaagttaatattgatatgtgtggttttcatcctatcatgaagctgtcagtttgttgccttgtagtctccattgtgtagttgttttattgggtctgtgagctatgtacttaagtgtgtgtttttgatatcaggtatcattctcttccatgtttagcactccattatttcttgtaaggctagtctgctggtaacaaattaccttagcaattgcttctcaggaaaatattttatt

SEQ ID NO: 872892 - DNA, 650 bp, Homo sapiens
tttgatcatctgtctagtgttgtcagtgaggagtccccaatattattgtgtggctgtctttttgtaggtctagaaatacctgttttattaatctggatgcttcagtgttgggtgcttatatgtttaggatagtttatcttcatgttgaaatgaattcattatcattatgtaatgtccttctttgtccttttttactgtcgttggtttaaggtctgttttatttgatgtaataatgatgactcaccctttttttgttttccattcacatgatatatcctcctccaaccctgtctttgaaccarttagtatcattacaagtgagaggggtgtcttgaagataaaagatggatgggtcttttttaaaatccaatttgccactctgaaacttttaattgggaagtgtagacaattgacattcaaagttaatattgatatgtgtggttttcatcctatcatgaagctgtcagtttgttgccttgtagtctccattgtgtagttgttttattgggtctgtgagctatgtacttaagtgtgtgtttttgatatcaggtatcattctcttccatgtttagcactccattatttcttgtaaggctagtctgctggtaacaaattaccttagcaattgcttctcaggaaaatattttatt

SEQ ID NO: 872893 - DNA, 661 bp, Homo sapiens
ctatcaactactgattacttactatctttacttaccattctttatccccagcaagctccaggaattagtattctgctggtccttaaagaggtttatccactttgacatagcctccaattgtggtcctttaaggacaccccctacctcaattctgggggtagttcctttttgggaaaagagaacatttttcctgcacctagtaagactctttattccaaactccctggttctccagaggtttctcctttttatcaaaaatgcgaacaagcactgcccactagggaccagaggctgctgtttctgtgaaagcacaagggctttccatgaatatccaccaggcttccttacctatccacctgttagayagtgattgccttgattgtttaaacacttctttttcatgttgctaacagaggatggaattttcctaccttcttctgaacctctccatgtcattctcaaaatgcacaaagatctccaagcctacatacaaaaaaaaaaaaaaaaaaaaaagcccagcctctttggagcttgaaagggaataggacatctacctaaaaggacctggggaatggaagcatgagaggatgggaaatcatcatttaattgctaagatgctccagatgggggtcactgcaaggtcagggaggcagggatatac

SEQ ID NO: 872894 - DNA, 661 bp, Homo sapiens
ctatcaactactgattacttactatctttacttaccattctttatccccagcaagctccaggaattagtattctgctggtccttaaagaggtttatccactttgacatagcctccaattgtggtcctttaaggacaccccctacctcaattctgggggtagttcctttttgggaaaagagaacatttttcctgcacctagtaagactctttattccaaactccctggttctccagaggtttctcctttttatcaaaaatgcgaacaagcactgcccactagggaccagaggctgctgtttctgtgaaagcacaagggctttccatgaatatccaccaggcttccttacctatccacctgttagatagtgattgccytgattgtttaaacacttctttttcatgttgctaacagaggatggaattttcctaccttcttctgaacctctccatgtcattctcaaaatgcacaaagatctccaagcctacatacaaaaaaaaaaaaaaaaaaaaaagcccagcctctttggagcttgaaagggaataggacatctacctaaaaggacctggggaatggaagcatgagaggatgggaaatcatcatttaattgctaagatgctccagatgggggtcactgcaaggtcagggaggcagggatatac

SEQ ID NO: 872895 - DNA, 661 bp, Homo sapiens
ctatcaactactgattacttactatctttacttaccattctttatccccagcaagctccaggaattagtattctgctggtccttaaagaggtttatccactttgacatagcctccaattgtggtcctttaaggacaccccctacctcaattctgggggtagttcctttttgggaaaagagaacatttttcctgcacctagtaagactctttattccaaactccctggttctccagaggtttctcctttttatcaaaaatgcgaacaagcactgcccactagggaccagaggctgctgtttctgtgaaagcacaagggctttccatgaatatccaccaggcttccttacctatccacctgttagatagtgattgccttgattgtttaaacacttctttttcatgttgctaacagaggatkgaattttcctaccttcttctgaacctctccatgtcattctcaaaatgcacaaagatctccaagcctacatacaaaaaaaaaaaaaaaaaaaaaagcccagcctctttggagcttgaaagggaataggacatctacctaaaaggacctggggaatggaagcatgagaggatgggaaatcatcatttaattgctaagatgctccagatgggggtcactgcaaggtcagggaggcagggatatac

SEQ ID NO: 872896 - DNA, 661 bp, Homo sapiens
ctatcaactactgattacttactatctttacttaccattctttatccccagcaagctccaggaattagtattctgctggtccttaaagaggtttatccactttgacatagcctccaattgtggtcctttaaggacaccccctacctcaattctgggggtagttcctttttgggaaaagagaacatttttcctgcacctagtaagactctttattccaaactccctggttctccagaggtttctcctttttatcaaaaatgcgaacaagcactgcccactagggaccagaggctgctgtttctgtgaaagcacaagggctttccatgaatatccaccaggcttccttacctatccacctgttagatagtgattgccttgattgtttaaacacttctttttcatgttgctaacagaggatggaattttcctaccttcttctgaacctctccatgtcattctcaaaatgcasaaagatctccaagcctacatacaaaaaaaaaaaaaaaaaaaaaagcccagcctctttggagcttgaaagggaataggacatctacctaaaaggacctggggaatggaagcatgagaggatgggaaatcatcatttaattgctaagatgctccagatgggggtcactgcaaggtcagggaggcagggatatac

SEQ ID NO: 872897 - DNA, 618 bp, Homo sapiens
tctaaattatcctcctgcctcaggtcccacataactgggactataggcatgtgccaccacacacagtcaggtgttttatattttgcacaagttcagtcttgctctgttgcccagactgttatggaaatcctggcctaaactaatcctccttcctcagtctccaaaagtgctggaattacatgggtgagccactattcacmgctgggagctctttaagtaaactcctatgctaatttggcatacccaatcattgtgcatgtgtgtgtttcctatcatttaattgttgagtatttcctttactttctgtcattacacaatgctccaagtttatcttctatagtttttaaaatgtcctaaaatccattatttcccaggtaaatctgctcctgtttattggataaaggtactaaaaaccagaccaagtttattggatctggtttctgggtgttcttattgttattgatgtatccttttttcaaggtcttctcagctagcagagcaataggggtatgcgtgtatgctagcccatgtgtgtacaaatatttatcaatctaaggttactcatttatcatctctatctatatgaagtaattattagttcatacttttgtttctaag

SEQ ID NO: 872898 - DNA, 665 bp, Homo sapiens
ccggggattttgttcaacaactcaccaggtactgtgatagttttttgcccagttctctcattccaatagtcagatgagtcctgtaatcgaatctttttccaaattcaaagctagaaaactcatgatgagcagttgtgttaagggacactaccagcagagcatcaagtcctatgtggtaaaaaccacaatataaataaagcaaaggggttgtacatgaaaaagaagaagacataataattctactcagtgaacatgatttaaagaattgaaaaggggaaaaaaacaaacataagaggaaggagtactcctgacatatgaagaaactaacagagaatttgcctgcattttctgaatatgcaccagctctggtccctgaccrtcgcatgaaatcccctgataaaaagtattcaagagaaacgatttacaaatctacagaaaaacactaatagaaaactgtgttccacatcttaccaccaattttcatgcaattcttgggcacgggaaagtgatttttaagaaagggcattattcatctccagagagctttgctgaattttcctgaatgtacattaatgataattctcaagttattcccaattccaaacacccctgggaggccaagccctgagaacatgaggaaagcccagggcaattgtctcagctga

SEQ ID NO: 872899 - DNA, 725 bp, Homo sapiens
cttagataaatgaaatcctactgtatgcatacttctgtgtctttctcaaatatatgcttttaagatttagtcaatgtggcttaatcttaattcaatttcattcattcattttcattgttgtacaccttattttaatgtactacagcatattcacacatttcactctttttttttttttccattttttgagacaaggtctcactctgtcacccaggctagaatgcagtgcacaatctcagcacactgcaacctccacctcccaggttcaagtgattctcttgcctcagcctcccaagtagcagggattacaggcacccgccaacatgcccggctaagttttgtatttttagtagagatggggtttcaccatattgtcaaggctggtccaaactcctgaccacaagtgatctgcccaccttggcctcccaaagtgctgggattacaggcatgagccaccacacccagcctacatatttcactcttaatgaacacgtgggttgtttacaacttgggttttttttttwaaaatgctgctgtgaacattattcatgaatgtggttttatcttggtcatcaagcaaatgagttttcagggaatatgcttacaagtaaaattgctggttcatagtatttaaatttttaattttactagaaaacgccaaaacattttataatatttgcttccaaaagccatgtttgagagttcccatttctctatacctgtat

SEQ ID NO: 872900 - DNA, 658 bp, Homo sapiens
tagatggggttttgtttatatgtttatttttatatgttgatatgtttattttgtttatatgtttatttttgtgcttttttgtgggaagaagggttgcctttcttttcacttttccttgtctgaatgatgaggcagttactaagtctaagtttggggtaaggagggaacaggcttacacgtgtagcctggcatgtttttatcagtggcagatacctgggcaccctcctctctacccccaagcagggcacagcaggttatctgccagggagctctttttagacctaaaacccagtgcttagtacatggctttgggccaaggctggagtatacacccttccatggaaagggaagtcggcaaagcatccctcaagatgagaggcatggcttcacggtcaaatgctacamagaggtttgcgaatctctgtgtttgaaaccagaactctcactttctcatcaatcaaattgtgagaaagaatttgaagaaactgaaaccacttaggtggctctgttagggatggaaaaatttcagaaagcatccagactggatttctatcaccttagatcaagtccagttcctcatctgggcaggaagttttaaggattgaaagcaaagactctagagtcaggctgccaagagttggcctagatatgggtcctt

SEQ ID NO: 872901 - DNA, 620 bp, Homo sapiens
gagacactactttgtgatttgtgtattcatctcatggagctgaatttcttttggttgagtagtttggaaacagtctttttgtagaatttttaaagggaatttgtgagcactttggggccaatggtgaaaaaggaattatcttcacataaaaactagacagaaagtttctgagaaacttctttgtgatgtttgtattagtctcacagagttgaaattttctttaaattgagcagtttggaaacagtctttttgtagaatctgcaaagggatatttctgagtactttgaggcctctggtgagaaaggaaatatcttcacataaaaactacacagaaactttctcagaaactgctttgtgatgtgtgcattcattctcacagagttgaacttttcttttgattgagcagtttggaaaaagtctttttgtagaatcttcaaagggatatttgttagtggtttgaggcttatggtgaacaagggaatatyttcacatgaaagctagacagaagtttctgagaaacttctctgtgatgtgtgcagtcatcccacagagttgatccattcttttgtgagcagtttggaaacagtctttttgtagaatctgcaaaaggatattagtga

SEQ ID NO: 872902 - DNA, 521 bp, Homo sapiens
gtgatgtgtgcattcatctcacagggatgagtgttacttttgattgagcaagttggaaatagtccttttgtagaatgtgcaaaggtatatttgtgagcggtttgtggactacagtgaaaaaggaaatatcttcacatcaaaactagatggaagcattctgagatatatctttttgatgtgtgcattcataccactcagatgaacrtttctattcattgagcagattggtacctctgttcttgaagaatatgcaaaaggatatctgtgagcattagggtcatatggagaaaagggaaatatcttcagatgaaaacttgacagaagctttctgtgaaacttctttggatgcgtgtattcatctcacagagttgaacatttcttttgattgagcagttgggaaacattcttttggtagaatctgcaaggggatatttgtgagcactttgaggcctatagtgaaaaaggaaatatcttcacataaaaactagacagaagcattcagagaaactgctttgtgatgt

SEQ ID NO: 872903 - DNA, 629 bp, Homo sapiens
ggagctctttgaggcctttggtgaaaaaggaaatatcttcacataaaaacttgatagagggtttctgagaaactgctttgtggtgtgtgcactcatctcgcaggtgtgaatgtttctttacattgtgcagattggaaactctgctcttgtacaatctgcaaagggatatttgtgagccctttgaggccyatggtgaaaaaggaaatatcttcacataaaaactagacagaggctttctgagaaacttccttttgatgtgtgtattcatctcacagagttgaaactttcttttgattgaacagtttgggaactatccttttttagaatctgcagagggatatttgtgagcccattgaggcctatggtgaaataggaaatatcttcacataaaagctacacagaaactttctgagaaacttctttgtgatgtgtcctttcatctcacagagttgaacctttcttttaattgagcagtttgaaaacagtgtttttgtagcatctgcaaatgaatatttggagcgatttgaggcctatggtgaaataggaaagatcttcatataaaaactagacagaaatatgctgagaaactccgttgtgaggtgtccattcttctcacagatttgaacatt

SEQ ID NO: 872904 - DNA, 519 bp, Homo sapiens
gtgctttcatctcacagagttgaacctttcttttgattgagcagtttcaaagcagtactcttgaagaatctgcaaatgaatattgggagcgttttgaggtttatggtgaaaaagatatatctccacataaaaactagacagaagcattctgagaaacttctctgtgatgtgtccattcttctcacagagttgcacttttcttttgattgagcagtttggaaacagtcttttcrtagatctgtaaagggatatttgtgagccctttatggcctgttgtgaagtagggaatatcttcacataaaagctagacagaagctttctgagagaattctttgtgatgtgtgctttcatctcaaagagttgaacctttctttggatgaagcagtatggaaacagtcttttgtagaatctgcaaatggatatttggagtggtttgaagcctgtggtgaaaaaggaagtatcttcacattaaaactagacagaagcattctgagaagcttctttgtgatgtgcgcattc

SEQ ID NO: 872905 - DNA, 678 bp, Homo sapiens
catttggagtggtttgaggcctatggtgaaaatgaaataaatacacataaaaactagacagaagcattctgagaaacttccttgtgatgtgtgcattcatctcacagagtgtaacctttcctttgatggagcagtttggaaagagtctttttgtagtatctgcagagggatatttatgagtggtttaaggccaatggtgaaaaaggaaatatcttcacataaaaactaaacagaagcattctcagaaaattctttgcratgtgtgtattcatctcacaggttgctttcttttgattgagcagtttgtagacagtctttttgtacaatctgcaaaacgatatttctgagctgtttgaggcctatggtgaaaaacatatatcttcacacaaaaactggacagaagcattcttagaaacttatttgtgatatgtcaattcttctctcagagcttaacctttcttttgattgagcagtttggaaacagtgtttttgtagagtctgcaaagggataattgtgagccatttatggcctaatgtgaagtaggaaatatcttcacataaaaactagacagaagctttctcagaagctactttgtgatgtatgatttcatatcacagagttgaagccttcctttgattgagcagttttgaaacagtctttttgtaaaatctgcaaat

SEQ ID NO: 872906 - DNA, 599 bp, Homo sapiens
tcacagagttgaaagtttcttttgattgagcagtttggaaacagactttttgtagaatctgcaaatggacatttggagcactgtgaggcctatggtgaaaaaggaaatgtcttcacataaaaactagacagacgcatactgagaaactctcttgtgaagtgtgcattcatctgacagagttgaacttttcttttgatagagcagtttggaaagcgaccttttgtagaatctccaaagggatatttttgagccccttatggcctatggtgaaataggaaatatcttcacataaaaactagacagaagctttctgagaaacttctttgtgatgtrtgctttcatgtcacagagaggaacctttcttttgattgagcagttgggaaacagtcttttggtgtaatctgcaaatggatatttggagcgtttttgtgccaatggtgaaaaaggaaatatcctcatctaataactagacagaagctttctgagaaacttctttgtgatgtttgcattcatctcatagagttgaacacttcttttaatggagcagtttagaaacagtatttttgtagtatctacagagggatatttgtgagcagttt

SEQ ID NO: 872907 - DNA, 599 bp, Homo sapiens
tcacagagttgaaagtttcttttgattgagcagtttggaaacagactttttgtagaatctgcaaatggacatttggagcactgtgaggcctatggtgaaaaaggaaatgtcttcacataaaaactagacagacgcatactgagaaactctcttgtgaagtgtgcattcatctgacagagttgaacttttcttttgatagagcagtttggaaagcgaccttttgtagaatctccaaagggatatttttgagccccttatggcctatggtgaaataggaaatatcttcacataaaaactagacagaagctttctgagaaacttctttgtgatgtgtgctttcatgtcacagagaggaacctttcttttgattgagcagttgggaaacagtcttttggtgtaayctgcaaatggatatttggagcgtttttgtgccaatggtgaaaaaggaaatatcctcatctaataactagacagaagctttctgagaaacttctttgtgatgtttgcattcatctcatagagttgaacacttcttttaatggagcagtttagaaacagtatttttgtagtatctacagagggatatttgtgagcagttt

SEQ ID NO: 872908 - DNA, 589 bp, Homo sapiens
ttggaaacagtatttttgtaggatctgcatagggatatttgggatccctttgaagcctaaggtgaaaaatgaaatatcatcacataaaaagtagacataagctttctgagatacttctttggaatgtgtgtattcatctaacagagctgaacatttattttgattgaacaattactaaacagtctttttatagaatcttcaaagggatatttgggagcccattgargcctatggtgaaaaaggaaatatcttcacctaaaaattagacagaatatttctgagacacttctttgtgatgcgtgcatttatctcacagaggtgaatctttgttttgattgagcagttaggaaacagtctttttgtagaatctgcaaagggatgtttgggagccctttgaagactgtggagaaaaaggaaatatcgtcacataaacagtagccagaagcctcctgagaaacttatttgtgatgagtgcattcatctcacagagttgaatctttcttttgattgagcagtttggaaacagtctttttgtagaaatttccaatggatatttctaagcagtttgaggcctatgttgaaaaaggaa

SEQ ID NO: 872909 - DNA, 589 bp, Homo sapiens
ttggaaacagtatttttgtaggatctgcatagggatatttgggatccctttgaagcctaaggtgaaaaatgaaatatcatcacataaaaagtagacataagctttctgagatacttctttggaatgtgtgtattcatctaacagagctgaacatttattttgattgaacaattactaaacagtctttttatagaatcttcaaagggatatttgggagcccattgaggcctatggtgaaaaargaaatatcttcacctaaaaattagacagaatatttctgagacacttctttgtgatgcgtgcatttatctcacagaggtgaatctttgttttgattgagcagttaggaaacagtctttttgtagaatctgcaaagggatgtttgggagccctttgaagactgtggagaaaaaggaaatatcgtcacataaacagtagccagaagcctcctgagaaacttatttgtgatgagtgcattcatctcacagagttgaatctttcttttgattgagcagtttggaaacagtctttttgtagaaatttccaatggatatttctaagcagtttgaggcctatgttgaaaaaggaa

SEQ ID NO: 872910 - DNA, 700 bp, Homo sapiens
atttgggatccctttgaagcctaaggtgaaaaatgaaatatcatcacataaaaagtagacataagctttctgagatacttctttggaatgtgtgtattcatctaacagagctgaacatttattttgattgaacaattactaaacagtctttttatagaatcttcaaagggatatttgggagcccattgaggcctatggtgaaaaaggaaatatcttcacctaaaaattagacagaatatttctgagacacttctttgtgatgcgtgcatttatctcacagaggtgaatctttgttttgattgagcagttaggaaacagtctttttgtagaatctgcaaagggatgtttgggagccctttgaagactgtggagaaaaaggaaatatcgtcacataaacagtagccagaagcctcctgagaaacttatttgtgatgagtgcattcatctcacakagttgaatctttcttttgattgagcagtttggaaacagtctttttgtagaaatttccaatggatatttctaagcagtttgaggcctatgttgaaaaaggaaatattttgatgtaaaaactagacagaaactttcagagaaacctctttgtgatgcgtgcattcatctcagagagttgaaacattcttttgagtgagcagtttggaaacagttttttatagaatctgcaagaggatatttctgggcatt

SEQ ID NO: 872911 - DNA, 575 bp, Homo sapiens
gagaaacttttttgtgatgtgtgcattgaactcatggagttgaacatttcttttgatatagcagttttgaaacattctttttgtagaaacttcaattggatagttggagcgctttgaggcctatggtggaaaaggaaatatcttcacataaaaactaaacagaagcattctccaaaacttctttgtgatatgtgcattcaactcacagagttgaacttccttttgatagaacagttttgaaacactctttttgtagaatctgcaaatgggtatttggctccctttgaggcytatggtgaaaaaggaaatatcttcacataaaaactagacacaagtattctgagaaacttctttgtgatgtgtgcattcaacctacagagtggaacctttcttttgatagagcagttttgaaacactctttttgtaaaatctgcaagtggatatttggtttctttgaggcctatgttggaaaacgaaattgaacctttcttttgatagagcagttttgaaaccctctttttgtagaatctgcaagtggatatttagagtgcattgtgggcaatagtagaaaagga

SEQ ID NO: 872912 - DNA, 575 bp, Homo sapiens
gagaaacttttttgtgatgtgtgcattgaactcatggagttgaacatttcttttgatatagcagttttgaaacattctttttgtagaaacttcaattggatagttggagcgctttgaggcctatggtggaaaaggaaatatcttcacataaaaactaaacagaagcattctccaaaacttctttgtgatatgtgcattcaactcacagagttgaacttccttttgatagaacagttttgaaacactctttttgtagaatctgcaaatgggtatttggctccctttgaggcctatggtgaaaaaggaaatatcttcacataaaaactagacacaagtattctgagaaacttctttgtgatgtgtgcattcaacytacagagtggaacctttcttttgatagagcagttttgaaacactctttttgtaaaatctgcaagtggatatttggtttctttgaggcctatgttggaaaacgaaattgaacctttcttttgatagagcagttttgaaaccctctttttgtagaatctgcaagtggatatttagagtgcattgtgggcaatagtagaaaagga

SEQ ID NO: 872913 - DNA, 710 bp, Homo sapiens
agaagcattctaagacacttctttgtgatgtgtgcattcaactggccaagtcgagcctttcttttgattgagcagttttgaaacactctttttggagaatctgtaagtggatatttgaagcattttgcagcctgtcatggaaaaggaaatatcttcacataaaaactagacagaagtattctcagaaactactttgtgatgtgtgcattcaaatcactgagttgaacctttcttttgatagagtagttttgaaactctctttttgtacaatctgcaagtggatagttggagcactttgaggcctacattggaaaaggaagcagctctacatgaaaagtagacagaagtattctcataaactgctttgtgatgtgtgcattcaactcacagagttgaacctttcttctgatagagcagctttctaactctctttttgtagaatctgcaaatggatatttggagcacttagaggcctatggtgcaaagggaaatatcttcacataaaaactagacakaagccttctcagaaacttccttgtgatgtgtgcattcatctcactgagttgaaactttcttttgccagagcagttttgaaatactctttttgtagtatctggaagtggatagttggagcactttgacgcctgtggtggaaaaggaaatatcttcccataaaaactggacagaagcattctcagaaacttttttgt

SEQ ID NO: 872914 - DNA, 654 bp, Homo sapiens
gagcagttctgaaacacacttattgtggaatctgtaagtggatacgtggtgcgctttgaggccaaaggtggaaaaggaaatatctttacgtaataattaggtagaagaattctcagaaacgtctttgtgatgtgcgcattcaactcacagagttgaaccattcttttgatagagtagtttggaaactctctttttgtagaatctgcaagaggatatttggagcactttgaggcctatggtgtaaaaggaaatatcttcacataaaaactagacagaggcattctcagaaacttctatgtgatgygtgcattcaattcacagtgttgaacatttcttttgatagagcagttttgaaacattctttttgtaggatctgcaagtggatatttggagcgccttgacagctatgttggaaaaggaaataacttcacataaaatctagacagaagcattctcagaaacttctttgtgatgtgtgcattcaactcacggagttaaatctttcttttgatagagcagttttctaacactctttttgtagaatctgcaagtgcgtttttggagagctttgaggctaatggtggacaaggaaatatcttcacctaagaactagacagaagcattctcagaaacttctttggatgtgtgcactca

SEQ ID NO: 872915 - DNA, 608 bp, Homo sapiens
catctagttttaatcctgtgatatttgcttttttgggactggattcaatgagctcccaaatatccgtttgcagaatcaacagaaacagtgtttccaaacttctgactccaaagaaaagtttatctctgttggatgaatgaacacatcacaaaacagtttctcagaaagcttcttgcttgcttttatctgaagatatatcctttatctccttaggcctcaatgtgctaccaaatatctcttcacagattctaataaatcagtgcttccaaactaatgaacggaaagaaaagtttaactctggtagatgaatgcacacatcacgaatttgtttctcagctaacttccttccagtttttatcctgggrtattcgctttttcaccattggcctcaacgagttccaaaatgtccattccaagaatggacaaaaactgtgtttccaaactgctgaatccaaaaccaggcttacctctctgagatgaatgcacacttaccaaatcagtttctcagtaagcttctttctagtttttatcagaagatatttcatttttcaccactgacctccatagtcttccaaatatctcttggcagattctaagaaaacagtgtt

SEQ ID NO: 872916 - DNA, 600 bp, Homo sapiens
aatttttatgtgaagatattcccgtttgccccataggccacaaatcactcccaatatccacttgcagattctacaaaaagagtgtttcaaaactgctctaagaaaaggaaggtttaactctgtgagtttaatgtacacatcacaaagaagtttcagagaatgcttttgtctcgttttcaggtgaagttatttccttttcctccacagacctcaaagccctccaaatgcccaggtgcggattatacaaaaagagtgtttcaaaactgctctatcaaaagaaaagttcaactctgtgagttgaatgcacacatcacaaagaagtttctgagaatgattctgtctggtttttatgtgaagatatttctatttccagtgaaggyctcaaagcgctccaaatgtccacttacagattccacaaaaagagtgtttcaaaactgctctatcaaaagaaatgttcaactctgtgagttgaatgcacacatcacaaagaagtttctgagaatgcttccgtctagtttttatgtgaagatattcccgtttacaccgtagacctcaaagcactcttaatatccccttgtagattctacaaaaagagtgttt

SEQ ID NO: 872917 - DNA, 600 bp, Homo sapiens
aatttttatgtgaagatattcccgtttgccccataggccacaaatcactcccaatatccacttgcagattctacaaaaagagtgtttcaaaactgctctaagaaaaggaaggtttaactctgtgagtttaatgtacacatcacaaagaagtttcagagaatgcttttgtctcgttttcaggtgaagttatttccttttcctccacagacctcaaagccctccaaatgcccaggtgcggattatacaaaaagagtgtttcaaaactgctctatcaaaagaaaagttcaactctgtgagttgaatgcacacatcacaaagaagtttctgagaatgattctgtctggtttttatgtgaagatatttctatttccagtgaaggcctcaaagcgctccaaatgtccacttacagattccacaaaaagagtgtttcaaaactgctctatcaaaagaaakgttcaactctgtgagttgaatgcacacatcacaaagaagtttctgagaatgcttccgtctagtttttatgtgaagatattcccgtttacaccgtagacctcaaagcactcttaatatccccttgtagattctacaaaaagagtgttt

SEQ ID NO: 872918 - DNA, 587 bp, Homo sapiens
cgcatattctacaaaaatagtgtttcaaaactgctctatcaaaggaaaggttcaactctgtgaatggaacgcacacgtcacaaagaagtttctgagaatgcttctgtctagtttttacatgaacatatttccttttccaccataggtctccaagcactctgaatatccactagcagattctacaaaaagagtgttacaaaacttctctatcaaaagaaatcttcaattctgtgacttgaatgcacacatcaggaagaagtttctgagagcaattctgtctagtttttatgtgaagatatacccctttccaaagaaggcctcaaagcgctccaaatgtccacttgcagatactacaaaaagagtgttacaaaacttctctatcaaaagaaatcttcaattctgtgacttgaatgcacacatcaggaagaagtttytgagagcaattctgtctagtttttatgtgaagatatacccctttccaaagaaggcctcaaagcactctaaatgtccacttgcagattctacaaaaagagtgtttcaaaagtgctgcatgaaaacaatggttgaattctgtgagttgaatgaac

SEQ ID NO: 872919 - DNA, 577 bp, Homo sapiens
cagaactgctctatcaaaaaaaaaaaggttctattctctgagtagaatgcacacttcacaaaatagtttctgagaatgcttctgtctagtttttatgcgaagttatttccttttccaccagaggcctcaaagcactccaaatgtccacttgcagattctacaaaaagagtgtttcaaaacttctctatcagaagaaaggttcaattctgtgagttcaatgcacacatcacaacggagtttctgagaatgcttctgtctagtttttatgtgaagataatccggtttccaacgagggcctcaaatcagtccaaatatccacttgcagattctacaaaaagagtgtttcaaaactgctctatgaaaagcaaagttcaaytctgtgagttgaatgcacacatcacaaagaagtttctgagaagacttctgtctagtttttatgtgaagatattcccatttccaatgaagggctcaaattgctccaagtatccacttgaagtttctacaaaaagagattttcaaaactgctgtatcaataggaagtttcaactccctgagttgaatgcacacatcacaaaga

SEQ ID NO: 872920 - DNA, 686 bp, Homo sapiens
gagttgaatgcaaacatcacaaggaagtttctcagaattcttcagtccagttttatatgaagaaatcccgtttccaacgaaggcctcaaagagtttaaaatatccacttgcagactttacaaacagagggtttcaaaactgctctatcaaaagaaaggttaagctctgtgagttgaatgcaaacatcacaaagaagtttctgagaatgcttctgtctagtttttatgtgaagatattttcttttccaccataggcctcaaatcgctccaactctccacttgcagattctacaaaaagactgtttcaaaactgctctgtcaaaaggaaggttcaactctgtgagttgacggcacacgtcacaaacaagtttctgagaatgcttctgtctagtttttatgtgaagatatttccttttctaccataggcctcaaagtgcaataatgaacacttgcagtttctaaaaaaagagtgtttcaaatctcctctatcaaaagaaaagttcaactctgcgagtttaatrcacacatcacaaagcagtttctgagaatgcttctgaccagtttttatgtgaagatattgccttttaaaacgaaactctccaaaatctccaaatatccactagcagattctacaaaaggagtctttcaaaacggctctatgaaaaggaaggtacaactctgtgggtt

SEQ ID NO: 872921 - DNA, 702 bp, Homo sapiens
tgtctagtttttatataaagatatttccttttgaaccataggcttcaaagcgccttaaatatccacttggaaattctacaaaaagagtgtttcaaaactgctctgtcaaaagtaagtttcaactctgtgagttgaagacacacatcacaaagaagtttctgagaattcttctgtctagttttakatgaagaactcccatttccaacgaaggccacaaacaggtcgacatatccacttgcagattctacaaaaacagtgtttcaaaactgctgtatcaacggcaatgttgaactctgtgagttaaatgcatacgtcacgaagaagtttctgagaacccttctgtcaagtttttttgtgaagatatttcgttttctaccgtaagcctctaagcccactgaatacacacttgcaaaatctacaaaaagagtgtttcaaaactgctctatcaaaagaaggttcaactctgtgagttgagtgcagacatcataaagaagtttctgagaatacttctgtctactttttatgtgaagatattaacgtttccaaagaaggcctcaaagcactacaaatatccacttgcagactttacaaacagagtgtttcaaaagcgctctatcaaaagaaaggttaaactctgtgagttgaatgcacacatcagaaagtagtttccgagaattattctgtctagtttttatataaaga

SEQ ID NO: 872922 - DNA, 702 bp, Homo sapiens
tgtctagtttttatataaagatatttccttttgaaccataggcttcaaagcgccttaaatatccacttggaaattctacaaaaagagtgtttcaaaactgctctgtcaaaagtaagtttcaactctgtgagttgaagacacacatcacaaagaagtttctgagaattcttctgtctagttttatatgaagaactcccatttcyaacgaaggccacaaacaggtcgacatatccacttgcagattctacaaaaacagtgtttcaaaactgctgtatcaacggcaatgttgaactctgtgagttaaatgcatacgtcacgaagaagtttctgagaacccttctgtcaagtttttttgtgaagatatttcgttttctaccgtaagcctctaagcccactgaatacacacttgcaaaatctacaaaaagagtgtttcaaaactgctctatcaaaagaaggttcaactctgtgagttgagtgcagacatcataaagaagtttctgagaatacttctgtctactttttatgtgaagatattaacgtttccaaagaaggcctcaaagcactacaaatatccacttgcagactttacaaacagagtgtttcaaaagcgctctatcaaaagaaaggttaaactctgtgagttgaatgcacacatcagaaagtagtttccgagaattattctgtctagtttttatataaaga

SEQ ID NO: 872923 - DNA, 616 bp, Homo sapiens
gctgagaattcttccgtctagcattcaatgaagaaatcccgtttccaacgaaggcctcaaacaggtccatatttccacttgcagactttacaaacagtgtgtttccaaactcctctatgaaaagaaaggttaaactctgtgagttgaacgcacacatcacaaagcactttctgagaatgattctgtctggttattatacgaagatatttccttttctgcaattgtcctcawatcgcttgaaatctccacctgaaaatgccacagcaagagtgtttcaaatctgctctctctaaagcaaggttcaactctgtgagttgaatacacacaacacaaaaaagttcctgagaactcttcttagtctagcatgaaaggaagaaaccccgtttgcaacgaagccctcaaagaggtccaaatatccacttgcagacataacaagcagagtgtttctaaactgctctaagaaaagaaaggttaaactctgtgagttgaaggcacacatcacaaagtagtttctgagaatgattctgtctagtttttatttgaagatatttccttttctactgttggcatcaaatcgcttgaaatctccacttgcaaattccacaaaaagagtgtt

SEQ ID NO: 872924 - DNA, 558 bp, Homo sapiens
tttgctgagaattcttccgtctagcattcaatgaagaaatcccgtttccaacgaaggcctcaaacaggtccatatttccacttgcagactttacaaacagtgtgtttccaaactcctctatgaaaagaaaggttaaactctgtgagttgaacgcacacatcacaaagcactttctgagaatgattctgtctggttattatacgaagatatttccttttctgcaattgtcctcaaatcgcttgaaatctccacctgaaaatgccacagcaagagtgtttcaaatctgctctctctaaagcaaggttcaactctgtgagttgaatacacacaacacaaaaaagttcctgagaactcttcttagtctagcatgaawggaagaaaccccgtttgcaacgaagccctcaaagaggtccaaatatccacttgcagacataacaagcagagtgtttctaaactgctctaagaaaagaaaggttaaactctgtgagttgaaggcacacatcacaaagtagtttctgagaatgattctgtctagtttttatttgaagatatttcctt

SEQ ID NO: 872925 - DNA, 596 bp, Homo sapiens
cctgaaaatgccacagcaagagtgtttcaaatctgctctctctaaagcaaggttcaactctgtgagttgaatacacacaacacaaaaaagttcctgagaactcttcttagtctagcatgaaaggaagaaaccccgtttgcaacgaagccctcaaagaggtscaaatatccacttgcagacataacaagcagagtgtttctaaactgctctaagaaaagaaaggttaaactctgtgagttgaaggcacacatcacaaagtagtttctgagaatgattctgtctagtttttatttgaagatatttccttttctactgttggcatcaaatcgcttgaaatctccacttgcaaattccacaaaaagagtgtttcaaatctgctctgtgtaaagggacgttccactctgtgagttgaatacacacagcacaaagaagttactgagaattcttctgtctagcatgaaatgaagaaatcccgtttccaacgaaggcctcaatgcggtccatatatccacttgcagactttacaaacagagtgtttccaaactgctctatgaaaagaaaggttaaactatgtgagttgaacgcacacatcacaa

SEQ ID NO: 872926 - DNA, 581 bp, Homo sapiens
ccgaatccaaagaaaagtttaactctgtaggatgaatgaacacatcacaagagagtttctcagaaagcttcttgctggtttttatctgaagatatttcctttttcaccatgggcctcaaagtgctaccaaatgtctctttgcagatttaaagaaatcagatattccaaactgctgaataaaaagaaargtttaactctgtgagatgaatgcacacatcacaaagtagtttctcagaaagattcttgctagtttttatctgaagatatttcctttttcaccatgggcctcaaagtgctaccatatatctcttcacagattctaagaaatccgtgtttccaaactgctgaatgaaaagaaaggtttaaccctgtgagatgaattcacaaatcgcaaagcaattttgcagatagatttcttctagttttaatgcagggatattcactctttccctattgcctcaatgagctcccaaaagtccattcacagactcgacagaaacagtgtttccaaactgctgaatgaaaagaaaggtttaactctgcgagatgaatgcacacatcaccaagtagtttctcagaaa

SEQ ID NO: 872927 - DNA, 601 bp, Homo sapiens
cagccagaacttccaacactatgttgagtaagagtggtgagagagggcatccctgttttgtgcctgttttcaaagggaatgcttccagtttttgccctttcattaaggtactggctgtgtgtttgtcatagatagctcttattattgtgagatacgtcccatcaataagtaattttttgagagtttttagcatgaagtgttgttgaattttgtcaaaggccttttctgcatctattgagatagtcatgtggtttttgtcattggttctgcttatatgctggattacatttactgatttgtgtatgttgaaccagcyttgcattccagggatgaagcccacttgatcatggtggataagctttttgatgtgctgctggattcggtttgccagcgttttattgaggatttttgcatcgatgttcatcagggatattggtcaaaaaatctcttttattgtgtctctgtcaggctttggaatcaggatgaagctggcctcataaaatgagttagggaggattccctctttttatagtcattggaatattttcagaaggtattgtaccagctcctccttgtacatctgttagaattcggctgtgat

SEQ ID NO: 872928 - DNA, 624 bp, Homo sapiens
gtgataaaggaaatatcttcagataaacatttgaaagaagctttttgagaaactgctttgtgatgtgtgcaatcgtcttacagcattaaacttttttttagactgaatagtatggaaacactgtttttgtaaaatctgtgcagtgatattaagtagtgaaaaagtcctatggtaaacaaggaaatatcttcagataaaaaattgaatgaatctttatgagaaactgccttctgatgggtctgttcatctaacagagttaaatccttcctttgatggaacrgttcagaaacactgtttttgtagaatctggtaacggataattgggagagcattgaggcctatggtgtaaaaggaaatatcttcatataaaaactagaaagaagctttctgagaaactactttgtgctgtatgctttcatctcacacagttaaacttgtcttttgactgagcagtttggaaacactgtttttttgtaatgtgcaaagcaatgataggtagcccaaaaaggcctatggcaatcaaggaaatattttcaggaaaaaactggaaacaagagttatgagaaactgctttgtgatgtatgtattcatttcacagagctaaatttttcttttgatttagca

SEQ ID NO: 872929 - DNA, 596 bp, Homo sapiens
cgcagtgcggtttctcagagaggttccttccagtttttatcccggatattcactttttcaccattggcctcaatgagctgccaaatatccattcacagaatggacaaaaacagtgtttcccaagtgctgtatccaaagaaatgtttatctctgtgacatgaaggcacacatcacaaagcaatttctcagaaggcttctttctagtatttatatgaagatatttcctttttcaccataggcttcaatgtgcctccatatatccctttgcagattctaccaaaatgtgtttccaaacgcctgaatgaaaagaaacctttaactctctgacatgaatacacacatcacaaagcggattcttagctagcttattctagtttttatcctgggatattggctttatcgcctttgcccccaatgagctaccaaatatcccttcacagsttgtacaaaaacagtgtttctaacctgctgaataaaaaacaatttaactctgtgagatgaatgcacatatagcaaagcagtttgtcagatatctttattccacattttatcctgtgatgttcagttttttgccattggtttcaatgagcacccaa

SEQ ID NO: 872930 - DNA, 662 bp, Homo sapiens
gaagcactgctttgtataatctgtgaagcaatgttttgtagcctaaaaaggcctgtagtgaacaaggaaataacttcagataaaaactggaaagaagcattatgagaaactgctttctgatgtgcacattcatctcacagaattaaacccttgttttgatgggacagttcagaaacactgtttttatagaatctgtgaagggatatttgggagcacattgaggcctttggtggaaaaggaaatatcttctgataaaaactagaaagaagctttctgagaaacttctttgtgatgtgttcacttacctcactgagttaagcatttcttttgattgagaggtttggaaacactgtttttatagaatctgtgaagggwtatttttgagaacagggatacttttcagcacattgaagcctatgttgaaaaatgaaatatgttctgatgaaaactagagagaagctttctgacaaactgctttgtgatgtgtttattcctgtcacacggttaaacctttgaatgagcagtttggaaacactgattttgtggaatctgaaaggtatatttgggagcacattgaggcctacggtggaaaaggaaatatcttcagagaacttgacagaagctatattagaaactgctttgtgatgtgtgcattcatctca

SEQ ID NO: 872931 - DNA, 555 bp, Homo sapiens
gaaaaggaaatacctttggataaaaactagaaagaagatttttgagaaactgctttgtgatgtatacattcatctcacataaaacactcttttgactgagcagttggaagtgctgtttttgcaatatctgtgaagaaatattaggtagcacaaaaaaagcctacattgaaaaaggaaatatcttcagataaatattggaaagaatctttcagagaagtcacttggtgaggtgtgcaatcttcacagagagttaaacatttctcttgatggagcagtttggaaacactggtttttagaatctgcaaatggatatttcagagtgcactgatgcctatggtgaaaaaggaaatatcttcagataactagaaagaagttttytgagaaactgtttatgatgtatacattcatctgacatagttaaaaatttcttttcactgaacagtttgaaaacactgtttttgtataatctgcaatgcaatgttaggtagtgcaaaaaggcctatattgaacaaggaaataaataacttcagataaaaactggaaggaatcgttatg

SEQ ID NO: 872932 - DNA, 693 bp, Homo sapiens
gttttgtagcacaaaaagccctatagtgaacaagaaaatatattcatttaaaaaccgtaaagaagcgttatgagaaactgctttctgatatgtgcattcacctcacatagttaaatccttcttttgaaggaacagttgggaaacactttttatagaatctgcgaagggatatttgggagtgcattcaggcctaggttggaaaaggaaatatcttcagagaagtactatacagaagctatctgagaaactgctttgtgatgtgtgcattcatctcacagagttaaaacwtttttttcattgagcagtttggaaatgctgtttttgtagaatctgtaaatgtatatttgggagcgcactgaggcctgtggtgaaaaaggatgtatcttcggataaaaacttgaaagaagctttttgagaaactgctttgtgatgtgtgcattaaagtcacagagttaaacctcttttttgattgagcagtttggaaacactgttttttgtagaatccggaagagatatgtggaagctcatgaggcctgtggtggaaaaggaaataacttctgataaaaactgaaaagaaacttgtagagaaaccacattgaaatgtgtgcaatcttctcacagagttaaacttttcttttgatttagcagtacggaaacactgtttttctagaatctgcaaagggatatttggga

SEQ ID NO: 872933 - DNA, 693 bp, Homo sapiens
gttttgtagcacaaaaagccctatagtgaacaagaaaatatattcatttaaaaaccgtaaagaagcgttatgagaaactgctttctgatatgtgcattcacctcacatagttaaatccttcttttgaaggaacagttgggaaacactttttatagaatctgcgaagggatatttgggagtgcattcaggcctaggttggaaaaggaaatatcttcagagaagtactatacagaagctatctgagaaactgctttgtgatgtgtgcattcatctcacagagttaaaacttttttttcattgagcagtttggaaatgctgtttttgtagaatctgyaaatgtatatttgggagcgcactgaggcctgtggtgaaaaaggatgtatcttcggataaaaacttgaaagaagctttttgagaaactgctttgtgatgtgtgcattaaagtcacagagttaaacctcttttttgattgagcagtttggaaacactgttttttgtagaatccggaagagatatgtggaagctcatgaggcctgtggtggaaaaggaaataacttctgataaaaactgaaaagaaacttgtagagaaaccacattgaaatgtgtgcaatcttctcacagagttaaacttttcttttgatttagcagtacggaaacactgtttttctagaatctgcaaagggatatttggga

SEQ ID NO: 872934 - DNA, 638 bp, Homo sapiens
tgatattgattcttcctacccacgagcatggaatgttcttccatttgtttttaacctcttttatttcattgagcagtggtttgttgttctccttgaagagttccttcacatcccttgtaagttggattcctagatatttcattctctttgaagcagttgtgaatgaaaagtcactcatgatttggctctctgtttgtctgttattggtgtataagaatgcttgtgacttttgtacattgatttttttatcctgagactttgcttaatttggctatcagcttaaggagattttgggctgagacaatggggttttctagatatgcaatcatgtcatctgcaaacagggacaatttgacttcctcttttccagttgaataccctttatttccttctcctgcctgattgccctggmcagaagttccagcactatgttgaataggagtggtgagagagggcatccctgtcttgtgccagttttcaaagggaatgcttccagtttttgcccattcagtatgatattggctgtgggtttgtcatgaatagctcttattattttgagttccgtcccatcaatagctaatttattgagagtttttagcatgaagggctgttgaattttgtcaaaagccttttctgca

SEQ ID NO: 872935 - DNA, 534 bp, Homo sapiens
actttctggagaatttgtgaaggaatatttggcagtgcattgaggcctatggtggaaaaggaaacatcttcagataaaaactcaaaagaagcttaatgagaaactgctttgagatgagataaatcatctcagagagttaaaactttcttttacttcagccatttggaaacacagttttcttaatatctgcgagcagatatttggtgccacattgagacctatggtgaaaaacgaaatatatacakataaaaactagaaagaacctttctgagaaactgatttgtgatgtgtgcattcatctcacagagttaaacatttctattgaatcagcagtttggagacacagttttcttagaatctgcaagtagatatttggtaacgcaatgaggcctattgtgaaaaaggaaatatattcagacaaaaactggaaagaatctttctgacagactacttaatgatgtgtgcattcatctgacacagttaaacctttctttttattcagcactttggtaacactgtttttgtccattgtgc

SEQ ID NO: 872936 - DNA, 639 bp, Homo sapiens
atctgcgaacagatatttggtagcacaatgaggtctattttgaaaaagtaaatattttcagacaaaaactggaaagaatctttctgagagactgttttgtgatgtgtccattcacctgacagaggtaaacttttcttggtattcagcaatttggtaacactgtttttgtcctttgtgcaaatggacatttgggagctcattgatgccaatggtgaaaaagtgaatatcccaggataacaactgaaaggaggagatctgaaaaaggctttgggatgtgtgcattcacctcacagtgttaaacctttcttttgaktcaatagtttggaaacacagttttgttagaacctgcaaagagatatttggtaccatgttgaggtctttggtgaaaaaggaaatatcttcagataaaaaatagaaagaacttttctgagagactgctttccaaagtgtacattcatcacacagagttaaatgtttcttttgcttcagcagtttggaaacacagttttcttagaatctgcaaagagatattttgtgccacattgagggctatagtgaaaaaggaaatatcttcagataaaaactagaaagaactttctgagaaaactgacttgtgatgtgtgcattcatctcacagag

SEQ ID NO: 872937 - DNA, 639 bp, Homo sapiens
atctgcgaacagatatttggtagcacaatgaggtctattttgaaaaagtaaatattttcagacaaaaactggaaagaatctttctgagagactgttttgtgatgtgtccattcacctgacagaggtaaacttttcttggtattcagcaatttggtaacactgtttttgtcctttgtgcaaatggacatttgggagctcattgatgccaatggtgaaaaagtgaatatcccaggataacaactgaaaggaggagatctgaaaaaggctttgggatgtgtgcattcacctcacagtgttaaacctttcttttgattcaatagtttggaaacacagttttgttagaacctgcaaagagatatttggtaccatgttgaggtctttggtgaaaaasgaaatatcttcagataaaaaatagaaagaacttttctgagagactgctttccaaagtgtacattcatcacacagagttaaatgtttcttttgcttcagcagtttggaaacacagttttcttagaatctgcaaagagatattttgtgccacattgagggctatagtgaaaaaggaaatatcttcagataaaaactagaaagaactttctgagaaaactgacttgtgatgtgtgcattcatctcacagag

SEQ ID NO: 872938 - DNA, 657 bp, Homo sapiens
tgcgagccgatatctggtagcgcaatgaggcctcatgtgaaaaaggaaatatcttcagacaaaaactggagagaatctttctaagagactgctttgagatttgtgcattcatctgacagagttaaacctttcttgatattcagcacttcggtaacgytgtttgtgtccactgtgagaatggacatttggaagctcattgaggccaaaggcaaaaaagtgaatatcccaggataactttaaggaagatatctgagaaaacacgtggtgttgtgtgcattcatcttgcagtgttacacctttcttttgattcagttgtttggaaacacagttttgttagaatctgcgaagagatatttggtagcacattgaggcctgtggtgaaaaaggaaatatcttcagataaaaactaggaagaatctttctgagaaactgctttgtggtgtgtgcattcatctcacagagataaacatttctttggattcaacagtttgttaacactgtttttgtccattctgcgaatggacatttgggagctcattgaggtcaatggcaaaaaagtgaatatcttataatgaaaactagaaggaagatgtctgagaaaacgccttctgatgtatgcattcatctcacagtcttaaacatttcttttcattcagc

SEQ ID NO: 872939 - DNA, 617 bp, Homo sapiens
agtgaatgtcccataatgaaaactagaaggaagatgtctgagaaaacgccttgtgatgtgtgcattcatctcacagtgttaaacctttcttttcattcaacagttttgaaacactgtttctggagaaactgtgaaggaatatttggcagcacattgaggcctatggcaaaaaaggtaacatcttcaaagaaaaactaaaaagaarcttaatgagaaactgctttgtgatgtgttgaatcatctcacagagttcagcctatcttttgcttcagcagtttgtgaacagttcttttagaatctgcaaagaataaatcatgccatgttgaggcctatgctgataaagaaaatatcttcagataaaaactagaaagaacctttctgagaaactgctttgtgatatgtacattcatctcacagagctcaacctttcttttgattcagcagtttggaaacagttttcttagaatctgcaaagggatatttgttgccacattgaggcctatggtgaaaaaggaaatatcttcagataagaactagaaagaactattctgagaatatgcttcatgatgtgtgcattcatctcacagaaataaaactttctttggattcagcagttg

SEQ ID NO: 872940 - DNA, 625 bp, Homo sapiens
taaacacagttttcttagattctgtgagcagatattttgtagcccaataaggcctattgtgaaaaacaaaatatcttaagacaaaaactggaaagaatctttctgagagactgctttgtgctgtgtgcattcatctgacagagttaaacctttctttatattcagcactttggtaatgctgtttttgtccattgtgcaaatggacatttgggagctcattgaggccactggcaaaaaagtgaatatcccaggataaaaacttgaagcaagatatctgagaaaaygcttggtgatgtgtgcattcatctcacagtgttaaaccttcgtttttcattcagcagtttggaaacactgtttctggagaatctgcgaaggaaaatttgacagggctttgaggcctatggagaaaaaggaaacatcttcagataaaaactcaaaagaagcttaatgagaaactgatttgtgatttgctgaatcatctcacagttaaacttatcttttgattctgcagtttggaaacacagttttcttagaagctgctaagagatatttggtgccacattgagtcccacggtgaaaaagaaaacatctttagataaaaactagaaagagcttaatgcttaat

SEQ ID NO: 872941 - DNA, 687 bp, Homo sapiens
taaaaactagaaaggagcattctgagaaacttctttgtgatatgtgcattcatctcacagagttaaaagtttcttttgatggaggatcttggaaacaccgtttttgtagagtctgaaaagggatatttcagagcaatttcaggcctatggggagaaaggaaataccttcccttaaaaacccgaaggaaggtttctgagaaactgctttgtgatgtgtgcactactctcacagagctgaaccattcttttgattgagcagattggaaccactgtttttctgggatctgcaaaggaatatttgtgacagctttgaggcctatggtgaaaaggaagtatcctcacataaaaactagaaaggagcttacttagaaactgctttgtgatctgtgcattcatctcacagagttaaaccgttcttttcattgaacattttggaaacaccatttttggagaatctgcaaaaggatatttgggastgctttcaggcctatggtgaaaaaggaaatatcttcacctaaaaactcgaaggaagctttctgagaaactgctttgttatgtgtgcattcctctcacagagttgaaccatgctttagattgagcagtttggaaacacaatgtttgtagaatctgcaaagggatatttggattcacatggaggcctgtgataaaaaaaggaaataacttctg

SEQ ID NO: 872942 - DNA, 588 bp, Homo sapiens
ttggcctcaagaagctcccaaatgaccattcacaaaatggacaaaaacagtatttccaaacagctgaatcaaaggaaaagtttaactccgtaagatgaatgaacacatcacaaagtagtttctcggaaagctttctgctagtttttatcagaagatacttctttcttcaacatggacctcaatgagctacaaatgtctctttgcagattctaagaaatcagtgtttcccaactgctgaatgarcagaaaggtttaactctgggagatgaatgcagacatcacaaggtggtttctcagatagcttgcttctagttttaatcctgggatattcacttttttgccattggcctcagtgagctcccaaacgtccaataacaaaatgcacacaaacagtgtttccaaactactgaatccaaagaaagttttaactctctgagacaaatgcacgaattggtttctcatataaattccttgtagttttaccctgggatatttgcttattccccattggcttcaatgagctcccaaatgtccattcactgaatcaacagaaacagtgtttccaaactgctgaatacagggtaaggt

SEQ ID NO: 872943 - DNA, 629 bp, Homo sapiens
gcaggctgtggtgtaaaaggaaatatcttctgatacaaactagacagaagctttctgagagactgctttgtgatgtgtgcattcatctcacagagttgaaccattcttttgatggagcagtttggaaccactgtttttgtagaatctgcaaagtgataattgggaaccctttgagtcttatggtgaaaaaggaaatatcttcacatgaaaactagaaaggagctttctgagaaactgctttgtgatatgtgcattcatctcacagttaaaactttctttgatggatcattttggaaacatggtttttgcagaatctgcaaagggatatttcagagcactttcaagcctatggtgaaaaaggaaatatcttcacctaaaaactcgaaggaagctttctkaaaaactgtttgtaatgtgtgaattcctcccacagagttgaaccattctttttattgagcagtttggaatcactgtttttgtagaatctgcaaaggtacatttgtgagcactttgagggcttttgtgaaaaaggaaacaacctcacataaaaattagaaaggagttttcttagaaactgctttgtggcctgtgtttcatctcactgaattaaacaattcttttgattgagc

SEQ ID NO: 872944 - DNA, 662 bp, Homo sapiens
ttgtagaatctgcaatgggaagtttgtgagcggtttgaggcttatggtgaaaaaggaaatatcttcacataaaaactagacagaagctttctgagagactgctttgtgatgtgtgcattcatctcacagagttaaacatttcttttcattgagcagtttggaaactctgttcttctagagtctgcaaagggatatttgggagtacattgaggcccatagtgaaaaaggaaatttctctaatacaaacaagaaagagagattttgagaaattactttgtaatgtgtgcattcatctcaaagaatttwaccattcttttgatggagcagtttggaaacacagtgtttgtagaatctgcaaagggatatttggattcgcatggaagcctgtggagaaaaaggaaatatcttctaacaccaactagacagaagctttctgtgagactgctttgtgatgtatgcattcatctcacagagttgaaccattcttttgatggagcactttggaaccactgtttttgtggaatctgcaaagggatatttgggagccatttgagtcttatggtgaaaaaggaaatatcctcacataaaaactagtaaggagctttgtgagaaactgctttgtgatatgtgcattcatctcacagagttaaaactttcctttg

SEQ ID NO: 872945 - DNA, 677 bp, Homo sapiens
agaatggacaaaaactgtgtttccaaactgctgaatccaaaaactggtttaactctctgagatgaatgcacacatcccaaaccagtttctcattaagctttttcctagttttcatatgaatatatttcctttttcaccattgacctccatagacttccaaatatctcttggcagattctaaaaaaacattgttttaaactcctgaatgaaatgaaagttttagctctgtgtcacgaatgtacacatcatgaatctctttctcagagggcttccttctagttttaatcctgggatattcacttttttgccattggcttcaatgagctcccaaacgtccattccgagaatggacaacagcagtgttaccaaactgctgaatacaaagaaaggtttaactctgttggatggawgaacacatcacaaagcagtttctcagaaagcttcttgttaatttttatctgaagatatttccttttgcaccatgggctgcaatgcactaccaaatatccctttgcagattccaagataacactatttcaaaactgctgaatgaaaagaaaggtttaactctgctagatgaaaacacacgtcacagagcagtttctcagataattttcttctagttgtaaccctgggatattcacttagttgacattggctacaatgaactaaaaata

SEQ ID NO: 872946 - DNA, 600 bp, Homo sapiens
acccagccatcccattactgggtatatacccaaatgactataaatcatgctgctataaagacacatgcacacgtatgtttattgcggcattattcacaatagcaaagacttggaaccaacccaaatgtccaacaatgatagactggattaagaaaatgtggcacatatacaccatggaatactatgcagccataaaaaatgatgagttcatgtcctttgtagggacatggatgaaattggaaatcatcattctcagtaaactatcacaagaacaaaaaaccaaacaccgcatattctcactcataggtgggagttgaacaatgagatcacatggacacaggaaggggaatatcacactctggggactgtggcggggtggggggaggggggagggatagcattgggakatatacctaatgctagatgacgagttagtgggtgcagcgcaccaacatggcacatatatacatatgtaactaacctgcacaaggtgcacatgtatcctaaaacttaaagtataataaaaaaaaaaaaagaaactgtttgtgatgtgtgcattcacctcacagatgtaaaagtttcttttcattgagcagtttg

SEQ ID NO: 872947 - DNA, 606 bp, Homo sapiens
aaagggatatttttgagtgctttggggactatggtgaaaaaggaaatatcttcacataaaaactagacagaagctttatgagaaacatctttgtgatatgtgtattcatcttactgagttgaaccattcttttgattgagcaatttagaaacacaatttttgtagaacatgcaaagytatatttgggagtgctgtgaaacctatggtgaaaaaacgaaatatcttcacataaaaacgagaaagaaacctgacaacctgctttgtgatgtgtgcattcatgttacggaggtaaacatttcttttcattgcgcagtttggaaactctgttcttctagaatgtgcaaagggatattagtgggtgctttgagccacatagtataaaaggaaatatcttcacataaaaactagacaaaagctttctgaaaaactgctttgtgatgtgtgcattcatctcacggaattgaaccacacttttgattgagcagtttggaaaaagtcttcttgtaaaatctgcaaagggacgtttgggatcactttgaggtctatggaaaaaagagaaatatcttcacataaaaagtagaaggaagttttctgagaaaccgcttg

SEQ ID NO: 872948 - DNA, 654 bp, Homo sapiens
agttagctcatcttgttgaattgatccctttaccattatgtaatggccttctttgtctcttttgatctttgttggtttaaagactgtttttgtcagagacgaggattgcaacccctgctttttttttgctttccatttgcttggcagatcttcctccatccccttattttgagcctatgtgtgtctctgcatgtgagatgggtctcctgaatacaacgcactgatgggtcttgactctttatccaatttgccagtctgtgtcttttaactgggggcatttagcccattcacatttaaggttaatattgttatgtgtgaatttgatcccatcattatgawgttagctggttattttgctcattagttgatgcagtttctttgtagcatcgatggtctttacaatttggcatgtttttgcagtggctggtactggttgttactttccacgtttagtgcttccttcaggagttctcgtaaggcaggcctggtggtgacaaaatctctcagcatttgcttgtctgtaaaggattttatttctccttcacttaggaagcttagtttggctggatatgaaattctgggttgaaaattcttttctttaagaatgttgaatattggcccccactctcttctggcttgtagagtttctaccga

SEQ ID NO: 872949 - DNA, 631 bp, Homo sapiens
tgtgcacccgcaggctcaacaccaggtggaagttgccaaggtttggggcttccaccctctgaaggcacagcctgagctgtacattggctcctttcagccatgactggagtggctgggacacagggcactaagtccctaagctgcacacagcacagggatcctgggcccagcccacgaaacctcttttttctcctgggcctctggccctgtgatgggaggggctgacatgaaaagtctctgacatggcctggagacattttccccatggtctcagggattaacattaggcttcttgctacttatgcamatttttgcagctggcttgagtttctccttaaaaaatgggttttgcttctctactgcatcgtcaggctgcaaattttctgaactttcatgctctgtttctcttttaaaacagaatgcttttaacggcacccaagtcacctcttgaatgctttgctacttagaaatttcttccaccaggtaccctaaatcacctctctcaagttcaaagttccacaaatctctagggcagaggcaaaatgccaccaatctctttgctaaaacataacaagggtcacctttgctcccattcccaaacaagttcttcatttccatctgagaccacctc

SEQ ID NO: 872950 - DNA, 665 bp, Homo sapiens
ctctttccaaattgaacttttctgagtctccatttcataatctggtcaatgagtataattgtgacaactatctcataagcttattatgattattaaataagctgaagtgaatataaacttcttatcttgttgcttgatacacggtaagtacttgatagatgttaagtatgaacatttttccttggtctctaacgtatatctgcttccacatcagtttacttgtatttatattatattgccttttagaaataaattatgcagattgctcctctttttgcatttatctcatggagcatttggattcamatattttcattgtaatgattcagctcagatgaatagtaaaagctgttgtcactgcttcctgtatggaagcagtctgttttattttattcctaaacaccttatttggcatagcattttttccctaatgacaaaaagtaatataacttttaaataacttcccatgagtgtgtaattctttggccctttttgtatatttataagaaggagtgcagacagaaaggcacacaaatcattaggtacacaactctatgatttttcacaaagtaaacattctctctcacttactacccaggtcaagaagtaacatatcatcaatatatcagatgacccctctgtttcctaaatccttcacggccacc

SEQ ID NO: 872951 - DNA, 608 bp, Homo sapiens
gtctctactaaaaattaaaaaattagctgggtttggtcgcaagaacctgtaatcctagctactcaggaggctgaggcaagagaatcgctggagccctggaggcagaggttgcagtgagcagagatcacatcaccgtactccagcctgggtgacagagcaagactctatctcaaaaaaaaggaaggaattgcatattatttatgttacaagaaaaaaatgagcttatttaattttttgacaataaaataaagccctgaaccaaaccaaaccttagtaaataactcataagttactaataaagaactgttatcattcatttgaaaaaaaaaatgtggcattwctcatcttcagcaagggatgcacatttagggatcagttctctgtccctggaagaaactcacaggtaccagggccccagatcatgtctttgggaaccccgcatctgtcctatggagcctcctaacacccagggacacttatctggaacctggtcattttcagtgtccagtggggcctccttcacacatcctcagggtggccacaacccttggaacacacatctgctcatcactggtcatggcaacagagaacatggatgggaaaaaaag

SEQ ID NO: 872952 - DNA, 562 bp, Homo sapiens
accctcaacaaactaggcactgaagaacatacctcaaaataagagccatctatgacaaactcacagccaacatcatactgaacaggcaaaagatggaagcatttcccttgaggaccggaacaagggaacaggatgcccgctctcaccactcctattcaacacagtacttatttccyagccaaagcaatcagtcaagagaaataaaaggcatccgaataagaaaagaagtcaaactgtctctcttcactgacgatatgattctatacccagaaaaccctaaagactctgccaaatgacttgagtagtttcaggatacaagatcaacatagaaaaatcagtagcacgtctatacactataaggttcaacctgaaagccaaatcaagaatacaatcccattttcaattgccaccaaaaaaataaaatacccaggaatacatccaaccaaggaggtaaaagatctctacaggaagaactacaaaacactgctgaaagaaatcacagatgacacaaacaaatagaaaaacattccgtgctcatggattgggagaatcaatatcactg

SEQ ID NO: 872953 - DNA, 562 bp, Homo sapiens
accctcaacaaactaggcactgaagaacatacctcaaaataagagccatctatgacaaactcacagccaacatcatactgaacaggcaaaagatggaagcatttcccttgaggaccggaacaagggaacaggatgcccgctctcaccactcctattcaacacagtacttatttcctagccaaagcaatcagtcaagagaaataaaaggcatccgaataagaaaagaagtcaaactgtctctcttcactgacgatatgattctatacccagaaaaccctaaagactctgccaaatgacttgagtagtttcaggatacaagakcaacatagaaaaatcagtagcacgtctatacactataaggttcaacctgaaagccaaatcaagaatacaatcccattttcaattgccaccaaaaaaataaaatacccaggaatacatccaaccaaggaggtaaaagatctctacaggaagaactacaaaacactgctgaaagaaatcacagatgacacaaacaaatagaaaaacattccgtgctcatggattgggagaatcaatatcactg

SEQ ID NO: 872954 - DNA, 653 bp, Homo sapiens
tgatataaacaagatatttgctcttctggaaataagaacctactaggggagataaagagtaaacacacaataataatcaacaaacttgatacattgtatagataatataaagttagtgcattagtgtgttctcatgctgctataaagaactgcccaagatggggtaatttataaaggaaagaggtttaattgactcacagttccacatgactggggagacctcaagaaacttacaatcatggtggaaggggaagcaaacatgtccttcttcacatggtggcaggaaggagaagaatgagaactgagtgaaggggaaaacctcttataaaaccaccactcccatgattcarttacctcccactgggtccctctcatgacatgtgggattatgggaactacaattcaagatgagatttgggtggagacacagacaaaccatatcattcagtccctggcccctcccaaatctcatatcctcacatttcaaaacacagtcatgcctttccaacagtccctcaaaatcttagctaattccagcatcaacccaaaagttcaagtccaaagtcttatctaagacaaggcaagtcccttccacctataagcatttaaaatcaaaagcaaataacttacttcctagatacaatgggggtaca

SEQ ID NO: 872955 - DNA, 594 bp, Homo sapiens
tccaagaaatgagaatgctgagtctcattccaccactaactacctctgatagttaattttgtctctctgagcagttgactttgtctctggctcccatatttcctgtttgtaaaaatcgtgaattatagtatctgcatgtcaaggggagaagccatgaattgtctttcaaatgtaagaaatatatttctcatagagtttggttctagtagagggatttagttctaccacctaaaatgatctccactctccaccctccaccctacctacctacatgtacacatgctcacagactcactgaagacatcctccacatcttaaagcwttccattctttctctctgggactagcctgagggaaaactgggaagtaactaaaatttgtccttgatgctcttggaattatttgtattccatataattattagtatttcatataatactaaccacataagttagttatgttacagataaggacatggagaatcaaaatattttaattcgtttgtctaatgtcacctgaccaatacaatgtagaattggaatttgaacaaggtctgtttgatttcaaagtccatggtctttccatttcatcacc

SEQ ID NO: 872956 - DNA, 671 bp, Homo sapiens
tgttgagttcagatcctaaatatctttgttagtttcctgcttccataatgtgtttaatattctcagtagggtgttgaggtctcctactattatgtgtggttatctaagtctcctcatatatctctaagaatttactttatgaatctgggtgctcctgtattgggtgcttgtatgtttaaagtagttaggtcttgttgaattgagctctttaccattatgcaatgcccttgcttgyctttttttatctttgttggcttaaagtgtgtcttgtttgaaattagaatagcaaccccacttttttcccatgttttgtttgcttggtagatttttctccatccctttattttgagcctatgggtgtcactgcatgttagatgggtctcttgaagacagaatactgttgagtgttgcttctttatctaacttaccactctgtgcctttgaattggagcatttagccatttacattcaaagttagtatcgatctgtgtagatttgatcctatcaccatgttgttggctggttacagtgcagacttggtttgtgtggcttctttatactgttactggtctatgtacttaagtgtgtttttgtagtagctggcaacagtcttttttttttttttttttttcaatatttagcactgtcttcaggacttactgtaaggcagg

SEQ ID NO: 872957 - DNA, 558 bp, Homo sapiens
ccagcctgggttacaatcacaggatagaaatggggagctgcagcaaacaaggatcagaagggtaaggagagaagattcctgagcccatcttaagaaggactattgaaaaatacaatcggtggactcaggagagagcgagttccttgctactgcaaatgcaaaagcagaaactggcctctaaggcccctattgattttgagattctagaaggtgtaagtcaagatgtagaaaagaggatggcccagctstcagggcagcagagctgtaactatgatgtttttgtttcccgggtgcctcaagacctactagcccctgaggctcaggaagtggttggttcagctttattcttagttggaattttttgccgtaagtcaaagacccaagtggaaggatggaaggatggaaggatggaaggatggaaggatggaaggatggaaggatgtgggagatgacactgtaggaagtcgcagaggaactcagagtgtgacttgggaggtttcctcagccctgaaccccatggtcttgactgagtggcaatgattgccacagaaattttac

SEQ ID NO: 872958 - DNA, 609 bp, Homo sapiens
ggcataagaggactggcttttggtctatctcagcttttgtcatgcctttcttactaagtttaatcatgtatatatatattttttaatttaaattgagaggtatgtgactcttcctttcactatacacttagtgaccattgcagggtcatttattggcctaatttcaatattgttgtgcctgaaggaatagggggcccaagamgagggagagagacaggagagtggctggccagtgtagcaatgagaatacatacaacatttataaattaagtttgccatcctatgagtgcagtttgtggaatctcaaattgatctataggttcaatattgtcttcacaaaaatccaagacagctttttgtagaaattacacaattaattctaaattatctatggaaatgcaaaggacaaaggatatccaaagaatctttttaaagaaggacctaattgacagtgcttacactaatttaaaaatgtattataatgctatgacaatcaataaaatatagtaacagtataaaattagaaatataagtaccaccaaatctaaaataaaagttaaaaaagagaaattgaagatgacataaataaatggaatgatatctcgtgtt

SEQ ID NO: 872959 - DNA, 686 bp, Homo sapiens
tctactttaagttattgtgcccttctttatacaattaattccccaaaagcagagatgaataacatttgatcttttctcacaagaccaaacagtgattgtcacttaatctgactgagcagattattctgttatgtaaaactttttaaaactagtttgatgcactaatactttccacaaaccttcttacatgatttcccacatatttaaatgacttgtttatgaaatttttcctctttggtcagttgcttgacgatctgatcagtgccktgttattgcttagcaacgactgttgtattgaggtttccaagtttctccagaactgttttgccaggtcccaagctggcagaactgaatgcctttagcgtcctatttctcctgactatgcggccaatgtcatcctccattattttgtttccaaataagcagccagatccttagtagctcattgactttcagaattcattgagaacagaaagacaaggtatcttctggtattttgagaaaatatatgtcctttgaaaagttagctttaggagatacacctaatgctaaatgacgagttaatgggtgcagcacaccagcatggcacatgtatacatatgtaactaacctgcacattgtgcacatgtaccctaaaacttaaagtataataataataaaataaaataaaaaataaaaaaagagaa

SEQ ID NO: 872960 - DNA, 686 bp, Homo sapiens
tctactttaagttattgtgcccttctttatacaattaattccccaaaagcagagatgaataacatttgatcttttctcacaagaccaaacagtgattgtcacttaatctgactgagcagattattctgttatgtaaaactttttaaaactagtttgatgcactaatactttccacaaaccttcttacatgatttcccacatatttaaatgacttgtttatgaaatttttcctctttggtcagttgcttgacgatctgatcagtgccgtgttattgcttagcaaygactgttgtattgaggtttccaagtttctccagaactgttttgccaggtcccaagctggcagaactgaatgcctttagcgtcctatttctcctgactatgcggccaatgtcatcctccattattttgtttccaaataagcagccagatccttagtagctcattgactttcagaattcattgagaacagaaagacaaggtatcttctggtattttgagaaaatatatgtcctttgaaaagttagctttaggagatacacctaatgctaaatgacgagttaatgggtgcagcacaccagcatggcacatgtatacatatgtaactaacctgcacattgtgcacatgtaccctaaaacttaaagtataataataataaaataaaataaaaaataaaaaaagagaa

SEQ ID NO: 872961 - DNA, 644 bp, Homo sapiens
agttatgcacagcaaaagaaactatcaacagagtaaacagacagcctacaggataggagaacatttttgcaaactatgtatctgacaaaggtctaatatccagatctttaaggaacttaaatttagaagaaaaaaacaacctattaaaaagtaggaaagggatatgaacagacacatctcagaagaaaacacrtatgtggccaacaatcatatgagaaaaagctcaacatcactgatcattagggtgagcagatttctgaactgagatttctttattcttattaaagggatgggtgcagattacagtagctgagaaatgaggatgagtaagagagttgtcagaagagttattctcctagcttttaaaatggtgcagcagacaaactggcttgtatgttccattttcactttggataaaatattcacatttcaattactgaaacaatctttgcaggaagtattctatttattccctctggctgtgaaagctaaaagcagcatttctgagagaaaagaattttttctgtgatctgaaaaaaagagagatgacagcctcattccatacttttctgtgttttgtcttcttttcagtgagttgcctctatttcacatgatagtaatgttatttgaattatatctcaatt

SEQ ID NO: 872962 - DNA, 679 bp, Homo sapiens
atagatgccctagtaggcgtggacaccccaaaactaattgtgccaagtgagttcaaggtaggtgaatgtctatcttttggtcattcctggaactctttttctttctttccccctattctaatttattgtgtttctctttgagttagttttgtacaattatccatattttttttccaaaatcagtccctcttaggctcatatatacatgtagtttaatttcttcactacaattaaatgtcaagactaggktttttatttaaaacaactgataatactattataaactctggcttatagttttagaataaatatccaaaatattttatataacttattaccttgatctatataatgactctgggaaatacgtattgtaactatcatcctcctgattttttcttttttgagacagggccttgctctgttgcctaggctggagtgtggtggtgcaatctcagctcactgcaacctttgcctcctaggttcaaagaatcctcccacattagcctcccaagtagctggtgctgtaggcacataccaccacccccagctaattttttaatgttttgtagagacaaggtctcactatattacccagtctggtcatcatcctgattttataaagttaagattgaagctcaaagaattaagtaaaatgcctaagattatggaactagta

SEQ ID NO: 872963 - DNA, 626 bp, Homo sapiens
attcttaacaactgatggtgaaaaatttacaactgatttttagaaaaattatagattatttatttctaccataaaacaatttagtgaaactaaaagtttaattcaaatggctgccccacattacacacacacacacacacacacacacatacacacacaaacacagcaaaggggattattatttattatgcatttttcttgggccagaaactctgtcaggtgcttttagatatgtcctctctaatcttcactccaaatcctcatgtgataggaacaagctcaaaaacagaaagaagttcaatttgaccaataattacttttaagaaactaaattccaaatttttcccaggatttcagaaatgttgaattatggtatgatactggtgtagagaaaactccttctttcccgtagctgaattttgtctcactcttcactttacaggatgtgtttttacctgagttaaaaacaagtttttwaaaaaaattaaaagttgggagacagattaagatggtggacaggaggcaggactagcttgcagctcccacttggatggtcagagcagtgtgtggagactcacatcgttaacttttgctccaagaactactgcaggaacataccaggaaag

SEQ ID NO: 872964 - DNA, 590 bp, Homo sapiens
caagtttgcctttctttcttctcaccaatctgtatgttggactcctaagatatttctcttccttaacaccaccagcacgtactcacataagcacacttttgtgctcatgcttactctgcatgtaatatcttttgttacctgatttatttgattgaccatggcttgatttgagtgtaacctattgtcccagattccactaacttagatatttctcctctcagctyagctcctgtgacacttttttttcccctacaatctatagaattttctgttcattcatctctcttttgttgtcttcgagaccaagtaattgtcctttttttagatgcaaaaataaatacttatttagaatgaaaaaaatcacaagttatacatttaaaaagctgaaatatgctacaaaaacacacaatacagaaagataatactgtatttttacttatgtttatttatcttttgaggtgtggtcaactacgatttcctctttctctgaccaccccgtgtgaaggaaccagccccttttccatttgttgatatgcacttaccctgttttctgttatttcatagcacttgtcccttgagctgccatctct

SEQ ID NO: 872965 - DNA, 657 bp, Homo sapiens
catcacagcaagatgatattcacagttccaagtttcacatgcacatgctatactttccatagcaaaagagcatgtctttgactcagcaatctctgcaagtatcctaagattccttctgactgggcaagcttaggtcacaaacctgtcccagaaacactcactgtagcwgagggaataaaatgttatgattggtttatcctaggtcatatgctccaccctgtgaagactttctagaactgcatgaaaccactaatagaaattgggctactgccctgcccagtcagccagcctactcccagaccaagagctggctcagaggtggtcccatcgcacaaagaaagccccacacagccacctggcatgctacacccatacctaccctgagagccagcccagtggtaggcccactctccaagagagcccactacacagcctgtcaacccaccacacctgcagatacctggcccgacaaccacctctatgccctaggccccagaaacattatgttaccattgtcacaaactcccatagccaaggcccctgacacaattgcagacattgcagacaaagattatagctaaataatctgtatggagatcatatgactcagtccacttagaaccaaaaccagtgcaccattcccaactgataccctag

SEQ ID NO: 872966 - DNA, 611 bp, Homo sapiens
ttggttgagttcgtctgaagacctgggattaatggaaagaaatgttcaggttaaggtaaaggattgtggagaccaagttttattgtgcagaagaagctctcagacagcagacttcagagagagcaggttgtaaattgtttcttatcagacttaaaagggtgcctggctcttagttgattatctcctagatcagggaaggaaggaaggaaaacaaagtggagaggggattctctatagaatgtggatttttcccacaagagactttgcaaggcaatttcaaggtatgtcaaggaaatatatttttgtgtaaaacattttgattttcttccttgttatgctacagtcagattgtaaagtaagtcactgtatayggtgttaaataaaacccatctaatgagaatttatggtttgcagggcatgactccccagaccccttagaaaggaatttgggcaagataaaaaaaatcagagcttagtcctcaggtagctacagatgaggaaaacagagtttctaaataacttggatcaggctatgtacctacaaaatggcagagatgaaattaataatctcagatccaatgacttaaaagtgaatattcttaaccctcttt

SEQ ID NO: 872967 - DNA, 603 bp, Homo sapiens
ctaacaatctattcttctaggtagtaaaactaagtgggaaaaaaatttgtgtgtgtgtgtgtgtatacatatttgtgtgtatatgtatatttgtatatatatatatgttatatgtgtgtgtgcagggataattgtatatatgtgtatgtttgtgcatatatatgcacacacacacttagcatgcttaagaccagaacatttattctaattatataatgctcttaakaaaagtcattgcacaaaattcatagaatgacaaaaatttggactagcacggtcagcacaattataggaaagaagggatatgaacaggtttccataaaggggaaaggggagccgtacctaagctgactgagatgggctgagccattgtggtcaagaacaaacagcaatcaatatttcctgggcaagaaaagcagcagggagaagagggttcattcaatatttaaagacagtgataagcaagggacaactttgatgtcatcaggccagaacagacgatgactatgaagacaagaggtaagcccatacatatctggcagttaagaaagacagactggcactgatgtaagatcaaaatgaggaaacaggccaggaacagtg

SEQ ID NO: 872968 - DNA, 545 bp, Homo sapiens
atcatttccataattgtaaaatgcaacatgattttatgttacagtgaaggaataaaaccttgacaaagtatgacaaaatgcttcttatgacttcaagtatttagcaaatattgaaaataattcttattaatgtatatgtgtgtggatgcttgtcttttttcrttccatttatttaatgagatgaaattataagcaaaatatgttaataaaggtactgataaatttttcccactcagaacaaactcttctgaatcccttttaaactcatctcatccatgatttttccttcattatcatcatctctgctaatcagaagcactggtgatgctgcatttcttgtgagattcctttgctacactctgtgggattatccttctaacctactgacagccgtctgccagtttccgtgttgatgattttagtagaagatgtcaatgaaaggtttgttttttttttttttttttttttgagacagagtcttcctctgttgcccaggctggagtgcagtgaacagtggcaccatctcggctcactgcaagatcctc

SEQ ID NO: 872969 - DNA, 614 bp, Homo sapiens
cagctgacacatttgtattggtctggatgatttactgttgcatggacagagcagtggtgctcaccacagtccctgcccgttaaagtaacaatcccctccccaagagtgtgggggtaaaaacagcccgcctttgtcataatgggtgtggcatgaaccaaggttggaagtattggctagttaagtgcaagggaaggcccaggatactaagacacatttgaaattacagacttgagtctgagctccgttgtcaccctttcattgaggaaaacaaaagcagggctgtgggaataagtgggtgtaatgaattccaagttccacaggatgaaagtatatttctgtggatgcatgagggaaccctaagatgtgttttattacccctargcctcaagaggtggtggcttctgaacccccaagtgtccccaagttgcattaaatctggggctgatatgtaaatatgtgaactatgcttggcgatgtggaggggcaaatagcaacatgtgtgctttggacatagagcaattgggctgcaacttagggtcatgtgtgagcaggagagatgtccatggtgcctatagttaagccaagttgggaagaataagactacatgctaaagt

SEQ ID NO: 872970 - DNA, 599 bp, Homo sapiens
ttaaaaaaaaatcattattagagttggctcctgagctccaggctgcagctctagagctttgcacaatgactggcagtggcattgtgtacagcccaggcagcttccttgggaaatttgtatttatctaagccctgtttgacatcatctactgtctatggtggggcaaggactggctgagcagggcatttgtatttgcccatcagagccgtaggcacattgttccaggaattcgactcatgataccctatggggtcggggtacgcgtggcaacagaagcaaggtgtgcagcaacataattgggcttgcctggcagcgtatctccctggtgattctgcctccttcaggagtcagggcttgctttacttaccctttttgctgtcacagcttcagtcctgacattgacacagtgggcccagcagttggcttctctaaccagcactatctaggggactctcytaggctcccaggaggtagagtccatgcctggctttgtccaaagagtggaggtgagcactaccatcctcttgagcgctccttggcgcgactttgtctgtgtgctgtgcaccagccaattaataacgttcagactttcccccagg

SEQ ID NO: 872971 - DNA, 628 bp, Homo sapiens
tctttgtggttttatctacctttggtctttgatgatggtgacgtacagatgggtttttggtgtggatgtcctttctgtttgttagttttccttctaacagacaggaccttcagctgcaggtctgttggagtttgctagaggtccactccagaccctgtttgcctgggtatcagcagtgatggctgcagaacagcagatattggagaactgcagatgctgctgcctgatygttcctctggaagttttgtctcagaagagtacctggccatatgaggtgtcagtccgcccctacttgggggtgcctcccagttaggctactcgggggtcatggaccacttgaggaggcattcttcccattctcagatctcaagctgcgtgctgggagaagcactgctctcttcaaagctgtcagagaagtacatttaagtctgcagaggttactgctgtctttttgtttgtctgtgccctgcccccagaggtggagcctacagaggcaggcaggcctccttgagctgtggtgggctccacccagttggagcttcctggccgctttgtttacctaatcaaacaactaactcatcaatggtgggcgcccctcccccagcctcactgccgccttgcagtttga

SEQ ID NO: 872972 - DNA, 628 bp, Homo sapiens
tctttgtggttttatctacctttggtctttgatgatggtgacgtacagatgggtttttggtgtggatgtcctttctgtttgttagttttccttctaacagacaggaccttcagctgcaggtctgttggagtttgctagaggtccactccagaccctgtttgcctgggtatcagcagtgatggctgcagaacagcagatattggagaactgcagatgctgctgcctgattgttcctctggaagttttgtctcagaagagtacctggccrtatgaggtgtcagtccgcccctacttgggggtgcctcccagttaggctactcgggggtcatggaccacttgaggaggcattcttcccattctcagatctcaagctgcgtgctgggagaagcactgctctcttcaaagctgtcagagaagtacatttaagtctgcagaggttactgctgtctttttgtttgtctgtgccctgcccccagaggtggagcctacagaggcaggcaggcctccttgagctgtggtgggctccacccagttggagcttcctggccgctttgtttacctaatcaaacaactaactcatcaatggtgggcgcccctcccccagcctcactgccgccttgcagtttga

SEQ ID NO: 872973 - DNA, 628 bp, Homo sapiens
tctttgtggttttatctacctttggtctttgatgatggtgacgtacagatgggtttttggtgtggatgtcctttctgtttgttagttttccttctaacagacaggaccttcagctgcaggtctgttggagtttgctagaggtccactccagaccctgtttgcctgggtatcagcagtgatggctgcagaacagcagatattggagaactgcagatgctgctgcctgattgttcctctggaagttttgtctcagaagagtacctggccatatgaggtgtcagtccgcccctacttkggggtgcctcccagttaggctactcgggggtcatggaccacttgaggaggcattcttcccattctcagatctcaagctgcgtgctgggagaagcactgctctcttcaaagctgtcagagaagtacatttaagtctgcagaggttactgctgtctttttgtttgtctgtgccctgcccccagaggtggagcctacagaggcaggcaggcctccttgagctgtggtgggctccacccagttggagcttcctggccgctttgtttacctaatcaaacaactaactcatcaatggtgggcgcccctcccccagcctcactgccgccttgcagtttga

SEQ ID NO: 872974 - DNA, 628 bp, Homo sapiens
tctttgtggttttatctacctttggtctttgatgatggtgacgtacagatgggtttttggtgtggatgtcctttctgtttgttagttttccttctaacagacaggaccttcagctgcaggtctgttggagtttgctagaggtccactccagaccctgtttgcctgggtatcagcagtgatggctgcagaacagcagatattggagaactgcagatgctgctgcctgattgttcctctggaagttttgtctcagaagagtacctggccatatgaggtgtcagtccgcccctacttgggggtgcctcccagttaggctactcgggggtcatggaccacttgaggaggcattctkcccattctcagatctcaagctgcgtgctgggagaagcactgctctcttcaaagctgtcagagaagtacatttaagtctgcagaggttactgctgtctttttgtttgtctgtgccctgcccccagaggtggagcctacagaggcaggcaggcctccttgagctgtggtgggctccacccagttggagcttcctggccgctttgtttacctaatcaaacaactaactcatcaatggtgggcgcccctcccccagcctcactgccgccttgcagtttga

SEQ ID NO: 872975 - DNA, 568 bp, Homo sapiens
aaaatcagtgtgcaaaaatcagaagcattcttatacaccaataacagacaaacagagagccaaatcatgagtgaactcccattcacaattgcttcaaagagaataaaatacttaggaatccaacttacaagggatgtgaaggacctcttcaaggagaactacaaaccactgctcaatgaaacaaaagaggatacaaacaaatggaagaacattccatgctcatgggtaggaagaatcaatattgtgaaaatggccatattgcccaaggtaatttatagattcaatgccatccccatcaagctactaattactttcttcacagaattggaaaaaactactttaaagttcatatggaaccaaaaaagagcccgcatcgccaagtcaatcytaagccaaaagaacaaagctggaggcatcacactacctgacctcaaactataccacaaggttacagtaaccaaaacagcatggtactagtatcaaaacagagatatagaccaacagaacagaacagagccctcagaaataatgctgcatatctataatcatctgatctttgacaaacctg

SEQ ID NO: 872976 - DNA, 580 bp, Homo sapiens
cgtttccactgtccatcagttgctaagtagccatgtgccccatctaatgtaatctaatttatcatggaattgtggtttaagctggacattaagaattgcaaataaatggcttttgcctaagattaatagtaacatattaatatttttcttccatctgcaaaagtaacattaatgaaaatcaaatgttaaaattctataattattagtaaagtgttttattaagtaccttatacatctggaattactcyttaattctggaaataatttacgtagactcttctctacataagattaagatttcataccatgatatagatttatgcaatataattgttgccttttgaattaataatatttgaatttgagctgcaagtttttaaaaaagtacttcaaagactaattcaccttcatagataaggcaaatagtctaatcaatttatggagaatgtatttagaatatgtaacagcaagtggcaggaggtactttagagttcaagactcatgtgcccatcactctgctagaagcacccataaatatggaatcatgtacttgttgaaaatgtcactgatgaaaaatctt

SEQ ID NO: 872977 - DNA, 580 bp, Homo sapiens
cgtttccactgtccatcagttgctaagtagccatgtgccccatctaatgtaatctaatttatcatggaattgtggtttaagctggacattaagaattgcaaataaatggcttttgcctaagattaatagtaacatattaatatttttcttccatctgcaaaagtaacattaatgaaaatcaaatgttaaaattctataattattagtaaagtgttttattaagtaccttatacatctggaattactccttaattctggaaayaatttacgtagactcttctctacataagattaagatttcataccatgatatagatttatgcaatataattgttgccttttgaattaataatatttgaatttgagctgcaagtttttaaaaaagtacttcaaagactaattcaccttcatagataaggcaaatagtctaatcaatttatggagaatgtatttagaatatgtaacagcaagtggcaggaggtactttagagttcaagactcatgtgcccatcactctgctagaagcacccataaatatggaatcatgtacttgttgaaaatgtcactgatgaaaaatctt

SEQ ID NO: 872978 - DNA, 534 bp, Homo sapiens
acttttaaaaaatatttcttctttatttttgtctgatgattagttcaaaagaccagtcttcaagctctgaaattatgttgtctactttgtccagtctgttgataaagttttcagttgtattttgaaattccttaagtgagtttttttwattctagaagttctgattgatttcttattaagatgtttatctcttccttcatttcccagattgatgtagaagtttctttttgttgatttcaaccttgaatctcattgagcttccttgcaacccaagctttgaattgtttattgtcatctctgagttttcaatttggtaggaagcattgccagagagctcgtgtgatcctttggcagtgtcactgcattcagatttctcatggtgccaaaattcttgcgtgggtccttctcatctggagatgctagcacttctaattagtgtaattatttttgttttggtaggatttttctcttttttttcctttcctataatattattgttatttttttcttctttccctttccctcctccctagg

SEQ ID NO: 872979 - DNA, 534 bp, Homo sapiens
acttttaaaaaatatttcttctttatttttgtctgatgattagttcaaaagaccagtcttcaagctctgaaattatgttgtctactttgtccagtctgttgataaagttttcagttgtattttgaaattccttaagtgagtttttttaattctagaagttctgattgatttcttattaagatgtttatctcttccttcatttcccagattgatgtagaagtttctttttgttgatttcaaccttgaatctcattgagcttccttgcaacccaagctttgaattgtttattgtcatctctgagttttcawtttggtaggaagcattgccagagagctcgtgtgatcctttggcagtgtcactgcattcagatttctcatggtgccaaaattcttgcgtgggtccttctcatctggagatgctagcacttctaattagtgtaattatttttgttttggtaggatttttctcttttttttcctttcctataatattattgttatttttttcttctttccctttccctcctccctagg

SEQ ID NO: 872980 - DNA, 628 bp, Homo sapiens
tcttaccaactagtgaaaagaaaatgcatcccatgtttaccacgtagacacagcctcagctggaaatagaagttctcctggagggcacccctctttctgctgctgctgagtctcttttggaagaggaacttgcaaactgcatagtgcagctatacagggaaagcagcaggaggaccctacccatttataggatggcctgaattagttgagtctgaaactaaacatggtttaccaggaacaggggaagaattttattgccgaatgttttaagacatgtcacaagacatagtcaatgtgtgcaaagtcacatataataaatgtgtactataaatctcggctttacaccatatagacaaattttattactagaaaattatttccacttcgttaaggaaccagaacgawagttacagaagcttatttcaaaggagcactaatttactttatagccttgggttttgtcccagtactgggaactaacagtgctctgacttcttccagttgttggcgggtcctggtttgaccatgtgaaaggatggtgggctgcaaaagacatgcaccggatcctctacctcttctacgaggatattaaaaaagtaagtggcactgagacttataggtcagaccc

SEQ ID NO: 872981 - DNA, 594 bp, Homo sapiens
ttgaaaatgtttgctcattctagtgttttactttattttccttatgataaataacttttcctccataaatttttatttctaagaaaaatatttcaaactaaatgctttacaagtggttcattttcttcccctaacaaaatccaatttggtcagataaactactaagtgttgagcgtggacatctgttagagtagcagattcagtttttggacacattttaattgtacacttcatgaattttaatttaaagaaagccaccgagattgaaaagattgaaatcttgagggcagctacatctgttaatgagcatttgtccatttcatgwtattttaaaagaataaactgccttgattacagaatcattcaaaaagtacatttagcttgtcgtgttgaactctcataaaggaattttgaatttttataatattattttgtttttaaatacttagctcttagttgaaagttttgttgtacccccttcctccttataaactgtgtactatgatgttgctagcccataacagttaaaaattttccacattaaatgctctggcttaaacatacatataattatataactgctaaaaatgattt

SEQ ID NO: 872982 - DNA, 582 bp, Homo sapiens
aatctctttttctttataaatttcccagtctcagttaattcttcttagcagtatgaaaatggatgaatgcaatcccattcgacaagtggttcccacatccttcccccattcccacccacagtgacacatctcatcccaagagatgagtatggctaacacaggggtagaggctttggtgtatctttttccatacagttgttgatggacaaaacattttttacaaagacaggatcacaccaaacacatcattttgtaatatgctgtttcgctcactatatgatcagttattcagtgtcctaacatatgtacaaaacattatttattaatttgagaaatccttaaagtgtgttgggactatcataggtctacttttctatgtttttgaagggttcaattatcacatatgatagacccagaaacttgcacaggragcccccatttaaaaattgactgcgctcaaagtatactttcagtcttttgaaacttgaaagatattttcccaaaaaacaatgctgaaatgagtactaggttctcaagattagagtaatatctacaatgaactcacaaggtagctgaaacacc

SEQ ID NO: 872983 - DNA, 611 bp, Homo sapiens
tggatattgctgtttaaacagtagatttggcatagatgatggtggcacaatggttgtaaaggaaaagaagcagaacacctcagtttgttcaattctctcattggggttttcagttgtatccagaatttaaaacagtaaaatttaagagtgtgaacagcaacattcacactttgtttagtaagtacaaagttgtgctcatacaggaagtttactgactttgaataataactttaaaaacaaaatttactcttttctaagtgttaattatttgttttaaaatttaagaatgaatcaagaaataaaacattacaccagtggtatgatttagtaattgtctgacttatactttttgtagacattttagttttatttaaattggcattctgwtttttttactggtcttgagtctatacacaaaagttgaataaaagaaaagtttcactgactacatttctttactattattattacttgtctctattcatgatcaacactgaaaataattttgttgtatacggaagtaatgttgatatggttaggctgtgtccccacccaaatttcatcttgaattgtagctcctataattccctcatgttgtgggagggaccccg

SEQ ID NO: 872984 - DNA, 644 bp, Homo sapiens
ttaatatatgcaagtcaataaatgtgatacaccacataaacagaattaaaaacaaaaatcacatgatcatcttgatagatccagaaaaagcatccaacaaaattcatcatcccttcatgattaaaactctcagcaaaattggcatagaagggacatacttcaatgtaattaaagccatctatgacaaatccacagccaatctaacactgaatggaaaaaaagttgaaagcrttctctctgagaatgggaatgagacaaggatgcccattctcaccactcctcttcaacatagtactggaagtcctggccagagcaatcagacaagagaaagaaataaagggcatccaaatcggtaaagaggaagtcaaactgtcactgtttgctgatgataggattgtttaccttggaaacccttaagactcctccagaaagctccttggtacttcagaatatgttagatcttgacctgccagggtgtgtccagaggaaggtaactgaagtgacagggatcttaaaattatgtagcataagaaacatttaaagaatcttggaaaaaagtagacttggggaagatataattcttcaactgtttaaaaagttgtcatgaaaagcagaatgagcttattctatatggctccaatgaa

SEQ ID NO: 872985 - DNA, 644 bp, Homo sapiens
ttaatatatgcaagtcaataaatgtgatacaccacataaacagaattaaaaacaaaaatcacatgatcatcttgatagatccagaaaaagcatccaacaaaattcatcatcccttcatgattaaaactctcagcaaaattggcatagaagggacatacttcaatgtaattaaagccatctatgacaaatccacagccaatctaacactgaatggaaaaaaagttgaaagcgttctctctgagaatgggaaygagacaaggatgcccattctcaccactcctcttcaacatagtactggaagtcctggccagagcaatcagacaagagaaagaaataaagggcatccaaatcggtaaagaggaagtcaaactgtcactgtttgctgatgataggattgtttaccttggaaacccttaagactcctccagaaagctccttggtacttcagaatatgttagatcttgacctgccagggtgtgtccagaggaaggtaactgaagtgacagggatcttaaaattatgtagcataagaaacatttaaagaatcttggaaaaaagtagacttggggaagatataattcttcaactgtttaaaaagttgtcatgaaaagcagaatgagcttattctatatggctccaatgaa

SEQ ID NO: 872986 - DNA, 644 bp, Homo sapiens
ttaatatatgcaagtcaataaatgtgatacaccacataaacagaattaaaaacaaaaatcacatgatcatcttgatagatccagaaaaagcatccaacaaaattcatcatcccttcatgattaaaactctcagcaaaattggcatagaagggacatacttcaatgtaattaaagccatctatgacaaatccacagccaatctaacactgaatggaaaaaaagttgaaagcgttctctctgagaatgggaatgagacaaggatgcccattctcaccactcctcttcaacatagtactggaagtcctggccagagcaatcagacaagagaaagaaataaagggcatccaaatcggtaaagaggaagtcaaactgtcactgtttgctgatgataggattgtttaccttgraaacccttaagactcctccagaaagctccttggtacttcagaatatgttagatcttgacctgccagggtgtgtccagaggaaggtaactgaagtgacagggatcttaaaattatgtagcataagaaacatttaaagaatcttggaaaaaagtagacttggggaagatataattcttcaactgtttaaaaagttgtcatgaaaagcagaatgagcttattctatatggctccaatgaa

SEQ ID NO: 872987 - DNA, 682 bp, Homo sapiens
agtgtaaaagtgttcctatttctccacatcctccccaggacctgttgtttcctgactttttaatgattgccattctaactggtgtgagatggtatctcattgtggttttgatttgcatttctctgattgccagtgatgatgagcattttttcatgtgttttttggctgtataaatgtctttttttaagaagtgtctgttcaggtctttctcccactttttggtgggttgtttgtttttttcttgtaaayttgtttgagttcattgtcaattctggatattagccctttgtcagatgagtagattgcaaaaattttctcccattctgtaggttgcctgttcactctgatggtagtttcttttgcaggagctctttagtttaattagatccgatttgtcaatgttggcttttgttgccagtgcttctggtgttttagacatgaagtcctttcccatgcctttgtcctgaatggtaatccctaggttttcttctagggtttttatggttttaggtctaacatgtaagtctttaatccatcttgaattaatttttgtataaggtgtaaggaagggatgcagtttcagctttctacatttggctagccagttttcccagcaccatttattaaatagggaatcctttctccatttcttgtttttgtcaggtttgtcaaagatcagata

SEQ ID NO: 872988 - DNA, 646 bp, Homo sapiens
tttatctgagcctgtattaaaacagaggagagactgacaaagctgatcaaactacatttgacataacttgaggctggatatactgtgatggctggccctcagttttatatgaacttccctcattataactttttttgctctatctcagggacaaacctctgcccatgtacttaaatgaaaatgaacattccctaccttcctgttattgcaacatttgacacagttccttaagtatcaagacygctcagcattttttagtttttctcttcccacagtcatcgatctcatgtctttgcatgtaaaagctttgcttgaccacctattccaagaaatgttctggcatggaccctgagcatttctctgttgcaccaactgctcttaataaagtattttctttattaagaaaatccggagatgtgtctgtgcttccttgacagtaaatacaactaatagttatcttcctaagctgctaagggtgtactgggatagagtgggcagtttctgggggaaggagtaacagagtgtgaacaggttaaacaatgttcccaaggctacaatgctagtaagtaattgatttaggatttagaatttttaattgatatatctaactcaatagcccatcttttctcaatatattatgaggaag

SEQ ID NO: 872989 - DNA, 677 bp, Homo sapiens
tggcactttctttaagggtgaaaacattttctaatatgagctagaggtaatggtggaatgtactaaatgccaccaaaatgtacaccttaaaatggttgattttatattatattaattttaatttcaagattttaaattaattttttatttttaatataatttttaaaagttttacatttaaaactttcaattaaaaaataaacattacaggagaaacgatgacaaaatatatcctagaaaaagtaaacacaattcctgaaaaaatacatgttgttgcttatgatcaatatctttttgcttctcatagtttgtttgaaagttgctacaccccgaagcttatggaaaactttaaaagttttttaaaaaaataaagaagacccatgtcatccccatgtctattttattttcaccmtatggtatcccgttaacttgtggtgatgactagtagagggcacagagggaaaggccattgtgaagcttggggtgcctactttccatgtggtaaagaagggtaaagtctatttcctatttggtaagataaagatacacaatgttctcaatgtacaattaataaatgtttggagctacgtacctttctgtgtgctgttctgtttccggaaatttcccatgactcaaaaatgttatcagatgacactaccctcaaaagggacggataa

SEQ ID NO: 872990 - DNA, 646 bp, Homo sapiens
ataagagtctcaaacaaaatcatatagcaagcagcatacaggaatctgtagatgcattcacattaagatcagaattaaaagagaagaggccagaaatgcttacgggatgtggagaaattgagaaaataataattttttcagggaaagacaacatgctgatcctggttatattgatataaagataaatagtggggctgggggcagtggctcatgsctgtaatcccaacacattgggaggccaaggtgggtggatcacaagctcaggaatttgagaccagcctcgccaatatgatgaaactccatctctactacaaatacaataattagccaggtgtggtggcatgtgcctgtagtcccaggtattcgggaggctgaggcaggagaatcacttgaccccaggaggtagaggctgcagtgggccaaaatcgcaccactgcacttcagtctgagcaacagagcaagactcaatctcaaaaaaaagatttttttttttttcataaaaagaaaaagataaatagtgggccctaaactagaaattctggcaaggtggaaacctcaggtacaattctaagccttttgaagttgttaaaatggaaaaaagctaaaattgactaagacctaacaaaagataccacatagacagggg

SEQ ID NO: 872991 - DNA, 644 bp, Homo sapiens
gctctgtccttttgacttggctgggctcagtacacccagctctcccaagctggcattgcatgctggcagctctacagttctggggtctcagtggcagtcccactaccatggcttcagaaggccttgccctcttgggaactctctgcagtgacctcacttccacaatgccactagcattgccctggtggggactttgcagtggccgagctcccttgactagatattactgtagtgggactctctgtgatggcctcacttccatagctccactargaattgccttgatgggggctctctgcagcagctacaatcctgtatttctgcttggcattggtctagtgagacttctctgcagtggttctgcccctgtaattagtctctgcctaggcccccaggcttttaacaataggaatatctttttaagtccagttaggggctgccaagcctccacagctcttgctttctgtaagcctgcagaattagcaccatgtggatgccaccaaggtttatgacttgtactttcctgagctgcagcataagccatacctgaggcttagaagtgctgtgctgggatgcaaatagcactctgggtctgtcccctgaaatattctgccctcctgtgcccttgagcctatgatgggagt

SEQ ID NO: 872992 - DNA, 698 bp, Homo sapiens
cattatcctctacttttacccagcaacctgatctcccttcaggctttcctgtttctaagaatgtactgggagtctgtttttcttacactctcaaaattctcttggctcctttcttcatcctgtgcctttcctggccaatgaatccttaaattctttttttgtgtgtgtgagacagggactctgttgccaagggtggatttcagtggtgcaatcatagctcactgtaacctcatatgcctctggcttcagcctccccagtagctaggactacaggtgtgcactaccatgcctggctaatttaaaaaaaaaaattgtttttgtagtggtctctctatgtygcttatgctggtttcaaactcctggcctcaagcagtcttctgccttggtctcccaaagtgctgggattagaggtgtgagccaccatgactggctttaatccctaaattctgtatggactgtaaatactgttatggactgagttgtgccccaccccatccatatgttgaagttctaagtgcccgtgtgactgtttaaaaatagggcttgtagcaggtaattaaggttaaacaaagtcatcagagtggggccctaatccagtagggttggtggcctcataagaagaggaaaagagagttctctaaatttccccacccatcttcatgtctttctttctccgccatgtgaggatatagtgagaa

SEQ ID NO: 872993 - DNA, 672 bp, Homo sapiens
acacatcctttgaaatctaggtggaaggtgccaagcctcattcactcttgcactctgtgcacccgcaggcttaacaacacatggaggctgccaagacttacagcagtttgtgctctccagagcagtggtatgacagtgtctggggtcctttgagcacaggctgcagccagagcttccagtgcagtacagtatcctaaggctgtgccaggcaatggggccctggacctggcccacaaaaacattcttccctcataggcctctgggcctatgatgggaggggctgccatgaaggtctctgaaatgccttcaaggcctttttcccattatcttggctgtgagtgyttggtggggtttcattatgcaaatttctctagcaagtggttgttccacagcctgcttgaattcctctctcaaaaaaagctttttctttctctgccacatggttagatgaaaaattttctaaacttttatgctgtgcttcccttttaaatataaattccaattcttaatcttttatttgctcctgcttctgagtgtaggttattagaaacagccaggcctcctcttgaatgtattgctgctcagaaatttcatctgccagatatgctgtatagtcaccatgaagctcaaacttccaaagacccctagggtatggacacaatccagccaagc

SEQ ID NO: 872994 - DNA, 672 bp, Homo sapiens
acacatcctttgaaatctaggtggaaggtgccaagcctcattcactcttgcactctgtgcacccgcaggcttaacaacacatggaggctgccaagacttacagcagtttgtgctctccagagcagtggtatgacagtgtctggggtcctttgagcacaggctgcagccagagcttccagtgcagtacagtatcctaaggctgtgccaggcaatggggccctggacctggcccacaaaaacattcttccctcataggcctctgggcctatgatgggaggggctgccatgaaggtctctgaaatgccttcaaggcctttttcccattatcttggctgtgagtgtttggtggggtttcattatgcaaatttctctagcaagtggttgttccacagcctgcttgaattcctctctcaaaaaaagctttttctttctctgccacatggttagatgaaaaattttctaaacttttatgctgtgcttcccttttaaatataaattccaattcttaatcttttmtttgctcctgcttctgagtgtaggttattagaaacagccaggcctcctcttgaatgtattgctgctcagaaatttcatctgccagatatgctgtatagtcaccatgaagctcaaacttccaaagacccctagggtatggacacaatccagccaagc

SEQ ID NO: 872995 - DNA, 581 bp, Homo sapiens
aacaatttctgtaatttgaaaactcaagtgtaactttaacaagggagaagcataagaaatataaaaattgtgaattttcagctcacaattaattttgataatccaatagctaaaagatgtctgctattttcatcttgtattccttgtgaggtataatcaggcctatttgagtttgacataggctttataatgttatctgaccatcacaatatgatttataatatggaggcatgaagtcatttctcattggggcaggagtgtggcaagggggaagaagagctttaccaattaactcaagattatttggtgacatttctcttaccttttaggtgaggagaaagagacagaggatggagaattggtgcttttagtatgctgatacattaagctgcctggaagcagatgctaaatcctattgaaaataattttatttgcgttttgcttagggyattgtttagcaaaatactacacaaaaagtcttgacctgtgtgtttgaaatggcagatgttcacagtgaggactgagccttggggcaacatcaatcttcacaattctgcacctatttgctcaataactggctt

SEQ ID NO: 872996 - DNA, 555 bp, Homo sapiens
cacaaaggtgaggcccagaatctgtgttttagcacagctctgtggagtaaaaaaaaaaaaaaaaaaaaaaaaaaaccaaaagccaggggtagccacaaccttcatgtctactttcatagccccttccccatagatggtgctggggggcagtgcaggttcttatttcataacctgttatggtggtggttgttttgaaccacagatgcaaaraattaaccttctcataatcctcacttctttggctcattatcatcagatcatgcaaatcttttttcatgctttacgttattttaactttttttcctttcatttctgagctccacttccattctcctgcccccacatgccctcattgcaatgtgttgtagagatgcccatactgttctgtttctgccttttttcactcaacagtttagagtttctaacagctgcacaggacagcaagattccttctgccacctgtgatgtgtctccgccccttgctgtgaacacctcagttgtcttgactcccaccatcataaataccgagctcaagcactaaactcagattcaccg

SEQ ID NO: 872997 - DNA, 588 bp, Homo sapiens
gtgtcctttcaataatgggaaatacttatttcaatatatgtggcagatattttaatttaactaaattgtatatatcactcatataaagattccttgcaaaagtgctttttggttaaaggataaatcaactgtctttgttttttaagacagtagaaaaatgtctttcttataataaacagctctgatgtacaacaggtcacttcttcccagtccctaacaaagaataattcaaaasttaacatttctactaattgaactttgacatatcatcagccattttagtgagtaaaatgctcttatggaatgtattactattaaattttataactcttaattacagaacaccatgcatctcaagcaatattataatagttatttttggcttccagaagacttctgactttgcaattgtgttgaagagaaaaataaaattgatgtgctttgttgcaaattaaactgtgtctccccaacatacatattgaagtcctaacctccagtatttgtaatggtgaccttatttggaaagtagggtctttgaagatgtaatcaagtgaagataaggtcatacatgattagggcgagccctaa

SEQ ID NO: 872998 - DNA, 588 bp, Homo sapiens
gtgtcctttcaataatgggaaatacttatttcaatatatgtggcagatattttaatttaactaaattgtatatatcactcatataaagattccttgcaaaagtgctttttggttaaaggataaatcaactgtctttgttttttaagacagtagaaaaatgtctttcttataataaacagctctgatgtacaacaggtcacttcttcccagtccctaacaaagaataattcaaaagttaacatttctactaattgaactttgacatatcatcagccattttagtgagtaaaatgctcttatggaatgtattactattaaattttataactcttaattayagaacaccatgcatctcaagcaatattataatagttatttttggcttccagaagacttctgactttgcaattgtgttgaagagaaaaataaaattgatgtgctttgttgcaaattaaactgtgtctccccaacatacatattgaagtcctaacctccagtatttgtaatggtgaccttatttggaaagtagggtctttgaagatgtaatcaagtgaagataaggtcatacatgattagggcgagccctaa

SEQ ID NO: 872999 - DNA, 596 bp, Homo sapiens
aatgctgactttaagatcaagcacttgggagcactcccttttttcttttattagtatgtatcctgatttagacatctttttcattataatcactgtcaggtttattgattaaaatgcttgtttttattgtgttctattttcatcattctattttttcttttctgatagtaagactaactaaacaagtmatttcaattctcacttgatttaattaccttgacaatcttgattctcaaaatcaggctcttccaggtccaaattagctttcttgcttgctttcttggtttttcccttcttagcattgtttacaataatttcactgaattatttcataacttaaaccaaacgacagattatctttattataagaacatctacccatatgtgttgctttgttataaaatctatcattttaccatttctatctctgaaatctgaagccatgttcaaagctcctgaatgtatcaaaccttgtaatgacaaagtggctctcaagaggctatgtccaaaccataaaattatgaaagagaagtgcctacttttgttcttcagtgcaattaatagaatttgaagcagcaaattgaaaataatgaatt

SEQ ID NO: 873000 - DNA, 619 bp, Homo sapiens
agtggcagcccactgtgtcaacaggatatctccttgtggtccaaaagacacacattctttgtcagtgctacccatgtttaacatctgatttggggtaaaaaatctttaaaaaatagagcatacgaccaggcacggtggctcacaccagtaatcctagcactttgggaggccgaggcaggcagatcacctgaggtcgtgagttcgagaccagcctgaccaacatggagaaactctgtctccactacatatacaaaattagccgggcatagtggcacatgcttgtgatctcagctactcgggaggctgaggcaggagaatctcttgaacccgggaggcggaggttgtggtgagctgagatcgcaccattgtactccagcctgggcaaaaagagtgaaactccttctcaaaaaaaaaaaaaaaaatagagaataacytgagttatttggagaaaaacgttgtttgccttctttcatcagttgtaataagccatgaaatgccgtcttggagctatcatagcagcccagtgggctgctggcttcgggacatctatgggaaagtaattaaacttctgctttcttaaaaaatttaaaaaaacctcttgttcttcaatctttctggt

SEQ ID NO: 873001 - DNA, 675 bp, Homo sapiens
caattaaacctttttcttcttagtctcaggtctgtttttatcaacagtgtgaaaatggactaatatagtaaattggtaccagtagagtggggcattgctaaaaaggtacctgaaaatgtggaagcggctttggaactgggtaacaagcagaggttggaacagtttggaggactcagaagaagacatgaaaatgtgggaaagtttggaacttcctaaagacttgttgaatggcrttgtccaaaatgatgataatgatatgacaataaaatcctggctgaggtggtctctgatggagacaaggaacttgttgggaactggagaaaaggtgacccttgttacgttttagcaaagagacaggcagcatttagagacttgtggaactttgaacttgagggagatgatttagggtatctggggggagaaatttctaagcagcaaagcattcaagatgtcacttgggtgctgttaaaggcatttagttttacagggaatcagagcatagaagtttggaaaatctgaagcctgactatacagtagaaaacaaaaacccattttctggggagaaattcaagccagctgcagatatttacatacgtaacaaggagccaaatgttaatccccaagacaataaggaaatgtctatagggcatgttagagacctttgaggcaggctct

SEQ ID NO: 873002 - DNA, 566 bp, Homo sapiens
agacatggagtcaaaggagaccattttggaactttagggtttaatgactgtcctattggattttggacttgtgtgcaccctgtggcccctttgttttaacgaatttctcccatttggaatgggtgtatttacccaatgcctgtacctccattgtatctaggaagtaactaacttgcttttaattttactggctcatagatggaagggacttgccttgtctcagatgagacttcaaacttggacttttgggttaatactggaatgagttaagawgttgggggactgttggaaaggcatgattgtgttttgaaatgtgaggacatgagacttgggaggagccaggtatagaatgacatggcctggctgtgttcccacccaaatctcatcttgaattgtaatccaaattgtaaaccttatgtgttgggggagggaccttgtgggaggtgattgaatcatgggggcaattccctgatgctgttctcgtgatattgagtgagttctcatgagatctgatagttttgtgagaagcctttcccccttcactctgcacttctttcattctctct

SEQ ID NO: 873003 - DNA, 691 bp, Homo sapiens
aaaatattttaatgacaatttaaaaggagagagcgtattaattttcaacttaattggacactaactctcatcatccagaagcagggtgaaaaagagaatagaggttatggtgaagtgaaagtgaacacaatgcaaggcaaagaagaaagaaataaagtcactgtcagaaaaaaaaaccatgataattattacttccctatgaaactacacagactagatggactcagaatgggtgtttgcctgtgttaatgtcactgcattctatgccttaaatgtaccttcaaggatccctaggacaatcccaatttttgtaccttctggtctgggtctctttggcctatttctrtactctcttctttgtatctaacctggctctttcctcttataacttatttaatttattcttgtgctattattggcaatggtggagaataacatgtcacaacccttcctataaatatcttctcatatgcttgcagttcgtaaacctattctcaatcctgctatgaaccaagtagtatgattcaacaaccttctcccaccagtcctatgtactgagcctttaacaaggttttctgaaaagagaggtgtcaatttcactgtgttcccagaagtgacaggggtctattttttctccattcagagtggaaataataaaaagaggaagaatcacagtgaattgatttggggg

SEQ ID NO: 873004 - DNA, 595 bp, Homo sapiens
tgcccacttttacttaacactagtttagctcttctagtcaatgcaacaagaaaaatgaaatatttgaataatttaaaaaactatcattttttaagatgttaactttccaacataaaatcttaacataacacatgtaaatagtaaaatggctggttatcgaaagaaaagttcaaattcaaaagctttcytatatagaagttatattacacagaattcttgggcattgcgaaggcccacagacatatttaggatttgatgctggcagtcgtctgagaattcagtgaagaatgttactcagaatgcctccctagaacctctccaacatggtagtgtcaggataaagatactcctcagctttcaatgccatcttcctttagctcttctccaacaaccttctcgagtcccatcatgtttccactaagagtctccttaggacacttccagcttgtccacaaaactgagttgtgcacaacaatcattttattattattaaaattttgtgggtcaggaacttgagaaggccctagctggctggtttgtatttggtccttctaggcagctgcatttagatatcagctagacatcattatcagaa

SEQ ID NO: 873005 - DNA, 670 bp, Homo sapiens
taaatttgaattcctgcgttattcttatatgagtaataataaatacatgtatgttaatcacatttttatactacaattttgtatctcacttggttttttaaattatcattatcccatgttaatcgtaagtcattttgtaatacagacaatagctgcctgaatgcttcaacatcttccagtctgcagtgttcttcttaactattaacatctacacctgctaccaatcattaactctaagccttaaggcagcatctctttttagcttactttttgcatgcgggtaccatctctcttccttcagcatagctctatgattacacakgttgacaccaaagtcagagagccagataccaacttgctcatccaccaccgactagctgtgtgatttgcgataagtcacttacactccctaagcctccatatttttccctccgtgaaatgggtgtgaatccagactaaaaggtaaaatgcacaagtgtatagcatagtgcttagcacagagtaggtcatgggcttgcattgacttgtaaaagtagaaagtcaggaaaaatagcaggataaattatattgataatggtagttataataacatttctccaaacactattaacacaagattcttgagtatagtggactttatttaaagtctgaagataaatttacagcataa

SEQ ID NO: 873006 - DNA, 606 bp, Homo sapiens
ttatctgcctgattcaagcctagtccttctaacaactctacaatgaatttcttgcaacatcgtgataggaataaaacctatagccaagtctattattcacctgtcgaatctggactacttcttgtttctaatgcaatgcctcagctcctcatgggctcttgttgccaagattctagcatgyactgtggctgggtctgtccaagtcatttatgacagcagggatatttacctaatcaatagatacagatataagaccaaaatggaaaactctctaaggaaattaaaacaagtgtgtagtaccctatgctgtaacgtataccttttgcagtttcctctatgagcttgctgggatgcagtctcacaactccatagtgtttcttatgttcttccacctcccacttggtttccaaccccgatattgatccctactcacctacccattctatcttcattcacatgataaatgcaaacttcttttccgtgctcaagctctggcccaatttgttgcttgccatcttcccttttgttttttggcagagtaaattattcctgcctctgtggaagcttgaaaaacacatgattatagaagggcttcttacccaaatc

SEQ ID NO: 873007 - DNA, 586 bp, Homo sapiens
cccattatttaactacaacttcctatttttctactttaccttttaaaggtagcattctccaggtttttatatttgattgtctcattgtattagtctgttcttatgctgctaataaagatatacccaaaactgggtaatttataagggaaagaggtttaaatgacttacagttccacatgggtggggaggcctcacaatcatggtggaaggcaaatgaggagcaaagtcacatcctacacagcaacaggcaaaagagcttgtgyaggggaactcccctttataaaaccgtcagatctcgtgagacttattcactaccatgagaacagtatggggaaaacaacccctatgattctattatctccacctgaaccctcccttgaactgtggggattattacaattcaagatgagatttgggtggagacacagccaaactatatcagtccaccccagcccctcccaaatttcaggtcctcacatttcaaaaccaatcatgccttcttaacagtcccccacagtcttaactcatttcagcattaactcagaatccacagtccaaagtctcaactgaggcaaggcaagaccca

SEQ ID NO: 873008 - DNA, 513 bp, Homo sapiens
agtacacagagagtccccaatggtgtacagcctagtagagctgtgaccccatccttcagaccccagaatggtagatccactgacagcttgtagtgtgcgcctggaaaagccgcagacactcaactccagcctgtgaaagcagccaggagcagggctgtatcttgcaaagccaaaggggcagagctgcccaagaccatgggaacccatctcttgcatcaacgtgacctaagtgtgagacatggagtcaaaggagattatcttggaactttaagatttgactgccctgctggatttcaaacttgcatggggccgatagaccctttgttttggcaaatttctcccatttggtatggctgtatttaccraatgcctgtacccccattgtatctaggaagtaactaacttgcttttgattttacaggctcataggtggaagggacttcccttgtctcaaatgagactggactgtggacttttgagttaatgttgaaatgagttaagactttgggggac

SEQ ID NO: 873009 - DNA, 603 bp, Homo sapiens
tcttgtggtaataaataagtctcaggagagctgatgtttttataaggggtttcccatttctcttggttctcattttctctcatttgccaccatgtaagaagtgcctttcaccttctgccttgattatgagtcctccccagccacttggaactgggagtccattaaacctctttttctttataaattacccagtctcaggtatgtctgtatcagcagtgtgaaaatggactaatacatctctctgttctctctcttatgtctccctcttccactaatgagaacccaggtgattacactgatcccacttggataatccaagatagtcttcctatttcaaggtcaaccttaataacatatcttcccttaattctccttagccatgtaaccttacacagcagtccccaacctttctggcamcaaggactggtttcatggaagataattttgccacagactgatgtgggggcaggggagtatggtttcaggatgaaatggttccacctcagatcatcatatattagattctcataagaagtgagcaacctagatctctcatatgtgcagttcacaacagggtttgcgctcctatgagaatctaaagct

SEQ ID NO: 873010 - DNA, 553 bp, Homo sapiens
ttaagtgtaaaacccaacactataaagaaacagaagaaaatctaacagtatcattcaggacataggcatgggcaaatatttcatgacaagaactccaaaagcaattgcaacaaaagcaaaaattgacaaataagatctaattaagctaagagcttatgcacagcaaaagaaactaccatcagaatgaacagaaaaccttcagaatgggagaaaacttttgcagtctatgcatctgataaagctctartatccagagtctgaaaagaacttaaacaaatttgcaagaaaaaaaaaacctattaaaaagtggaaaagtacatgaacagacacttctcaaaagaacacattcatgcagccaataaacatatgaaaaaaagctcaacatcactgatgattagtgaaatgcacatcaaaaccacaatgagataccatctcatgccagtcagaatgctgattattaaaaagtcaagaagcaatagatgctggagaagtggagaaatagaaacacttttaaactgttgatgtgaatgggaattagttcaatcattgtgca

SEQ ID NO: 873011 - DNA, 514 bp, Homo sapiens
cgaatttactttgaaattattttgtttatttggtgggcatatacatcatgagctttctaaaggtcaaaagtagagtttgttcttggattctaaagcaatctgatttccatttacagtatgctttggtgaccctaaatgcagaagcaggcccagttaagtcatacttcagtttgtgtttkgtttaattttcccatgaagaaaatccctgctagattaaggcagtgctgaaatatcattttccctaaattacttctatctccaactaggttcataagagaatgctactcataagtgacatctgaactctgaatgttggtttcatgcccattttgttttcaaagctgtggaagcatcttagtcagctagtttcttatctgaaaattgaggcaaaggtcaaaaaagttaggactcctgggttttattaacatttacctggtagggatcctgaagctttattaattaatgtttgtaaaatcactgtgcgcttcgtagagaagagactccagtaaattat

SEQ ID NO: 873012 - DNA, 573 bp, Homo sapiens
cacacacacatttgttagagtatttattagttatctaatatatgcaatccataaaaccaaactaacacatttttctaacaaactttaaaagactaaaagtattcaatacaagtaaactatcaccataggaatatttaatgaatgtacatcaggaagataaaaattgataccaaagaaaaagctgcaatgtcagaagaaaatgggagtgaaccaaaaaaaaaaagaaagaaaaagaaatggcaaacatatgggtaaatataaacaaactctgactttacaaaattaaaatgacaattactaattttgtggattaaaaacacaatggaattaaaatagtgggcaagaataacatttaagacacacaaatcaatactatrtagaacgaattatctgaaaaagcaattaaattaaaaagcaataatataaaataaactctaaaaacatggcaaattcaaaaatatgttttcaaataattcatgagtcaaaggaaataatggaaaatttaaataaggaaaatacagagaatactatatatcaaatttgtgggaagtactgaagaagttcatagtggaa

SEQ ID NO: 873013 - DNA, 573 bp, Homo sapiens
cacacacacatttgttagagtatttattagttatctaatatatgcaatccataaaaccaaactaacacatttttctaacaaactttaaaagactaaaagtattcaatacaagtaaactatcaccataggaatatttaatgaatgtacatcaggaagataaaaattgataccaaagaaaaagctgcaatgtcagaagaaaatgggagtgaaccaaaaaaaaaaagaaagaaaaagaaatggcaaacatatgggtaaatataaacaaactctgactttacaaaattaaaatgacaattactaattttgtggattaaaaacacaatggaattaaaatagtgggcaagaataacatttaagacacacaaatcaatactatatagaacgaattatctgaaaaagcaattaaattaaaaagcaataatataaaataaactckaaaaacatggcaaattcaaaaatatgttttcaaataattcatgagtcaaaggaaataatggaaaatttaaataaggaaaatacagagaatactatatatcaaatttgtgggaagtactgaagaagttcatagtggaa

SEQ ID NO: 873014 - DNA, 631 bp, Homo sapiens
tctttctcttgcttgattgccctggctagaacttccaatactatgttgaataggagtggtgagagagggcatccttgtcttgtgccagttttcaagagaatgcttccagattttgcccatgcagtatgatattggctgtgggtttrtcatagatagctcttattattttgagatacgtcccatcaatccctagtttattgagagtttttagcatgaagcactgttgaattttgttgaaggccttttctgcttctattgagataaacatgtggtttttgtcattgattctgtttatgtgttcgcttacatttattgatttgcatatgttgaaccaggcttgcatcccagggatgaagccaacttgatcgtggtggataagctttttgatatgctgctgttttaggttcgccagtgttttattgaggattttcgtgtcaatgttcatcagggatattggcttgaaattttctttttttgttgttgtttctttgacaggttttggtatcaagatgatgctggcctcataaaattagttagggtggagtctctctttttctattgtttgggatagtttcagaaggaatggtaccagctcctctttgtacctctggtagaatgtggctgtgaatcc

SEQ ID NO: 873015 - DNA, 567 bp, Homo sapiens
aaaacagaattttggtaccagagttagaatatgtctgataggtatttgaaaatagtcatagaatgattatgtaacttgtccacgttggcagaaattatctctcccatttctggtaggaacttgagcacaatttgactttgaattatctactcttttgctactttacattaaaactatttgataactgatmattaaacctactttaacatggttgatgttcttcatttgtgagccttcatatgatccttggtatcaatgtattaatcactcctttattttgctaatacaattcaaggaaatcatcacattagcaaaaacaaaagtataatgaacagcctgcctgcattaaatttatgtttttaattttgtctgttgtctatgtcatgctttcagcgatcaacagtaaaagataataggcagcctggcttttttagtcgaaatattcttaagttccacttgactaaaatctgcttttaatgatttctgggatttactctttttcttccaaatcttttttccccacttcttatgtttaacacaattacacttgattgatgcttagcacat

SEQ ID NO: 873016 - DNA, 642 bp, Homo sapiens
ccaaaggtggaaaaatgaaactggatcctcatctctcaccttagacctgaaaccataaagattctagaagataacatggaaaaaacccttctagacattgtcttaggcaaagacttcatgaacaagaacccaaaaacaaagataaataggtgggacttaaactaaaaagcttctgcatggcaaaataataataatcagcagagttaacagacaacccacagagtgggagacaatctgcacaaactatacatcttacaaaggactaatatycagaatctacatgaaattcaagtcagcaagaaaaaaaaaaatcccatcaaaaagtgggctaaggacctgaatagacaattctcaaaagaagatgtacagatggccaataaatatatggaaaaacattcaacaccactgattatcagggaaatgcaaatgaaatccacaatgtgatatcaccttactcctgcaagaatggacataatcaaaaaatgatagatgttggcatggatgtggtaaaagggagcacttttacactgttgttgagaatgtaaactagtacaaccattacggaaaacagtgtggagattccttaaagaactataagtagatctaccatttgattcagcagtcccactcctgggtatctac

SEQ ID NO: 873017 - DNA, 642 bp, Homo sapiens
ccaaaggtggaaaaatgaaactggatcctcatctctcaccttagacctgaaaccataaagattctagaagataacatggaaaaaacccttctagacattgtcttaggcaaagacttcatgaacaagaacccaaaaacaaagataaataggtgggacttaaactaaaaagcttctgcatggcaaaataataataatcagcagagttaacagacaacccacagagtgggagacaatctgcacaaactatacatcttacaaaggactaatatccagaatctacatgaaattcaagtcagcaagaaaaaaaaaaatcccatcaaaaagtgggctaaggacctgaatagacaattctcaaaagaagatgtacagatggccaataaatatatggaaaaacattcaacaccactgattatcagggaaatgcaaatgaaawccacaatgtgatatcaccttactcctgcaagaatggacataatcaaaaaatgatagatgttggcatggatgtggtaaaagggagcacttttacactgttgttgagaatgtaaactagtacaaccattacggaaaacagtgtggagattccttaaagaactataagtagatctaccatttgattcagcagtcccactcctgggtatctac

SEQ ID NO: 873018 - DNA, 609 bp, Homo sapiens
gtccaagtttctgacccatagaatctgtgagcatgatgaaatggtggtgttacctgccgctaggttttgagatgatttgttacatagcaaaaataatcagaagagtctttcaaggctgaccacaaattaatgtaatgtaatgtcaacgaaactttttgtgttaacacggaattgtgactgaagccacaaagctgacaaagtgaggtgttataagtgtatcaactctcattagagctgcccaaaatagggccagccaagagcagcagcacaatggrccattgtgcaatcacaccagcccccaatgtatttgacaggacacttattttgcaaatcttcatttatcgttaagtataaacaggtgtttacctcaccttcaatggtcaacaacctaaggtgacttaaaaaaaaatactgataccaagtccctccccagatggattgaatcagagctacttagggtggagccaaaaggcttgttttttaaagcttcccaggtaattctaatatgtgtgtagtcgggtatgagaacgattgcaagcaaaagcagctgagggacgctgtccaaggagtaggctcagtagcacgaactgcaaatacttgagaagggaa

SEQ ID NO: 873019 - DNA, 624 bp, Homo sapiens
tgagaccagtctgggcaacatagcgagacttcatctccacttaaaaaaaaaaaaaaaaaaaaaaaactcaaatgtggtggcgcacgcctttggtcccagctacttgggagcgctgaggtgggaaatctcttgagcctgggaaataacggctacagtgagctttgatcgtgccattgcactctagcctgggtggcacagtgagaccctgtttcaaaaaaagtgaatatatttaaggtatacagcaggatgttttaatatagagagttaaatgactgctatcgttagctaattaacatacccatcttctcaggtagttaccttgtgtatgtgtgtggtgagaatacttgagatatactctcctatcaaatttcatgtatataatatagtattactaactatggtcactatgctatacattagatctctagaatgtattcaccctacatacctaaaattttatacactttgaccagcaccttccctttcttytctcccagccccttcccctaataaccaccattctactctctgctactgtgaattcagctgtttgagattccacatctaagctatcttctttattagccattgctaaagagtcactgataagcctgcttcctgtct

SEQ ID NO: 873020 - DNA, 522 bp, Homo sapiens
ataggagaaattggccaaaacaaaggggttacaggccccatgcaggtctgaaattcctgcagggcagtcaaatcttaaacctccaaaatgatctcctttgactccatgtctcacatccaggtcacaatgatgcaagaggtgggttccgacggccttgggcagctccgcccctatggatttgcaaggtacagttcccttcccaggtgttttcacaggctggtgttgcctgaggcttttccagacacacagcacargctgtcagttgatctaccattttggtgtctggaggacagtggcccctcttctcacagctccactgggcagtaccccagtggggactctgtgtaggggctccaaccccacatttcccttttgtaccgccctagcagaggatctccatgagggctccgtgcctgcagtaaactttttcctggatatccaggtgttttcatatatcttctgaaatctaggcagaggttcccaaacctcaattattgacttctgtgtactcataggctcaat

SEQ ID NO: 873021 - DNA, 683 bp, Homo sapiens
tatttattgcagtgacatgtaggttttccatgtgtgctgataaacaagagtttacagctctgcatggcacttcccatgatttgccccttgtattctgattctaacccagaagtgatgacaatcaccaagtgccaactgaaggaaaaagtcaatgaaatgtacagtaggattaacagaactaaaatttctgtcacttacatgcaatgaagygtttatgagagaaaagtagagaatgggtcagaagtgtgcaggtaatgcaaaacacgtagtaaatggtttcacaaacaagcatataattatatacattgacatatactttgtgaataacaagatgtaataaattaagacatttcaggcttaatttagattgaaaggctatgtgaggtctctaagaattaacactgaccataagatatgtagtcattaaggacaattataaataaaaataacatttcacttttttaatggcttttgaacactgtgatatcataagaatagctaggaaaatagtggacaggaagatctatgaaggcaattagtcttatgaaaaattaaagcatggcacaaatccactacaacgaaaacagaagcaggaatgcacagaaaaataatagaatcaaaaataaagtcaagaaatagactcaactgcagtacatatatatatatatatataaaatatatat

SEQ ID NO: 873022 - DNA, 655 bp, Homo sapiens
atttcaaacttaataattatattttcccccagtagatatgtgaaatgtatataaacaattacaataacaaaatatggccaagatgccctgatagaagtgtgtattaagtaacagacattttgagagaagagatattgtcttctgtgtttattggaggaggaagagasaagacattgaatatgtccataaaaagaagatagatatcagctgaatttgaaaaaagtaataacacacataaagagggtattctgagcattacagacatggccaacattctaatcaaatactgttgttgaggaattgacaaatttctaaaatattttaatggtttctattaactatcaaattacctttaaggcatttgagatttactgatactcaagattctctgtaagctagtctgaaaaaatgaaaaccatccttgccaccctacaattcctgttttttaccttctacaccttatttctgatgttgtttcctcatattatcatttcaacataatcgtatctgaattttgtcaagttataaaccagtgtctgaatatgtaaaacactactactgctttttcattttgcttgttctggagcctcctagttttaagtagccagcaactagacactgtcatttatctggatttaggacctatttatcactc

SEQ ID NO: 873023 - DNA, 430 bp, Homo sapiens
tctttccaggaaagataactttaaaaggaagaaaaagttgttaaaaaacatgatgctttaaaagtattgaagataaatttatacaactgaagggaagtgttggaagtgactgaaggataagtatgtagaaaactaagtaaacacagacataagacaaatattaactgaagcagctaaagaagcaagcaaaattgygtgagacaggaaaagtaaaattagcatataacgtgactcaactctgtaaaccttttcttaggagtgctctattcaaatttataatccggcaacttcaggctaatgaacgaacaggaggtaacatgagcttatggaagtgtgcagatttaccataaggctagtaaagtttgcatgagaccttagtctaatttgcatgagaccttagtcacgtgtttatacagtaaattttttttgg

SEQ ID NO: 873024 - DNA, 622 bp, Homo sapiens
gtcccagctactcgggaggacttcggaggctgaggcaggagaatggcgtgaacccaggaggcggagcttgcagtgagccgagatcgcgccactgcactccagcctgggcgacagagtgagattcgtctcaaaaaaaaaaaaaaaaaaaaaaaagattgtaatggtcttggataatacatgttttgaaaagacactcttagtaaaaacgaagaaytgaaaatagggagaaaacaggaaatcagttggaataaaaaatcaataattacttaataaatattttcaacaacacttggtgactaatggatgcattagctgacagaaatattaaccaattcgtttctaaatttgctagcttaaaatctctggattaattgacatgaattaatcacaaagcaattcaggagaaaaaaaatttatttgagggatatttgattcttgtctggaggtgtttatttagaaattcctgtttgacagactacaaaatatgttcaaatggaagttgaaattaagtactgaattcagaagggcagcctatagaaaaaatagacatttgtaggtaattaacattaggcagtggttgaaatcaaagaagagaggggttttccacaatggggaagaattc

SEQ ID NO: 873025 - DNA, 553 bp, Homo sapiens
gattggtgcacttacaatcctctaggtagacataaaagttatccaagtccccactagattagctagacacagagcactgattggtgcatccatgaacccggagctagacacagagggttgattggtgcctttacaatcctttagctagacacaaaagttctccaagtcccmactagattagctagacacagaacactgattggtgggcttacaaacctttagctagacacggagtgctgattggtacatttacaatcctctagctagacataaaagttctccaagtccccaccagtttagctagatgcagagtgctgattgatgcatccacaaaccccaaggtagagataaaagtcctccaagtgcccacccgactcacgagcccagctggcttggcctagtggatcccccactggggctgtgggcggacgtgcccaccagtcccatgccacctgcctgcactcctcagcccttgagcggtcgatgggaccaggtgccacagagcatggggcggtgcccatcggggaggctgggctgcgcgggagcccatggg

SEQ ID NO: 873026 - DNA, 667 bp, Homo sapiens
ctggagtttactttttactctactgtgttttttttaatttcttcccctttaagaatgcagctttaatgtttatagttcattgtagcctaatttgtctcttgttgcattcaaggatgaagactttatatgagttccttagttataggcagtctttgtatgatggctttctcaaatgcttgttgttgtagcaatgtgctcagtgtgtgagcaggttcactgtctggtttggggttggaatgacagaggtcccttgaagcttccttataccccagtggtctgcattgattgattgattkatttttccccagtattttatttactagtatgaacagttcagccttcataccagtagtggaggtgtccatgggtaaaaattggttgtgactaaagcaggtggctaaatgcaatactgatggtaggccgaggtctcagccttgacagaggcagctgggggagctctcagtgaaatgcactgaagtcttaccagaaataaggatgggaaccacctcagctgcccttccaggccagtagaaaggtgatccacctcttagtcacactcctgacccagtgttctggctatgcagatcgaacaggcacttcttttcatttgcaggtatgtcaatgttccataaagagaggatcgtgactctccccctgtgcaagtctg

SEQ ID NO: 873027 - DNA, 667 bp, Homo sapiens
ctggagtttactttttactctactgtgttttttttaatttcttcccctttaagaatgcagctttaatgtttatagttcattgtagcctaatttgtctcttgttgcattcaaggatgaagactttatatgagttccttagttataggcagtctttgtatgatggctttctcaaatgcttgttgttgtagcaatgtgctcagtgtgtgagcaggttcactgtctggtttggggttggaatgacagaggtcccttgaagcttccttataccccagtggtctgcattgattgattgattgatttttccccagtattttatttactagtatgaacagttcagccttcatrccagtagtggaggtgtccatgggtaaaaattggttgtgactaaagcaggtggctaaatgcaatactgatggtaggccgaggtctcagccttgacagaggcagctgggggagctctcagtgaaatgcactgaagtcttaccagaaataaggatgggaaccacctcagctgcccttccaggccagtagaaaggtgatccacctcttagtcacactcctgacccagtgttctggctatgcagatcgaacaggcacttcttttcatttgcaggtatgtcaatgttccataaagagaggatcgtgactctccccctgtgcaagtctg

SEQ ID NO: 873028 - DNA, 621 bp, Homo sapiens
aatgacaaaccaagcaaacagcctatttgtgggtgtaaggggcaactccagtaaaatcttagccacagaataacattctggatattatccatctgtgagactggttgtttgccacagctgtcttgggaatcagacctcctatgacagtcatgaattttaaaaagtatccattgacttctgacctgttggttttgagaaggtgagtaagcaaacagtaggatggtgactcgaagttaaatacatttcaaggaaaccctcaaggagaggtcagagcagtgaaactcgaaggcaaagcaatggcttctccgggaagaactatcattttcccagcggggcatatagattctccatacctttctatgaaaaccatgcagattacatacataatatttgtgtgtaaattgccttgaatttaaagggcacttttccacaaaagtmtaaagcattttcttgttcagagaagtagtttttctttgctcatcttccagatggatataccaaggcactgaaaaattgtgtgtagaataacgctacaactaattttctgggctttccattgaaccctttcttgatcaactgtactttgtatgcatacacatgcataactatgtgcataagatg

SEQ ID NO: 873029 - DNA, 616 bp, Homo sapiens
aacttttaaaaagataagaatttaaaaaacaagaattttaaaaagaaagaattaaaaaaaaaaaaaaaaaagattaaaaggccaggctcagtggagtggctcacgcctgtaatcccagcactttgagaggccgaggggggcagatcacttgaggtcaggacttcaagactagcttggccaatacggtgaaaccccatctctactaaaaatacaaaaattagctggacttggtggcgggtgcctgtagtcccagctacttgggactacaggaggcaggagaatcacttgaatccaggaggtagaggttgcagtgagtcaagatcgcaccactgcactccagcctgggcaacaaagagagrcaccatctaaaaaacaaaaacaaaaacaaaacaaaaaagcaagattagcacaaaagataataattgaaattacctttgaatgctacaaaacaatggagcaattcttcctctaacaaactgacaagaaaccatttgaacctatacttttcaagtgtaaaagcaaaaacgttatcaatcagacaagactcagaaaacttatcactcaagccactctcataaaaaccattcattaagaaggatgtccaagaaaaattaaa

SEQ ID NO: 873030 - DNA, 616 bp, Homo sapiens
aacttttaaaaagataagaatttaaaaaacaagaattttaaaaagaaagaattaaaaaaaaaaaaaaaaaagattaaaaggccaggctcagtggagtggctcacgcctgtaatcccagcactttgagaggccgaggggggcagatcacttgaggtcaggacttcaagactagcttggccaatacggtgaaaccccatctctactaaaaatacaaaaattagctggacttggtggcgggtgcctgtagtcccagctacttgggactacaggaggcaggagaatcacttgaatccaggaggtagaggttgcagtgagtcaagatcgcaccactgcactccagcctgggcaacaaagagagasaccatctaaaaaacaaaaacaaaaacaaaacaaaaaagcaagattagcacaaaagataataattgaaattacctttgaatgctacaaaacaatggagcaattcttcctctaacaaactgacaagaaaccatttgaacctatacttttcaagtgtaaaagcaaaaacgttatcaatcagacaagactcagaaaacttatcactcaagccactctcataaaaaccattcattaagaaggatgtccaagaaaaattaaa

SEQ ID NO: 873031 - DNA, 616 bp, Homo sapiens
aacttttaaaaagataagaatttaaaaaacaagaattttaaaaagaaagaattaaaaaaaaaaaaaaaaaagattaaaaggccaggctcagtggagtggctcacgcctgtaatcccagcactttgagaggccgaggggggcagatcacttgaggtcaggacttcaagactagcttggccaatacggtgaaaccccatctctactaaaaatacaaaaattagctggacttggtggcgggtgcctgtagtcccagctacttgggactacaggaggcaggagaatcacttgaatccaggaggtagaggttgcagtgagtcaagatcgcaccactgcactccagcctgggcaacaaagagagacaccatctaaaaaacaaaaacaaaaacaaaacaaaaaakcaagattagcacaaaagataataattgaaattacctttgaatgctacaaaacaatggagcaattcttcctctaacaaactgacaagaaaccatttgaacctatacttttcaagtgtaaaagcaaaaacgttatcaatcagacaagactcagaaaacttatcactcaagccactctcataaaaaccattcattaagaaggatgtccaagaaaaattaaa

SEQ ID NO: 873032 - DNA, 616 bp, Homo sapiens
aacttttaaaaagataagaatttaaaaaacaagaattttaaaaagaaagaattaaaaaaaaaaaaaaaaaagattaaaaggccaggctcagtggagtggctcacgcctgtaatcccagcactttgagaggccgaggggggcagatcacttgaggtcaggacttcaagactagcttggccaatacggtgaaaccccatctctactaaaaatacaaaaattagctggacttggtggcgggtgcctgtagtcccagctacttgggactacaggaggcaggagaatcacttgaatccaggaggtagaggttgcagtgagtcaagatcgcaccactgcactccagcctgggcaacaaagagagacaccatctaaaaaacaaaaacaaaaacaaaacaaaaaagcaagattagcacaaaagayaataattgaaattacctttgaatgctacaaaacaatggagcaattcttcctctaacaaactgacaagaaaccatttgaacctatacttttcaagtgtaaaagcaaaaacgttatcaatcagacaagactcagaaaacttatcactcaagccactctcataaaaaccattcattaagaaggatgtccaagaaaaattaaa

SEQ ID NO: 873033 - DNA, 642 bp, Homo sapiens
ttctgatctgtaaagtggataacaaaaactcctttgaatataattttttataaaacattttaaaatataattttattttttactgacaaataataattgtacatattcatggcatacatagtgatgttttgatacatataatttatggtgaatagatcagggtaatcagtatatccatcatctcaaacactttgaataagggttttaataaggatgaatgagcaccacttaaataaatcaagcatttggtagacttgacataaactgcaaatattataggttgactaaggagtgatacataaccacctttaattgttaaatggagctggatcataaaattaagattatatattccggttgaacatccctaatctgaaaatctgaaatgaacaaaatctgaaactttttgagtgctgccatgatgccacaagtggaaaattccacacttgacatttcagatttcagatactcagattaggaaggctcaacccgtacagggattcyggtgatgctactgtgctgcttagctacacggaacacattattttttcactgtattaatgatatgctatattttttaccattaagtcctatgtgtgagtaagtgtaagaaaatgattgcttatcattagcatatgaatt

SEQ ID NO: 873034 - DNA, 620 bp, Homo sapiens
caaattcatctagagcctgaaaggctggttggctcatgttgaacccctaattctgataagcacatatttcagaaagagatcaaaacaccacaaatcttctctaatgaactgcggtttttagttctaaacaactcctaaaatttaaacaagtttacttctccaacttcctttatagcacccaaatgcctagattagattaatgtgttagattaatacattgcattcagtagatgcttaatacacttttattgaattaactagtgttaaagtgaactaaatatggcctgagaaggactctgtacctctatatttgagtccttgtggacaaactgcaacctagcttaataggtagacaagattgaaaacctaacttaggagtatgcacctgtaacaatagctgagtcttggctgatcccagcagctgtacttcaaccattcatacactgctgagygttcaaactgtgttcaataaggcaaatgctgaaccgtaaccaatccagccattctgtacctcacttccgatatctatacatcatttccctttttttgtctataaatcttcttccaccacgtggctgcgctggcttctctgtgaatctgctgtgtttctgggggttgcc

SEQ ID NO: 873035 - DNA, 617 bp, Homo sapiens
aaaatactggcaaaccgaatccggcagcacatcaaaaagcttatccacgacgatcaagtcggcttcacccctgggatacaaggctggttcaacatacacaaatcaataaacgtaatccatcacataaagagaaccaatgacaaaaaccacgtgattatctcaatagattcagaaaaggccttcgayaaaattcaataccccttcatgctaaaaactctcaataaactaggtattgacagactgtatctcaaaataataagagctatttatgacaaacctacagccaacatcatactgaatgggcaaaagctggaagcattccctttgaaaactggcacaagacagggatgccctctctgaccactcctattcgacatagtattggaagttctggccagggcaatcaggcaagagaaagaaataaaaggtattcaaataggaagagaggaagtcaaatagtctcggtttacagatgacatgactgtatatttagaaaaccccaacaactctgcccaaaacctccttaagctgataaacaacttctgcaaagtctcagaatataaaatcaatgtgcaaaaatcacaagcattactatacgccaataatagacagagagc

SEQ ID NO: 873036 - DNA, 689 bp, Homo sapiens
accaaatccagcagcacatcaagaagcttattcaatatgatcaagtgggcttcatctctgggatgcaaggctggttcaacatacgcaaatcaataaatgtaatccagcatgtaaacagaaccaatgacaaaaaccatrtgattatctcagtagatgcagaaaaggcctttgacaaaattcaacaacgcttcatcctagaaactctcaataaattatgtattgattggacatatctcaaaataataagagctatctatgacaaacccacagccaatatcatactgaataggcaaaaactggaagcattccctttgaaaactggcacaagacagggatgccgtctctcaccactcctattcaacatagtattggaagttctggccagggcaatcaggcaggagaaggaaataaagggtattcaattaggaaaagaggaagtcaaattgtccctgtttgcagatgacatgattgtatatttagaaaaccccatcgtctcaacccaaaatctccttaagctgataggcaacttcagcaaagtctcaggatacaaaatcaatgtgcaaaaatcacaagcattcttatacaccaataacagacagacagccaaatcatgagtgaactcccattcacaattgcttcaaagagaataaaatacctaggaatccaacttgcaagggacgtgaaggacc

SEQ ID NO: 873037 - DNA, 660 bp, Homo sapiens
agagtcacttcactattcattgtttgtgaagaataaactttcctcattaggaatgccagtttgacaaacactgtaatagtgagaaaacacctaagactaaagaatgaaactagggtaggctggccattaagcatacctcaaaacactacacttttatttatagtaagcatctttagtgtacattattattaaaaattattttacataagggggttcagttgattttaattttatttgtaagcatgtgatttactaccaaagcataatgtatttatcctattactgggtgaaaaaatttactgaagtttgagagtatctaaagtggcaaatagaaattaactaagcatccagggtatgagattccttataaaacaagtggacttgctgtacattgttcatacagtctttaaaaccacctgaaaatttctttatcattttctatcaaaacaaaataaaaatactcatcttagagaaaacatcaaaagctatgtctgatttcttaaaattatatcagtaattmtaaatatctctaagctttctaaaattcattacagtgtcaaatatgataaaaacccttcttgatgccagtgagagatgacatcacgaaaatattttaatttacatgagacagcttgttaaatcgatattaacaaaactaat

SEQ ID NO: 873038 - DNA, 600 bp, Homo sapiens
cactgtgccagacagctggaacaattctcaagtataagcgggaaacagatgtactaattgacagattacatgtatattcttaaaactcaccagtaatcactgctattgtatagagtgcagaccaataattttgtttttaggtaggagtgttttattattgacttttttttttttttttttttttttttagacagagtcttgctctgtcgcccaggctggagtgcagtggtgcattgttggctcagtgcaacctccgcctccctagttcaagtgattctcttgcctcagcctcccaagtagctgggattacaggcatgtgccaccacatctggctaatttttgtacttttagtaragacaggatttcgccatgttggccaggctggtttcaaactcctgacctcaggtggtccgcctgccttggcctcccaaagtgctgggattacaggtgtgagccaacgtgcctggccttaccattgacattttttataattgccagggagtagtgacaataaaaagtaggtcaactttccattggttttgttactttataaattttttttcgatgttccctcttgcctgcaccacgggcaggcttacc

SEQ ID NO: 873039 - DNA, 589 bp, Homo sapiens
tgagggtaaagaatggaattaactcatttgattatttatttattaattttatttgttattatactttaagatctagggtacatgtgcacaatgtgcaagtttgatacataggtatacatgtgccatgttggtttgctgcacccatcaactmatcatttacattagggatttctcctaatgctatccctcccccaggcccccatcccccaacaggccctggtgagtgatgttccccgccctgtgtccaagtgatctcattgttcaattcccacctatgagtgagaacatgcggtgtttggttttctgtccttgtgatagtttactgagagtgatggtttccagcttcatccatgtccctacataggacatgcacttatccttttttatggctgcatagtattccgtggtgtatatgtgccacattttcttaatccagtctatcattcatggacatttgggttggttccaagtctttgctgttgtgaatagtgctgcaataaacatacatgtgcatgtgtctttctagtagcatcatttataatccctggggtatacccagtaatgggattactcagtcaaatggtaattc

SEQ ID NO: 873040 - DNA, 504 bp, Homo sapiens
acaagcaataggctggatttgccctatgggctgtagtttgctgatccttgttttaatccattgccctactcaagtttttggttttgccctctgatatctaggctcctccctttaagatgtatttccttttcttaagaatggcccaggccaggcatggtggctcacgcctgtaatcccagcactttgggaggctgaggagggcrggtcatgaggtcaggagatcaagaccagcctgaccaacatggtgaaacctcatttctactaaaaatacaaaaaattaagctgggcgtggtggcgggcgcctgtagtcccagctactcgggaggctgagcagcaggagaatggcttgaacccaggagggggaggttgcagtgagctgagatcgcaccactgcactccagcatgggtgacagagcgagactccgtctcaagaaaaaaaaaaaaaaaaagaatggcccatatttgtagctgagcagttctctcagtctgcttcattcatgccag

SEQ ID NO: 873041 - DNA, 612 bp, Homo sapiens
catggtacaggaaaattagttccctctgtgggcctgtttccacacttgaaacgagacagtggaccaggtgttcataaaggtgcctgcctgctctaacattcaatggtgttggaattctacaacatagattctcttacctttcagtcctgaggtgcagtggacaatgagatagctgatgaccactcattttccagrcaagccaagttcatcctctgagagcaaatggcttgcatggctttcttaggcaaagaatagctcatcaacacattatggcaagcctagtatttgcgcttgctttctggagaatttcaaaacacaaataaagaccttttctttcaattattaagatcagaataactttacttagagtgaaaaaaaaaattggaattgccctaaaaactctatgtatggatcctgatttttcaaaagatctcaaattatctttctttttttataaattcctgacaaaaattatctcattcagaactatatagctctaatcaaatatccactgcatgccataatcgggggtaggccatttcagtacctactagacaataaacaactccagaatgtgtcttgtttttatgcatttgtatattttcagagctt

SEQ ID NO: 873042 - DNA, 684 bp, Homo sapiens
aaagcaatgtacagattcaatgctatttctatccaactaccaatcaaattattcacagaattagaaaaaaattattctaaagttcatatggaacccaaaagagcccaaatacgcaaaggcatcctaagcaaaaatagcaaacctagagacatcacattacttgacgttaaactatactgcaaggctacaataactataacagtatggtattggtataaaaacagacacatagacccayggaacagaagagagaacccagaaataaggctccatacctgaaaacttctgatctttggcaaagttgacaaaaacaagcaatggggaaaggactccctattcaataaatggtgctggaataactgactagccacatgtagaagactgaaactggatcccttccttgcaccatatgcaaaagtcaactcaagatgaattaaagatttaaatataaaaccccaaattataaaatctcttgaagaaaacctaggaaataacattctggacataggccctgccaaaggtttcatgaagaagatgccaaaagcaattgcaacaaaaacaaaaattgatataatgggaactaattaaactacagagcttctgcatagcaaaataaataaataaataaaagtattaacagattaaacagacaacctacaaaatggaataaaatatttacaaact

SEQ ID NO: 873043 - DNA, 684 bp, Homo sapiens
aaagcaatgtacagattcaatgctatttctatccaactaccaatcaaattattcacagaattagaaaaaaattattctaaagttcatatggaacccaaaagagcccaaatacgcaaaggcatcctaagcaaaaatagcaaacctagagacatcacattacttgacgttaaactatactgcaaggctacaataactataacagtatggtattggtataaaaacagacacatagacccatggaacagaagagagaacccagaaataaggctccatacctgaaaacttctgatctttggcaaagttgrcaaaaacaagcaatggggaaaggactccctattcaataaatggtgctggaataactgactagccacatgtagaagactgaaactggatcccttccttgcaccatatgcaaaagtcaactcaagatgaattaaagatttaaatataaaaccccaaattataaaatctcttgaagaaaacctaggaaataacattctggacataggccctgccaaaggtttcatgaagaagatgccaaaagcaattgcaacaaaaacaaaaattgatataatgggaactaattaaactacagagcttctgcatagcaaaataaataaataaataaaagtattaacagattaaacagacaacctacaaaatggaataaaatatttacaaact

SEQ ID NO: 873044 - DNA, 606 bp, Homo sapiens
tcaccttaaaaatgaaaattggttggtaaaattccacattctgacaggaaaaataacatcgtttttgtgaatctgaaagatggtttcctttccaccactggaacaactgcttttattttttaataatctgaggtatcttaggactgcaattacactgtagaaaaacacgtgacattaataaatcagaataattaaaacagtgcaaaacaaacacatttgtaagtgctgagcagagaaatacacagaaaaatgaatctttttagttgaggggttaggggagatggaggttgccatgatgaaatcagatttctgggagaaggcttagacatgcctgggagcacatgaagtggtgtcaggccggctgctgtgaggcagcagtataatagtcctgcaggagaaaaattagatttcagaggggtggctgaaaacatgaggtcaaaactgatacaaaggcagatttgttcctaayagaaaaccctcttgccagctgtcggcgccttctcttcctgccaggtttgcagggcaggggcagcagccttcttcccttttgcccaaataggagaagagcccattcaatcgattacgggctgtccaaagtgggctgag

SEQ ID NO: 873045 - DNA, 626 bp, Homo sapiens
acaagtttgtgtgttgacctgtgtttttatttcttctgtatctatacttaggagtagaatttcaaagtcaaatgttaaccttttgaacattaaacctctgtgttcaacattttaaaaaactgccttgtattttccaaagtggctgcactgcctaacattccttttagcagtgtatgagaactccaacttcttcatatccttgccaacacttgttattattcatctttttcattatagccatcctaatgggtgtgaagtggcatctcactgcagttttaktttgcacatccctgattgctaattatgttgaacatactgtatgcacttattggccatttgtatatcttctttggagaaatgtctattcagattattttccattttttaattaagtttttgtctcttgttgtatcatttctttatgtattttagatacaagccctgctgtagcctgaatgtgtttcctcaaaattcatatgttaaagtctaatcaccaatgtgatagtattaagatgtagggcctttaggggtgattaagttatgagagtagaatcctcgtgaatgagattaatgacctcatgaaagaggttcgagggagctattcatccccttggccctttcatccc

SEQ ID NO: 873046 - DNA, 613 bp, Homo sapiens
gtgaaaagctgtgagtatatttgttaacatatgtgcaaccgtattgggaaaagctgcatcatttatgatcttttccagtcttcttattttgctgagggggcatctgggaccctgaaagggatggggctggcctgtggtcccacaagaaaggagcgagagagacgtggggcttggattgtgaggcagccttttcttcccacgtgctctccctgcctctactttctgcaagcaccaggaggtagaagacaaaggtatatccacagctattagcatccccagggtctgatgtctggcccttgccagtggcgactgcgtcctctttgtctgaacgacctagtctttgagccagggcytacatcgaggtccttccagacaccctagaggcaaaagcaaacctctccctcatcctgctgctttctttagggctgagaaagcctgggccagcagatgccctgtcagagcctagggaaccaggcttggcttgggcagacggcatctcggaagggcttgtgcatttagggaaaaccagccccaaataactcccagattcagtcctgagctatgcaggtgaaggcaggtaggaaattacagccacttgaggctttctctccca

SEQ ID NO: 873047 - DNA, 613 bp, Homo sapiens
gtgaaaagctgtgagtatatttgttaacatatgtgcaaccgtattgggaaaagctgcatcatttatgatcttttccagtcttcttattttgctgagggggcatctgggaccctgaaagggatggggctggcctgtggtcccacaagaaaggagcgagagagacgtggggcttggattgtgaggcagccttttcttcccacgtgctctccctgcctctactttctgcaagcaccaggaggtagaagacaaaggtatatccacagctattagcatccccagggtctgatgtctggcccttgccagtggcgactgcgtcctctttgtctgaacgacctagtctttgagccagggcctacatcgaggtccttccagacaccctagaggcaaaagcaaacctctccctcatcctgctgctttctttagggctgagaaagcctgggccagcagatgccctgtcagagcytagggaaccaggcttggcttgggcagacggcatctcggaagggcttgtgcatttagggaaaaccagccccaaataactcccagattcagtcctgagctatgcaggtgaaggcaggtaggaaattacagccacttgaggctttctctccca

SEQ ID NO: 873048 - DNA, 682 bp, Homo sapiens
tcaagaaaacatcaatgtcataaaagacataggctgaataaccactccagatgaaaggttaaagagacctgacaatgtgtgaccataaacgcaatatgttctcaacaaagtactggcaaaccaaattccacagcacatcaaaaagttaattcaccatgatcaaayaggcttcactcctgagatgcaaggttggttcaacatatgcaaatcagtcaatgtgattcaccacataaacagaattaaaaacaaaaaccatatgatcatcttaacagacatggaaaaagctttccataaaatccacattccttcatgataaaaaccctcaagaaactaggcattgaaggaacatacctcaaaatagtaacagccatttatgaccaatccacagccaaaatcatgcggaatgggcaaaaaccggaagcattccccttgaggactagaacaagacaaggatgcctactctcaccacccctattccacatagtactggaagtgccagcaagagcaatcaggcaagagaaagaaataaaaggcatccaaataggaaaagaagtcaaactaactcttcacaacgattctatacctagaaaaccctaaagactccaccaaaaggctcctggaattgataacttcagtaaagtttcagtatacaaaatcaatgtacaaaaatcagtagcatttc

SEQ ID NO: 873049 - DNA, 667 bp, Homo sapiens
tccttcatgaggccctggctttcctgctgcttgtctggctgagttttccttgttgccccttaaagcctggtgtgtctcatgttgacctaagttctcttctcttcccagttcacacactcttgcagaatgatctcttccacttctacattttatttatttatttttgaggcaggatctcactctgtcacccaggcaggagtgcagtggcgtgaagacagttcactgcagcctcaacctccggggctcaagggatcctcccgcctcagtcttccaagtagctgggactacaggcgcgtgataccatggccagctaatttttatgtttttcttttttttttagagatgggggtctcactatgttgctcaggctggtctcaatcccctgggctcaaaatccacctaycttggcctaccaaaatgctgggattacatgcatgagccaccacacttggcctatttctacattttaaattatcgtttaaatgcctctcatatctgtaccttcagcacaaacttctcttcctggctcctgacctgtttatccattggctaccgattatccattggctaccgaacacctcaaaggtttctcagaacttcaaattcaacagaacaaaatctgagctcatcatcttccccacaaacctgtttttccccagagtaagaa

SEQ ID NO: 873050 - DNA, 671 bp, Homo sapiens
ttgcataaactgtaacagattattttataaaatgtattaaatgccaactaatctatagactggctaaacagaattaattttcttaaaatctgaattatgtatgcccagaatgtagtttaattgcatccaatattagaaaaaaatctaactaacttcaaattacaacaaaaaactacacatgtaaaatctttgggaatattccatgagatatttagaaacatctgactccaatttggaaaaaaaaaaaaaaaaaaaaaaaaaaaawatatatatatatatatatatatatatatatatatatgagatttgcaaccaggagccaaattcatttcgttcattttcagtctttaaagcttaatgcatatttagagaaattgcatagttacttttgatgttattatcttcaaaactgttgcattagtttttctttcagtctttaagagttacacaatgtttcttgtattcctgaatggcaaataacataactatatatccatattataataatgaaagaaattctcatcatataattttacacatttcttccctctacatgaaggcctcgtggtatttttatgtcttttatagagccatcttcaaaatggaaaatttggatagattctgcaatagtcctagaaatgctaatcgccagtgaattaatcatcaagtta

SEQ ID NO: 873051 - DNA, 609 bp, Homo sapiens
atataatgacttcttttcctttgggtagatacccagtaatgggattgccagtagttctactttggggaatggtagctctacttttagttctttgagggatctccctactgttttgcacagtggatgtactaatttacatttccaccagcagtgtaaaagtgttccttttttatcacattcatgctaacatttattatgttttttattttttaattatggccaagaaaaaattatttttgagcatatgaatgaactacgtgaaaaatatagtcccttttaaaaattaatagttgcatttataacaaaaattgtactttatattatacayataaatttaaaaatttttattttatacatttatacttatcatgttttatatatgttactttgatcaattgtgtattaattataattacaaatataactcagtctaggagaaacattttagcactcagaatcttgggttcatagaacataatgtaatcctagcacttaatgaggctgagatgaaagcattgctttatcccaggagttctagaccatcctggaaatacagtaagaacccatctctataaaaaatttaaaaattagctggttgtggtggtgtgt

SEQ ID NO: 873052 - DNA, 651 bp, Homo sapiens
agagctttattaattcttaaattattatgagtacttaaaatacagtcacactgaaactaaaaagaatacaattcattcttaattagatcaacttggattatctccacttaaaaaattatttcattaaaccactttgaaagtttggatgttctaggcattttaactcaggtctgcctcagtactgcctttatatctgaacattagatctctgccttaggccccacacctcaagaaatgcatgcttccaagtaccttcctcaaaattttctaagtccctctcctatgcctggcatggtttggggccaccagtgccatytaagtgtagtccagactgagcatagacataaatcctagcccctgattttttacttgggacattttgcgaccctctattcagtacatagactcaactggatgccccgagaagctctaggactcactcaacctatgtggtctttctggatatcatggttgagcctcagacctgtaaagacagcctagcaaaaaaattgttccagctgtttggtaaggtatttattccatgggatctcatagaattgatctaccataatggtgtgggcacattaatttgggtgattctcactcacattggagataagatgagttaaaggctctgggctgctgatggac

SEQ ID NO: 873053 - DNA, 644 bp, Homo sapiens
ctgttttatggagaatgagggtcacaaaatttctgagattcattactagttaacataaccaaagattcctggtcccacctcattctgaaggcataccctaactctttctgagtctgttgacctccacttctgtcagtcctatagcatttactttaatagtcacacactgtgtttgtctgtaaaagttatttctaaaagctttatttgtgaatatttaaatttgttgattcacatttaaaaatgaagcagattcagccactgttctgatttttttcctctagagctaacttgttgctgctaaaggcaaattatttattaatgttcagaatattaatattaaaaattcagaatgaagaaataatttggctccaaaagtaccactaaataaaaaatattttacagtgctcagcctgactcaacaaaagatctgatttattgaacttgatctgtaagaaaagtagtaaagctaacagaagtaagagctattttttctcctgccgagtatttcyttccttcttcccttcctttcttttctttatctctaaggacaaacattttgcaccttcccttccacagttagtggaatgggattatagcaaaagagagagagcatgtctgaactcatgaaacttacatcctgctgt

SEQ ID NO: 873054 - DNA, 547 bp, Homo sapiens
taagcatgggatgtgtttccatttgtttgtatcacctgtgatttctttcagcagtgttttgtagctttccttgtagagatctttcacctcctttgttaggtatattcctaagtattttattttttttgcagctgttgtaaaagaggttgagttcttgatttgattctcagcttggtcgctgttggtgtatagcagcgctactggttwgtgatcatttattttgtatcctgaaactttgctgaattcatttatcaaatctgggagctttttttgatgagtttttagaggttactaagtatacgatcatatcatcagtgaaccgtgaaaatttgacttcctctttactgatttagatgtcttttatttatttctcttgtctgattgctctggctaggacttccagtgctatgttgaatagaagtggtgaaagtgggcatccttgtcttgttccagttctcagggcgaatgctttcaacttttccccatttagtataatgttggatgtgggtttgtcatagatggcctttattaccttgaggtatattcc

SEQ ID NO: 873055 - DNA, 642 bp, Homo sapiens
cccttttgagatgctgtatggatgacctttcctcaccagtgattttccgttagatcgggaaacctctgagttagttaagcatgtaacctctctggcacacttccaacaggaattagcacaattagcaaaagctcaatcccagaaaagaggaccacttctgtttaacccaggagatttggtactggtaaaggctctctcctctttctctccttctctaggcccaagctgggaagggccttacactgttctttctcccaactcccttggcaataaaagctacaggaatcgactcctggatacatcacactcagattgaagmctggaaagctgagggaacaacccctgacagcccagaggaaggtcctgaatatcaatgtgaagaaagaagagatcttaagccgaaaatcccaaaagataagtaactgagtgagaactacttatcttactcacgcccctacctcaccaaatactttgtttctacctctccttttgagattcgtcaccaaatattagaccttctttttgatgcatatttgcaagggaatttttaattatccatagagttacattataacttcatagagctccaaagagaaattgtatatcttggcaaataacaattttagatggaaattacttact

SEQ ID NO: 873056 - DNA, 642 bp, Homo sapiens
gggcctggcttctattaattaacacagtgttttcactatgtctatctatattgtagatatctataatctatatctacagatataggtttacccatggatcagtacttcatttctttgtagggtggataatattctattatatagatawgccacattgtttatctgttaatcagttgatggatatttgggttgtttccacttttttggctattttaaacattcatgcataagtttttgttctggaggtgtatttttaactcttttttcacatgtgcatgggaatggaatttctggcttatggtaattctgtgtttaagtatttgaaaaattgccagactattttccaaagtggctataccattttacacttctgctagcagtgtataaagaaaggtcccaaattttctgcatgcttgccacattctttcacagctttttcttctaagttttttgattagtttgttctttgcctcaactgttaccaccatctcagcagacatgacgttaaataatgccactgattgtttttgacaaacacctctaagaaaaagactgttttcattaggtgagcttctgaggtcaaataaagatattccttgagagtagggtttctcaggaaactgccagacagttcaaataatg

SEQ ID NO: 873057 - DNA, 640 bp, Homo sapiens
aatgtactggctccatacttggccttctctgaagatatcccagtgggtgggttagggcacattgctatagcctggcgagtggaattctaggctccccacttggcctctgctggtatgaatgaggatggggctacattttttttttttcctgtggtgtttagtcagagcagagcagtttctgtctaaaagttttctcttttcttgtgttgttcctttcttggccctttggccagatagagcagtttttgttaggtcttttttagtttgcacttattgatatttccaagtgccatcttcttcaaagtctcctcctttcaaagaaagtgcctcctttcaaagtcttcttatgtttatttcatatataatgtccagagtttttcattgtacttagtaggaggagtaaggaaaagtatgcctrcttcttcttggaagccagaatttccaagttttaaagacttgttattaaatcataccatacatatggaaaagggcacatatcttaagcatacaggacaatgaagctttaccaacaatacacccatgtaactagaacgcagatcaagaaaccgaacacaaccaatacctttcagaagcttccttatgttccctctgatcacaagccccccacccctgcaaagtt

SEQ ID NO: 873058 - DNA, 548 bp, Homo sapiens
aatctcctttcattgaaacaaggcaaataaattaaacatggtgaataacccactgacagaaagcatggtatttttctgggcaatctgaactacaaattggctgacaacaggaaacagtatggccctacactacatgattttctatcattaaaactatggaaatattttccttgtcctcatgtcctcatagatatgtctcttttaaatagcatagagctggatttttaaaatccaatctggtaagctatttaaatttaaattggtggttatagtgattaataatgtagttgggcttgttttgcccctcttattcrtgtataatgtatttttatacttgttttgttcatattgttttattttgaattaattgaatctttgtctttattttattattttgtattcattgatttaaaaaattttatgttaaccttgaaatactgtcatgcagatttaataaattcttaagctaatgattcttactagttaaaaatgtaaagtattaagaatgtgagctccacgagagctgggatttttgtctttgtccattg

SEQ ID NO: 873059 - DNA, 590 bp, Homo sapiens
gcaagacctagaccacactcctggtgtttcgtgactttctgggctcaagctatcttcctggctcagcctcccaagtagctgagactgcaggcatgcatcaccatgcccagctaatttcttctattttttgtagagactgggtcttgctatgttgcccagactgacctcaaactcctgggttcaagtgatcctccccccttggcctcccaaagcgctaggataacagacatgagccgctgcacccagccacagctccactattaaaagtgagacgctggccaagtacggtggctcatgcctgtaatcccagcactttgggaggccaaggtgsgaggtcaggagtttaagaccaccctggacaacatagtgagaccccatctctgaggaaaaaaaaaagaggaggtggcaaccagcagaggaggcagagtctctacaggcccttaagctcaaaacaaacagcagctcaggaaggaggctcagccacccactctctatgcccagcatcgcctccaaccccactggcatgtccaaaggcatatctccaccaaagcgtgcacacaggtgtgtcttggctcacttttagtgaatag

SEQ ID NO: 873060 - DNA, 677 bp, Homo sapiens
tatgggctaactcactttcagttctctaacagacctggagctacacaggaaagtaagtagaaaccaataaagtccattgcaggactatctgtctaatctcaactatggtgttttgcccttctctcccctaggtcattgccacaaggaaaagagtttgcagagattatccagtaacttaggaggggaaaatatataaacataaaataaccatggtattcggtatccacttgtaggaggttatcattgtaaaaaatgggtttgagtactaaattaagattcctccatccccatctatattccacaaatataccttagattttatagcatttcataagattatttatgtagaaaaatgttaaccgtttactaactctctatgaaggatgttcattgtactactattcattttactatcttgcaatytttctaaaggtttgaaatttttcaaaaagttaaaacaaaattctacaaagtaactagaaaaaccccttataaagaatgaccaatatcagtagtgcatataattcaaactaaaggtcaattctactcaaaagtacttgtagaatcatcggatactaattaacaaatttatacatgggcaagattatagcatgaataaaaatttttcaacaggaaatattgtaagtgtcatgcctacagcgtcttgctttgtcacc

SEQ ID NO: 873061 - DNA, 537 bp, Homo sapiens
agatgcacaatcgaaatcaggtgtgcagaggggactggaaattacattaggacccagatgaagatacacaagtagaaagagcccctcgccatgccaggagacactgattcctgcacatgacgcaacagaaccgacatagggaactcaaggaaagtccagaagaggaaagygaagaaggcagggctaccttccattcgcgcatggttttcattttcagcctttagatcccttttctcattcaacatcacaacactgccatgtgcagttccttttgtagatgagggaaataacattcagagaggcggagcgctctgccttagacatcacagatgtcaagcaggaagggctggtgtttgatccgaggactctgacttctacacgttccaccacacacatggctgaattcaattaggcaagtttgtttgggtgctgagttcctctgattaacattttgcttctcctctttccattttcaagcattcttaaatgattttttaaacactgtcatatgcagcataatgatgtttccatcaacaa

SEQ ID NO: 873062 - DNA, 666 bp, Homo sapiens
gtgagaaacggctcagagactttgaaggctgtaattggactatgatgctgttgggtagagcccaaagggttgctgggcacttggaaacaaactagtgagcttataaaataactcactgtcacctccccaggctgcccagagctgacatgatgaggcaagcccacagagagagggcagccccgggtgagcggcacccgccctgcacccagcacaccactttcctggccatggagtgtaggtaggaagaggaggcaatctgcttcaatttctgctgtttctattgtcacctttgtcaccaagcacaagacaggtaatcactgtattgagaataaccatctggcaaggttgttaccgtgaaaataaaaatcaaaaggaaatgtctacaaaggcagtttataatccacacatatttttaaattattatggcagatggttccatgtatgttttataaactgaaggctcaataaaagtctgcagactttcatgtgatttttgaaagtactcagaaytttgacttgaaagggcagaggaagggctgaaaggagaaaagaggtacagtttgcccactgatatttttttctggggcaaattgtcacctgaagagcatccttcagttaaaaatcaagtaacaaaaagagaagagacccacattctaaaactggatg

SEQ ID NO: 873063 - DNA, 623 bp, Homo sapiens
aaaaagagaagagacccacattctaaaactggatggacacccatcagacttattggttatgcccaatgggttcttttctggtcactaggtggcgatctggggcccaaatgcacttctgctccaatgtggtgaaaatagcrtctttatattttaatatctaggggaaccacttttcttgaaagcagaaaaagcttctctgataatctagttggcatttatcacactgaatgatgtcttttctcttaagttaccagcaagaggagaaaatcagaaggtaaacattccccaggattcaatggaaagtatatttccccaacattcaaaacaaattgttgaaagatgttgactgaagtaatatcaacaattaaaatgaaattttgaagctgaaaccccaattagcataatgtatgatgggtcccaagtaagccagggttactccacctttttctcccagtccacagaagagaacagcatgaagatcaccacccagagagctctcactccagcttgggacctgagaaccacctgaccctcttgtgttcctgtctccccggtcccaggctgctgcttccaacacaccaagtggacccccacccccatccctgcccctgctgcctcccctt

SEQ ID NO: 873064 - DNA, 595 bp, Homo sapiens
ggataaagtggacctatcagatgtctacagaacactctaccccaaatcaacagaatatacattctttggccaggcctggtggctgacgcctgtaatcccagcgctttgggaggctgaggcaggcagatcacgaggtcagatcgagaccatcttggccaacatggtgaaactccatctstattaaaatacaaaaaattagccaggcatggtggcacatgcctgtaatcccagctacctgggaggctgaggaaagggaatcgcttgaacccgagaggtggaggttgcagtgagctgagatcatgccactgcactccagcctgggagacagagcaagattccatctcaaaaacagcaaaaaaaaaaaaatatatatatatatatatatatatatatacgttcttctcagtgccacatagcacttattctaaaatcgaccacataattggaagtaaaacactcagcaaatgcaaaagaactgaaatcataacagtctctcagactacagtgcaatcaaattagaactcagaattaagaaactcactcaaaagcacacaaatacatggaaattgaacaacctgctcctgaatgactcctg

SEQ ID NO: 873065 - DNA, 641 bp, Homo sapiens
tgataccaaagcctggcagagacacaacaaaaaagaaaatttcaggccaatatccctgatggacattgatccaaaaatcttcaataaaatactggcaaaccgaatctaacaacacatcaaaaatcttatccaccacaatcaagtcagcttcatccccgtgatgcaagcctggctcaacatacagaactcaatgaacataatccatcacataaaaagaaccaatcacaaataccacatgattatctcaatagatgcagaaaaggccttcgataaattcaacacaccttcatgctaaaaactcccaattcactaggtattgatggaacatatctcaaaataataagagcaatttatgacaaatccatagcccatatcatactgaatgcaaaaaagctggaagcattccctttcaaaaccggcacaagacaaggatgccctctctcactactccttttcaacatwgtattggaagttctagccagggcaatcagcaagagaaagaaataaagggtatggaaatagaaagagaggacgtcaagttgtctctgtttgcaaatgacatgattctatatttggaaaaccccatcatctcagcccaaaaatttcataagctgataagcaacttcagcaaagtctccaaa

SEQ ID NO: 873066 - DNA, 580 bp, Homo sapiens
tttcatcataaaatctttgcttgttcctaagccttgaatggtattacctagattttcttttagggtttttaaagtttttgttgttacattacatttaattctttaatccaccttgagttagttttcatataaagtattaggaagtggtcyagttttaattttctgcatacaactagccagttctcccagtgctatgtattaaatagtaaacccttttctgattgtttttacaaggtttgtcaaagatcagatggttgtagatgtgtggtgtaatttctgaggtctctgttctactccattggactacctgtctgtttttgtacaagtattatgctgttttggttactatagctttgtagtatagtttgaagtcaggtagcatgatacctccagctttattctatttgcttaggattgtcttggctctactgactttttagttccttatacattttaaaatagtttttttttttctaattctgtaaagaatgtcaatggtagttcaatgagaacagcattgaatctataaattactttgggcagtgtggccatttttatgatattgattcttcctacccat

SEQ ID NO: 873067 - DNA, 620 bp, Homo sapiens
ttttctgcatctattgagataatcatgtgttttttgtctttagatctgtttatgtgatgaataacatttattgatttttgtacattgaaccaaacttgtattctgaggatgaagtcatcttgattgtgatagataaacttatwgatgtgttgctggatttggtttgtcagtattttagaggatttttgctttgatattcatcagggatattggcctgaagttttgtcgttgttgttgttgttgatgttggagtccctcctttacgatcatttggaatagtttcagaagaaatagtatctctgttagaattcagctgtaaatctatctgatcctgggatttttgttgttgttggtggtggtaggctatttattactgcctcaatttttgaacttattattggtttattcagggatttaatgttttcctggttcagacttgggagggtgtgtgcatccaggaatgtatccatttcttctagattttctagcttatgtgctaaagatttttaaagtattctctgatggttgtttgtatatttgtggggtcagtggtgatatcccccttatcatttctgactgtgtctatttaattcttttaagttttcttctttattagtgca

SEQ ID NO: 873068 - DNA, 620 bp, Homo sapiens
ttttctgcatctattgagataatcatgtgttttttgtctttagatctgtttatgtgatgaataacatttattgatttttgtacattgaaccaaacttgtattctgaggatgaagtcatcttgattgtgatagataaacttattgatgtgttgctggatttggtttgtcagtattttagaggatttttgctttgatattcatcagggatattggcctgaagttttgtcgttgttgttgttgttgatgttggagtccctcctttacgatcatttggaatagtttcagaagaaatagtatctctgttagaattcagctgtaaatctatctgatcctgggatttttgttgttgktggtggtggtaggctatttattactgcctcaatttttgaacttattattggtttattcagggatttaatgttttcctggttcagacttgggagggtgtgtgcatccaggaatgtatccatttcttctagattttctagcttatgtgctaaagatttttaaagtattctctgatggttgtttgtatatttgtggggtcagtggtgatatcccccttatcatttctgactgtgtctatttaattcttttaagttttcttctttattagtgca

SEQ ID NO: 873069 - DNA, 530 bp, Homo sapiens
cgatcatttggaatagtttcagaagaaatagtatctctgttagaattcagctgtaaatctatctgatcctgggatttttgttgttgttggtggtggtaggctatttattactgcctcaatttttgaacttattattggtttattcagggatttaatgttttcctggttcagacttgggagggtgtgtgcatccaggaatgtatccatttcttctagattttctagyttatgtgctaaagatttttaaagtattctctgatggttgtttgtatatttgtggggtcagtggtgatatcccccttatcatttctgactgtgtctatttaattcttttaagttttcttctttattagtgcagatgcggtctattttgttaacttttattcaaaaaaaaaaaatacagctcctgaatcccttgagttttttgaaggattttgtgtgtctctatctcattcagttctgctctgatcttggttatttcttgtcttctgctagctttgggaagttttcctcttggtcctctagttctt

SEQ ID NO: 873070 - DNA, 601 bp, Homo sapiens
tttttttttttcctatgtacttcaggatggaccatcatcctgaaaaactcttttttttttattcttgaagttttagggtacatgtacacaatgtgcaggtttgttacatatgtatacatgtgtcatgttagtgtgctgcacccattaactcatcatttaacattaggtatatctcctaatgctatccctccccactgcccccaccccacaacaggccccagtgtgtgatgttccccttcctgtgtccatgtgttctcattgttctattcccacctatgagtgaratcatgcggtgtttggttttttttccttgtgatagcttgctgagaatgatggtttccagcttcatccatgtccctacaaaggacaggaactcatcattttttatggctgcatagtattccatggtgtatatgtgacacattttcttaatccaatctatcattattggacatttgggttggttccaagtctttgctattgtgaatagtgccactataaacagacatgtgcatgtgtctttatagcagcatgtttcaaaattctttgggtatatacccagtaatgggatggctgggtcaaatggtattcctagttctag

SEQ ID NO: 873071 - DNA, 601 bp, Homo sapiens
tttttttttttcctatgtacttcaggatggaccatcatcctgaaaaactcttttttttttattcttgaagttttagggtacatgtacacaatgtgcaggtttgttacatatgtatacatgtgtcatgttagtgtgctgcacccattaactcatcatttaacattaggtatatctcctaatgctatccctccccactgcccccaccccacaacaggccccagtgtgtgatgttccccttcctgtgtccatgtgttctcattgttctattcccacctatgagtgagatcatgcggtgtttggttttttttccttgtgatagcttgctgaraatgatggtttccagcttcatccatgtccctacaaaggacaggaactcatcattttttatggctgcatagtattccatggtgtatatgtgacacattttcttaatccaatctatcattattggacatttgggttggttccaagtctttgctattgtgaatagtgccactataaacagacatgtgcatgtgtctttatagcagcatgtttcaaaattctttgggtatatacccagtaatgggatggctgggtcaaatggtattcctagttctag

SEQ ID NO: 873072 - DNA, 601 bp, Homo sapiens
tttttttttttcctatgtacttcaggatggaccatcatcctgaaaaactcttttttttttattcttgaagttttagggtacatgtacacaatgtgcaggtttgttacatatgtatacatgtgtcatgttagtgtgctgcacccattaactcatcatttaacattaggtatatctcctaatgctatccctccccactgcccccaccccacaacaggccccagtgtgtgatgttccccttcctgtgtccatgtgttctcattgttctattcccacctatgagtgagatcatgcggtgtttggttttttttccttgtgatagcttgctgagaatgatggtttccagcttcatccatgtccctacaaaggacaggaactcatcattttttatggctgyatagtattccatggtgtatatgtgacacattttcttaatccaatctatcattattggacatttgggttggttccaagtctttgctattgtgaatagtgccactataaacagacatgtgcatgtgtctttatagcagcatgtttcaaaattctttgggtatatacccagtaatgggatggctgggtcaaatggtattcctagttctag

SEQ ID NO: 873073 - DNA, 659 bp, Homo sapiens
tggttatttcttgtcttctgctagctttgggaagttttcctcttggtcctctagttcttttacttgtgatgttaggtcattgacttgagatatttgtagctttttgatatggggcatttagtgctctaacttttcctcttaccactgcttaagctgcatctgagagattctggtatgttgtctcgttgttctcattagtttcagagaacttcctaatttctgccctaattttattatttacccaggagtcattcaggagcatgttgtacaagttccacatagtcttgtgattttgattgagtttcttaatgttgagttataatttatttgcattgtggtctgggagactgtttgttatgatttcagttcttttgcatttgatgaggartgttttatttccaataatgtgatcaattttagactaagtgccgtgcagccatgagaagaatgtatattctgttgttttcagttggagagttctctagatatctattaggtctacttgatccagagctgagttcaggtcctgaaaatctttgttaattttctgtctcaatgatctgtctaatattgtcagtggagtgttaaaatcttccactattattgtgtgggagtctaagtcattttggaggtctctaagaactggctttatgaatctg

SEQ ID NO: 873074 - DNA, 678 bp, Homo sapiens
ctgaggcttgagtaggtaaacaaagcagctgggaagctcgaactgggtggagccaactgcagctcaaggatgcctgcttgcttctgtagactccacctctgggaacaaagcatagccaaataaaaggaagcagaaacctctgcaaacttaagtgtccctgtctgatggccttgaagagagtattggttctcccagcatgcagctgcagatctgagaaaggacagactgcctcctccagtgggtctctgacaactgagtagcctaaatgggaggcactctccygtaggggcagactgacacctcacatggccgggtactcctctgagacaaaacttccagaggaacaatcagacagcaacatttgctgttcaccaatatccgctgttctgcagcatccactgctgataccaaggcaaacagggtctggagcggacctccagcaaactccaacatacctgcagctgagggtcctaactgttagaaggaaaaccaacaaacagaaaggacatccacaccaaaaccccatctgtacatcaccatcatcaaagaccaaaggtagataaaaccacaaagatagggaaaaaaaaagagtagaaaaactggaaattctaaaaatcagagcacctctcctcctccaaaggaatgcagctcctcaccagaaatggaacaaagctggat

SEQ ID NO: 873075 - DNA, 577 bp, Homo sapiens
tgaggcgggtggatcacaaggtcaggaggtcaagaccactctggccaagatggtgaaacctgtctctactaaaaacagaaaaattagccaggcgtggtggcaggtgcctgtaatcccagctactcaggagactgaggcaggagaattgcttgaacctgggaggcagaggttgcaatgagccaagattgcatcattgcactccagcctgggtgacagagaaagactccatctggaaaaaaaaaaaagatgtcataaagttaaattatattttttaaaaatacttaccaatatatggtctgaattgacatattttagaatttctttttttatttgtaaacagttttataaagaaatttcccccaatgattaggaccagaaagtatatttgttatgacagaaggggttggtcattattttactgagaaaaagagaatttwgaacaaaagggacaacagcaacaaaaagatgagtatacaattttgatatgatatccaggaaacttatgggtctacatttcttttcctctttctctctctcttttttttttttttggtgtgagaatacattgagcgatgtg

SEQ ID NO: 873076 - DNA, 635 bp, Homo sapiens
ttgatttgacagctgcttttagaagtgtatctaacaaagagcaattttgcaaaatcagctcagaccccagctttggaaggctccatgttgtggaatcctgtttagttactctgagaggtagacaataagagtttcgcaagctgaagctaaatatcaggtaaatcatatctgaaaaaaattaaaatcagcccagaaactctgccatcattgccataacaaaggaactattccattttagtacatatgtatcaggttctctttttggtgagttattttctttttcgtggttgttaactaatgttgatttgaactagattttgcttgtattgaaatggtagggtgagaggaattctcagggaagaataacaatatgatttgctccagtttctctcaatctaagagctgatacttggtcttggctatgttattgttttcctgtgagtttattctttgttttttctcttcccccaactagtaycttagtacataacactgccacccctaatataaataagtaccaccgacccatagctagccttcccaaatctaatatcccctctcattgttgctagactatttctcatttacaaaagttggaaaagtctaaaaaaatccttatttaatttcatttgtca

SEQ ID NO: 873077 - DNA, 670 bp, Homo sapiens
ctgtgagcctgtaaaatcaaaagcaagttagttacttcctagatacaatagggataaaggtgttgggtaattacagccattccaaataggagacattggccaaaacctaggggctacaggccccatgaaattccaaaattcaatggggcaatcaaatcttaaagctccaaaattatctcctttgactccatgtctcatatccaggtcatgctgacacaagaggtgggttccatggtcttgggcagctccgcctctgtggccttccagggtacagcctccatcccagctgctttcacaggctagcattcagtgtttgtggcttttctagcacacggtgcaagctgttggtagaactatcattctgtggtctggaggaaggtggsactcttctcacagatccactaggtggtgcaccggtaggaactctgcgtgagggctcccaccccatgttactcttctgcactgccctagcagaagttctccatgagggccccgcccctatagcaaacttctgccttggtatttccatacatcttctgaaatctaggtggaggttgccaaacctcagttcttgacttttgtgcacttgcagactcaaaaccacgtggaagctgccaaatcttgaggcttgaaccctctgaagccacggatggggaagctgggatatagg

SEQ ID NO: 873078 - DNA, 591 bp, Homo sapiens
ccagataccctaaatcatttttcccaagttcaaagttccacaaatctctacagcagggacaaaatgctgtcattctctttgctaaaacataacaagagtcacctttgctccagttcccaacaagttcctcatttccatctgagaccacctcagcccagaccttattgtccatatcgctataagcattttgggcaaagccattcaacaagtctttagggagttccaaactttccracatttccttatcttcttctgagccctccaaactgttccaacccctgcctgtttcacagttccaaagttgcttccacatttttggtatctacagcagcaccccactcctggtaccaatattgtattagtccattttcacactgctgataaacacatacctgacactgggcattttgtaaaaaagaaaagaggtttaatcgaacttacagttccacatagctaaggaattctcacaatcatggcagaaggcaaggaagagcaagtctaatctaacatggatggcagcaggcaaacagagagagcttgtgcaggggaactcctgtttttaaaaatatcagatctcatgagacttattca

SEQ ID NO: 873079 - DNA, 677 bp, Homo sapiens
cctaggggtaggtctctgaactggcccccccagggtgtacctgtgtcttatggtcgagattgcagaggtgagatagactccagtctcccatagtgctcccaggcttattaggaagaggaaattcttgcctaataaattttggtcagacagkttgatctcaaaaccctgtctcctgataagatgttatcaatgacaatggtacctgaaacttcattagcaattttaattttgcctccgtcctgtggtcctgtgatctcgtcctgcctccacttgccttgtgatattctattaccctattaagtacttgatgtctgtcacccacacctattcacacactccctccccttttgaaaattcctaaaaaaaacttgctggtttttgtggcttgtggggcatcacggatcctaccaatgtgtgaagtcttccctggatgcccagctttaaaatttctctcttttgtactctgtccctttatttcacaagcctgccaacgcttaggaaaatagaaaagaacctacatgattttcggggcagttcccccaaaaccaaaaacatactcaagtcactctgacttctgcaagcacaagggaccaatgggttcccaggaagttgcagaaccctgtgagatctaaccctcaggatgggccacccataaaagacggtggagcacagctccc

SEQ ID NO: 873080 - DNA, 677 bp, Homo sapiens
cctaggggtaggtctctgaactggcccccccagggtgtacctgtgtcttatggtcgagattgcagaggtgagatagactccagtctcccatagtgctcccaggcttattaggaagaggaaattcttgcctaataaattttggtcagacaggttgatctcaaaaccctgtctcctgataagatgttatcaatgacaatggtacctgaaacttcattagcaattttaattttgcctccgtcctgtggtcctgtgatctcgtcctgcctccacttgccttgtgatattctattaccctattaagtacttgatgtctgtcacccacacctattcacacactccctccccttttgaaaattcctaaaaaaaacttgctggtttttgtggcttgtggggcatcacggatcctaccaatgtgtgaagtctyccctggatgcccagctttaaaatttctctcttttgtactctgtccctttatttcacaagcctgccaacgcttaggaaaatagaaaagaacctacatgattttcggggcagttcccccaaaaccaaaaacatactcaagtcactctgacttctgcaagcacaagggaccaatgggttcccaggaagttgcagaaccctgtgagatctaaccctcaggatgggccacccataaaagacggtggagcacagctccc

SEQ ID NO: 873081 - DNA, 578 bp, Homo sapiens
tgcagtataatacaaaacgtttcacagtcctaaaaatccattgtcctatacctattaattcttctcttcctcccccaacccctgacaaccactgttttttttttactatttttatagttttgccttttcccgaatgtcacataattggaatcatatggaatgtagccttttcagacaagcatttaagattcttttcatatcttttctgtggcttaatagctcattatttttttagcactgaataatattacattgcatggatgtaccagtttttatttatcccttcacatattgaaagatattttgtttgctttccattttgggcaattatcgataaagttttgtaaacattaatcagcargtttttgtgtggacataagttttcaacccatttgggtaaatacccaaaatagtgattgctgtatcatatggttaccatatgtttagctgtgtaagaaactgccaaattatcttctaaagtggctgtatcattttgcatttctaccagaagtgaatgagtgttcctaatgctctgcaaattcaccagcaattggtatttttttcctcttacaattgta

SEQ ID NO: 873082 - DNA, 620 bp, Homo sapiens
ggttcaggaatttagagggacctcagttggttggttctggctcagtttctttcatgaaattgcaaccaggatatcagtaagagctgcagttatctgaaggcttgactgggcctagaagatactttcaaggtggttcactcatgtgactgttggcaggagatttcagttctttgccccatgagtgagtgtctccttagactgcttgagtattcccgtagcatgggagttggcttccccgagagtgagtgatccaacagagacagaccacgacagaagccacagtgtcttttatgatgtastctctgaagttgcaaagcatcattccatttttttctgttatttatttattttttagaaacagggtcttgctatattgccagggttagtctcgatctcctgaactcaagcaatcctccccctcagcctcccaaagtgcagggattacaggcattagccaccatatctggtttgttcttagacaagattcacaaaaaccagcccatgtccaaggggagattagacttttagatttcacctcttaaagatagaagtatcagggaatttgtggacatattttaaaaccatcacagtgttcaacagaaggggcactcttttgatga

SEQ ID NO: 873083 - DNA, 457 bp, Homo sapiens
ttaattttctgtctcgttgatctgactaatattgacagtggggtgttaaagtctcccactattattgtgtgagagtctaagtctcttttaggtctctaagaacttgctttatgaatctgggtgctcctgtattgggtgcatatatatttaggttagttagctcttcttgttgcattgatccctttaccactatgtaatgcccttctttgtcttttttgatctttgttggcttaaagtctgttttatcagagactaggattgcaacctctgcttttttytttgttttctatttgcttggtaaatattcctccatccctttattttgagcctatgtgtgtctttgcatgtgagatggaaaaagtttttttttaaaccacaagggatgaaccttgcataaattaagagccgtagcattgttgcaggcattgtgttgttacctgacaccattttggagtgg

SEQ ID NO: 873084 - DNA, 600 bp, Homo sapiens
gtcacttggctacgtctttactctttctgccatactctacatgctagagggaaacctgtgtctttaaaaacaacatttaaaaaaattttcatatatttattgcagacagggtcttgctttgtcacctaggctggagtgcagtggcacaatcgtggctcactgcagccttgacatcccaggcttaagtgatcctcccggctcagcctaccgagtagctgagactagaggtgcatatcagcatgccaggctattttttaaatttgtttggtagagatgaagtattattatgtcatccaggctcttggcttcaagtgatcctcctgccatgggctccgaaaatgctgagattacaggtgtgggccactgcacccagccggaaacctgtgtcttgtctttggatttgctctacttcatygtcacacagagatgggtgtgatagatcatcatagctaattattgaacaaaaggatttacatgtttcctttaaatatagacaaggtcctaaaagaatttaaaatagacttctgtgtaaaacaagaaaggttcttggattgcaaagacgatgtgctctaaatgtaggtgatgccaggagcagtgctt

SEQ ID NO: 873085 - DNA, 581 bp, Homo sapiens
acaagatattccttttgtatctactgatataataaatacactgaaaaatgatcctgactcagcccttggcaatggtagtggagagttctcacaaaactccatggaagaaaaacaagaaactaaaagcacagatggacagtaagtagtctctgtgctggagtgttggtggccgttagtttaattaatactagtcttctgaaatatagatctgatattttaaacataaatatagtcagccctttggttttgactttatcctttttaccattatataagaatgtttattaatgaagtacttatttgcatgtaattacattcaaagaaaatcaaatgtgacagttctaatatccctgtgtcagataaaccatgagaaatagtttgtgtgattcaaaaatgaaaatttttctttktgtgggtgttttgcctgttaacctatgtgacctatatgtaatatttaattttcaatttttaccaagtattcctggtggattttcactggtatatgaaaacaattatgcatattagaatatgatgttaaatcacgagtattatctttgcagtcaactttatgaaacagagaa

SEQ ID NO: 873086 - DNA, 409 bp, Homo sapiens
ttatactttgtgccatgactgtgagactgcccattttattgcacactttctaacattcttaccaaactgataaatacaagctggtacctagaagaaaaaaaggccgggcatggtggctcacacctgtaatcccagcattttgggaggccaaagcaggtggatcacctgaggtcagsagttcgagatcagcctggccaacatggtgaaaccccatctctactaaaactagaaaaattagccggcgtggtggcaggcacctgtaatcccagctacttgggaggctgaggcaggagaatcgcttgaacccaggaggcagatgttgcagtgagctgagatcatgccattgcactccagcctgggtgacaagagcaagactaagtctcaaaaaaaaaaacaaaaaaaactttcc

SEQ ID NO: 873087 - DNA, 627 bp, Homo sapiens
cttttatacaatgagaaaacatgcattgaaaatgacaattgaatgaaatctctctacaaatgtttaaatggcccatcaggtagcagaatgtacttgaagttttgattgtattcccaggaatatgggtttgacaaaccaaacattggtcataaactattttaacaatttagaagtcaccatcccaatatatattttatttaaataattttatcttttccaccatgagtcatggaatgcaacattttaataacaaaaggtttayggactcagaaaggacaaagtggctgtcctggttctccataagtccatgcttaatgttgaacttacatgctcttgaatagcatttttttactccaatttaggtccatagcactgataactgatgggctctcataggtaatttgacttagaccatgcaattcattcaaattgtatatctaaacaatttcagtattggctgatatagcatggaaatctggcaaaatattttcgtggtattcaattaatttttgttctgcttgggttagcagttttataaaccagtgagtcttttcattaaagttattcttatccagtccaaatgatgtgattctaaagttatcagaaacctgtattcaagtgtttttc

SEQ ID NO: 873088 - DNA, 672 bp, Homo sapiens
agcttagttcttccacataatcatttaattttattataatagcctcataaagtagataatgcagaccttattgtactgactttccttataaagaaagtaaagttttaatgtagaacttcattaagtacccagcaaataaatttaatgaaaatctcatccctaagcttaaaacttatrtatctgtcagtcctcttttggcatagaagctgttctgtctttactgtactgtttcctctttctgggaaaatggaaagactacttttcctggctttcataccattagtttgggtcatgagatagagttttgactgatggattgtgggtgaaaatgatgtaagatatatctagactttgtccttaaaaacatctgatgctacctgccagttcatttttcctctgcttatggatagcatagttgcaagataagggaggtggctacttttcaaaattgcattgtattttttgagagtaagaaataagtcttgtttggtacaagccaccaagatttggaagctattattacaggatagtgtaatttatccttattaatacataaatggaatcttccttaaaatgcatcagtcatattgaaaacattgtattcaaaatcaggctcattctcttcgtcctcttccttctacctacttcaaatatacccgttccataggtgaa

SEQ ID NO: 873089 - DNA, 642 bp, Homo sapiens
gaagtgagagaacaagctatgcagatagttgagggaagacattccaggcagaaggaacagtgaggaccaagcccttgggtcaagattataattagtgaattctaaggacagcaatggtagttgagaggttggaacagaatgaaagttggggagaatgatagaaagtgatgtcagagagttactcagacatgcaatgcaatagctttttttttttttttttgcagttgcaagatttaatagagtgaaaacagagctcccatacaacgggaggggacccaaagggggttgccactgcctgctcgaatgccctgggtttatatcctgatcattgtccctccccctgtgccctcaggcgatagatgattgastatttctttacctcctgcttttagcctgattggtattttagtgagccctttttttaatacctgattggtcgggtgtgagctgagttaccagccccgtgtttaaaggtgggtgccatcaccttccccagctaggcttaggaattcttagttggcctaggaaatccagctaatcctgtctctcagtccgccctctcaacaggaaaacccaagtgctactggggaggttggctgatgacagctctaactgcctcctgctgaactggggcgtagtagg

SEQ ID NO: 873090 - DNA, 405 bp, Homo sapiens
cagctaggcttaggaattcttagttggcctaggaaatccagctaatcctgtctctcagtccgccctctcaacaggaaaacccaagtgctactggggaggttggctgatgacagctctaactgcctcctgctgaactggggygtagtaggggttgtgcagttgagatttccttgggagggttgcctttgatgtcatcaacatcggagcatgggctagcaggctggctcaggggtccgtggtagatcttagtcatggactgtatctggggctccatttgaagaactatttgtagttttccagctttgattctgaaagagacaaatttaacaaggaggttaaagatacagggattgaaatgtatggcctgaagtacagggggaggcacatccaacagttagtagggtt

SEQ ID NO: 873091 - DNA, 581 bp, Homo sapiens
actcagcctcccaagtagctgggattacatgcgcatgccaccacccccagctaatttttgtatttttagtggaaacgaggtttcactatgttggccaggctggtctcaaactcctgacctcaagcgattcaccagcctcggcctcccaaagtgctgggattacaagtgtgagctaccacttccagccattaagtgtcttcttaaacagcttataccatgcactttatgatctaaatacttcgtttttaaacattatcatttgctaagaacatactttgtttgtartagaagagactcacacagttgagttatttatgaaaaattatgcatctttttaaatattttctggaagagtggtttcacatcttttgaagggtgtggctagtaatttccctcaccggtcgcatcaatcgcaagtaacagtagcctaataataatttctttcttatactaggtgataattaaaacttatgaactgctttatgtgttatttcattttatttccaaatttgagatttatatttcatgttttccagaagaaaagaactaatcaaagtgatttgtcaaagttgatacaacca

SEQ ID NO: 873092 - DNA, 568 bp, Homo sapiens
aactgtgtagaacttaccctggtcttcgcagcaaccctatgagaaagaaattattattgatcacatttacagattagaagttgaagctcaagacatttaagtcattttctacaataacagcaatacaatttggtatagcatgtatgtgtgtaaatcttttattttcatctttcaaaatattttggtgtttctttgttttcttctctcatttcctatagccttagccatgttttagtctctttttcctttataggtaagctgcttatcatccctattttgtccttaaaattaatttttttttttgagagggagtcttgctctgttggcaggctggaatccagtggcatgatctcggctcactgcaacctccractcccaggttcaagcgattctcctgccttagcctcctgagtagctgggattacaggtgtgcgccccgttcccagctaatttttgcatttttagtagagatgggatttcacaatgttggccaggatggtctcgatctcctgacctcatgatctgcctgcctcagcctcccaaagtactgggattacaggcatgagcc

SEQ ID NO: 873093 - DNA, 619 bp, Homo sapiens
tatcactggttgactgttggctggttggctttttatggcacttggaacaaactcttggcaatcttataggggaatacgattctggttatttgtaaactcattctactatttttatctttgagaattattgagtttgcctcttcatttctcaaactcaacttatttgttcattagttgagagtttagcactacatggtatgaaaaacttatttccctttctttaaatttaagtggtgatagtttacagctttttaaatgtaacacatattatctttttctctcttttttttcataataagttcagtactccgacattaggaatattagctggaatgttagagttttaagaaagctttgtggaataagaatttgttatctctamcttcttgcttgaagtatcttaatactgctgtgctccagatgacattttagtgttactttcatctaatgctacattagttaccatatgttctaaaagttcatttataattgatgtttgtcattgtttctttagcttcctcacctcttgcatctcctttcttacactcctgccaaaattcaaccatgagctcagttctccatgggtacttctatagtgaatcagtaattgtactatatg

SEQ ID NO: 873094 - DNA, 557 bp, Homo sapiens
ttattattttgagatatatttcatcaatacctagtttatcgagtgttttattggggttgtttgttcaaaatagtgtctttccttcttaagatatttttctttttttattatgctttaaattctggggtgcatgtgcagaatatgcaggtttgttacataggtatacatgtgccatggtgatttgctgcgcccatcatcccatcacctacattaggtatttctcctagtgttacccctcccctaaccccctgccctctcgacaggccccggtgtgtgatgttcccctccctatgtccatgtgttctcattgttcaactcctacttatgagtgagaacatgtgtttttagcatgaaggggtgttgaatatcatcgaaggccttttctgtatctattgagataatcrtgttgtttttgtcaatggttctgtttatgcaatagattatgtttattgatttgcacatgttgaaccagccttgcatctcggagatgaagccgactttctaaaattttaatttatttttaatttttgttcttcttaagacatctttaaccttta

SEQ ID NO: 873095 - DNA, 639 bp, Homo sapiens
atttcagagagtaggtatccatcacctactctttgagaaggtgaacagtgtaaaatgaaagaaacaaaggagccaaatctctaattcaaatgtaaaaataacccaaagacacatacttctagaacaacctttcccgataaggaaaaagcaaacaaaaaacagtctgtattctggagatgatggacccttggagactggggggaattatgtagaackaataaaatattcaacagggagatgcaactgaactttactggagtaagtaaaatgcttgggtctcaactgccagggaagtgtgtaggaaccactcccaaagttcagaccatcctgtcggcaagactgcggaacccgagttctcagtgcacttgaacaaatagctttgttacctacattctgtctagtgaatcacagggtcactaaattgcaaggacataggaaagcaacagctgaaatcatatgtcctggttacttaacatgaaaatacttaaaactgtcccaggaatccaataaacagcccccactctctgagaacagatatattctttgaataattttattaagtgactagtgctgttattgctaactagtgcagccctttccaattttttggaattaaattatgttcatcattggtatctc

SEQ ID NO: 873096 - DNA, 606 bp, Homo sapiens
ctaattccatttgatataagtattctgtaatcactgagaaggaatgtctaacatattaactcaatatttagcaactactaatttccttgatatatttcataacttcccttgactctaaataagattctttttaaagatatattcctatttccaggttttgtattttctcagtaataggtctaatattttgttcctataaatttactaatacgttttgttgacacatctcagcaatgaagtgagtatcctcatgaataaagcttagattttatactataaaatttaaccaatattacatagcaggatttgacacaaactttggtttggtctaagttwgagcagtgttgttttgttgaaaagccttcaggagatacaattcacctaccaattcatataccatatggtatatctaccatatagatcatacatttaaaatatacaattcagtggttttaacatatttaaatatatgtgcaaccatccctccacagttatttttaaaacatttcatcgcttcacaaagaaactccatatcccttagatatcaatccactctcccaccactacccaccatccctaagcaaccaccaatctaccttcaacctc

SEQ ID NO: 873097 - DNA, 668 bp, Homo sapiens
tttcagttgcacagactgctctgacactgttagcgatggcaatcaaatgccagcacaagaagcaagggggcacaaatgaatctcctgatgaggtctatttacagttcttgcagaatattatacgttttttacttcaaaacctctagagttttttatttttaaaactttggtgtatttgagaattggggctggtcatttcctggtatggctaatggtaaaatatcagcyctttctctcgttaattcatttgagggagatttcgttaagaggaagattcagtgatgaactcatggagggagagctgtacctctggttaggctcaggagtcgagagtgtgagctatggagtgaaagtaggtgttttcaaatctgcgtctactgttcctgatagttaaacactgggcaggtcacttactttgtgcttctgtttcctcagctgcaaaaaaaactagtacttgctccatgacattgtgaggtttagaattaatccatgcttacgacagtgactgtcaaaccaaaagtacacaatagatactatctgttactattgttctgtttttttattctttatattgttttacatctgagaacttcaaagattatttgatacaaatatctccactgataaaaatatcagtagagaaataggataattatgcttaaccagct

SEQ ID NO: 873098 - DNA, 668 bp, Homo sapiens
tttcagttgcacagactgctctgacactgttagcgatggcaatcaaatgccagcacaagaagcaagggggcacaaatgaatctcctgatgaggtctatttacagttcttgcagaatattatacgttttttacttcaaaacctctagagttttttatttttaaaactttggtgtatttgagaattggggctggtcatttcctggtatggctaatggtaaaatatcagctctttctctygttaattcatttgagggagatttcgttaagaggaagattcagtgatgaactcatggagggagagctgtacctctggttaggctcaggagtcgagagtgtgagctatggagtgaaagtaggtgttttcaaatctgcgtctactgttcctgatagttaaacactgggcaggtcacttactttgtgcttctgtttcctcagctgcaaaaaaaactagtacttgctccatgacattgtgaggtttagaattaatccatgcttacgacagtgactgtcaaaccaaaagtacacaatagatactatctgttactattgttctgtttttttattctttatattgttttacatctgagaacttcaaagattatttgatacaaatatctccactgataaaaatatcagtagagaaataggataattatgcttaaccagct

SEQ ID NO: 873099 - DNA, 668 bp, Homo sapiens
tttcagttgcacagactgctctgacactgttagcgatggcaatcaaatgccagcacaagaagcaagggggcacaaatgaatctcctgatgaggtctatttacagttcttgcagaatattatacgttttttacttcaaaacctctagagttttttatttttaaaactttggtgtatttgagaattggggctggtcatttcctggtatggctaatggtaaaatatcagctctttctctcgttaattcatttgagggagatttcgttaagaggaagattcagtgatgaactcatggagggagagctgtacctctggttaggctcaggagtcgagagtgtgagctatggagtraaagtaggtgttttcaaatctgcgtctactgttcctgatagttaaacactgggcaggtcacttactttgtgcttctgtttcctcagctgcaaaaaaaactagtacttgctccatgacattgtgaggtttagaattaatccatgcttacgacagtgactgtcaaaccaaaagtacacaatagatactatctgttactattgttctgtttttttattctttatattgttttacatctgagaacttcaaagattatttgatacaaatatctccactgataaaaatatcagtagagaaataggataattatgcttaaccagct

SEQ ID NO: 873100 - DNA, 740 bp, Homo sapiens
acaaaaattagctgggcatggtggtacatgcctgtaatcccagctactcaggaggctgaggcaggagaatcgcttgaacccaggaggtggaggttgcagtgagctaagatcatgccattgcactctagcctgggcgacagggcaagactgtgtctcaaaaaaagaaaaaaaaaaaaaagatacaatatgtcccccaaagatcagataacttagctctaataaataaaatccaagaagcatattctgctacagtaaatccttaaagtaggaacaaatgccttaggagaaagcctttatctttagaaagaactgtrtcctattttgagtgatgataaatattcaacaaaaaatattttgtcatggattgtatcattaccactgattgacaccaaagataaaccaagcagtgaagaaggcccaacccacaaaccaacatcatcggtgatattgggtccaagaaagattcgtcaaagatgtcatcacaatagtgcttttgccctattagttaagttgggcaaacgcactctcagatgcaaaacaccttacctacattgcttacttgcaatattatttttttaacttttaaaatattttttacattttttattcttacctggaaataagagtatttgagaaacctggagtacttcagaaactttacagtttaatattgtccatgttggaaacaagtattgactatcaaaaaatatgaaaataaaaatatataatttacatttatg

SEQ ID NO: 873101 - DNA, 603 bp, Homo sapiens
ctgtatgtttttgacaactttgtcaaaaatgagttcactgtaggtgtgtggatttacctctggggtctctattctgttccactgatctatgtgtctgtttttattccagtaccatgctgttttgattactatagctctgtagtataatttgaagtcaggtaacgtaattcctccagttttgttctttttgcttrtgatagctttggctattctgggtcttttgtggttctatataagtattaggattttttttctatttatgcaaagaatgctatcggtattttgatagggattgcattgaatctgtagaccgctttgggtagtatgaacattttaacaatatccttccaatccatgaacatagaatatctttccattttgtggtgttctcttcaatctctttcattagtgttttatagttttaattgtaaacatctgtcacttctttggttaattcctaggtatttaattttatttgtggcattgtaaatgcaattaatttttatttctttttcattttgttcactgttggcatatagaaatgctactgatttttgtatgttgagtttgttatcttcaaatttactgaattcgtttatcagt

SEQ ID NO: 873102 - DNA, 671 bp, Homo sapiens
gcagatataacaattctaagtatgtatgtacccagattcatgaagcagatattactagttctagagagagagcaagactgcaatacaataatagtgggagacttcaacatccccctttcagcattagacagtttatctagacagaaaatgaacaaagaaacattggatttaaactgcaccttagaccaaatggacctaacaaacatatacagaacattctatccaacaactgcagcatattcatcctttggatcaacacatggcacattcttcaggagagatcatgtgttaggttgcaaaataagtctcaacaaattttataaaattaaactcatatcaagtatcttctcagaccacaatagaataaaactagaaatcaataccaagaggaaatttggaaactatacaaatacatgggaattaaacaacatgcccctaaacaaccattgagtcaaggaagaaatgaagatggaaatttaaaaaaaagtcttgaaaccagtgaaaatgaaaacascatatcaaaacctgtgggatatagcaaaagcagtgctaatagagaagtttatagagataaatgcccacactaaaaaaaacacacctgatttaaaataacctaacaaggcacctcaatgaacctcaagagcaaaccaaaccccaaattagcagaagaa

SEQ ID NO: 873103 - DNA, 616 bp, Homo sapiens
ttacatgtaagtgtttatcttgcattgatctttgtataaggtgaaaggaataagtccagtttcaagcctctccatatggctacctagttatcccagtaccatatattgaatagggagtcctttccccattgctttcttgtcagctttgccaaagatcagataattgtacgtgtgtggccttacttctgggctctctattctgtcctattgatctatrtgtctgtttttgtaccagcaccatgctgttttggttactgtagccttgtagtatattttgaagtcagatagtgtgatgacttcagctttgttctttttacttaaaagtgtcctggctatttaggatctttttagttccatatgaattttaaaatagtccttttctagttttgttaaaaatgtcattggtagtttgataggagtatcattgactctgtgaattgctttgggaagtatggccattttaatattgatttttactctccgtgaccatgaaatgttttttcatttgtttgtgccctctctgatttctttgagcagcagtttgtaattctcattgtagatatctttcacctccctggttagctgtattcttaggtatttcattttgtggcatttg

SEQ ID NO: 873104 - DNA, 616 bp, Homo sapiens
ttacatgtaagtgtttatcttgcattgatctttgtataaggtgaaaggaataagtccagtttcaagcctctccatatggctacctagttatcccagtaccatatattgaatagggagtcctttccccattgctttcttgtcagctttgccaaagatcagataattgtacgtgtgtggccttacttctgggctctctattctgtcctattgatctatgtgtctgtttttgtaccagcaccatgctgttttggttactgtagccttgtagtatattttgaagtcagatagtgtgatgacttcagctttgttctttttacttaaaagtgtcctggctatttaggatctttttagttccatatgarttttaaaatagtccttttctagttttgttaaaaatgtcattggtagtttgataggagtatcattgactctgtgaattgctttgggaagtatggccattttaatattgatttttactctccgtgaccatgaaatgttttttcatttgtttgtgccctctctgatttctttgagcagcagtttgtaattctcattgtagatatctttcacctccctggttagctgtattcttaggtatttcattttgtggcatttg

SEQ ID NO: 873105 - DNA, 695 bp, Homo sapiens
accagaatataatttacaaggacagagcacttttttgtttaaattataaagccccttgacaaggaccttcttaaaaagtgccaaatagcattagtgatattcatcaatttccactaaattgttgtatgccaaagttagttttactgtttcatttacacactacattgtacatggctttactactccaaactttaaaccaaaaataatcttccttcaaaggacaaaggagaccctggaggtgtttgctagtcatttaaaacagctatggctgacagtttacagcttaccctccagaaaaagtcctaatgcgcttttccaggcttgctcccaatgggtagatccctgctcagagcctggctagttattggcagtagatcaaccttcacttgctgcccyctcctccactttccctcatcctctgtcactcactcattagaggtttgtaaggcaaagttatcaagacagccttctgagaataagcataaggaggctcaccagctacacaatcataggagaatattcatgtggcattaatcctttctgtgtgattataccacctcactgattttcccacctgtaactgtgtaaagcaaagaagacagaacttcacctttgggacttctttttccttaagaattctggcaggtttactggttttgaaatgaaaagcccctacacctgaatttaatgtcagg

SEQ ID NO: 873106 - DNA, 586 bp, Homo sapiens
atctcggagaatccatgctgaaaaaagaatgtatatcctgcagctattgggtagaatgttctgtaaatatctgttaagtccatttgttctaggttatagtttaagtccatagtttatttgttgactttctgtcttggtgacctgtttagtgctgtcagtggagtattgaagtcmcccactattattgcattgccatccatctcatttctttggtctagtagtaattgttttataaatttgcgattgtcagtgttagctgcatatatattcaggattatgatattttcctgttggactagtccttttatcattatataatatccatctttgtctttttaactgttgttgctttacagtttgttttgtctgatataagaacagctactccttctcacttttggcttccatttgtgtggactacctttttccacccctttaccttaagtttatgtgaatcttttatgtgttaggtaaatctcttgaagacagcagaaacttggttggtgaattcttatgcattctgccattctgtgtcttcttttttttttttcaaaccatatccagctttattaaagatactttccat

SEQ ID NO: 873107 - DNA, 619 bp, Homo sapiens
ccacgtttctgctccgtctcacaagactgaatataaattgatatataacgtggatttggggaagacagactggtagattactctcagtactccttttttacgtggatttggggaagacagactggtagattactctcagtactcctttaagttaatttaaatatgaastagtagttgctgtctgcaagaaagccttgttggttcattttgaatttttgttttttacttttttgcaaatggagaaaggattgtggtccacggaatgctgtcatgttgccatgttgtcatgcaatacagtatttttgtcgcagaaaaatgtcttttattattttttgaccaattatggtttgccatgtgtactcaaataatcgcagacacccacgttactttctgagttactcacaagaataacccaaatgtcagacagataataacactggctagatctggtctttttatggaatattgctgtttagtcttggaagtgtgtgtctgggggggtggtaggagaaggggtgtctgtgtcaaactgatttacatcaagacaaaataaagggacagcttgaagttcttattagatctttgattattctgctgttttattgtgactcccaatcct

SEQ ID NO: 873108 - DNA, 592 bp, Homo sapiens
gggatttttaaattgtttataaagccttaagttcctctgacaagaagaacatataaattcgtgtcacaactagaatatttcaaacacagtaatactgtcacttggtataacttatttgtggagacattgaaaagcagtcatgatgrtcaaaataacacatttggtttatgtgaatctaaagactcatgttctattagcaccaattgaataattataaaaaacattggaccatttaaaaagtatgttctcttttttttttttttttttttttttttttgagacggagtctcgctctgtcgcccaggctggagtgcagtggcgcgatctcggctcactgcaagctccgcctcccgggttcacgccattctcctgcctcagcctcccgagtagctgggactacaggcgcccgctaccacgcccggctaattttttgtatttttagtagagacggggtttcaccgtgttagccaggatggtctccatctcctgacctcgtgatccgcccgcctcggcctcccaaagtgctgggattacaggcgtgagccaccgcgcccggctaaaaagtatgttctcatacattatttcatttgat

SEQ ID NO: 873109 - DNA, 592 bp, Homo sapiens
gggatttttaaattgtttataaagccttaagttcctctgacaagaagaacatataaattcgtgtcacaactagaatatttcaaacacagtaatactgtcacttggtataacttatttgtggagacattgaaaagcagtcatgatggtcaaaataacacatttggtttatgtgaatctaaagactcatgttctattagcaccaattgaataattataaaaaacattggaccatttaaaaagtatgttctcttttttttttttttttttttttttttttgagacggagtctcgctctgtcrcccaggctggagtgcagtggcgcgatctcggctcactgcaagctccgcctcccgggttcacgccattctcctgcctcagcctcccgagtagctgggactacaggcgcccgctaccacgcccggctaattttttgtatttttagtagagacggggtttcaccgtgttagccaggatggtctccatctcctgacctcgtgatccgcccgcctcggcctcccaaagtgctgggattacaggcgtgagccaccgcgcccggctaaaaagtatgttctcatacattatttcatttgat

SEQ ID NO: 873110 - DNA, 619 bp, Homo sapiens
ggttcaggaatttagagggacctcagttggttggttctggctcagtttctttcatgaaattgcaaccaggatatcagtaagagctgcagttatctgaaggcttgactgggcctagaagatactttcaaggtggttcactcatgtgactgttggcaggagatttcagttctttgccccatgagtgagtgtctccttagactgcttgagtattcccgtagcatgggagttggcttccccgagagtgagtgatccaacagagacagaccacgacagaagccacagtgtcttttatgatgtastctctgaagttgcaaagcatcattccatttttttctgttatttatttattttttagaaacagggtcttgctatattgccagggttagtctcgatctcctgaactcaagcaatcctccccctcagcctcccaaagtgcagggattacaggcattagccaccatatctggtttgttcttagacaagattcacaaaaaccagcccatgtccaaggggagattagacttttagatttcacctcttaaagatagaagtatcagggaatttgtggacatattttaaaaccatcacagtgttcaacagaaggggcactcttttgatg

SEQ ID NO: 873111 - DNA, 631 bp, Homo sapiens
caaaactggataatttataaacaaaggagctttatttgatgcatagttccagaggctaaacaggaagcatggctaggaggcctcaagaaacttgcaatcatggtggaaggcaagcaggaagcaggcaccttcttcacaaggtgtttagaaggagtgtgtgtaagaacaaggaaatgccacactttaaaaaaatcaggtctcataagaactcactcagtatcatgaaagagcatgggggaaactgtcccccatgattcaatcacctcccactgggcacctcctgggacacataaggattatggggattacaattcaagatgagatttgaatggggaaacagccaaatcatatcattccacmcctggcccttcccaaatctcatgtcctcacatttcaaaacaaaattgtttcttcctaatagtcccccaaagtcttaactcagtccagcattaatccaaaagtccaagtccaaagtctcgtctgagacaaggcaagccccttccacctagaagcctgtaaaataaaaagcaagttagttacttctaagatacaacgcaggtacaggcattgaataaatgctcccattccaaatgggagaaattggccaaaacaaagggactacaggccctat

SEQ ID NO: 873112 - DNA, 645 bp, Homo sapiens
ccagttcccaataagttcctcatctccatctgagaccatcttggcctggacttcattgttcacatcactatcagcattttggtccaaactattaaacaagtctctaggaagttccagactttcccacatcttcctgtctttttctgagccctccaaactgttccaamctctgcctgttacccagttccaaagttgcttccacattttaaggtatctttataggagtactccactcacttggtacgactttattgtattagtccattttcacactgttataaagaaatacccaagactgggtaatttataaaggaaagaggtttaattgattcacaggtcagcatacctggggatgcctcaggaaacttacaatcatggcagaaggggaaggaggcatgtcttacgtggtggcaggcaagagagtgaaaaatccaggggaaactgccatttataaaaccatcagatctcgtgagaactcactcattctcatgagaatagcatgggggaaaccacccccatgatccaattgccacccacccttgtcacatggggattatggggattacaattcaaaatgagatttgggcggaaaaataaagccaaaccacatcactccgtaaccccaatcatcaccctagcccatcc

SEQ ID NO: 873113 - DNA, 605 bp, Homo sapiens
atgaccaatgtcatcttccagcttttagcttacctttgtatttttaaatgtgtatataaataattttatcatatggatgttttatatttaccttccattgattttattgtttatctttattataactttaatattatggggtttttttgagttttaaatttcttttcctccttcaatattttatttattttattttattcattttgaggcagggtcgtactctattgaccaagctagagtgcaatggggtgatcatggctcactgcagcctcaaccttccaagctcaagtgattctcccatcacagcttctcgagtagttgggtgtataggcacacaccatcatgcctggctaatgtttttattttttgtagagcctggatctccctgtgttkcccaggccagtcttgaactcaaagcaatccttctgcctcggcctcccaaagtgcagggatttcaggcgtgaaccatcatgcccagcctcaatattgtattttattctttgatttctttttttctgtattttattatttgaatttaaaaattaatttggggtaaattgatgtttatatgatattgagtcttcccatttgtgtgtatggatatg

SEQ ID NO: 873114 - DNA, 575 bp, Homo sapiens
ggtttctctctctgggactctccctgtatcagcaatggtactatcacttttccttgtcacccaatcactatgaacttcttcccctctcacacccatacccaaagtaacgggtagtgggaatgggtggatgttcatcccacctctttttttaatgaatamattaaataaaagagtatctccacaagtttgcctacctatcattttaaagtaaaaccagtttaatttgattgttgacctctctggtgaaattgctagaaatgaagaaagtatcttaccaacctaaaggaaatggagataaaagagttggagaagaagaatgatgcctaaggcaagtctttaaaaaagagtttttcacatatctttctcttaccaaactttaggttgctaatacatttatcactataatttgatttttaattgatattcctggtgaaaaattgatacatttgatagattcagaggctgtaataaagtcatctgtcctaagaactaagaagtacacagagtgatgtagttcactaaaggtttcccccacctcaatttacatgggccttaactttcaagagattcaacat

SEQ ID NO: 873115 - DNA, 575 bp, Homo sapiens
ggtttctctctctgggactctccctgtatcagcaatggtactatcacttttccttgtcacccaatcactatgaacttcttcccctctcacacccatacccaaagtaacgggtagtgggaatgggtggatgttcatcccacctctttttttaatgaatacattaaataaaagagtatctccacaagtttgcctacctatcattttaaagtaaaaccagtttaatttgattgttgacctctctggtgaaattgctagaaatgaagaaagtatcttaccaacctaaaggaaatggagataaaagagttggagaagaagaatgatgcctaaggcaagtctttaaaaaagagtttttcacatatctttctcttaccaaactttaggttgctaatacatttatcactataatttgatttttaattratattcctggtgaaaaattgatacatttgatagattcagaggctgtaataaagtcatctgtcctaagaactaagaagtacacagagtgatgtagttcactaaaggtttcccccacctcaatttacatgggccttaactttcaagagattcaacat

SEQ ID NO: 873116 - DNA, 575 bp, Homo sapiens
ggtttctctctctgggactctccctgtatcagcaatggtactatcacttttccttgtcacccaatcactatgaacttcttcccctctcacacccatacccaaagtaacgggtagtgggaatgggtggatgttcatcccacctctttttttaatgaatacattaaataaaagagtatctccacaagtttgcctacctatcattttaaagtaaaaccagtttaatttgattgttgacctctctggtgaaattgctagaaatgaagaaagtatcttaccaacctaaaggaaatggagataaaagagttggagaagaagaatgatgcctaaggcaagtctttaaaaaagagtttttcacatatctttctcttaccaaactttaggttgctaatacatttatcactataatttgatttttaattgayattcctggtgaaaaattgatacatttgatagattcagaggctgtaataaagtcatctgtcctaagaactaagaagtacacagagtgatgtagttcactaaaggtttcccccacctcaatttacatgggccttaactttcaagagattcaacat

SEQ ID NO: 873117 - DNA, 627 bp, Homo sapiens
agtggctcatgcctgtaatcccaggactttgggaagctaaaacgggaggaatgcctgaggccaggtattcaagaccagcctgggcaatatggtggaagcctgtcttgaaaacaaagcaaaacaaaaaaccaagaaaattttggctaaacactaaattgtgcatgtataacctaaaactccacaaggctaagcaaagatcaaatacaagaaagctgtaagctaaacaattctcagagctcacaatgtaaagagagaaatttgagttctgacaagtagagtggagtagacttaatgaacatccagmacatacagcagagaccgcagaagagtcatgtgttagaaggaggactaaatcagcagctgagtaaaagctattcaagaaccccacccccaacaaaacaagtcttgaaaggatcatgctgattgcaagtaacttgacaacctgccaaaacaaagtttgtcactctaaaaggacaaggtccagacactccaaaatataatcattacaatgtccagcataaaataaaaaaattaatagacacaaaagatcaggaaaatgtgatctataaccaggaaagaaaatggaaacagtcaacagaaacagacccagaaatgaaaaagatcatg

SEQ ID NO: 873118 - DNA, 586 bp, Homo sapiens
atgtgtcccagagattctggtactttgtgtctttattcttattggtttcacacaacatctttatttctgccttcatttcgttatgtacccagtagtcattcaggagcaggttgttcagtttccatgtagttgtgtagttttgagtgagtttcttaatcctgagttctaatttgattgcactgtggtctgagtgacagtttgttgtgatttctgttcctttatatttgatgaggagtgctttacttccaattatgtgrtcagttttaaaataagttagatgtggtgctgagaagaatgtatattctgttgattttgggtggagagttctgtagatgtctattaggtccacttggtgcagagctgagttcaagtcctggatatccttgttaactttctgtcctgttcatctgtctaatattaacagtgaggtgttaaagtctcccattattattgtgtgggagtctaagtctctctgtaggtcactcaggacttgctttatgaatctgggtgctcctgtattgggtgcatatatgtttaggaaagttagctcttcttgttgaattgatccctttaccattatgtaatg

SEQ ID NO: 873119 - DNA, 597 bp, Homo sapiens
tggtgagaaatgaaagttaaagtcatattaagaagaaacccaaatatcacactaaagaacttggccttttatcctattggtcgtagagtacaactgagctttaaaaaaaaaaatcaagggaatgatatcagatttctcctttagaagaaatttctagcagcactatagtagggggattggaaagaggtgagactgtaggcagagaaaccagacaggagctcctcctactaatgttttatagtttcaacttctactgcttttgtttgtcacaagtttaatactgtcttttttgaactttgctgagacaggaggtttgaacactgccatcaagtcagcaacttgytcatgttgccctctattggtagaaaggaaaagaaattactatcaagggcattatttcacatttcatttgttgatggtatttcgattttcctgaaataatgtttgttatgttttgtaacataaaaaacatatgctggcattatattacaattacaggaatacctctgaaattacacttcgagtagtaaggggatagtgtagacagcaacaaccacaggagttcaaagagagaaatgaatatggtctagcctggag

SEQ ID NO: 873120 - DNA, 634 bp, Homo sapiens
ataaaacaggttaagaactcatgaaaataattttaaactttacttgaaatatacatacaaaaatggattatactattttataacttgcttttttgatttttgcttaataatataaaatgacataattccatatcattagtcttctgcaagactattctttttatttaactgcatcatttttcattcatcagatagtccataattttaccaatttcttgtatttggataatcacattgtacccaatcytacgaatattttgaagaatattcctttctgttaattctagcataacatcttctgtctttacacggccaagccaacctttttatgattgatgagaaatttgatcctcatcaaatagaggaattatgaatcccacatggttaaggagaaagtattcctatggcacttcagttaagtatctttgtagcactaattgcattccactacataatacattttcttcattcaatatttaacaaatatttgagtacctgctatgtgccaggcatgaagggtgggaggggttgcaattttaaaggtgttcagcgtgatacaagaccatgtcagagcagcaatggttgacagactgcagagggctgtataagccaccaagaggagtctggcttttat

SEQ ID NO: 873121 - DNA, 689 bp, Homo sapiens
ccttactctcactcagtggggcctctatctcttaaaatttattttagtttaagagggggtcttgctctgttgcccaggctggggtgcagtggcatgatcatagctcactgcagcctcaaactcatgggctcaagcaatcctcctgcctcagccttccaagtagctgggactataggcgtgtgtcattatggctaattatttttaaaatttatttttgtagagatggggtcttgctgttttgcccaggcaaactcytgggctcaagagatctttctatcttggcctcccaatgtgctgggattacaagtgtgagccaccatgcccagccaaaaaaaatttgtttggatagcatatattctttctttggtgggcaggctgaccgagtttaataaagccttcaaatctgagaagccagatgggctggggcagttgattttcccttgtcccattgatgatcagcttctttttatgtatttatttgtcatggttttgattggtcttccatctcacaaagcagtgagaatacaactctcgttactgtcatagtgaatccctgatacagctaggcatcctgtgtgcctctcctggtggggcagaccctgagaggggtctggaatgtagcagcaagccagcactgtcgactcatacatgtgggagtagctgtttatggagtctttttcctctctagc

SEQ ID NO: 873122 - DNA, 631 bp, Homo sapiens
taccaattagtatagtttttagaaatttgaattttcattctctgaggtgctgtttatttcctctgaatttttaaaagtgggctattggtattttttcctattgatttataggagatctataacttttatcagactagtggcagtttttttgtctggtttattggttggcaatgattttcatctaaaaatatgatgaaaatattttgtgaaaatttttatgtagtcggatctatttgtctgttttaaaaaatatttcttcccttgcttttatgcttagacagtccttgagtttgagtttgtgacttttcttttctcttctctccctttcccttagttttcttttcctccattcctccttgctttctctgtttttctgtgtctttaacatttaactcttttttatacatctggattttatgttggtgcgatgggtgaactccagctcatacttgatctctttgaaaatagctaatcctctcagtasagatttttgaatagtctttctccccacctcattatttgtgatggtttctttatcattaatttcacatatgtacgagggctgtttcatggctctccattttttctctgttggtaatcaacaaatcgtcactgcagagtgattattgtg

SEQ ID NO: 873123 - DNA, 615 bp, Homo sapiens
acttcatgtcccataaacccctctgttccctcttggaatctgttgccattaacctgtgatgtatgtactctgccaccattacctctagctctagcactcatccattcatatggcaaatatagagagagcaccaaccattgccaggcactctgctaggtgctagacatgcacagtggaaaagaggaaagagcctgtaccatgagagagcttacggtctagtggaaatgcagacaagagagctaattaaaatatgcagtgttaagaaaaatcctctgtgctgtaatggaacccagtccacaggaaggacactcagattaccctttagaaggagtgatgaaggaaagtttcccagagaagtaatccagaacccaaaaaagaaaggcttaaagctgtgggtctcatgcttccaggtctcccccaaaggatacactgggattccaggagtkccagggtgacaaagcagtcaatcatccaaaccaagcttggacaggctatggcaagtaatggggacatacaaatctttaatctctgtttgctgttggtgatgatggcatcactgaaatttttgaggtgtattctcagggttatttaacacacattaaaaagaaaaatgta

SEQ ID NO: 873124 - DNA, 419 bp, Homo sapiens
tcccttgctcgtgctcttttgcctgccaccatgtaaaatgtgcctttgctcctccttcaccttctgccatgattgtgagggctccccagccatgtgaaagtgtgagtccattaatcctctttttctgtataaattacccagtctcaggtatttcttcctagtagtataaaaatggaaaaatatgctatgcttcagtcagaatgcattctagctattgcttrtataaaaaaactttcttgcccttccttaatttggaagagctcctataacttgaatttagatggtaaaataattacatcaaagatgagtatcatctagaagctttccccccttaagcactgatttgtaagttacatttagaaatacccatttctttaattctttcctacccattttcagttgtttggaataaagaggag

SEQ ID NO: 873125 - DNA, 469 bp, Homo sapiens
aagagtgacctttaatccagtttctaacaagtacctcatctccatttgaggccacctcagcctggattttattgtccatatcactatcagcatttgggtcaaggacattcaacaattctctaggacgttccaaactttcacacattttcctgtcttcttttgtgccctccaaactgtttcagcctctgcctattacacagttctaaagttgcttccacatttttgggtatctttacagcagtrccccactctctgtggtacaaatttactgtattggtccattcacattctgctaataaaggcatactcaagactgggtaatttataaaataaagaggtttaactgactcacagctccacaggcctagggaagcctcaggaaacttacaatcatggtggaaggggaagcaaacacagccttcttctcagggtggtagcaaggagaagggccgagcaaaagggggaaaag

SEQ ID NO: 873126 - DNA, 631 bp, Homo sapiens
tcacctcaatctagcctggatgacagagtgagattctgactcaaaaaaaaaaaaaaaaaaaaagaaaagaagaaagaaagaaagaaagaaagaataaagcaaaataatagaggtgcagaggagatgcaaattccacatatggtcagataaacttgttgaatgagaaacacaattttccaacttagaaaataatgaaatcgaaagttgaagagggtgtattcaccgagaggaagtgggagagtcaatgactggcatttccatgagttcagatggcaggtccygtggggatcactgagagctggaattgcaggaagagccacttgtgttgtgcgtcttgagtgatgacaggcaaatagtggttctggaagtgccttatggaatcaggatggctggggaggttaatcatggaactgggaggccagtgtgtccaacacgttatgcatgcagaaggggagactctgatggggttcagcacacactaccccaaaatacagcattttggcatttgaaaaaaagaaaacaacaacaacagcagaaggagaaaacctactctcacctatccctcagccctttccctcagccctttcccctgaaacatgttgcccaggctggtctcgaaccccaccttcct

SEQ ID NO: 873127 - DNA, 633 bp, Homo sapiens
  misc_feature 318, 334, 367, 423: n = A,T,C or G
attttcttacacaaaaatctacttgtccaagaatttctgtagagtctataaccagagtgcttcagtgctctgaaaggagagtgaaattagcacaataatagctttcttctcttcataagaatattttaatgtagataaaataagagcatattagaatcagatttataattatatagcaggttttttttttttttagtctgagcttcaggtaggccatttctgcttagagtccttaaaatttttaaatattcactatgaatgtcttattaaaatatgttctacatctttttaaaagtcttacaatagagccattccctnccagattgtaatttanactattttcattgctttttacttgggcttattntaccttttcagtttcttaaaaaatatctcttaggcttcgcatttgtgttcttcttntacattaattcaatcaaatatcacrttactatttataaaacatatatatttattttaaggattcaaactctttttagttttaaaatgccatgatttagacttgcggttgttttttgtatacaagaacaaatatgaaaactgaattttagagaaatctctaattcctatgctagtgacatttcaaattcaaagtagtttaagaacactatt

SEQ ID NO: 873128 - DNA, 582 bp, Homo sapiens
ggtgggagcaaaatgctgccagtctctttgcataacaagtgtcacctttgcggcagttcccaaccagttcctcatctccatctgagaccacctcagcccggactttattgtccatatcattatcagcatttttgtcaaagctattcaaaaagtctccaggaatttccaaactgtcccacatcttcctgtcttctgagctcttcaaatctctaggaagttccaaacttttccacattttcctgtcttcttctaagccctccaaactgttctaatctctgcctgtcacccagttccaaagtcgcttamacatttttgggtatctttacagcagtgccccactctctgtggtaccaatttactgtattagttcattctcacacttctaataaagacatacctaagaccgggtcgtttataatgaaaaagaggtttaatgaactcacagtttcatatggctggtgtattagtccattttcatgctgcttataaagacataactgagactgggcaagtaacagaagaaagaggtttattggacttatggttccacgtggctgggaggcctcacaatcatggcagaag

SEQ ID NO: 873129 - DNA, 687 bp, Homo sapiens
caacacatgggaattcaatatgagattttggtggggacacagtcaaatcatatcattccaaccttggccccttccaaatctcatgtcttcacatttcagaaccaattatgctttcctgacagtacccaaagtcttaactcatttcagcattaactcaaaagtccacagtccaaagtctcatctgagacaaggcaagtccctttcacctatcagcctgtaaggtcaaaagcaagttagttacttcctagataaaatggtggtacaggcattgggtaaatatagccatttcaaatgggagacattggycaaaacaaaggggctacaggccccatgcaagtccaaaaatccagcagtgcagtcaaatcttaaagctccaaaatgatgtcctttgacgctgtctcacatccaggtcaagctgatgcaagaagtgagctcccatggccttaggcagctccacccctgtggcttcacagggtatagtccccttcctggctgctttcacaggctggtgttcagtgtctgcagtttttccaggtgcacagtgcaaactgtaggtggatctaccattctggggtccagaggatggcggccctctgctcacagctccatgagtcagtgccctagtaggggctctgtgtgggggcaccaatcccacatttcccttctgcactgccctagcagaggttc

SEQ ID NO: 873130 - DNA, 577 bp, Homo sapiens
ggacattttttacaatgatcattatttacagatgcaagtgctgtgtgaaatatagtacttaaactcaactataatttaacactacctatttccataatgagtgttcaaaaggatgaatcaatagaccttccaagagaacatgtaatagcttttaagaatataggcgtgcttcaattatttgaattaaaatcaaaattgaggaatacaaattttagcttttctttctctgtagggttagcagtaaatcatcaaagaatatactcaatttcattagtttgtataaacaagacatatctgatttgaaaagtaataactcaagaaaggaaatatgtggacttgtttttcattcaaatatagatatatacttgtaacatgaagaaattgactactggcgtggcttgytttgcactgaaaataaactaagaaacccctatgccaatataacttgtgaactcaaaatatctgagacaggtctcagtcaatttagaaagtttggttaaggacacacccatgacacagcctcaggaggtcctgacaacaagtgcccaaggtggtcggggtacagcttgctttttag

SEQ ID NO: 873131 - DNA, 577 bp, Homo sapiens
ggacattttttacaatgatcattatttacagatgcaagtgctgtgtgaaatatagtacttaaactcaactataatttaacactacctatttccataatgagtgttcaaaaggatgaatcaatagaccttccaagagaacatgtaatagcttttaagaatataggcgtgcttcaattatttgaattaaaatcaaaattgaggaatacaaattttagcttttctttctctgtagggttagcagtaaatcatcaaagaatatactcaatttcattagtttgtataaacaagacatatctgatttgaaaagtaataactcaagaaaggaaatatgtggacttgtttttcattcaaatatagatatatacttgtaacatgaagaaattgactactggcgtggcttgttttgyactgaaaataaactaagaaacccctatgccaatataacttgtgaactcaaaatatctgagacaggtctcagtcaatttagaaagtttggttaaggacacacccatgacacagcctcaggaggtcctgacaacaagtgcccaaggtggtcggggtacagcttgctttttag

SEQ ID NO: 873132 - DNA, 621 bp, Homo sapiens
cattgattcactccagaaaggtgggacaacttgaaacaggggagctcccatgtcataggtgcattcaaagattttctgattggcaattggttgaaagagttaagttattatccaaagacctggaatcaatatgaaagtgtgtctggattaagataaggagttttagagaccaagattcttatcatgtagatgaagccttcaggtagcakgcttcagagacaatcatagtaaatgtcccttaccagacttaagaaggtgctagactcttagtctttcctggatcaggaaaagacccggaaagggaagaggcttctctatagaatgtagattttccccacaagagacagctttgcagaaccatttcaaaatatgccaaagaaatctattttggggtaaaatactttgatttctttcaggacctgctatctgtcatgtgatgctatagtagagtcaggttggactttggtatctcattgctacaaagagtctgttttgttagtcttaagatctctgttttaacgtgaatgctggtcagttgtgcctggattccaaagaaaggggagtgtaatgaggcctgtctcacctccctttccatcatggtctgcgctagtttttcagggt

SEQ ID NO: 873133 - DNA, 602 bp, Homo sapiens
aaagaagaattggtaccaatctttttgacactattccacaagatagataaggaaggaaccctccctaattcattctatgaagccagcatcaccctaataccaaaaccgggaaaggacataacaaaaaaagaaaactacagactgatatccttgatgaacatacatgctaaaatccttaacaaaatactagctaactgaatccaacaacatatcaaaaagataatctaccatgatcaagtgggtttcataccagggatgcagggatggtttaacatrtgcaagtcaataaatgtgatacaccacacaaacagaattaaaaacagaaatcacatgatcatctcaatagatggagaaaaagcatttgacaaaatccagcatccctttatgactaaaactctcagcaaaatcagcatacaagggacataacttgtggataaagaaactgtggtatatttatatgatggaatactactcagccatgaaaaggaataaattaatggcatttgcagcattctggatgagattggagactgctattctaagtgaagtaaatcaggaatggaaaaccaaacatcatatgttctcactgatatgtgggagct

SEQ ID NO: 873134 - DNA, 595 bp, Homo sapiens
ctcaaatatgttttccacattgcttgctttctctccctgtcttcggggacaccaatgagtcataggtttcatctcttcatataatttcatatttcttggaggttttttcattaatttttattattttttctttatttttgtctgactgcattgatttgaaaaatctatctatgagttatgagagtctttcctcagctcggtctattctgctattaatacttgtgattgtattatgaaattatcgtagtgagtttttttttaacctctatcagatcaatttggttcttccttaaaatgactctctcatctttcagctcttgtattatcttaytggattccttagattcctggattgggattgggtttcaactttctcttgaatctcaatgatctttgttcctatacagatgctgaattctatgtctgtcatttccaccctttcagcctggttcagaaccattgcatggggaactagcatggtcattaggaggtaaggagacactctagacttttgagttgccagagttctttccctggatcttttccatctgtgtgaaatgatgttcctttcatcattgaagttgctgccctttag

SEQ ID NO: 873135 - DNA, 634 bp, Homo sapiens
actctagctttggttagcactcaagcagtcaattctgctgcatgttttaggagtgaatattctcatcaattggctctaatgtgaatattgattccaattcacctcttccctgcctattgaactttcatgtcccttcarataaatatcataccacttggcacttaattatgtgttgtccagcattcctcattgttatttcctccatgctagtctctctggctggactgttgccttcatgaaggcagggcaactatcccttacttcgtatgtaatactctcactcttagtacagtgctgagacaggtaggagtttctccataatacttgtcaattaaataatttaaaagaaaaacaaaattcctctagtttcatagcagaccacctatgactagagcagaatttctaaattcattatgctaatattgagagcaaaagtaatgtctgcataatgggataatgagagtctgatggactgtcattgtctgggtactatttcagaggacacaatatttgccatggcacactcaaatttatgtaatagtaatagcatcatgtattcagtacttactatgtgcctggtgttgttctaaatgcttaacatacataaattcatttcacctcaatatcccttatg

SEQ ID NO: 873136 - DNA, 511 bp, Homo sapiens
acatgcaaagaattagctttgttggcaggattcacccgttggaatttgttagttatgtttctcaaataatggatcctaggtttctggggcactgtggatttaccacgtgagttatgacaagaggtagaggtctttgtgacttctttgataccacctatcttgtagattgtcataataaacttctgattctcacctctgattagactatttttaagattataccgaagtgttatatataaccaattgaaaaggaaattacttcttagatttataagggttcagaatccagtgaaactctttatgattgaacaaaaatgcattaaaatgaattgctaaaaggagacaygaagaaacgtcataaaacataaaatgttagacttgagagatactttcaaggtaaaatagtctagcgatttccaacctgaggttctaaggtttctataggttttctaagccttatattaaggcatttggaactgtttcaaattggaagtcctagtttctcaaaata

SEQ ID NO: 873137 - DNA, 599 bp, Homo sapiens
ttagggtgtcaattttagatctttcctgctttctcttgtgggcatttagtcctctaagtttccctctacacactgctttgaatgtgtcccagagattctgggatgctgtgtctttgttctcattggtttccaagaacatctttatttctgccttcatttcgttatgtacccagtagtcattcaggagcaggttgttcagtttccatgtagttgagcggttttgagtgagtttcttaamcctgagttctggtttgattgcattgtggtctgagagaccattcgttataatttctgttcttttacatttgctgaggagtgctttacttccaactatgtggtcaattttggaataagtgtgatgtggtgctgagaagaatgtatattctgttgatttggggtggagagttctgtagatgtctattaggtccatttggtgcagagctgagttcaattcctggatatccttgttaactttctgtctcattgatctgtctaatgttgacagtggggtgttaaagtctcccatttattgtgtggcagtttaagtctctttgtaggtctctaagtacttgctttatgaatctgggtgctcctgtatt

SEQ ID NO: 873138 - DNA, 599 bp, Homo sapiens
ttagggtgtcaattttagatctttcctgctttctcttgtgggcatttagtcctctaagtttccctctacacactgctttgaatgtgtcccagagattctgggatgctgtgtctttgttctcattggtttccaagaacatctttatttctgccttcatttcgttatgtacccagtagtcattcaggagcaggttgttcagtttccatgtagttgagcggttttgagtgagtttcttaaacctgagttctggtttgattgcaytgtggtctgagagaccattcgttataatttctgttcttttacatttgctgaggagtgctttacttccaactatgtggtcaattttggaataagtgtgatgtggtgctgagaagaatgtatattctgttgatttggggtggagagttctgtagatgtctattaggtccatttggtgcagagctgagttcaattcctggatatccttgttaactttctgtctcattgatctgtctaatgttgacagtggggtgttaaagtctcccatttattgtgtggcagtttaagtctctttgtaggtctctaagtacttgctttatgaatctgggtgctcctgtatt

SEQ ID NO: 873139 - DNA, 637 bp, Homo sapiens
gggttaatattatcatctctgagagatatgccccttctcccatccagtcactctttcacattatcctcataatttcttcatggcatttctctgacattatattatttgtttgatcggttatcgcctgttaacccagtagactgtaagtttctttgtcatattccctagtgggtccattgatcttatcattgtatccagtatatcataggtcttcaataagtatatgttggataaattgatacatgaatgtaggtgggacactgtcttagtcctttggggctgctataacgaaatgctttggactgggtcatttataaacaaaaatatattgctcacagttctggaggctggaaagtccaacatcaaggcttcgggagatttgatawctggtgaggactcattcctcatagatggtaccttccatgcgtcctcacatggcagaaaagcaaacagcctccttcaggcctcttttataaaggcactaatccaattcaggagggctctgcattgatgacctaattaccttccaaaggttaaatatcctaatactactgccttggggattaagtatcaccatatgaattttgggaggcacaaacattcagattatagtagacatcaaactgttcacaaaaca

SEQ ID NO: 873140 - DNA, 494 bp, Homo sapiens
ggtggctcacacctgtaatctcaacactttgggaggctgaggcagggggatcacctgaggtcgggagttcaagaccagcctgataacatggtgaaaccccgtctctactaaaaatacaaaaatgagccggttgtggtggtgtgcgcctgtactccccgctactcaggagactgaggctgargaatcacttgaacccgggaggaggttgcagtgaactgatatcacaccagtacactgcagcctgggcgacagagcgagactccatctaaaaaaaaaaaaaaaaaaacttaactggcttttacttgtgattctagaatcaggcaacacctcattctataaaatagaattatataaaattgaatgttcttaccagctgagcagaggagcctacctttatagacagaaaaggagtgagggaaacagacacagaacagaaagcacatgggtgttttttttgttttgttgagacagagtcacgctgtgtcgccaaactg

SEQ ID NO: 873141 - DNA, 677 bp, Homo sapiens
agatgcaaaaactgagccccaaggagatgggttaattctcctagtgtcagacatagtgagactaggagatgtgttaatagatgggttaaacccatgtgtttttgtaagccatggttttcagaaagaagtaacttaaataaaacytaaatggtacttaactaatttccaatgatctggctattttcaaaacactttggaaaactggagcatgagaatattataaatgcaaaatgtttctttgaaattctcttaaatacatttcattttttttcctgtgagagctactttgcttgagccttatagaaataattctgcttttgagtactagtgagaagaaacatctttattctttcaatagatatttttcaatgcctactacgtgctagagttatgctaggctaaaaggtagaatgataaaccgatatataaggttcctctcatggtggaacactcattctactggagaactagacttttattatgtttgtagcagacaatctaatgaaattttttcttatttctaatgtccatgatttttggcttcacagtagctatcacaaaattattctgacattatccacatatggtattgctagatagccatggctgtgaaatttggttccttagcaactgcaaatgtaccttggaaaggaaaagaaattgtcatgaaatactct

SEQ ID NO: 873142 - DNA, 677 bp, Homo sapiens
agatgcaaaaactgagccccaaggagatgggttaattctcctagtgtcagacatagtgagactaggagatgtgttaatagatgggttaaacccatgtgtttttgtaagccatggttttcagaaagaagtaacttaaataaaacctaaatggtacttaactaatttccaatgatctggctattttcaaaacactttggaaaactggagcatgagaatattataaatgcaaaatgtttctttgaaattctcttaaatacatttcattttttttcctgtgagagctactttgcttgagccttatagaaataattctgcttttgagtactagtgagaagaaacatctttattctttcaatagatatttttcartgcctactacgtgctagagttatgctaggctaaaaggtagaatgataaaccgatatataaggttcctctcatggtggaacactcattctactggagaactagacttttattatgtttgtagcagacaatctaatgaaattttttcttatttctaatgtccatgatttttggcttcacagtagctatcacaaaattattctgacattatccacatatggtattgctagatagccatggctgtgaaatttggttccttagcaactgcaaatgtaccttggaaaggaaaagaaattgtcatgaaatactct

SEQ ID NO: 873143 - DNA, 677 bp, Homo sapiens
agatgcaaaaactgagccccaaggagatgggttaattctcctagtgtcagacatagtgagactaggagatgtgttaatagatgggttaaacccatgtgtttttgtaagccatggttttcagaaagaagtaacttaaataaaacctaaatggtacttaactaatttccaatgatctggctattttcaaaacactttggaaaactggagcatgagaatattataaatgcaaaatgtttctttgaaattctcttaaatacatttcattttttttcctgtgagagctactttgcttgagccttatagaaataattctgcttttgagtactagtgagaagaaacatctttattctttcaatagatatttttcaatgcctactacgtgctagagttatgctaggctaaaaggtagaatgataaaccgatatataaggttcctstcatggtggaacactcattctactggagaactagacttttattatgtttgtagcagacaatctaatgaaattttttcttatttctaatgtccatgatttttggcttcacagtagctatcacaaaattattctgacattatccacatatggtattgctagatagccatggctgtgaaatttggttccttagcaactgcaaatgtaccttggaaaggaaaagaaattgtcatgaaatactct

SEQ ID NO: 873144 - DNA, 629 bp, Homo sapiens
tgaacttttgggctcaagcaatctgtccactttggcctcccaaaattctgagactacaggccttagccaccatgtcctgccgatcaggcctttaaacctaagaaattaccaaaagtaatttttataaattattaccaccaaatcttacattacctacacttacctatcgtttagaataacttcctattttttaaaaattttttcttcttcattgtgaaattcaagacgttgactccaattaacattgtcttagtccattttggctgccataacaaaataccataaactgggtagtttataaaatatagaaattcatttctcacagttatagacactaggaagtccaagatcaaggcgctggcagattcagtgtctggtgagggccgctttgctgatttatagatggcaccttccagctgtgtcctcacctagttgaaagggtgtggtagctttttsgggccttttctatgagggcactaatcccattcaagaggggctccaccctcatcacctaatcatgtcccagaggcctcccttattaataccatttctttgggtttaggttttcagcctatagattttgagggaacataagcattcaaaccatagcaaacatcaaatcaaatctt

SEQ ID NO: 873145 - DNA, 641 bp, Homo sapiens
catatgacagttcataacaatgattattataatttcaaccagatcacaatgaaaagcaaatacctttctcaaagaagtaatattattttgtctattttttaaaatatagagatggagtcttgctatatcatccaggctggtatcaaactcctggcatcaagccatccagccacgttggcctcccaatgtgctcagatcacaggcatgagccaccacacccagcctattattttttctaaatgcactaaaatggctttaatcagttgaatgtaggagaattggaaaattatacaagtacatatgtatacatgcatttattatttggaataaaggaaagatcatttcccttgtttttcaggataagttagaagcaatacaacagaaacmattacaaatgcatacatttatatgtatgtatgtatacactaagcacttctttttttttttccatttaggttcttaggtgttaaaaaatcaggtactccacttgctattgcattatacataattattatgttttgtcagatagagttcttgcttccaaggaatttaagcttataagaggagacaaaatttgtgtacagttgaccaaagaacaaaaaggaagtggaaattgtaatacgaggcatataaattattat

SEQ ID NO: 873146 - DNA, 625 bp, Homo sapiens
actggcctcttacctttgcctaggcagtccccttacagggtttctggcctgtggtcattaaagggtgttgctttctaacagatccaggagctccaggcttatcttgggaccttaagaggaaaggatcacccaactcacaggtatttgaggatacaaacccatggctgggcttggctttaaaaggccttacctgagatttcttgtggaacagagttccatcgaagccagtacaaaaggcctacatagaaataattattcttgctgcactttatgctaataatcaggccaagcatagttctatcatatwttttttttttaccaaaaatgaggactggagagagaaaagttatgcaacaaaatttatcatatatttgccactaaattctattgtcacttggttgtttttaagttttttaacccacattttatactaatcctgcttattcctgagaatcaagtagtgatgtcctgcagccccaaagaaacagaaagggatgggtaatgtaaaaatctggatcaatattctagctctgggcaattatcctgcaaatcctgccaggtgataaaagtaaatagggtgcccatacttgcaggtttctttgtttgggaaaataaagccaagcac

SEQ ID NO: 873147 - DNA, 634 bp, Homo sapiens
caatcacacaatcttgctacttgtttagtgtcccgcttttaacaacacattcaggaacccaagctctaaccatgggatgggccactggaccatctattgcatgtcctctgtcagattcactgcaatgggtcacagcatttactcagatccactacctactaatcttaggagatatttgcccttccagtttctcagtgcctagttactctgcaaatggccacaagtacattttgtttcagaatcttactttcacaggctgtaggtaattgtttatttcaagctttaatatgctaaaaaatcaacttcttaaacccactctccagtgcacaggtcaacatattaaatgccaaattctgaattagacctactgctttgataaatttggcccagttcaacttaatacactgtgttatttgatttgacatycttaagggtgacaagatcttgtaattttctttgatgtacaggctatcttctgtagaaaccttgcatttcccagtctggagtctaagaccagaggcagtgagtgataatgggaatgtatctttacaaaaataaacacctgctggaaataaagtttaagaatatttggagaaaagattcacaattttggctctagctaccaaaatgcccc

SEQ ID NO: 873148 - DNA, 457 bp, Homo sapiens
tcctccagtaacaaagttaagtgaatccagaaaaacaagttctcctatcttaagactaaaaatcttaaacttgagggctaggcgcggtggcttgcgcctgtaatcccagcactttgggaggctgaggcaggcggatcacaaggtcaggagatcgagaccatcctggctaacacagtgaaaccccgtctctactaaaaatacaaaaaattagctgggtgtggtggcgggcgcctgtagtcccagctactcgggaggctgaggcaggagaatggcgtgaacccaggaggcggagcttgcagtgagccgagatggcgccartgcactccagcctgggcgacagagccagactccgtctaaaaaaaaaaaaaaagaaaaagaaaaaatcttaaacttgaaactacagagctctgtataggaagaagaaacagtcactcacaaaaatgaagagaagatattt

SEQ ID NO: 873149 - DNA, 532 bp, Homo sapiens
caagaactcaacccctgccttttttttttttgaaacagagtctcactctgtcacccaggctggagtgcagtggcgtgatcttggctcactgcaacctttgcctcccgagttcaagctattctcctgcctcagcctcctgagtagctagactacaggcacccaccaccatgcccagctattttttttttgtatttttagtagagacggggtttcaccatattggccaggctggtcttgaactcctgaccttgtgatctgcctgcctcagcctcccaaagtgctgggattacaagtgtgagccaccatgcctggctgaactcaatcccttttaaaacagcttcaaaaacataaagtatctaggaatacayctatccaaggaaagatttctgcaagtaaaactgcaaaacactgctgaaagaaatcatagaccacacaaacaaatggtaacacatcccatgctcatggatgggtaaaatcaatatcgtgaaaatggccatactgccaaaagcaatctgtaagttcaatgcaattc

SEQ ID NO: 873150 - DNA, 642 bp, Homo sapiens
tcacaggctaatcttgtttatataaagatgcaaaaatatgatcaaattagcagcaaagtgagcctaactatcttaaagacaagacactacttcaggaaaactggacttctttctgaaaagaattttttaaaaagaagtgtgttattattactcatcatatttagatattaaaataaaacatatatgattatctaattaaatgtagaaatagcattggtagcattcaacatccattcattgttaaaagtcttagaaaacaaggaatagaggaaactttcttaacatgaaaaattaaggttatttacaaataatttacaggaaacatcatattcaattgtaaattactgaatgcacttatcttacaatcagaaataggccgggtgcggtggctcatgcctgtaatccgagcayttctgtggctgaggcaggcagatcacctgaggttgggagttcgagaccagcctgaccaacatgcagaaaccccatctttactaaaaatacaaaattagccgggagtggtggtgcgtgcctgtaatcccagctactcaggaggctgaagcagaagaattgcttgaacccaggaggtggagtttgcagtgagccgagttcatgacattacactccagcctgggcaacaaaagc

SEQ ID NO: 873151 - DNA, 594 bp, Homo sapiens
tgtaaggcaagcctggtgatgacaaaatccctcagcatttgcttgtctgtaaaggattttatttctccttcacttatgaagcttaatttggctggatatgaaattctgggttgaaaattcttttctttaagaatgttgaattttggcccccactctcttctggcttgcagagtttctgccgagagatccgctgttagtctgatgggcttccccttgtgggtaacccaacctttctctctggctgctgttaacattttttccttgatttcaacttcagtgaatctgacaattatgtgtcttggagttgctcttctcgaggagtatctttgtggtgttctctgtatttcctgaatttgaatgttggcctrccttgctaggtaggggaagttctcctgcgtaatatcctgcagagtgttttccagcttgattccattctccctgtcacttgcaggtacaccaatcaggcatagatttggtcttttcccatagtcccatatttcttggaggctttgttcatttctttttactcttctttctctaaacttctcttctcacttcatttcattcatttgatctccaatcactgataccctt

SEQ ID NO: 873152 - DNA, 594 bp, Homo sapiens
tgtaaggcaagcctggtgatgacaaaatccctcagcatttgcttgtctgtaaaggattttatttctccttcacttatgaagcttaatttggctggatatgaaattctgggttgaaaattcttttctttaagaatgttgaattttggcccccactctcttctggcttgcagagtttctgccgagagatccgctgttagtctgatgggcttccccttgtgggtaacccaacctttctctctggctgctgttaacattttttccttgatttcaacttcagtgaatctgacaattatgtgtcttggagttgctcttctcgaggagtatctttgtggtgttctctgtatttcctgaatttgaatgttggcctaccttgctaggtaggggaagttctcctgcgtaatatcctgcagagtgttttccarcttgattccattctccctgtcacttgcaggtacaccaatcaggcatagatttggtcttttcccatagtcccatatttcttggaggctttgttcatttctttttactcttctttctctaaacttctcttctcacttcatttcattcatttgatctccaatcactgataccctt

SEQ ID NO: 873153 - DNA, 635 bp, Homo sapiens
acatatgagtcaattttcaaatgactcatatacagaatatgaaaaccatttccataaaatatcaagaagacaacccaattaaaagtggtgcactgaatagacatttcataaaagagaatatttaaataatgtagatacctcaaattaatttactttaaaagcttttcctctttgactattctttcattatgttttattttcccacaatcttctaagtgctttatgtattttaaatttaatataataatttcagttgaagtaaacttagttgttctttatcaaagtcattttttctattttaggtcttttacctttccacatacattttaaaatcagcttgtgaatttctacaaaattgccagttgggacattagggagcatkgacatttttatggcagtttattgacaatttatatacttccttgttatctaccatttctttttgtgtgcgccacttattacctgtgtcaactcagactttgtgtctgtgggtgagaatgtctgttttgaccatattatcttctacagggaaaggaagcagagtagtcttgctagaacatccttttgtcattcctaggaagaaagcataaggttaagatgacaggattctctctgccattagtaagtagggcagt

SEQ ID NO: 873154 - DNA, 649 bp, Homo sapiens
ccttctttgtctcttttgatctttgttggtttaaagtctgttttataaaagactaggattgcaacccctgcttttttttgctttccattgcttggtaaatcttcctccctccctttattgtgagtctatgtgtgtctttgcacatgagattggtctcctgaatacagcacaccgatgggtcttgattgtttatccaatttgcccgtctgtgtcttttaattggggtattaagcccatttacatttaagggcttacacataatactgttatgtgtaaatttgaccctgtcattatgatgctagcgggttattttgcctgttagttgatgcagtttmttcatagtgtcaatggcctttacaatttggcatgtttttgcagtggctggtagaggttgttcctttccacatttagtgctttctttaggagctcttataaggcaggcctgatggtgacaaaatctctcagcatttgcttgtctgtaaaggattttatttctcctttgcttatgaagcttagtttggctggatatgaaattctgggttgaaaattcttctctttaagaatgttgaatattggcccctactctcttctagcttatagggcttctgcagagagatctgctgttagtctgatgagcttcctttgtggg

SEQ ID NO: 873155 - DNA, 649 bp, Homo sapiens
ccttctttgtctcttttgatctttgttggtttaaagtctgttttataaaagactaggattgcaacccctgcttttttttgctttccattgcttggtaaatcttcctccctccctttattgtgagtctatgtgtgtctttgcacatgagattggtctcctgaatacagcacaccgatgggtcttgattgtttatccaatttgcccgtctgtgtcttttaattggggtattaagcccatttacatttaagggcttacacataatactgttatgtgtaaatttgaccctgtcattatgatgctagcgggttattttgcctgttagttgatgcagtttattcatagtgtcaatggcctttacaatttggcatgtttttgcagtggctggtagaggttgttcctttccacrtttagtgctttctttaggagctcttataaggcaggcctgatggtgacaaaatctctcagcatttgcttgtctgtaaaggattttatttctcctttgcttatgaagcttagtttggctggatatgaaattctgggttgaaaattcttctctttaagaatgttgaatattggcccctactctcttctagcttatagggcttctgcagagagatctgctgttagtctgatgagcttcctttgtggg

SEQ ID NO: 873156 - DNA, 491 bp, Homo sapiens
caggcttccttgagctgcagtgggctccacccagttctagcttccaggccactttatttacctactcaagcctgggcaatgttcggtgcccctcccccagcctcgctgccgccttgcaatttggtctcagactgctatgctagcaatgagcgaggctccgtggccatatgaccctctgagccaggtgcaggatataatctcctggtgtgccgtttgctaagactttggaaaagcacagtattaggctrggagtgacccgattttccaggtgctgtctgtcacccctttctttgactaagaaagggaattccctgacccgttgcacttcccagttgaggcaatgcttgccctgcttcggctcatgctcggtgggctgcacctactgtcctgcacccactttccgacactccccagtgagatgaaccgggtacctcagttggaaatgcagaaatcacccatcttctgtgttgctcacgctgggagctgcagac

SEQ ID NO: 873157 - DNA, 491 bp, Homo sapiens
caggcttccttgagctgcagtgggctccacccagttctagcttccaggccactttatttacctactcaagcctgggcaatgttcggtgcccctcccccagcctcgctgccgccttgcaatttggtctcagactgctatgctagcaatgagcgaggctccgtggccatatgaccctctgagccaggtgcaggatataatctcctggtgtgccgtttgctaagactttggaaaagcacagtattaggctaggagtgacccgattttccaggtgcygtctgtcacccctttctttgactaagaaagggaattccctgacccgttgcacttcccagttgaggcaatgcttgccctgcttcggctcatgctcggtgggctgcacctactgtcctgcacccactttccgacactccccagtgagatgaaccgggtacctcagttggaaatgcagaaatcacccatcttctgtgttgctcacgctgggagctgcagac

SEQ ID NO: 873158 - DNA, 491 bp, Homo sapiens
caggcttccttgagctgcagtgggctccacccagttctagcttccaggccactttatttacctactcaagcctgggcaatgttcggtgcccctcccccagcctcgctgccgccttgcaatttggtctcagactgctatgctagcaatgagcgaggctccgtggccatatgaccctctgagccaggtgcaggatataatctcctggtgtgccgtttgctaagactttggaaaagcacagtattaggctaggagtgacccgattttccaggtgctgtctgtcacccctttctttgactaagaaagggaattccctgacccrttgcacttcccagttgaggcaatgcttgccctgcttcggctcatgctcggtgggctgcacctactgtcctgcacccactttccgacactccccagtgagatgaaccgggtacctcagttggaaatgcagaaatcacccatcttctgtgttgctcacgctgggagctgcagac

SEQ ID NO: 873159 - DNA, 498 bp, Homo sapiens
ttgtttttttcttgtaaatttgtttgagttctttgtagattctggatattaccctttgtcagatgagtagatggcaaaaattttctcccattctctaggttgcctgttcactctgatagtagtttcttttgctgtgcagaagtgctttagtttaattagatcccatttgtcaattttgccttttgttgtcattgctttggtgttttagacatgaagtccytgcccatgcctatgtcctgaatgatattgcctaggttttcttctagggtttttatggttttaggtctaacatttaagtctttaatccatcttgaattaatttttgaataaggtgtaatgaagggatccagtttcagctttctacatatggctagccagttttcccagcaccatttattaaatagggaatcctttccccattgcttgtttttgtcaggtttctcaaagataagatggttgtagatgtgtggtataatttctgagggctctgttccgttc

SEQ ID NO: 873160 - DNA, 601 bp, Homo sapiens
acctcttgataattccagtatctgcagttgcctgatgaattctgtgaaaacaagaagaggcttgttcagtgttgctccaaagggcagatacccacccagcgagtgggtatccttgtcagacaattccaacatctgatttctttcagtattataaagyttttttttttttctgaaaaagaagaacctttaagccaccagagttatccagctgcagacaatgcttttttgtaacaggtaaaaagttatccacctctttaggtgtctcaggaaatgtagggcagccgtttctctgccaagcacaatatagaagacattttaccttggtgaggcctgcttatggttatgataaggacatgtgccatctcacggttggctatcctgatgtgttgtagcaactgaaatgattctttctttcctcttccagtgaagggcatgttacttatatcatggtgcatagctcgatcttagctattgtagaaagactacaaacactggaagggttttttaatgttctctttcctcttcctgggatacagtgcctctagatactacatggtaaattccagattcttcaagtctttgttcaaatgtcacctgatca

SEQ ID NO: 873161 - DNA, 657 bp, Homo sapiens
tgaagattattaattctctagaagtgtgctatcaacagatggctattgaacacttgaaatgtggctagtgcctcatgtcaaaatgacaatattttgaatgtgttaaataaattattaaaatgaatttctcctgtttgtttttactttttaatgtggctactagaaaaatttaaattatacrcctggttcacattatatatccactggaaagtgctgcagtagcagacaataattgtttgactttgtcatttgctattattaattaagggctcaaagtgtgaagttacatgttatagggttttgtttttgtttttgtttttgtttttttttttgcctgttagagattcaagtgatttgtatccagtaggaaaaataaccccagttttatttttctgtaggacattaactagatttgtattttttaaaaaattattttggcgtgccttttaaatcccagttcctcaaatgctctttgaatcaactttattatcgtattgtttcccttgtcagttaatgagttcaataaaatctttgatacatattcatactttaactgtatgagacttgtgtttctaactttttggaaattatactttgacatatctctgtctcctgttcggcttgatggcagagactcaattattaacatacctagta

SEQ ID NO: 873162 - DNA, 657 bp, Homo sapiens
tgaagattattaattctctagaagtgtgctatcaacagatggctattgaacacttgaaatgtggctagtgcctcatgtcaaaatgacaatattttgaatgtgttaaataaattattaaaatgaatttctcctgtttgtttttactttttaatgtggctactagaaaaatttaaattatacgcctggttcacattatatatccactggaaagtgctgcagtagmagacaataattgtttgactttgtcatttgctattattaattaagggctcaaagtgtgaagttacatgttatagggttttgtttttgtttttgtttttgtttttttttttgcctgttagagattcaagtgatttgtatccagtaggaaaaataaccccagttttatttttctgtaggacattaactagatttgtattttttaaaaaattattttggcgtgccttttaaatcccagttcctcaaatgctctttgaatcaactttattatcgtattgtttcccttgtcagttaatgagttcaataaaatctttgatacatattcatactttaactgtatgagacttgtgtttctaactttttggaaattatactttgacatatctctgtctcctgttcggcttgatggcagagactcaattattaacatacctagta

SEQ ID NO: 873163 - DNA, 657 bp, Homo sapiens
tgaagattattaattctctagaagtgtgctatcaacagatggctattgaacacttgaaatgtggctagtgcctcatgtcaaaatgacaatattttgaatgtgttaaataaattattaaaatgaatttctcctgtttgtttttactttttaatgtggctactagaaaaatttaaattatacgcctggttcacattatatatccactggaaagtgctgcagtagcagacaataattgtttgactttgtcatttgctattattaattaagggctcaaagtgtgaagttacatgttatagggttttgtttttgttyttgtttttgtttttttttttgcctgttagagattcaagtgatttgtatccagtaggaaaaataaccccagttttatttttctgtaggacattaactagatttgtattttttaaaaaattattttggcgtgccttttaaatcccagttcctcaaatgctctttgaatcaactttattatcgtattgtttcccttgtcagttaatgagttcaataaaatctttgatacatattcatactttaactgtatgagacttgtgtttctaactttttggaaattatactttgacatatctctgtctcctgttcggcttgatggcagagactcaattattaacatacctagta

SEQ ID NO: 873164 - DNA, 601 bp, Homo sapiens
cattactggtatatacccaaaagatttcaaatcattctactataaagacacatacacatgtatgtttattgcggcactattctcaatagcaaagacttggaaccaacccaaatacccatcaatgatagactggataaagaaaatgtggcacatatacaccatggaatactatgcagccataaaaaacgatgagttcatttcctttgcatggacatggatgaagctggaaaccatcattctcagcaaactaacacaagaacagaaaaccaaacactgcrtgttctcactcataagtgagagttgaacaatgagaacacatggactcagggaggggaatatcacacactggggcctgtcaggaggtggaggctaagggacggataacattaggagaaatacctaatgtagatgacaagttgatgggtgcagcaaaccaccatggcatgtgtatacctatgtaacaaacctgcatgttctgcacatgtatcttacaacctaaagtataataaaaataatttttaaaaaatcacctgtggttatgagttcttgaaatgtggctagttcaaactgagatgttataagtataaaatacactctagaa

SEQ ID NO: 873165 - DNA, 647 bp, Homo sapiens
tcatctgtgattgcatatgaattttaaagtagttttcactaattttgtgaagaatgtcatcggtagtttgataagaataatattgaatctgtaacttgccttgggctttatggccacttaacattactgattcttcctattagcatgaaatattttccatttatttgtgttatctctgattctttgagcagtgttttgtaaatctcattgtagagatctttcacayttctgattcttgtattctgaggtatttaattcttttttaaatttaatttgttatattttttaaacttttattttaggttcaggggtacaagtgcaggtttgctatatgagtaaactcatgtcacagaggtttgttgtaaagattattttatcacccaggtactaagcctgttagacaatactttttttttttttttcttattctctcccttctccaactctccaccatcaagtaagccccattgtccattgttcccctctttgtgtccatgtgttctcatcatttagtttccactgataactgagaacatgataactcccagctccatccacgtccctgcagaagacatgatctcattctttcctatggctgcatagtattccatggtgcatatataccacattttcttcatccagtctgt

SEQ ID NO: 873166 - DNA, 666 bp, Homo sapiens
tccttcagttctgctctaatcttagctatttcttgtcttctgctagcttttgaagttagttgctcttgcttctctagttcttttaattgtgatgttagggtgttgattttagatctttccatctttctgatgtgggcatttagtgctataaatttccctcttaaccctgctttagttgtctcccagcaattctggtacgttgtctctttgttctctttgktttcaaagaacttctttatttatgccttaacttcgttatttacccagtagttattcaggagcaggttgttctgtttccatgtagttgtgcagttttgagtgagtttcttaatcctgagttctaatttgatcacactgtggtctgagagactgtttgttatgatttccattctcttgcatttgctgaggagtgttttacttccaattatgtggttgattttagaataagtgctacgtagcactgagaagaatgtattatctgttgatttggcatggagagttctgtagatgtctattaggtctgcttggtctagagctgagttaaagtcctgaatgtccttgttaattttctgtcttgttgatctgtctaaaattgacagtggaatgttaaagtctcccactgttattttgtaggagtctaagtcactttgtaggtctctaagaact

SEQ ID NO: 873167 - DNA, 611 bp, Homo sapiens
agcccaattcttgcatcagcatgacctggatgtgagacaaggggtcaaaggagatcattttggaactttaagatttaatgactaccctattggattttggacttgcatggggcctgtagcccctttgttttgactaattcatcttgtttggaacatgcatatttacccaatgcctgtaaycccattgtatcttggaagtaactaacttgctttgattttacaggctcataggtggaagggacttgccttgtctcagataagactttggacttggccttttgggttaatgctggaatgagttaagactttgggggactgttgggaaggcatgattatgcattgaaatgtgaggacatgagatttgggaggggccagggggcagaatgatatggtttggttatgtccccacccaaatctcatcttatagttcccataatccccatgtgttatgggatgggcccagtgagaagtaattgaatattgggggcagtttcccccatgctgttctcatgatagtgagtgagttctcatgagatctgatggtttcataggcatctggcatttcccctgttggcactcattctctctcctgctgccctgtgaagaggtgc

SEQ ID NO: 873168 - DNA, 535 bp, Homo sapiens
atcttagtaaaaaaaatctgtgagcaacaccctgtagcgggaaaaggtaacctgtcttgatgggagtccataggaggctgcaggctgcttccctacagagactgatatcaaggtagctgcagaatttagattctaatcctagtgtgattggaggtggggtagattccagggaggtcagaaagtgatcaaatacaaaattgtgctcctwtggaggaggtcataggaactttgaattatgacaatggctagtaattgggtagaattggagcaggctggtgatggcagttttgtgtgggtggtaggacctaggaatcaaacttgagggcaaattgtggagcacatatgacaaacgatgtagagcctttcctatttccctttccagtgtgttatccaaaacaataaataataaagaattaagaaagactaatatttttatcaatctcattaagaaaaattgcatcaaatcaagataactataatgataaatattgttagaatattattaaccaaatgaaagtgacacaaaacaaaaacg

SEQ ID NO: 873169 - DNA, 644 bp, Homo sapiens
agagagcctgatcttaaaggagcaagttttctaggttgagactgaaaagcaggagatggggtgttagcacaggaagatgtattaaaaaggaagaaagtttggaaagtgaaagattgagaggagaggcagtagatggcacctgagagacagaaggattttgaacttttaaagtctttttttcttcttttaatttattatttgtctttgttaattaatattttggagcaagaaaaattttgattcccaattgcatttagatgcytcagtgtaccaattaaggtacacatttcattcagattgcttagttttagagcctttgctttctagtttattcctgagacaaactaaattagagaagtcaaaatcccctcatctgaacctggaggtcgaaacctcacagctgaggtcaacacgaggaaataaccctcctcaacaaaagatatcccagacaagagagagaaagacgtctcttcaaacagggaggagaaagacctctctcaaccaaatcccaaataaaatggaactcaaaccaaattcaggagctctgtccaagaaagactcatcagggggaaaaggggcactcaaagatctccattataggtaactcacaccataatcccaagggccagtgattctcctcaagg

SEQ ID NO: 873170 - DNA, 644 bp, Homo sapiens
agagagcctgatcttaaaggagcaagttttctaggttgagactgaaaagcaggagatggggtgttagcacaggaagatgtattaaaaaggaagaaagtttggaaagtgaaagattgagaggagaggcagtagatggcacctgagagacagaaggattttgaacttttaaagtctttttttcttcttttaatttattatttgtctttgttaattaatattttggagcaagaaaaattttgattcccaattgcatttagatgcctcagtgtaccaattaaggtacacatttcattcagattgcttagttttagagcctttgctttctagtttattcctgagacaaactaaattagagaagtcaaaatcccctcatctgaacctggaggtcgaaaccycacagctgaggtcaacacgaggaaataaccctcctcaacaaaagatatcccagacaagagagagaaagacgtctcttcaaacagggaggagaaagacctctctcaaccaaatcccaaataaaatggaactcaaaccaaattcaggagctctgtccaagaaagactcatcagggggaaaaggggcactcaaagatctccattataggtaactcacaccataatcccaagggccagtgattctcctcaagg

SEQ ID NO: 873171 - DNA, 644 bp, Homo sapiens
agagagcctgatcttaaaggagcaagttttctaggttgagactgaaaagcaggagatggggtgttagcacaggaagatgtattaaaaaggaagaaagtttggaaagtgaaagattgagaggagaggcagtagatggcacctgagagacagaaggattttgaacttttaaagtctttttttcttcttttaatttattatttgtctttgttaattaatattttggagcaagaaaaattttgattcccaattgcatttagatgcctcagtgtaccaattaaggtacacatttcattcagattgcttagttttagagcctttgctttctagtttattcctgagacaaactaaattagagaagtcaaaatcccctcatctgaacctggaggtcgaaacctcacagctgaggtcaacacgaggaaataaccctcctcaacaaaagatatcccagacaagagagagaaagacgtctcttcaaacagggaggagaaagacctctcycaaccaaatcccaaataaaatggaactcaaaccaaattcaggagctctgtccaagaaagactcatcagggggaaaaggggcactcaaagatctccattataggtaactcacaccataatcccaagggccagtgattctcctcaagg

SEQ ID NO: 873172 - DNA, 661 bp, Homo sapiens
tctggtagtgtgatgcctccagttttgctctttttgcttaggattgccgtggctattagggcttgttttttggttccataagaattttaaagtagttttttctaattctgtgaagaatttcaatggtaatttaataggaatagcaatggatctataaattactttgggcaatatggccattttcacaatattgattcttcctatccatgagcatgaaatttttctctgtttgtgtcctctctgatttcctygagcaatggtttgcagttctccttgaagaggttcttcacttcccttgtttgctgtattcctaggtattttattctctttgtggtaattgtgaatgacagtttatttattatttggctctgtgcttgtctattgttgatgtataggaatgcctgtgatttttgcactgattttctatcctgagactttgctgaagttgcttatcagcttaagaagcttttgggctgagactatggggttttctagatataagttcatatcatctgcaaatagggatagtttgacttcctatctttctatttgggtgccctttatttttttttcttgcctgattgcacgggccaggactttcaatgctatgttaaataggaaggttaagatagcgtatccttctcctgcaccagttttcaag

SEQ ID NO: 873173 - DNA, 611 bp, Homo sapiens
agttcatgtcttttgtagggacatggatgaagctggaaaccatcattctaagcaaactatcacaaggacagaaaaccaaacacggcaagttctcactaggtgggagttgaacaatgagaacacatggacatagggtggggaacatcacacaccgaggcctgtcttggggtgggggcaggggggagggatagcattaggagaaatacctaatgtagatgacggattgatgggtgcagcaaaccaccatggcacgtgtatacctacgtaacaaacctgcacgttctgcacatgtaccccagaacttaaagtataataaaaaaaaaaaaawttaaatgaagactatatgacactgtttataggagtagaacaggttgtttcatcacaacttcctctgtttaactgtcttttttaacctcaaggctattccagatcatcagtaagatagagtacctatgccagacttccctggaattaggaacatccatttttcttctcctgagaccatttgcttgggactttatcctgacatgtgtagcagttaagtggggaaacatccaactggacatttccaacacctacatggttatattttgtatacctttagaatcatc

SEQ ID NO: 873174 - DNA, 589 bp, Homo sapiens
aaactggaaatagaaggaacataccttgacacaataaaacccatataagacagacccacagctgctattatactgaacagggaaaaactgaaagcctttcctataagatctagagcaagacaaggatgctcattttcaccactgttattcaacatagtactagaagtcctaactatagcaaacagaaaatagaaacaaataaaaggcwtccaaattggaaaggaagaaatcaaattactcttgatgatattatcttttatgttgttgttttgtttgtgtttttgagacagagtctcactctgtcacccagattggagggcaatggtcccaccttggctcactacaatacctgcttcatgggttcaagtgattctctcacctcaggcttctgagtaactgggattacaggtgcctgccaccatgtccagctaatttctgtatttttagtagagacagagtcttgccatgttggccagcctggtcttgaacttctgactctcaagtgatccacctggcttggccttctcagagtgctgggattacaggcatgagtcactgtgcccagcctgatattatcttatgtttggaa

SEQ ID NO: 873175 - DNA, 644 bp, Homo sapiens
acggttgcatattccagaaaatgcgtatggtggtatttctgtcaatctaagcccttgagaaactataggaagcacagatgtacgactccacttgatcgccacattagcatgtgttatgtgcctaaacaaatgtttgttttggtaagtcactggaattctaagggttaatttcttatttatttatttatttatttatttatttatttatttgtattatactttaagttttagggtacatgtgcacattgtgcaggttagttacatacgtatacatgtgccatgctggtgtgctgcccccactaactcgtcatctagcattaggtatatctcccactgcaatccctccctcctcccccacgccacaacagtccccagagtgtgatgttccccttcctttgtctatgtgatctcattgttcaattcccacctatgagtgagaatatgcggtgtttggttttttgttcttgygatagtttactgagaatgatgatttccaatttcatccatgtccctacaaaggacatgaactcatcattttttatggctgcatagtattccatggtgtatatgtgccacattttcttaactcagtctatcattgttggacatttgggttggttccaagtctttgctattgtgaataa

SEQ ID NO: 873176 - DNA, 643 bp, Homo sapiens
cattgtattattaaatttcgttgctgactttacgaaaattgtacactgaagctgaaaaccaaaccaagacaataacagttgaaaataatgtaatgcacttagataaatagctgttttctattttccttgcaaactggaaaataaaaatgaatatacaaacgttttcttatcgagcatgagattttaagttctacaataatatgtatytaaataaggaggcaggaattacagttttatcatcaagagggacgttagtttgcttctcgacaatttatttcaatgaacatgtattttgcatatattaggtcaaacatattctaaattctggtaaaatagagatgaattatacatatttcaaggtctatctatgtacctatctatctatcatctatctatctacctcttgttctcaaaacatccacagactagtaagaaatacacagataagctaacagtgcaaagaatgtaagagaacaggagtaaaagaaatgcaaaggagggacacaaaacttcagcaggttggaaagattttgaagccagtagattatggatgggtggaaggcatgcaaattagaatgagattggagagagagcaaaatggaaaagactgcaagagtccacataatgaggagatctttggtta

SEQ ID NO: 873177 - DNA, 475 bp, Homo sapiens
ttccagtgagtgggctatttctaataagattagtagttttttcattcatatttagatttctggattttcaaggtcatgttttagtttatatttgaaatgtgctggaggaaattagggaaacacctcattttagaggtgaattctgcaggccaggaactgcatacaccaaggtgttctgacagcccttccagacctggttcaggtagccccattccacagcctttctaggctgcagccagcacctaccacttcctcagtctcccccttggttaaatgggtcacagtcagtccaggttcttgagacagaaatccygggcatctgttatccttaatactttccttttcctctcagccaatcagcagccagattctataaatctactgcctcaaagttatctctttcattcctccaatctcaacacctttgcagccctcatcaatgataacctgagctatttcaagaactggttcttct

SEQ ID NO: 873178 - DNA, 608 bp, Homo sapiens
tgtaaccttgggtcatatgtgagctccatttgcagacacatgagcaacagttcactttttaccctacactatccttgttgaacagctcagtagaggtcatcgctttctaactcatataaaacaaaaaagaagttgagctcttttttatttttacaaaacccagacaaataaagaaaaggaaaagatacttttaaaaaaagatactttgtttctaacttttaaaactattttcttaattaaaaagcctcaaatttattttcctatttcctcaatacacatttcaaattacgtacatatcatcttcccatcttatagaattcttatgmcaaagaagaaactgaaactgttattgaaactaaaggttcaatgatgagtgtctaccagagtatgcatcctctaatgcttaatgaagaaaaaacttttattatttttgtcaaatcaattaaactaatttcttttgtcaaaagcagatgcacacctctactgacacacatgttcccatcaatctaaatagagaattatggccttaattttattcagatttctcaatttcaatttttgttaggccttatggtgaatttggaaactacctaaaatgatgaattttg

SEQ ID NO: 873179 - DNA, 604 bp, Homo sapiens
ttttgttgtatttttagtagagacagggtttcaccatgttggccaggctggtctcgaactcctgacctcaagaaatccaccagcctcggcctcccaaagtgctaggattacaggtgtgagccaccaagcctggcaaaatagctttttatagtggcccttcacctccaggtgtttgcatttcagtgggattaaaggtggtactgaggcctgggccagtaggtagaggtcacctgagaacaccgggccctcccattgcccatgcctgggcaataccctgagtatttggtccttgagtagcatggaatcctctctagatttaatcactactaagccctaaaggtgggagtatatgggattcatttcgtctttgagaaaatcaaggcatgcagtrcagttcccttgaatagggagagtctggagggttgcacaaatctgaaaattattcctgctcagaggctgtatcgttctttgttgagatcaaagtccatcatgtatgccgacagcgttaattttgaagaaagccattcctcacattatctcctcacattttgcctcttcctggcaaaaaataaaaaatgttgttctgtcccttagatttgattta

SEQ ID NO: 873180 - DNA, 634 bp, Homo sapiens
tgctaaaacaacaagagtcaccttagctccagttcccaagtttctctttccatcttagaccatctcaaccaatactttattgtccatatcgctatcagcatttttgtgaatgccattcaacaagtctctaggaggttccaagctttcccacattttcctgtcttcttctgagccctccaaactgttccaacccctgcctgttacccagttccaaagttgcttccacattttcaggtatctacagcagtgccccactctactgttaccaatttactgtattggtctgttttcatgctgctgataaaggcatacctgagactgaaaagaaaaagaggtttaatggacttacagttycacatggctggggaggcttcacaatcatggcagaaggcaaggaggagcaagtcacatcttacatggatggcaggcaggcaaagagagatcttttgcagggaaactcccatttttaaaaccatcacatctcatgagactctttcactatcacaagaacagtgtaggaaagacccactcccataattcaatcacctcccaccaggttccccccatgacacatgggaattgtggcagttacaattcaagatgagatttgggtgaggacacagagccaaaccat

SEQ ID NO: 873181 - DNA, 606 bp, Homo sapiens
tcaggatacagaattaatgtacacaagtcagtagcactgctgtacaccaacagtaaccaagctgagaatcaaatcaagaactcagcctcttttacaatagctgcaaaaaataaaataaaatactgaggaatatacctgttaccaaggaggtgaaagacctctacaatgaaaactataaaacactgctgaaagaaatcatagatgacacaaacaaatggaaacacatctcatgstcatggatgggtagaatcaatatcgtgaaaatgaccatactgcgaaaagcaatctacaaattcagtgcaattcccatcacagtatcaccaacattcttcacaaagctggaaaaagcaatcctaaaattcatatggaatgaaaaaagagcccgcatagccaaagcaatactaagcaaaaagaacaaatctagaggcgtcacattacccaacttcgaactatactataaggccatagtcaccaaaacagcatggtactggtataaaataggtacataaaccaatggaacagaatagagaacccagaaataaagctggatacttatagctaacgagtcttcaacaaagcaaacaaaataaagtggggaaaggacac

SEQ ID NO: 873182 - DNA, 629 bp, Homo sapiens
caaatgatatttctagttctagacccttgaggaatcgccacactgtcttccacaatgtttgaactagtttacactcccaccaacagtgtaaaagtgttcatatttctccacatcctctccaacatctgttgtttactgactttttaatgatcgccmttctaactggtgtgagatggtatctcattatggttttgatttgcatttctctgatcaccagtgatgaagagcattttttcatgtgtctgttggctgcataaatgtcttcttttgagaagtgtctgttcatatcctttgcccactttttgatgggcttgtttgttttttttcttgtaaatttgcttaagttcttcgtagattctggatattagcccgttgtcagatgggtagattgcaaaaattttctcccagtctgtaagttgtctgttcactttgatggcagtttcttttgctgtgcagaagctctttagtttaactagatcccatttgtttattttggcatttgttgccattgcttttggtgttttagacatgaagtccttgcccatacctatgtcctgaatagtatggcctaggttttcttctagagtttttatgattttaggtctaacatttaagtctttaatccatct

SEQ ID NO: 873183 - DNA, 629 bp, Homo sapiens
caaatgatatttctagttctagacccttgaggaatcgccacactgtcttccacaatgtttgaactagtttacactcccaccaacagtgtaaaagtgttcatatttctccacatcctctccaacatctgttgtttactgactttttaatgatcgcccttctaactggtgtgagatggtatctcattatggttttgatttgcatttctctgatcaccagtgatgaagagcattttttcatgtgtctgttggctgcataaatgtcttcttttgagaagtgtctgttcatatcctttgcccactttttgatgggcttgtttgttttttttcttgtaaatttgcttaagttcttcgtagattctggatattagcccgttgtcagatgggtagattgcaaaaattttctcccagtctgtaagttgyctgttcactttgatggcagtttcttttgctgtgcagaagctctttagtttaactagatcccatttgtttattttggcatttgttgccattgcttttggtgttttagacatgaagtccttgcccatacctatgtcctgaatagtatggcctaggttttcttctagagtttttatgattttaggtctaacatttaagtctttaatccatct

SEQ ID NO: 873184 - DNA, 679 bp, Homo sapiens
ggttgccaggtgaaggaagctcccaactggaattggtagtggctcccacttggcacaaatttccttgagtggagtctgggggactagccagagctgctgtggatatgaatgagcgcaggagtacagtagtggccaaacagggagaggcaaggtccaaaagctgtgcttgctttctcagcagggtatctcacagcctggggcaaggtctgagtggagcactgccagaacaagactggcctcactacctgcatgggaactgggtgaggcctctcaaaaatggttatccctgacttccctggcaaactatatgatcagagcagagacagccaagatctcctctggaacataaccccattggcctgagaagcaaccccccaccccatagtagccacagaaagtgccccacccaaggagagtctgtgccaagccttgcctaatcctgcccccatctgatggtatttccctgaygccctggtagccaaacacaaagcataggcacccttgggagctttaaggccctgcccattgcctgagaaaccaaaatacttaccttggccgtcttagggcaagcctagagctcctgactactaccacagctggtgctctcttgaaagtgccacctcctggttggaggccaagcaactcaggccattgtgacacttcatgacagaatgaccct

SEQ ID NO: 873185 - DNA, 573 bp, Homo sapiens
gtctggaattgagtaaacatgaattaagtattcaacgaatgagtaaataaatgcttccttcaaggttttccattttaggcaaaacatcatgtcgtttgataattatgctcatgatctctttatgaacatttttgtggggggagaaatagtatcacacagatcacagtgagaggaaaaaagtaacgggttatatgaaaaggctagacaaactgacgagtgctaaatcacctgctaacagtggcttaagtgagagtttctgaaatcctgtgcaagaaactaaactgaggactaacagacatttgtagtcgaaacatctgttttataaagcaattgagaaatcataaaaatgttttatgcctttagggcctaaatattccaagacaaatatayattttaaaatatattatttattccttttcaaagaatctgactcggcattccactatacatcaactgatggtaatctattcaccaaactggcttgcaatggggaattctggctgcggtttgtgtgcccttgaataagacaaaatatcctctctctgatgattcattttgcaagtggaaagaaat

SEQ ID NO: 873186 - DNA, 624 bp, Homo sapiens
gaaccctgtaagtttattctatttgtgctattgtttgtttcactactttgtggctacaccatttgttgtggatcttttagggaattctaaggcaagatgtgctcttagttttgccttttatttctaatgttgatgccccaagagtgagatatcccttctgaagtgggagccttcttttgtcttgccttaaaaaaaaaaagcaccacagaagtcttttgtacttacagtgcccaagccagttgcccagacaacaacatctctactcttccccaacaacattaattttaatagagactacctgggtttgggtacttaaaacttgtgttaagaggacytgagaaaggatagaaatcaatagtctctgctgtccctgttgaataaaagcttttgatagtgctaatagctatatgaaaggcaaaaatcctcacttaaatgatcagttggccttgaaaataacaccaaatcaacataggtaatttctatttgttcattttttgcagtctttagccagaattctatccttagccggaaaatatgttagtccccacatcaaataataagcctgctataattccaaaccacttagcaaccttttctgtgtcattcaggtgtaaattagtgaat

SEQ ID NO: 873187 - DNA, 623 bp, Homo sapiens
ctgagcgtttgccagaaatgctatacagaattgtctatatatctgtttggtaccagtaccatgctgctgtggttactgtagccttgtagtatagtttaaagtcaggctgcatgatgcctccagttttgttctttatgcttaggattgtcttggctatatgggctcttttttggttmcatgtgaaatttaaagaggttttttccaattctgcaaaaaaactcagtggtggcttgatgggaataccattgaatctataaattactttgggcagtatggccatgttcatgacactgattcttcctatccatgatcatagaatttttttccatttgtttgtgtcctctcttatttccttgagcagtggtttgtagttctccttgaagaggtccttcacatcccttgtaagttggattcctaggtattttattctctttgtagcaattgtgaatggaagtttactcatgatttggctctctgcttgtctattgttggtgtataggaatacttgtgatttttgcacattgattttgtatcctgagactctgctgaatttgcttatcagcttaaggagttttggggctgagatgatggggttttttaaatatacaatcatgtcatctgca

SEQ ID NO: 873188 - DNA, 618 bp, Homo sapiens
aaaaatgaggacacattcctgattttttcctctctaaaaaatcaggacacgttctcacctttatagttcctggcactttttccttcttccaggatttctcagtgtacaatgatggctgctcagttatcaaatcggcagattctgtcagcagtctgagatgtaacccctgactatgctgaatacattaatgtatgagtgcagccttcttcagagtattcagagctatcaacctcaatggcactccctatcatgggcttccagtgaatttaatcagcaatgtctccttaataactctgtttcatcctaaaatgattattttttttttttttttttttttttttttttagatggagtctggctctgtcatccaggctggagtgcactgatgcgatctggctcastgcatcctccatcctcctccctgattcaagcgattctcctgcctcagcctccagagtagctgggattacaggcacgtgccactatgctcggctaattttttgtatgtttagtagagacagagtttcaccgtgttagccaggttggtctccatctcctgacctcgtgatccatccgcctcggctcccaaagtgctgggattacaggcttgagccaccg

SEQ ID NO: 873189 - DNA, 654 bp, Homo sapiens
tgagtaatctaaaagctaaatgcaatttccaagaaatgaaaaattgcagcaatttttggaaattagaattgaccaacaataaaagcattgcatatcaaacattttaagacacacctaaagttacacccagagggaaatttgtaaatctaaataaaattattaggaagatgtaatttcttcccaaactaatctataactccaatgtaatatcaataaaaattccagttgatgagctttctttctttctttctctctctctctctctctctctctctctctctctttctttctttctttttctttctttcagacagggtctcactctgtcacccaagytggagtgcagcagcacgatcatggctcactgctgcttcaatctctcaggctcaagtgattctcctgcctcagcttccagaggaactaggactacaggcacacatcaccacacctggctaattttttttttttatttttagtagagatgaggtctcactatattgcccagcctggtctcgaactcctgagctcaagagatcctcttgccttggccttttcaaagtgctgggattataggtgtgagccaccacatccagacccagttgagttttcttaagaattcagtaaatgtgctctaaagcttatgaatagctaagt

SEQ ID NO: 873190 - DNA, 583 bp, Homo sapiens
cattcaatgtggctcatcttacaaatgtaatgaaaattgggtgtcttatgtgacagtgcttctatttgatgtatgggacatttgattttccatgttcttctttcctgtcttcatgcagcatggtgagcagtggagcgaaaatgcctgcaccacgtgtatatgtgaccggggtgaggtcaggtgtcacaagcaggcctgcctgcccctgagatgcggaaaggtatttgagagtgtgtaccttacttgtttaagctcttttctgggtcatttaaggaatgcacttcttattccrgtgtgtcctttgggggaatcaaaagttttataatgtttgcaaagttacataaagatatgaaggctctgcttcctaggaagaagggttgaggtgcaagggaccctgcccatcgtgggtcgggccagagaaagagccatgtagagctttggtattttgggtcctcctgcctctgttggcttgggtgtttcaccgtctcctgaggactgcccctcaccttcctctctgtgtcctagggtcagagcagggctcggcgtcatgggcaatgctgtgaggaatgtgtgtctcctgccg

SEQ ID NO: 873191 - DNA, 626 bp, Homo sapiens
gccagggcaatcaggcaggagaaagaaataaagagtattcaaataggaagagaggaagtaaaattgtctgtatttgcagatgacatgtttgcatatttagaaaaccccatcatctcagcccaaaaactccttaagctgatatgcaacttcagcaaagtctcaagatacaaaatcaatgtgcaaaaatcacaaacattcctatacaccaatattagacaaacagccaaaccatgagtgaactccattcacaattgctacaaagagaataaaatacctaggaatacaacttacaagggatgtgaaggacctcttcaaggagaactacaaaccgctgctcaaagaaataagagaggacacaaacaaatggaaaaacmttccatgctcatagataggaagaatcaatattgtgaaaatggccatacctcccaaagtaatttacagattccacgctatccccatcaagctaccattgactttcttcacagaattagaaaaagaacactttaaatttcatatggaatgaaaaaagagcccgtatagccaaaacaatcccaaaaagaacaaagctggaggcatcacactacctgacttcaaactatattacaaggctacagtaacaaaaatag

SEQ ID NO: 873192 - DNA, 589 bp, Homo sapiens
cctaaataaactctacatgtttaatttccttgatagagatctgaacatgtgtcacatgtccattatataatttaattcatatgtctatttttttaaacattaagattagcatccactttcattaattcacaaaaattaagaattaaaaatacatctcaaaaattttaagctaaatttaactcaaattatatctaatatttagattagaatatatttataacacttgtgatataaacattattttaccatagaatstaacttactgattaatagagggctgaacatgtcatgctgtcactgagtagcattagtgttaacctccatttcagtaggagagagtagaagtatgtttgcttatgtccctagctgctatttctgtgatacctctctggtggtatctatttcatcctgttatctaaaaagctcccaacccacaaagcaggttgttctggggtacacctgtgctttacctgctgtattcctcagctggttgcccacacaagctcttctctctgacttggtccttttcagaggtttatgaggtccccaaaagagaaggtggtaatgcttcttttgtccttttctcaag

SEQ ID NO: 873193 - DNA, 515 bp, Homo sapiens
cttttcaataagtaaagggtggagatgattaacgttaacgggaaaattaaattactctcaagcagtcagaaattactgtttggttcaccaagtcacacaaaagacagtctgaagtcaaacaactgcagctaattcgtcttgtcattgatgtatgttgtattaggattctccagagaaacaaaacaaatggatatgttggacgcaaagagagagagagagagagagaraagcacaactgatggatatgttggaggcaaagcgagagagagagaaacagaaccgatggatatgttggaggcaaacagagagacaggaagagagagattttaatttggcttacataattgtggggctggcaagtccaaaatccataaagcaagcagtcagcctggaagttctgctaagagttgatcttgcagtctttagtcccaattccttgaatttccaagcaggatttctatgttgcggtcttagggcagaattccttcctcttcaggaaacctcagtctttcctc

SEQ ID NO: 873194 - DNA, 655 bp, Homo sapiens
aactcagacctttacactacaaagttcataatgttattccactgtattattttgcctattctgaatacatctctatttacagagctaacaattgttatattctgtgggctgatgtgtgcaatataaaacccagtttacaatttaaataaaggcagaagaatttgtatcaaataatttgatatgcaacagttatatttcagtaggtgctcaaatttatatatatgattttctactgctttgatctcaggtaaatacaaatttcttgacttaatatgtttattattgaataacacaaataatagatgagttgaaaagtgattcatagcttaattataagtaaactcaaccatcctagatctgcacaaactaaggcctttaatakgatgctgatagtaaatatgtaaagcatatagttgatcctagaatctgtcttccaaattttgagtgttggactcttaagagagtgtctatattatgtaaaactgatgcataataaaatacaattctcagctctgtctctttcactgtatttcactaagtgaattttagagttttcccaagttaatctcatctaaattgtttcttgtagtgtgttgggttagttcaactggcatccatccatccatccatttactcatgcagcaaatctataata

SEQ ID NO: 873195 - DNA, 625 bp, Homo sapiens
ctatgactgactgaccaataaaatatggttgaaaggacactgccagtttccaggaccaggccttaggagattagcagtttccattttctctctcttgaacatttgcttctagaaccagctgccatgctgtgaggaagcctaagcagtccatggagaggcctaggtggaaaggaattgaagtcctttgttaacagctcccaccaatagccagcaacaacttgtggttgctcttggaaatgaatcctctatccgcatttgagctaccccagccaaagctgcatgagttgttgtgctaagcattgccccaattttaaattcataagctttttttggtgtggtttgttatctaacaattaataactggaatgccactttttatgactctatcttatagaaataagaactccagaaaacaagaatggacgtatatgggaatgtttataacaatrtccttcatgatttaaaaaaaagaaagaaaaaataaactagaaacaacttgaatgtccattctgtacattatggttaaaaagtattgcatagctccattgtggactatatttggctatttttttgtttatttttgagacaggatctcactctgttgcccagactgaagtgcagtggc

SEQ ID NO: 873196 - DNA, 617 bp, Homo sapiens
ttcttctctaatctcgctaagtcttcttagctgtctccttgatttctactggcagtgtttccttggatacttttttcagacctcctttattcttactaaatatcttctctccgaatgacagcttccattttcatggctgctacctgtataccaatgactttaaactgctttcttcatccctgaactttcttgagctccggatcttaaatgttgacaaccctgatgtcttagcagtttggggtctactcaaagcccagttatcattgatgaggtctataaaacatttatagaagaattaatgccaattctagagaaactcttacatataatcaatgagaaaggaatattccaaaatcactctcgaagaggccagtataaccctgatgcgaaaacctaacaaaaacattaaagtgttagagtgtttgagaaaagtgaaaattacctttctgataaagacyatgtgaagatctctcgaaactaagcaatagaaaaattaacaactcaataaaaatgaatgaaggatttgaacacatatttcatgcacatggaagaggcccaacgtcattaattattagggaattgcaatttaaaaccaccattagatgccactacatacc

SEQ ID NO: 873197 - DNA, 617 bp, Homo sapiens
ttcttctctaatctcgctaagtcttcttagctgtctccttgatttctactggcagtgtttccttggatacttttttcagacctcctttattcttactaaatatcttctctccgaatgacagcttccattttcatggctgctacctgtataccaatgactttaaactgctttcttcatccctgaactttcttgagctccggatcttaaatgttgacaaccctgatgtcttagcagtttggggtctactcaaagcccagttatcattgatgaggtctataaaacatttatagaagaattaatgccaattctagagaaactcttacatataatcaatgagaaaggaatattccaaaatcactctcgaagaggccagtataaccctgatgcgaaaacctaacaaaaacattaaagtgttagagtgtttgagaaaagtgaaaattacctttctgataaagaccatgtgaagatctctygaaactaagcaatagaaaaattaacaactcaataaaaatgaatgaaggatttgaacacatatttcatgcacatggaagaggcccaacgtcattaattattagggaattgcaatttaaaaccaccattagatgccactacatacc

SEQ ID NO: 873198 - DNA, 636 bp, Homo sapiens
gattggtgtacctgaaagtgacagggagaatggaaccaagttggaaaacactcttcaggatattatccaggagaacttccccaacctagcaagacaggccaacattcaaattcaggaaatacagagaacaccacaaagatactcaagaagagcaaccccaagacacataattgtcagattcaccaaggtgaaatgaaggaaaaaatgttaagggcagccagagagaaaggttgggttacccacagagggaagcccatccgactaacagtggatctctcagcagaaactgtacaagcaagaagagagtgggggscaatattcaacattcttaaagaaaagaattttcaactcagaatttcatatacagccaaactaagcttcagaagtgaaggagaaataaaatcctttacagacaagcaaatgctgagagattttgtcactaccaggcctgccttacaagagctcctgaaggaagcactaaacatggaaaggaacaaccagtaccagccactgcaaaaacatgccaaattgtaaagaccatagatgctaggaagaaactgcatcagctaatgggcagaataaccagcaaacatcataatgacaggatcaaattcacacataataatattaacctta

SEQ ID NO: 873199 - DNA, 581 bp, Homo sapiens
ttaaaacacatctgtaacgagcttgcaacagcctggataagcagtttaagagtaattgtttgaaagagagaggaggagaccaggtgcggtggctcacgcctgtaatcccagcactttgagaggctgaggcaggcggatcatgargccaggagatccagaccatcctggctaacacagtgaaaccccgtttctactgaaaatacaaaaaattagctgggcgtggtggcatgcgcctgtagtcccagctactcaggaggctgaggcaggagaatcgcttaaacccaggaggcggaggttgcagtgagccaagattatgccactgcgctccagcctgagcgacagagcaagactccatctcaaattaaaaaaaaaaaaaaaaagcaaaaacaagacgaggttataaaatctggcatgcttttatgtttaaaaaaaatctctcattgaaaaacaaaccatacttagtgaaaaaatacaaaaaaaaatttatcaaattgtacagtcgtctcagctgctaagattatgaggtttttttttcactgtaactatgtatttcaaattttctataaggattgtgtaggatt

SEQ ID NO: 873200 - DNA, 600 bp, Homo sapiens
ggcagaagttaaaggtttaggctcagtgtattttgcaatagagatcactgttgaatatacgacagagtgtttattacacataatccctgtaagagtctatttggcagtcacccaaagccaaccaatggcttctaccatgctgaaacytgacttacacgaaactagagctgagagtaaaagtcagctcagaaaggaactgcgagatagcatgcttatattagagtagcattttagaaggaagaaaatttgaaaacagctaaggtttggctgttgtttgcctgtttggtttattagttttcaatcacacttcagaatgatgcaggtcacagtgtgtctatagttgccctctagcaggctgtccacaaaacacctttctgcaaccactgagaaaaatgagagtccagggcttccccagtctatgttccccctgcagacacagttgtctagaagagtatacccaggctcttccttcatctcggtcagatcccttagaacaaagtgcctttccactcaatccccttgctacccactgtctacagacagtcttctggcctttcatttagggtctcacatgctttagagtgacccacttctagtctc

SEQ ID NO: 873201 - DNA, 545 bp, Homo sapiens
ttgcagacaacatgattttatatctagaaaatctcatattctctaccccaaagctcctttagctgataaacaacttcagcaaagtttcaggatacaaaatcaatgtggaaaaatcactagcattcttatacatgaacaacagccaagccaaaagccaatcaggaaccaaatcccattcacaattgccacaaaaagagtaaaatacctaggaatacagctaacttgggaggtgagagatcgctacagtgaaaattacaaaacactgctcaaagaaatcagagatgacacaaatggaaaaacattccatgctcatgawtaggaagaatcaatcattaaaattgctataccacctaaagcaatttacagattcaatgctattcctatcaaactgccaatgacgttcttcacagaactagaacaaaaaaactatttaaaaaattttatgaaaccaaaaaagagccaaaatagccaaggcaatcctaagcaaaaagcacaaacacccagtctacacttacaggacttcagtcaccaaaacaggatggtat

SEQ ID NO: 873202 - DNA, 609 bp, Homo sapiens
ttttgttgggaagggagggagttacatctggagaaatgtcctcagaaatttattacaggatcggatatctgcaaagtgtgatagaacccagggtttgtgcccttcttgtagaggtagcaattctggtgtccctgttacagtgagaaccctttctggaagacaggcatcctggaactttacttggcctatctgcataacctttcctttttttgatttctccctgtgtattaggagaattttctttctatgatttgggatagtctgggaggacagcccacaagttttctagattgggaatgaataagagaaaattaatgtttcctgggtctaaattctyctgaaatcctttatcaactgtgtgatttcggggtgaccgtttaattagataatgcatttaaagtgctatcacagtgcttgatgaatagtaaacattcaataaactaatgttttataatgtttaaattattattaaaacactattttcatttattcatgattcactcaaaatatccagcaattcaaagtgtcttctctgtgtctggtgctgtggaatgtgggggatggtttggtgtgtttgcggtggccttctgaggtctccctagtctctca

SEQ ID NO: 873203 - DNA, 701 bp, Homo sapiens
tttgaggagttagtcataaattctttcccaaggccaatgtccagaatggtgttttctaggttttcttcaaggattcttatagtttgagatcttacatttaaatctttaatctatcttgagttaatttttgtgtatggtaaaatgtagaagtttgatttcattcttctgyatatggttagtcactgtcctagcaccatttattgaatggggagtcctttccccactgcttatttttgttgcctttgttgaagatcagatggctgtaggtatgccgctttctttctgagttctccattctgttccatcggtctctgtgtctgtttttataccagtaccatgctgttttggttactgtagcccagtagtatagtttgaagtcaggtagcacgatgcctccagctttgttctttttgcttgggattgtgttggctatttgggctctttttttggtttcatatggattttagaatagtgttttctagttctgtgaagaatgactttgttagcttgataggaatagcattgaatctgtagattgctgtataactattgtaatgatattgattcttccaaaccacgaacatggagtatttatccatttgtttatgtcatttatgatttctttcagcagtgttttgcagttctccatgtggaaatctttaatctccttggttagatatgttctgaggtattattttttt

SEQ ID NO: 873204 - DNA, 701 bp, Homo sapiens
tttgaggagttagtcataaattctttcccaaggccaatgtccagaatggtgttttctaggttttcttcaaggattcttatagtttgagatcttacatttaaatctttaatctatcttgagttaatttttgtgtatggtaaaatgtagaagtttgatttcattcttctgtatatggttagtcactgtcctagcaccatttattgaatggggagtcctttccccactgcttatttttgttgcctttgttgaagatcagatggctgtaggtatgccgctttctttctgagttctccattctgttccatcggtctctgtgtctgtttttataccagtaccatgctgttttggttactgtagcccagtagtatagtttgaagtcaggtagcacgatgcctccagctttgttctttttgcttgggattgtgttggctatttgggytctttttttggtttcatatggattttagaatagtgttttctagttctgtgaagaatgactttgttagcttgataggaatagcattgaatctgtagattgctgtataactattgtaatgatattgattcttccaaaccacgaacatggagtatttatccatttgtttatgtcatttatgatttctttcagcagtgttttgcagttctccatgtggaaatctttaatctccttggttagatatgttctgaggtattattttttt

SEQ ID NO: 873205 - DNA, 701 bp, Homo sapiens
tttgaggagttagtcataaattctttcccaaggccaatgtccagaatggtgttttctaggttttcttcaaggattcttatagtttgagatcttacatttaaatctttaatctatcttgagttaatttttgtgtatggtaaaatgtagaagtttgatttcattcttctgtatatggttagtcactgtcctagcaccatttattgaatggggagtcctttccccactgcttatttttgttgcctttgttgaagatcagatggctgtaggtatgccgctttctttctgagttctccattctgttccatcggtctctgtgtctgtttttataccagtaccatgctgttttggttactgtagcccagtagtatagtttgaagtcaggtagcacgatgcctccagctttgttctttttgcttgggattgtgttggctatttgggctctttttttggtttcatatggattttagaatagtgttttctagttctgtgaagaatgacwttgttagcttgataggaatagcattgaatctgtagattgctgtataactattgtaatgatattgattcttccaaaccacgaacatggagtatttatccatttgtttatgtcatttatgatttctttcagcagtgttttgcagttctccatgtggaaatctttaatctccttggttagatatgttctgaggtattattttttt

SEQ ID NO: 873206 - DNA, 570 bp, Homo sapiens
ggactatgtgaaaagaccaaatctacatttgagtggtgtacctgaaagtgacggggagaatggaaccaagttggaaaacactcttcaggatattatccaggagaacttccccaacctagcaagacaggccaacattcaaattcaggaaatacagagaacaccacaaagatactccttgagaagaccaaccccaagacacataattrtcagattcactaaggttgaaacgaaggaaaaaatgctaagggcagccagagagaaaggtcaggttaaccacaaagggaagcccatcagactaacagcagatctctcggcagaaaccctacaagctagaagagactgggggccaatattcaacattcttaaaggaaagaattttcaacccagaatttcatatccagccaaactaagcttcataagtgaaggagaaataaaatcctttacagacaagcaaatgctgagagattttgtcaccaccaggcctgccctacaagagctcctgaaggaagcgctaaacatggaaaggaacaactggtaccagccactgcaaaaacatgccaagttgtaaag

SEQ ID NO: 873207 - DNA, 613 bp, Homo sapiens
caatgtgaactttcttggattcattttgcaccccataccagtgcttggaaaccatcccaaatactttgtcattcagagttttagaaggcttctattttaataaagtcataactataatgccaggatagctcagtttccagattcaactatatatcatgactgtgacccaccttctaccattacccctcttttcagagttttgagtgataaagtctccacgttcaaatccaaatgttggcccactttcagctccaggaagttgacctttcaatggaaacctttactttaaaaaaactcaggagctagccagttttcgcagcaccatttattaaataggraatcctttccccatttcttgtttttgtcaggtttgtcaaagatcagatggttgtagatgtgtggtattatttctgagggccctgttctgttccattggtctatatctctgttttggtaccagtaccatgctgttttgtttactgtagccttgtagtatagtttgaaatcaggtagcgtgatgactccagctttgttcttttggcttaggattgtcttggcaatgcaggctcttttttggttccatatgaactttaaagtagtttttttccaattc

SEQ ID NO: 873208 - DNA, 597 bp, Homo sapiens
tatcaaatcatcatcatcttttacctggagatgtgcaacggcatcccaagaggtcaccctctttacctgtctatagtctaatttcaacagagcaactagaatggtggttttaaaacagaatttgggaatttagttgcactttgatggtgttagtccacaaaatccaatccttttgctaattacaataaaaatttgtgaacaaaacacaaacaaacaagtatataaaaggaaattacccatatctgtgggctctctaaggcaaataaaagggggcagattgtgaaggaaagtcaaaacttagagaaggaacctggcttagggtgtttgcttttatggtttttgactcaatgagaggttttagtcacagaggagaacatcagcattggtagataaaactcctaaaaaaaaaaaccctcatctttttgggagagtaagggggaaatcttatagtggggkaaaaaagcagaagaaaggctagcttaattctgtgtaggaatcagtataaggctgagattggaaagaaaaaaatcttgaagaaatcatagcagtaaacttccaaatcatcggaaagacataaatttacacatcagcaaacca

SEQ ID NO: 873209 - DNA, 600 bp, Homo sapiens
ccctttcagagaaaatcaggaattcaaagattctgatgaactgggcaactaagaatatcaaccttaaatgggtaggcaaagctgaggcacacttgggcatggaccccaccccaggtactgcacaatacagttggaaaggaattcctaacatacagctgttccctgaggggaggagagtttgggccacacatacagtgtcctaactcaaaggttccccatggtttggctcttgattcatcaacttggaacaaaggggactaggcatacacaagagtctctagaccacagaaaaaaaagtgcagttttgtatggacacacaaacacttgcaggggcttcattcctgggaatagggcagagaaaactcaaatattcccagttgttctggaargcacttgccagcatactctgccgcctgttgctgctgaccattagcttctgactagtctgcatcagagagctaatgtggccaactagccttagacttccagcagcccgagtaggacctgggcactttctcatccctcttccctggctcaccccagcaataacttcaggtctactgtttcctcctggaagaagtttgtgtgggcaatgagcac

SEQ ID NO: 873210 - DNA, 560 bp, Homo sapiens
tgctgactttatgagtgaatagaccgcttccgtgttccccattgttatgaccctatagcctaacatagtacctggcaggttagaaccactcaatggatatttggaaataaatgaatgaatgaaatttcagccttccattataaaataaaacctgcttcctcacatttgtgtaagaatgctctaacattaaaatgcttagatattcatctttcaatttccatatttcttttgaggaacaccaatgccatcatcatattgcctctgtaatcacttttgttattggtacaagtgttgacatagaactttttccttaacaatctgaagatagttgaaataaaaaagagataatttttaaaaastccttaaggtaggaaatatcaaaagcaaaataaattcagtgtttacaagataaaccttatctttccagcctattttatctcctagtctacacatattctctttgaatgcattgcttatgagttttgtctagagagcaaccatcctggtaaacttcatactcaagagagtaggcagaggtcttcccttccagtccagatttt

SEQ ID NO: 873211 - DNA, 597 bp, Homo sapiens
gttcaaaatacatcttatttgaattaaatttgaaataaacagtcgcactatatttgaaaaatatccaaaacactgatgcctgtagcaactgatttatataacatttatcaagcagatacttaactcaaacatccaagatatttctttaagataggcaggtaaataataggttaggaataaaaagtttagttatattctaaagtgtgatactgatttcttagtgcttcatgattactgaagcagacattttacaagtcatgcaaaaattacaattatgactttgagtagtttgcagtcctcaattatgacacaggtgtttatattcctcttgtaaaaactaaattgatgtaagcyatcaaatctgtcatctattcattaataacatctatggataagttggctctttgaatataatacagctgatgctcagatattttcttttagtgccttttgtatatatctctgttattgcattgtattaaaataccttgtttaaaatgatttctgttatattgactacatgattaattatgggaaggcagaaatatactttactctgctctttgtccacatttcctcatctaattcttggtacaa

SEQ ID NO: 873212 - DNA, 614 bp, Homo sapiens
cccctaaatggtcgccctctgacatttcgatggtactgataaccttcatcccgacttctgcttggctgtcctttccaggactcctcacttctcacatgttgatatccacccctaccagaatagccccaatcacttttgtacttcctgcttccataagtttgattatagaactgcttggatctaccacttctcaaaatattagacacttcattttcatcttctgaactctcttcttttggtctttgcactctgctatcaacagagttggccccagggctgaccacatcagcagcagtcttaggatcttttactttttctgttttttctttcargctttgaatggtccttttaggttcaagttcaacaggcacagtttctctctctctgtttagaatctgagtgggaggatgagcctttccctctgctacaggagggatggaagccaatgccgtatctgcctttcgtgtctgggaagattgctctgtccggccttcgtccggcttactgctcacacttgcttcagggagagaatgtacatgttcacccctggcttctggaaactcatctactgttgaaactgaaccacaatctttagacagatccagattttccag

SEQ ID NO: 873213 - DNA, 641 bp, Homo sapiens
gggagaggtaactgcaggatatgctctaggagaaggtggaattggaatgaagcagaaagaataaaacctctgttcaatgaaaataaatgagggttgtgagtatttatttaaaaatcttttattccaaagacagtggattgtcttcctaaataagagtttgccggcaaacaagacattacaagaaaatcagcatttcagtggttgaagagaggctctgttatcatcattattattatttttaacctggcagagaaaaaagaaccaaacactaattgcaaaaaatttgctggtgtcagtgctgtgactcggtgccatttctgagctgagcaattatgcacttcccgactaatgcattatcataatggctctcggtgggcacaacatatggtgttacttttgttttcaacatgatrtaagccagattttctttttctcactgcactaaaaataacacacaatgattttcctccttccttactcaggtaaggagaggacagacagaaagcttcagtgatctccttcgggctcatctcccttaaccagacaggctgccttttaaacagcaaccctcccaattgatgcttggctatcacatttgcagaaaaaaacttttctttgataccattttagtgtgggatact

SEQ ID NO: 873214 - DNA, 706 bp, Homo sapiens
ttttctaccattccgtaggttgtctgtttattctattgatagtttcttttgctgtacagaagctcttaagtttaatgagatgccatttgccaatgtttttattgattttagtgtctttgtcacagaatctttgcctgttcctatgtgcaggatggtattgcctaggttgtcttccaggtttttatagttttaggtagtctttaagccacattgagttgatttttgtatatagtataaggaaggagactggcttcagtcttctgcatatggctagccmgttatcccaccaccatttattgaataggaagtcttttccccattgcttgtttttgtcagctttgtcaaagatcagatggtcataggtgtgcggccttatttctggtctctctattctgtttcattggtctatgtgcttgtttttgtaccagtaccatgctgtttggttattgtaccctcctatagtatagtttggaaacctattactgggtatatacccagaggaatattaatcattctgtcataaagacacatgcacataaatgttcattgcaggattattcacaatagcaaagacgtggaatcaacctaaaaacccttcagtgacagagtggttaaagaaaatgtaatacatatacactatggaatactatgcagccataaaaaataaagagatcatgtcttttctggggacatggatggagccaga

SEQ ID NO: 873215 - DNA, 706 bp, Homo sapiens
ttttctaccattccgtaggttgtctgtttattctattgatagtttcttttgctgtacagaagctcttaagtttaatgagatgccatttgccaatgtttttattgattttagtgtctttgtcacagaatctttgcctgttcctatgtgcaggatggtattgcctaggttgtcttccaggtttttatagttttaggtagtctttaagccacattgagttgatttttgtatatagtataaggaaggagactggcttcagtcttctgcatatggctagccagttatcccaccaccatttattgaataggaagtcttttccccattgcttgtttttgtcagctttgtcaaagatcagatggtcrtaggtgtgcggccttatttctggtctctctattctgtttcattggtctatgtgcttgtttttgtaccagtaccatgctgtttggttattgtaccctcctatagtatagtttggaaacctattactgggtatatacccagaggaatattaatcattctgtcataaagacacatgcacataaatgttcattgcaggattattcacaatagcaaagacgtggaatcaacctaaaaacccttcagtgacagagtggttaaagaaaatgtaatacatatacactatggaatactatgcagccataaaaaataaagagatcatgtcttttctggggacatggatggagccaga

SEQ ID NO: 873216 - DNA, 706 bp, Homo sapiens
ttttctaccattccgtaggttgtctgtttattctattgatagtttcttttgctgtacagaagctcttaagtttaatgagatgccatttgccaatgtttttattgattttagtgtctttgtcacagaatctttgcctgttcctatgtgcaggatggtattgcctaggttgtcttccaggtttttatagttttaggtagtctttaagccacattgagttgatttttgtatatagtataaggaaggagactggcttcagtcttctgcatatggctagccagttatcccaccaccatttattgaataggaagtcttttccccattgcttgtttttgtcagctttgtcaaagatcagatggtcataggtgtgcggccttatttctggtctctctattctgtttcattggtctatgtgcttgtttttgtaccagtaccatgctgtttggttattgtacccycctatagtatagtttggaaacctattactgggtatatacccagaggaatattaatcattctgtcataaagacacatgcacataaatgttcattgcaggattattcacaatagcaaagacgtggaatcaacctaaaaacccttcagtgacagagtggttaaagaaaatgtaatacatatacactatggaatactatgcagccataaaaaataaagagatcatgtcttttctggggacatggatggagccaga

SEQ ID NO: 873217 - DNA, 627 bp, Homo sapiens
aaagcttggtattagcattgttatagtcagtacctaagtaatagatacagtttctcacagattaactgtgcaacattaaatcattgcatttgggtctcagcatcacaccaccaaaaaatttatgtgagtttgtgaatacacatttttaaatgtttgaagttgcttttatgggggcatttcaaaggttgctgaacccacaaatttacctgtcaggaaggggccatagcattgaggccattgctttattttgattaggatgtaggtgatattatgccgtagagtaaatgatgaagggtagggatagtagcyggaggaatgaagacagatgtgagtgaggcaacactaaaattaaaacgtttttaggaatgtaagcaagctacgtgaattaatagtgacatataatgctattaaagttattataaatgaggaaacctttagcatactgacattcaggtgaagctcaactttgggtatactacgggaaaagcagaaggttaaagagtgatgatttagtagacaaaaagttttccttatatgtggaagaaataggctgatattgaccctcatcaagaaaagggaagagaacatttagagggaaataaactatacgtactgtcataaatgtca

SEQ ID NO: 873218 - DNA, 643 bp, Homo sapiens
gcctttaggatgccagaattcagcagcaaggtattatttaacttgagaagaaaaattgcttggctttatagctttcaaaggaccatgtgtcatgatgttatgcatgaaaagagttttcctgtaggggaactagttttataagcaacgaatgaccacggggaatacaccgtagttattttaaagagcatttgaagaactctaacaaattaacattttatacttcataatatacctccttcytaaaatttgccaagaaagcctcaaccactgatttttacagtcatcaaatgtagagagtatccttggctaacacccagctacacttggtggctgattttattccccttactctgttgttctgctgggtgaggggcttcgtagaaagcaggtttcaagagaagaaaaaacagatccattcttttcctttttttcctgactcttatatgtattatattttttacagaatgctttatctgatacttgcattattacaaatatgttttattaataatacattctggatatatttttagcttcagaaaatacatcctttattcagccttcttcaaaaggtgggtataacacagaagtatctccaagatcctttttagctctaagaaaaggtgtttgaattgggatacac

SEQ ID NO: 873219 - DNA, 592 bp, Homo sapiens
taattaactcaagaaagcaattggattccttcctggggaattttaaaattgaaagtagagggacaatttcaggctttttctgatggtgaggttatcagatgagtgcctttgaaactgaagatttcatgttactgaayatatggaaggaataggtatggagtagatcagagattctcaacagtggtgctatgaatacttgggggctagaaaattgcttgttggcatggggttaggagtgggggcttatcttgtgcattatagaatgtttagcagtatccaaggcctctacccattagattccagtagcattccccagcagtgacaaccaaaaatgtctccagacattgccaaatgtcccttggagggtactgtctcccaactgagatccaccaaagtagaggaaaacaaagctaaatgcatggagagaagcagaaactggaaatggcaggagctccttacagatattgtcctaaatacatttgtccttctgttgtttctaagcctcagatctcttcctatcctttttatagttacatgaattataccaaccttcttccagttggcagtttttcccccatttttctccctaaaa

SEQ ID NO: 873220 - DNA, 601 bp, Homo sapiens
agcagcatgagaacagatgaatatagtaaattagtaccaggagtggggtgctgctataaaagtatagctgaaaatggggtgctgaaaatgtggaaacaactttggaactggataacaggcagaggatggaacagtttggagggcccagaagaagacaggaaaatatgggaaagtttggaacttcctagagacttagagggctcagaagacaggatgatgtgggaaagtttggaacttcctagacacttgttgaatagttttgaccaaagtgctgatcacaatatggacaatgatgtccaggttcaggctgtctcagatggagatgaggaacttcttggggaatgaagcaaaggggactcytgctatgtgttagcaaagagactggtggcattttgtgcctgcctagaggtccatggaactttgaacttgagagagatgatgtaaggtatctggcagaagaaatttctaagcagcaaagcattcaaaaggaagcagagcatgaaagttccttttggaactttaaggtttaatgaccgccctgttggattttggacttgcatgcagactgtaacccatttgttttgaccaatttctcccattt

SEQ ID NO: 873221 - DNA, 446 bp, Homo sapiens
ttttgggttcacattacataccaatgataaagtttaatttataataagcacagtaagagattaacaacaacaactaataatagtttaagtataaaaatatgccagcatcactactgttacactttgaggctattattaaataaaataatgggtttttgaacataagcactctaatactgccacagttgatctgatagcgagagaagtactaagtgcctatcaggcagggagcatagaagatgtgaacacactgtaaaargaaatgagtcatgacatggttgtttggttctgtatcgccatccaaatctcatctcaaattgtaatccctacatatcaggcaagggaactggttggaggtgattggatcatggaggcaaaaattttcataagcagtgaggagcagaatgttaattgccaagacaatgggaaaaatgtctccagtgaat

SEQ ID NO: 873222 - DNA, 627 bp, Homo sapiens
aggaagtcaaattgtctctgcagatgacatgactgtatatgtagaaaacctcaccgtcttagcccaaaatctccttaagctgataagcaactttagcaaagtctcaggatacaaaatcaatgtgcaaaaatcacaagcattcctatacaccagtaacagacaaacagagagccaaatcatgagtgaactcccattcacaatttctactaagggaataagatacctaggaatacaacttacaagggatgtgaaggacctcttcaaagagagctacaaaccactgctcaaggaaatatgagaggacacaaacaaatggaaaaacactccatgmtcatggatagaaagaatcaatatcatgaaaatggccatactgcccaaagtaattgatagtttcaatactatccccatcaagctatcgactttctccacagaattgtacaaaactactttaaacttcatatgaaaccaaaaagagccccaaaaggagcccgcatagccaagacaatcctaagcaaaaagaacaaagctggaagcatcacgctacctgacttcaagctatactacaaggctacagtaaccaaaacaacatggtactagaaccaaaacagatatataaaccaatggaac

SEQ ID NO: 873223 - DNA, 627 bp, Homo sapiens
aggaagtcaaattgtctctgcagatgacatgactgtatatgtagaaaacctcaccgtcttagcccaaaatctccttaagctgataagcaactttagcaaagtctcaggatacaaaatcaatgtgcaaaaatcacaagcattcctatacaccagtaacagacaaacagagagccaaatcatgagtgaactcccattcacaatttctactaagggaataagatacctaggaatacaacttacaagggatgtgaaggacctcttcaaagagagctacaaaccactgctcaaggaaatatgagaggacacaaacaaatggaaaaacactccatgctcatggatagaaagaatcaatatcrtgaaaatggccatactgcccaaagtaattgatagtttcaatactatccccatcaagctatcgactttctccacagaattgtacaaaactactttaaacttcatatgaaaccaaaaagagccccaaaaggagcccgcatagccaagacaatcctaagcaaaaagaacaaagctggaagcatcacgctacctgacttcaagctatactacaaggctacagtaaccaaaacaacatggtactagaaccaaaacagatatataaaccaatggaac

SEQ ID NO: 873224 - DNA, 673 bp, Homo sapiens
gccccaattaaaagacacagcctggcgaattggacacagtcaagacctattgatgtgctgtattcagaagacccatctcacatgcaaagacagacataggctcaatataaaaggatggaggactatttaccaagcaaaaaaaaaaaaaaaaaaaaaagcatgtattgcaatcctagtctctgataaaacaaactttaaaccwataaagattaaaaaaagacaaagaagggcattacgtaatggtaaagggatcaatgcaacaagaggagctaactattctaaatatatatgcacccaatacaggagcacccagattcataaagcaagtccttagggacctacaaagagacttagactcccacacggcaatagtgggagactttaacaccccactgtcaatattagacagatcaacgagacagaaaattaacaaggatattcaggacttgaactcagctctggaccaagtggatctaatagacatctacagaactctccaccctaaatcaacagaatatatattcttctcagcaccacatagcacttattctaaaactggccacataactggaagtaaaacactcctcagcaaatgtaaaagaatggaaatcataacaaacagtctctgagattacagtgcaatcaaattataactcaggattaagaaactcac

SEQ ID NO: 873225 - DNA, 673 bp, Homo sapiens
gccccaattaaaagacacagcctggcgaattggacacagtcaagacctattgatgtgctgtattcagaagacccatctcacatgcaaagacagacataggctcaatataaaaggatggaggactatttaccaagcaaaaaaaaaaaaaaaaaaaaaagcatgtattgcaatcctagtctctgataaaacaaactttaaacctayaaagattaaaaaaagacaaagaagggcattacgtaatggtaaagggatcaatgcaacaagaggagctaactattctaaatatatatgcacccaatacaggagcacccagattcataaagcaagtccttagggacctacaaagagacttagactcccacacggcaatagtgggagactttaacaccccactgtcaatattagacagatcaacgagacagaaaattaacaaggatattcaggacttgaactcagctctggaccaagtggatctaatagacatctacagaactctccaccctaaatcaacagaatatatattcttctcagcaccacatagcacttattctaaaactggccacataactggaagtaaaacactcctcagcaaatgtaaaagaatggaaatcataacaaacagtctctgagattacagtgcaatcaaattataactcaggattaagaaactcac

SEQ ID NO: 873226 - DNA, 652 bp, Homo sapiens
gttcctggaaggaaagcagccagactgacaccttgattgcagcccagagaaccttagcaggggttctagctgagcctgccgggactcctgacctgtggaaactgtgagacagcaaatgggcagggagtttctccactctctgcacccactttcactgcccccgcatggtatcatcgtgcattactgtgacatatttatcaaaactgaggaacaacttagggacaatgctattaaagttaactccagcccttattccgatttcaccagtttttccattaatacttttttattgctccaaggtctaatccaggatcttgtgtttagttgtgatgttccsttcccttcctgtggtctgggtcagtttctcattctttcctagtttttcatgacttgacagttttgaagaatactggtcaggtcttttttgcaatgtcgcttgatttgggtttgtggaatgttcttctcgtcattagactggggttatggatttatggagagaatgatgagagaatttttggaagtgatggaaatgttcaattttttttgttgtggtggattcatgggtgtatatgtttattaaaacaaattacactatggcataaaaatgagtacattttattgtgggtatcatacctcaataaagtttttggaa

SEQ ID NO: 873227 - DNA, 559 bp, Homo sapiens
agcccagatggcttcacttatgacttttaccaaatacttcaagaataaataatactaattttaaacctgctgttccagaaaatgtacaccaagagaggaatatttccaattcatttgtgagatcaccattttctgatacaaaaaccagttttaaaaattaagaaaagaaaactccagacaaatatccttcacaaatatgggtgttaaaatcaataaactgcaaggaaatcaaatcataactcactccagcmtagaactcctgggctcaagcgatcctcccacctcagtttctgagtagctgggactgcaggtgcatgccgccacacctagctaatttttttttaatagagatatagtcttgccatgttgcccagtctggtcttaaactcctggcctcaagcgatcttcctgccttggcctcccaagatgctgggattataagcatgagccatcatgccaggacaagaacagctttttcaaaactgacacataatagttgtacactatctgatacaggccaccgtaaagctatataagcttgacaacgtggtattaatgt

SEQ ID NO: 873228 - DNA, 598 bp, Homo sapiens
atacaccagattaacagaataaaggataaaaattatatgatcatctcaatagatgcagaaaaagcatttttaaaaatcaacatgtttcatgataaaaactcttaacaaattaggcacataagtaatgtatttcaacataataaaggccgtatatgacaagctcccagctaatatcatttcaacggtgaaaatctgaaaggttttcctctaagaagtagaacaagacagacaaggatgtcctctcttgccgcttctatttaacatagtactggaagtcctagccagagcaattagggaagaaaaacagatcaaaggtatctacattggaaaggaagaagtaaaattgctgtttgcagatgatatggtcttgtacatagaaaatcytaaagacttcaccaaaaattggttagaagtaatcaacaaatgaaatataatatcaggatagaaaatcaacatattaatatcagttgtatcagtttctacatttcaacaaggaactatccaaaaaacaaatcaagaaaacaatcccatttacaatagcatcaaaaaaattaatgtatttgggaataattttaactatggaggtaaaagctctgta

SEQ ID NO: 873229 - DNA, 587 bp, Homo sapiens
attaattacttgaggggtgtttgtatgtgtgtgtgcttgtgtgcgcccacgcgcatgcacgtgtgtgttttcaatttattgcatagggtaacactggatatgcaagggaacatgttctggtaataatagggtcttcaagagccactcgctgaggagcaaatggttaacactttcacctgtatgttgaatagaccttgacagtattaacaggctttgcatacacctacttgtcaactagtctttaaatctgctttcccattctgaactgcacagatatgcaaaaggtttcttatttgggaaaaatgtagtacatwattgggtaactattaagctgtctataatatagccaaaaaatacaaatagttacttgtattacagaggcctcccctgagaattttaaagaccacaatttgctgctttctaattctggatttctggcataaaaataaaacatatttggaatgggggcggtgtataacatccataaggctatttcaagaaaataaaacatatttaatttcatttaatatccagagtggtattgctttatgagaaatgtagtcttattgaaattttatggcaatatt

SEQ ID NO: 873230 - DNA, 667 bp, Homo sapiens
atatatccagttagtaagattattttaggtatagaaatgataaacatatgtgatgagtgttcatgtgaatgaatgagacttatctgaatggcgaatttgaatcatcaggcagattcctccgtgtcaactctgttattctcttcaccaacctcaacattgattcaatcactctggcatgtatcttttytatctcttttgatttatctcaaaccaagttacttcgttccatccttatgatcatagcctaaactcaggtgactattgttttccattttgtttcctgaaataatcttccaactggttttctgctaatagtcttatatttttctaatatgtttttcaaactttcaatcagagtgatcttataaaatacagaacacattatttctcagcttacatatccccattactttctgatggtcttcaggataaaatctgaaactcctaagcataggatatccatctcctctgggacatctctccatattctctgagatgccttccttgattcatcatgactggtttaattccccttcctgtatggtcccatgacaccatatcttgaccctttgtctcttaccacttaatattaaaattgcctggtttttcatttatttgtcttcctatctagtttgttggatctttatgtatattaaccacagctatc

SEQ ID NO: 873231 - DNA, 605 bp, Homo sapiens
aaaacctaggtgataggttgataggggtagcaaaccaccatgacacacgtttacctatgtaacaaacctgcacgtcctgcacatgtatcccagaacttaaaatttttttaaaaaaaattacatttcaccttttttaaaacagagtgttgtcatgctatatcatgtggatcccatcattataggcattatgtactctaataagatggcaagagaaaaaatgtttaagctgttcaggctggaggtaaaatggaagagttgaggctggccttggctgacagtcagwtgagtctggactctggccctacctggccatgtgtatggataagtttctgaacttcttttcttcaaaatataaccacgctaaaagcagcctgatgggagtccgactgagcacggtttgaatcccacctttgccatttagcatgatgagatgtgagttaagttacttaattcaagccccacgtcctcatctttaaatgcagacaacagtatctaccttcaggttgttgtcaggattaatataatttatgtaaagtattttacccaacatttggcatatatttgtatacagtaattggcgtatctttggtataaaataaatgtta

SEQ ID NO: 873232 - DNA, 605 bp, Homo sapiens
aaaacctaggtgataggttgataggggtagcaaaccaccatgacacacgtttacctatgtaacaaacctgcacgtcctgcacatgtatcccagaacttaaaatttttttaaaaaaaattacatttcaccttttttaaaacagagtgttgtcatgctatatcatgtggatcccatcattataggcattatgtactctaataagatggcaagagaaaaaatgtttaagctgttcaggctggaggtaaaatggaagagttgaggctggccttggctgacagtcagatgagtctggactctggccctacctggccatgtstatggataagtttctgaacttcttttcttcaaaatataaccacgctaaaagcagcctgatgggagtccgactgagcacggtttgaatcccacctttgccatttagcatgatgagatgtgagttaagttacttaattcaagccccacgtcctcatctttaaatgcagacaacagtatctaccttcaggttgttgtcaggattaatataatttatgtaaagtattttacccaacatttggcatatatttgtatacagtaattggcgtatctttggtataaaataaatgtta

SEQ ID NO: 873233 - DNA, 673 bp, Homo sapiens
ccaaggcaatcctaaacaaaaagagtggaagctggaggcatcatgctacccagcttcaaactatacttcagaactatggtaaccgaaacagcatggcactggtacaagaacaaacacatagaccaatgaaacagaatagagaacccagaaataggacttcaaacctacaacaayctgatctttgacaaaacctgacaaaaacaagcaatggagaaaggatttcctatttaataaatagtgctgggagaactggctatcaatatgcagagaattgaagctgcaccccttccttacaccacatagaaaaatcaactcaagatgatttcagggctaaaatgtaaaacccaaaactacaaaaaccctagaagaaactctaggtaataccattcaggacacagacatgggcaaagatttcataacgataatgccaaaaggaattgcaacaaaagcaaaaatttacaaatgggatctaattaaactaaggaacttctgcaaggcaaaagaaactatcaacagaataaacagcctacagaatgggagaaaattcttgcaatctatgcatctgataaaagtctaatatccagcatctatagggaacttaaataaatttacaaggaaaaaaaacaaccccattaaagagtgggcaaaggacatgaacagacacttctccaaa

SEQ ID NO: 873234 - DNA, 620 bp, Homo sapiens
ttcttgcaatctatgcatctgataaaagtctaatatccagcatctatagggaacttaaataaatttacaaggaaaaaaaacaaccccattaaagagtgggcaaaggacatgaacagacacttctccaaagacgacatacatatggccaacaaacatataaaaggaagctcaacatcactaatcatagaaaaaggcaagtaaaaaccacagtgagataccatctcataccagtcagaatggcaattactaaaaagtcaaaaaagaatagatgctggtgaggttgtgcagaaaaaggaatgcatttacactgttggtgatacattcatgtgtatgttcattggaccgcttttcacagtagcaaagacatggattcaacctaaatgcccakcaatgatagactggataaagcaaatgtggtacatatacaccatggaatactatgcagccataaaaaaatgagatcatgttcttgtgggaacatggatggagctggaggctattatccttggcaaactaatgcaggaacagaaaaccaaataccacctgttctcatttataagtgggagctaaatgatgagaacagttggacacatagaagggaacaacacacattggggcct

SEQ ID NO: 873235 - DNA, 567 bp, Homo sapiens
atgtctaattatgtgactaattttagactgtgcgccatgtgcagatgagaagaatgtgtattcttttgtttttggatggatagttctgtagatatgtatcaaattcatttggtcctgtgtcgcgttcaggtcctaaatatctttgtaaattttctgcttgggtgatctgactagtacttacggttgggtgttgacgactcccactattatatgtgggagtctaagtctctttgaaggtctcaaagaacttgctttatgaatctggatgctcctgtgttcagtgcatatatatatataggataggtaggtcctcttgttgaactgagccccttacccttatgtaatgcccttctctctctctctttctctctctctctctctctctctstgtgtgtgtgtgtgtgtgtgtgtgttaatctttgttggtttaaagtctgttttgtctgaaattatgattgtaacatctgcttttctcttgttttccacttgcttggtacatttttcttcatccctttattttgagcctgtaggtgtcactgtatatgagatgggtctctcaaagacagc

SEQ ID NO: 873236 - DNA, 608 bp, Homo sapiens
taaacaaaaaacaagcttagggtttaaatatttcaggcaaatcttttactttttcttccctaaattacccaaattattgcatcaaatgttcacttacagttttgataacaattcaacttaaattataaacagtttgaactaagttatcaaaaaatctcctctttgaatgaaaaagaaaaaatataaagcaaaataaaacccttctgccatcaccaccactaacaatttcacagcaagaacaaaactaatcctaccaaaaattagtggtatttaaataacaacatattttgaaagttctaaacatgttatggatatcagctaatttgtctatcatggcagaagggacatgagtttattattattaattcctttgaaacccatagttataattgagaccattttattgaaagagtgttatataattgcaatatctttgtaatatcayagaataaaagtcaaagttaacaatacaattattcatatctatgtgctcctattctttactttttaagacagtgagtttagttagaatttccctgaatttaccaaaaccactttcaggcacatttggtcccctagagaggaatcgctactataccttcatgagg

SEQ ID NO: 873237 - DNA, 634 bp, Homo sapiens
tgtagttgtgcagttttgagtgagtttcttaattctgtgttctaacttgattgcactgtggtctgagagactttcttattatttccattcttttgcatttgctgaggagtgttttatttccaattatgtggtcaattttagaataagtgtgaagcggtgctgagaagaatgtatattctgttgatttggggtggagagttctgtagatgtctattagctccacttggtccagagctgagtttaagccctgaatatccctgttaattttctgtcttgttgatatgtctaataktgacagtggggtattaaattctcccactattattgtgtgggagtctaagtctctttgtaggtctctaagaactttctttatgaatctgggtgctcctgtattgggtgcatatatatttagaatagttagctcttcttgttgtgttgatccctttaccattgtgtaaagggatgccttctttgtctttttttatctttgttggtttaaagtctgttttatcagagactaggattgcaacccctgcattttttttttttgctttccatttgcttggtaaatattcctccatctctttattttgagcctatgtgtgtctttgcacgtgagatgaggatcttgaat

SEQ ID NO: 873238 - DNA, 597 bp, Homo sapiens
cacgtctttgctatcgtgaatagtgctgcaatgaacatacacatgcatatgtctttatggtaaaacaatttatattactttaggtatatacccaataataaattgctgggtcaaatattaagttatctgagaaactgcaatactgctttacacaatgaattaatttacattcccaccagcagcgtatgagcattttattttctctgcaaccttgccagtatctkgttgttgtttttttttttaccttttaatagtagccattctgactggtatgagacagtatctaactgaggttttgatatgcatttatttaacaatttgttataatgaacttttttttcatatgctttttggctgcatgtgtgtcttcttttgaaaagtgtctgttcatgtcctttgctttctgatgaggttgttttttgcttgttaatttaagtttcttatagactctgaatattagacctttgttagatgcatagtttgcaaatattttctttttttctgtaggttgtctgtttactctgttggtagtttcttttgctgtgcagaagctcttcagtttagttaggtcccatttgtcaatttttgtttttattg

SEQ ID NO: 873239 - DNA, 542 bp, Homo sapiens
cttaatttaattttatttatttttattttactttaagttccaggatacgtgtgcagagggtgcaggtttgttacataggtatacatgtgccatggtggtttcctgcacctattaacccatcatctaggttttaagccccacatgcattagatatttgtcctaatgtgctcccttcccttgtccccaacccccgacaggccccggtgtgtgttgttcccctccctgtgtccatgtgttctcactgttcaactcccacttgtgagtgagaacatgtggtgtttggctttctcttcctgtgttagtttgctgaggataatggcttccagcttcgtccatgtccctgcaaaggacatgatctcatttttttttatrgctgcatagtatcccatggtgtatatgtgctacatttttttaatccagtctatcattgatgagcatttgggttggtttactattgtaaatagtgctgcaataaacacatgtgtgcatgtatcttgatagtagaatgatttatattcctttggatatatacccagtaatgg

SEQ ID NO: 873240 - DNA, 624 bp, Homo sapiens
ttgtataaaaacctactttttgagcttcaagtttccctttttctgttcttaaaggaagaataaagtggcttggctctgtgaggaattgaaccttccacacagacaggagctcatttggaggcaagagctgctctgcatgtgtggccagcatctctgggagggctgggtccctccatttttgttagagggtcccacagcagccttggtgttctcctgcatgtccaagctgtggcaacagaatgtcccgcagacgctgcctctcagcacccatatcatatccctagcatyctccagtgttcattgtgaggacaaacctgcatatcacttttctgtactaggggctaagaatctaaattcagggaactttcattatctgtgggcaaatcacagtctgtctgggccaccagcatctaactgaggtagaagaccagcaggacttatttccccatcctgacaggatgaagtaaaaaaccagcaggaaccagcaagtagtgaagaagcaacctctagtcactgtcactgctcattagcataagacgctcccaccagcaccaggacagtttgcaaatgccatggcaacaatctggaagttaccatctcttttcatgaaaatgacctggaact

SEQ ID NO: 873241 - DNA, 624 bp, Homo sapiens
ttgtataaaaacctactttttgagcttcaagtttccctttttctgttcttaaaggaagaataaagtggcttggctctgtgaggaattgaaccttccacacagacaggagctcatttggaggcaagagctgctctgcatgtgtggccagcatctctgggagggctgggtccctccatttttgttagagggtcccacagcagccttggtgttctcctgcatgtccaagctgtggcaacagaatgtcccgcagacgctgcctctcagcacccatatcatatccctagcattytccagtgttcattgtgaggacaaacctgcatatcacttttctgtactaggggctaagaatctaaattcagggaactttcattatctgtgggcaaatcacagtctgtctgggccaccagcatctaactgaggtagaagaccagcaggacttatttccccatcctgacaggatgaagtaaaaaaccagcaggaaccagcaagtagtgaagaagcaacctctagtcactgtcactgctcattagcataagacgctcccaccagcaccaggacagtttgcaaatgccatggcaacaatctggaagttaccatctcttttcatgaaaatgacctggaact

SEQ ID NO: 873242 - DNA, 668 bp, Homo sapiens
atggcctttgaaatattatgcttagatcacatttaggaagaactccccagtccccttttgtatttagattcaatctattctacctgtgatttcccatggacatataaacctctagctttgcttgtataatttttagcataagatacctctcactatatcttgtaaaaatggttaggttagggattacaagcttttaaggaagtatcagcttttaattttagaraaggcttgagtcaccaaccatggtggctcacacctgtaatctcatcactttgggaagctgaggggtgtgaatcacttgagctcaggagtttgagaccagcctaggtgacatagtaagaccccctagctacaaaaactagaaacaattaaccaggtgtggtggtacatgcctgtagcctcactacttaggaggcagaagtaggaggaccgcttaagcctaggaagtcaaggctgcagtgattgtactactgcactcccacctggcagacagaacgagactttatttcaaaataaagaaagaaagaaagaataagaaacgaaaaaataagaaagaaaagacctgagtcagacagacttatggtcaaattctttatcatctatgatttcttcaactgtcaaatactacaataatggtaatttgcagggcttataataaaggtcaaatt

SEQ ID NO: 873243 - DNA, 540 bp, Homo sapiens
agctgtattcctaggtattttattattttttttctgacaattataaacacaggttcatttgtaagatggctcttggcttgactgctgtggtgtgtagaaatgctagtgatatttgcatattgattttgtaccctgagaccttgctgaggttgttyatcagcttaagaagctttttggctgagactatagagttttctagatacacgatcatgtcatctgcaaacagggatggtttgacttcctctctttctattcagatgaactttatttctttttctagcctgatttctctggccagaacttctaatactatgttgaataggagtggtgagagagggtatccttgtcttctgctggtgttcaaggtaaatgctttcagcttgtacctattcagtatgatgttgtctatgggtttgtcttatacagctattattttgaggtatgttccttcattatctaggttattgagagtttttaacatgaatggatgttgaatcttattaaaagccttttctgcatctatttagataatcatgtgtt

SEQ ID NO: 873244 - DNA, 612 bp, Homo sapiens
gtctctggtggaattccactgcgaatctgttgggtcctgcctttttttggttggtaagctattaattactacctcaattccagaacttgttattggtctattcagcaattttacttcttcttggtttagtcttgggggagtgtatgtgttcaggaaattatccatttcttctagtttagatcattctactataaagacacatgcacacttatgtttattgtgacactattcacattagcaaagacttgaaaccaacccaaatatccattaatgatagattggataaagaaaatgtgrcacatatacaccatggaatactatgcagccataagaaaggatgagttcatgtcctttgctgggacctggatgaagctggaaaccatcattctcagcaaactaacacaagaacagaaaaccaaacactgcatgttctcactcataagtgggagttgaacaataagaatacatggatacagggaggggaacatcacacacaggggcatgtctggaagttgggggctgggggagggatagcatcaagagaaatacctaatgtagatgacgggttcatgggtgcagcaaaccaccatggcacatgtatacctatgtaac

SEQ ID NO: 873245 - DNA, 581 bp, Homo sapiens
aaagtaatttggtaatttatacattcttcaagttgtttttaaactcaactcaatgattttgtagctaattatatcaaagtgttttcatgcttgaaattctgatggtatttaaaatatatatttttctcattgtagaatatgctttgattggaatttatcaagcataggctttgatatgaaaatcaaaattattatccaaaaatacttaatttttatggttgaattgcaatatatattgtcaaataaagtagyagggtggaaagatgacttgtccaataaaagctttcagggaaaaagaaacatttagaaggtgtgaggattctccttctggcttgaaaccagagtgagacttctaaaatgcaaaaagcacttgtcttttttttttttctttaaatgttgtcaaaatttttgattgccttaaaaaaagttaacactgtttgatatagttctagaagtcatggcctgtttatcctgcctgccttatttttctccatccataacttttacctcctctcacctcacagctatggttatattgaacacctctcagttacaagcataaaatgtctttggattctcaa

SEQ ID NO: 873246 - DNA, 676 bp, Homo sapiens
tgtcgcccaggctggagtgcagtggtgcgatctcggctcactgcaagctccgcctcctgggttcatgccattctcccgcctcagcctccccagtagctgggactacaggcacccgccaccacgcctggctaatttttttttttttttctgtatttttagtagagacagggtttcaccgtgttagccaggatggtctctatatcctgacctggtgatccgcccatcttggcctcccaaagtgagggagtggcgtgagccactgcacctggcctatattcagtttttctaaactcatgtcttcatataccaatattcttgtcttctatacaaaaattattctttgtgactcttttaaacacagcatatcagaacaccagatattgaaatataattttatagtatagtgttcacatataaaactacatgtattttgtgaaaaggggaatgtttggtttatgaaaaagtaaataattttctgaagatatcaaacatctagcttcttctcmgatcactgttatggcagtgttgttcttattttcctactatgtatttaaatcatatcaatcaaccatagaaaaactaatgtatactctcccttattttgcaattgtggaggccatgaaaataacaattaagaatgaacattttgtctaagaaatttaaaaatggaatttag

SEQ ID NO: 873247 - DNA, 603 bp, Homo sapiens
aaccaaacgaacaaaaaactatataagaactgtatctggcttcctatgttttatagtaagaattttttttttttttgtaaagtgcttatacaggcctataatcccagcacttggggaggctgaggcaggcggatcacgaggtcaggagatcaagaccatcctggccaacatggtaaaatcccacctctactaaaatacaaaaaattagctgggcatagtggctgaggcagaggaatggcttgaatctgggaggcagaggttgcagtgagctgagatcgtgccactgcactccagcctggcgacagagcaagactctgtctcaaaaaacaacaaaaaaawgtacttatacagagattctgtaatttgaaatataagaatagagataaaaataataacaactataatataaattgtgatactggggaagatgtttgaatcttatataagattagagaatggaacattaacttctatctgaattgatctaagaagatattaaattgaatcttagaaatatagtatgtgttatttttgcttgttacaaaaattagcaaggttgtggcaatcagaaaacaggatactcatcaaataatattaaattac

SEQ ID NO: 873248 - DNA, 634 bp, Homo sapiens
tctctgtgtccatgtgttctcaatgttcaactctcacttatgagtgagaacatgtggtgtttggttttctgctcctgtgttagtttgctgaggatgatggcttccagcttcatccatgtccttgcaaaggacatgatctcatccctttttatggctgcatagtattccatggtgtgtatgtgccacattttctttatccagtctatgattgattaccatttgggttggtcccatgactttgctattgtaaatagtgctgcaataagcatatgygtgcatgtgtctttacactagaatgatttataatcctttgggtatatacccagtaatgggattgctgggtcaaatggtatttcttgttctaaatccttgaagaatcaccatactgtcttccacaatggtcgaactaatttacattcccatcaacagtgtaaaagagttcctaattatctacagcctcgcgagcatctattgtttcctgacatttcaatatttgccattctgactggtgcaagatgggatttcattgtggttttgatttgcatttctctgatgatctcattgttgttttaatttgtatttccccaatgagacaacatgtggagcaccttttcatatgcttacttgccatttg

SEQ ID NO: 873249 - DNA, 676 bp, Homo sapiens
ttagaaaatattccaaaaagaaagcaaagatacaataacaagggcatcctattctcttttccaacctaacaagaatggaaaatgactacaagtgaaaattgagagcgatcatcccaagttcccagcgttggagccgtgtctggacgtccgtaatttttttttttgacagggtctcacccttgytgaggctgaatgcagtggcatgatcaatggctcattgcagcctcagcttcccaggctcaaaccatccttccaccctctgtctttgagtagctgggaccgcaggcacctgccaccacacctggcaagtttttgtattttttgtaggggtttcaccttgttgcccaggctggtcttaagttcctgtgctcaagtgatctgcccaccttggcctcttaaagtactgggattacaggcatgagtcacaaatgctgggattacagacataggccactgtgccccattgccttctgtatttctaatgccaatcttttcttccatcttctttactactagaaagcaggccattaactaatggaagcagagacagaaaggagtcagtatttctatagatctttaggcaggaaaagaaatgaggctgaaatgatgatattgtttgtttttgtgtccccacctaaatctcatctcaaattgtaatacatataatccccacgtg

SEQ ID NO: 873250 - DNA, 594 bp, Homo sapiens
cactgaaagtaaaattataatcaaagtttttagatgagtatggagcaaaggtgatttgaatacttaatagcatgaagcaatgacagccaaatgtgttcattttcttaatagccattactaaacctcttgtgccctcttataaaactctcttcattgagcctcatgccacccagaccttatccttgttacaggctgacctctctcaaactccttccatcacattctttaaggactatggcccctggcttataaactttctctcytccattaattccactatcttccagaacgatttaaaagtgagtgggaaaataaacatccccactttaaccttagaccactgtgactttatgaaccccagtgaatttctcactttcttcactccagtaacactaaattgtttcattaactagagtcacagtatctattaaacttctgagatctaaactcctacagcccattttttttaggatgttactggacacttccagggtttttactctcttatttataatctagtttttttccaatattacctagatttagaccatttacaacacattttctcccaatctgtatggtctcttaaacatt

SEQ ID NO: 873251 - DNA, 526 bp, Homo sapiens
gcatttgcaacaatatggatggaactgaaggtaattctattaagtgaaataagccagacacagaaagacaaacactgcatgttctcacttatttgtggagtctaaaaataaaaacaattgaactcatagagatagagaatagaaagatggttaccagacacaggaaggggaacatcacaaaccggggcctgttgtggggtggggggagtggggagggatagcattaggagatatacctaatgttaaatgatgagttaaagggtgcagcacaccaacatggcacgtgtatacatatgtaactaacctgcacgttatgcacgtgtaccctaaaacttaaagtatawaaaaaaaaaaaaaagaaacatggttaccagagactgagaagggttgtgggcagggcagggggaggtggggatgataaatgggtgcaaaaagtatagttagaaagaatgaataagacctagtgtttgatagaacaacataggggctatggtgaataataatttaattaaacattttaactaaa

SEQ ID NO: 873252 - DNA, 617 bp, Homo sapiens
ttctttagaataaaagttatgttacaagccagactgtttcagtgacatgcttcctggttttttgtgacagattgtacgtggcataatctctgatctaatgggcattcattggaaatagtcttttttatcttggtgtcagaagaatagtacatgggctatcacagagcactgaaagagtgggagttcaattcctgataccgcttctatcttatgataagagtctgagactaattaatttctactactggccgggtgtggtggctcacgcctgtaatcccagcactttgggaggccaaggcaggcggatcacgaggtcaagataccaagaccatcctggacaacatggtgaaaccccrtctctaggaaaatacaaaaaaattagctgggtgtcgtgccgcgtgcctgtagtcccagctactagggaggctgaggcaggggaatttcttgaacccaggaggcggaggttgcagtgagccgagatcgcgccactgcactccagcctggcaacagagcaagactctgtctcaaaaaacaaaaaaagaaaaaaaaaatttctactaccacttttgtattttagaagcatgtcaataaggcgtagaggctgcatggccataggg

SEQ ID NO: 873253 - DNA, 647 bp, Homo sapiens
aataatttctaggattaaaacatcaccatcacacaaaatttaccatagatgcacaacacagccaacttgataaagcaaagtgtcaatttttatatatatacatgaatagataactataaaaattaattcttagggatgcttggtgctgatctcggtggagcagcctaggtcgggacattgaatttctgaattcaatgcacctgactttggatttccttcaraactaagcccacttccacaatttttatatttcaagtcgagtgttttatagtacttgtattttgtgtctgtttcatttcttttgcttgttaattgatttttcatttattcagttgttatttatccagactcattgaattatgaatggtgctaatggaatttaaagatgaaagacatctgaaactacaccacaaaacacttatattctagtaagttacatccaaacaagcaattactataaccataaaagatgaaagaagtctccccacatcacactttcttttcaaatgttccccttgctatccctacaggatacctcttgcattccttcttttctaacatctttccctacacttcattctttattcctctgctcaccgacactcacactgactttgaatacaagtttagaattggtctaatgaaca

SEQ ID NO: 873254 - DNA, 578 bp, Homo sapiens
aagagtccagtagaaggatttgcgtgtgccagtgtgagagggtgagaaaggaatgcatgaggatgcacagagcatggcatagggggttagagcaggaatggggaggactatctagaatgcatgtatttcttactgagtagaggcaaacataaaggtagarcatgatataatgattcttttttttatacactttaagttttagggtacatgtacacaatgtgcaggtttgttacatatatatacatgtgccatgttggtgtgctgcacccattaacttgtcatttaacattaggtatatctcttaatgctatcccttctccctccccccaccccacaacaggccctggtgtgtgatgttccccttcctgtgtccatgtgttctcattgttcaattcccacctatgagtgagaacatgcggtgtttggttttttgtccttgcgacagttagctgagaatgatggtttccagcttcatccatgtccctacaaaggacatgaactcatcattttttacagctgcatagtattccatggtgtatatgtgccacatttttttaatccattggacatttgggttg

SEQ ID NO: 873255 - DNA, 447 bp, Homo sapiens
ggaaggatggaataatgaacctgttgtgaactgtattgatagattgtccttgctacaagacaggtaatactaacatttatcaatatctaagtctgcacaatccattatttagctactagatatatatggctattgagaacgtgaaataagactagtgtgaattaagatgttcagtaagcataatatatataccaggtttcaaaaacttgtcaaacaaaggaaaatatcaaattaataatttgtatcytgattactgtttgaaacgaccatatgttggatgtattgggttaaataaactatacttttaaacttctttttttaaaatttgtaatgtggctactagaaaatttaaaattaagtatttagcagacatatttctattagacatacttctgttgtttgtctaagtgcttcttttgtagaggtttctaaaatcattgcaaatca

SEQ ID NO: 873256 - DNA, 662 bp, Homo sapiens
tttggatggtaaattatatggtcactctatacataacatttaaggaaagccaagcctaggataatgtttacctaggatgtcttccagcaacaatttcaaaattctttcactctttttcttcctcaattgtctttctttccagtctttctcctttctctttcgtcagataaggcttaaatatcctccaaacagctcatttcctcayctcactcctcatcccaatcccctagaaatttttcttctcatctccatgtttctggagtccatgttgagactacagcttgaagattttttatcttgtttgccttgtttgggggcaaggagagaaggaagtgtcctgaagctctgtgtggccagactaccctggactcttccccagaccctggaagactagagaaatggtctatcaagcatgatgtgtacaggaaatgtgctatggctgacgagcgaatcaggcactgtcaaatgaagactgagccaagtgtgaggctcagaccactaccagcagaggaacaagttgacccatgggtcttctagattaagcgaaatcacagacttctcacaaaggaatgcaagggccagaaacggccatcttattggtcccacctgtcctgtaaggttttgagctcaacgtttctccttgagttggactctatactttc

SEQ ID NO: 873257 - DNA, 582 bp, Homo sapiens
tccagcctgggtgacagagcaagactctgtctcaaaaaacaaaaacaaaaacaaaaacaaaaacaaaactgaataaacgagacttttcctggagtttttggaaaaattacattggtggctagaaagggcttaattgtagggtttcccctttctgtgaggctttcttcaactttgtgtacctgttgttgcatgtcggcactagaatctaatgtaagttgacagtggatttggcatgagctgttgatggggttatttgayacagaatatatagaaccctgcttttcaggggaggggccagggctcccaggtgctttgtcacttgaacacattcttcgttccaaggaaaatttagtcatgtggaggaaatgagaatgagttgtgggtctcccagggtcctgggtgaccgttgggtgctgggtggatctgaagaggttaaaacatggaatgaacatttcttaggtgcttcttctggtgggaaattctctaggatctgggtgtatggacctcaagggtggaagaggcagtaggagaaaaccagaaagatggagctgaaaccagcaggctgctctaacagagacaacc

SEQ ID NO: 873258 - DNA, 638 bp, Homo sapiens
ctatgcacataaactagaaaatctggaagatatagatacatttctggacaaatacacctcccaagactaaaccaggaagaaactgaatccctgaatagaccaataacaagttcagaaattgaggcagtaataagtagcctaccaaccaaaaaaaccccaggaccagatggattcacagctgaattctaccagaggtacaaagaagagctggtaccacttctactgacactattccaaacagctgaaaaggagagacacctccctactcattttatgaggccagcatcatcctcataccagagatacaacagagatacaacaaaaaaaagaaaacctcaggccaatatccctgatgaacagtgatgcaaagatcctcaataaaatactggcaaaccgaatacagcagcacatcaaaaagcttatccacyacaatcaagttggtgccatcccaaggatgcaaggttggttcaacatacacaaatcaataaatgtaattcatcacataaagagaactaaagataacaaccacgcgatcaacagatgcggaaaaggcctttgacaagatttaacatcgctttattgttaaaaactctcaataaactaagtattgaaggaacacacgtaaaacagtaatagcc

SEQ ID NO: 873259 - DNA, 625 bp, Homo sapiens
cacacacacacacacacacacacacacacacacacacattaagtccatcactaactttcctttttgctgattctccttgtagcagttattcaaaacttcagacacttcatagcagcatcccaagaaacaggatcagttcaggaaagttgaacccctgtcccaatttggcagatcatcctgattcacattttttaattccctcacttactgagccagtcagccagtgtttattcagcacccagtatgtgctaggcgctctgccagatgccacagttataaagaacaagctgctgcccaaggattatgcaatctcttgaacagtttgacagaaaacagaaaataacctgtcaacttagttacccctgaggaagaccaagctacacaactcaattcaatgaatcagaaagagatggtaattatacagaagttttttttcaaaggcaactaycatttattttgtgctaacttgatgtcaggaatcatagacacaattctggtttaccttttatagatgtgtcttagtaggtgtctttatagtaggtgtctttaggcttattcaaaaaccactttgtgtttgcctctgtttttatttattttatcccaccttaacacatgtgattttggg

SEQ ID NO: 873260 - DNA, 675 bp, Homo sapiens
gcacaagctattcccgtcttgaggcaaacttaaattctcttggtttctactccctaaagctaaaaaactctcttttgcctgatgtaggctcatgatctggggaaggaagttgctttttctcctctctgagtggttcttacagagtcagcccaaacagtaatagtaaagggaagattctctaattcatcccgactatacattatcagggctaaaacccgttctatgctgacactgaagaactgtcctggaaaggaaaatatttccactttaaagtttctgatagtatcatatgggcaggagagtgggacgtgtcgaccagaaatgcgatatttaaaggacttagatgttttaagagactaacagagcaagagtggacaaattaaagtagtaaactaagaatcagagtagcacagctaacataggcagctcatgtagagattagggagaaaagaaaatattcttgaaaatgtcctcccaagttcaaaaacaaacctcagttcccctcaacagaaggaaagacttaaaataaaaagacygtggcacagctgtgaagcaaggcatggattcttttcttatgactgttaaatgtacagtccccttagaatggaaataatgttattaccctggagggggctccattatgatgcacactggttcatattttagtttagagca

SEQ ID NO: 873261 - DNA, 616 bp, Homo sapiens
gctgcaagccaaggaaatgtagactgcctctagaagctgaaaaagtcaaggaaactgattctcccctagagcctccagaaggaatgcagctctaccaacacattgatgtccgcctctaaaattcatttcagacatctaacctctataactgtaagagaataagcctgagttgctttaagccactayggttgtgataatttgttcacagaagcaataagaaactaacacacctctgcccagctgcaataaccaaaaatatctccagatgctgccaaatgttccctggggggacaaaacctacccctcatcctttgttaaaaaccattaccctaaaagaagaattttgtttattttcatagtcacgggtctgcaaaatgaatgtacttccactgatacagctgggcgtagctaacatgctctgtttgaggctgatggttggctgaactttagctccaggttgagaattcagctcatgtctgctcgacacatgttttgttttggggcctgagctaaagatacaggagctaaagatacaagagtacaagaacatgtacttctcatggaggaccagtggggtgcaaggagcaagccaaactatacaagcacacttaaaact

SEQ ID NO: 873262 - DNA, 643 bp, Homo sapiens
atctgtgacctgaatataggttcataaaaattacccaaacttcaaaacaaagattttaagaaaagagtaagtgaaaatactcactgagtgcccaggacaataagtgaaaataaagccacatcaaagcccatattgtacaatttgagaatactgatgtaaagtttctgaaagcttcaagtgaggggaaaaaatgcaaatcacacataaggaacytgagtggatgcaaaattctccacggcaagagagaaagaggacaataaagcaacatcttttaaaaattgtgaaggaaaaaattattttccacttagaattccaaactcagagaaataccaatcaaatgtgagggtagaatatagacatatatagacatatatagacatgcaaaatctcaaaaatgtatctcatatccattcttcctcaggaggctactgaaggacatgttctatcaaataagagagtaaatcaagacacaggagacaacagaaaagaggatagatacccagtataggagtaaggcaaaggaaatctccaaaaggcagtaaaaagagatcctaagatgacaactattgaccagagagtgtaccaatcagcgtatatcagagaatatgatttaaggaaaaagcaacacatggatgactatcat

SEQ ID NO: 873263 - DNA, 657 bp, Homo sapiens
ggcaattcctcaaggatctagaactagaaataccatttgatccagcaatcccctactgggtgtatacccaaaggattataaatcattctactataatgacacatgcactcctatgtttattgcagcactattcacaatagcaaagacttggaaccaacccaaatgcccatcaatgttagaacggataaagaaaatgtggcacatatacaccatggaatactatgcagccataaaaaatgagttaatgtcctttgcagggacatggatgaagctggaaaccatcattctcagcaaactaacacaggaacaaaaaacaaacactgcatattcttactcttaagtgggagttgawcaatgagaacatatgggcacagggaggggaacatcacacaccagggcctgttggggagtgggggacaaggggagggataacattaggagatatacctaatgtagatgatgaattgatgggtgcagcaaaccaccatggcacatgtatacctatgtaacaaacctgcacattctgcacatgtatcccagaacttaaagtatatatatgaaaaaagaatgtaaataaatcatagagaatattggcaaatactcaagatctgcaaaggaattttggggtggatttattcaccactgtctcatgtgtat

SEQ ID NO: 873264 - DNA, 589 bp, Homo sapiens
ctgacatcaacttacatataggggtactaatgcaaaacagctgttctcaggaaagtgcagagagacgtgaccacctctgcatctgtcctacagcctgatcatcagaggtgggtttcctgtgtacccggattgtcagagacagaaagsaggcagtgaaagtacctgcagagctcgctgcagggctaccctgaaatagggattggccttggctgtcttctagtacctagttgcaatagcagccactcaatcagcagtggccacctagcatgtagcaatttttgtgaagaaaaattagcctccagcaaaggcaatcagacaagttaagataccaaagaaaacaagttttcctttggaagccttagaaaaagatttgctgaaagttatgggggaatctcaggtcagcttttctcatcaagtctttcttaactgcagtcataggcatcatcctcatggaaatttctaacataatcagatctagctctacctttgctgtagaagtcagttctggaattccagctgctgtccttctttgataaactgccttgctctaattatttttatgtgaagaattactgctacatggagctta

SEQ ID NO: 873265 - DNA, 613 bp, Homo sapiens
gagaacctgggcttccagaatgcctgtggacactgaagggtgggacagctctgggaacaggaagagccatcttccaggacacctgtccctggtcagcctggaagcaagcaatgctggagccacactgcagtcaggggtcgtcattttgtccctcagaacatacaccatatatgccacatctgcacacgtcggatggttctaacctggtgggaggagtgactccctcacagctcactgtttgggaagaggaaggatccaggatctaggatcatttccaatatattgcatgttaagctcaatttattcctaacttatagactcacaattcccactgaattagcaatttctggattagctccaatggaagtgatcccactcaaaccaaagtggaaaaaataaagatttayagcatggaaaacacccaagtgctgtgcgcagtggaaactgtctaactcgccattctatttgcttgttttctaccactgatccaaacacatcagcatccagagccaggtgccacctggtgaaagctcagctcatcaccattgcttcccttaacctaccctcaagtttcattcctttaagcatcctgcagcaaccaccaagtgaattc

SEQ ID NO: 873266 - DNA, 598 bp, Homo sapiens
ttaaaattcaatctttctggacttctgtggctgaagtccacttgcaatttgaaatgccaccagcacctctctttttttcataattgatctgcttccagattcaaaattttgtttcagccataccagcgtctggtgggggacacacaccctaaatcatagcatgcctgtcatctgaccctttctccgccagtctgctggaaatcccgtgcaagcttctttccctaacctgggatcagacagtgtttcccacccaaatttgattaaacgtgccctcccttgctgttgtccatatggcaccaaaatgcgggctgcctttctcatttttccagactgtggggtcagacggtgcccagacaggcaaataatagtcaaattatacaggaagttgtcaaaggagtccgaacacagacagaggaaayctctgaccccacgacaggtcaaaggtctggttcaagtttctccttcttaatctgtcaccacagccaaattaaaagcagccctttgaatgaaaccatttatggagtctgctttttttttttttttttttgaaagtttttcttttattacaagctgaactttttttttaattgcactaaca

SEQ ID NO: 873267 - DNA, 612 bp, Homo sapiens
cctattaataatataattcccacaatgaaaatatcacatatctcctacatacacacacagagccataaaacatttctaaggaatgtatgtaaatatcgatgctatcactgtgtatatgaccatatgtgcatattacaggcttacataggaaggcagagaccacagaatataatggtgcacaaactagttttgagggcatgagatctggagttgaaccccatttctattacttactattgatagaaccttcctgagcatgatttgccaccttaaaaacgtgggcacagtactcaatgcctatcttataatattatgaaaacattttaaagatgacacccgtgagtttttttaccaattattatattgatgtcacgtgatactactggaactatatttattggtaaatgaagctccttttcaaactttatccaatttctctctcactcacacttatttccaacttgtyttgtcatattatgctgtaaattaggtgattaaatcttttttcactttgaaaaatatggtgagtcatttatagaaacatttgtaagactgatcactggggtagctcataaatgatttccagcttatactccttttgtctgcccatca

SEQ ID NO: 873268 - DNA, 631 bp, Homo sapiens
agtggaaccatattaaagttagattgcattaagttaaaaacttagaatctaagtgacagaaagagaggaaatagtaagacaatagtaaagattaaatagaaacattaaacaattttaatttattcaagagattaagatagaagacaaaactgagaaaactgtrtattagacaaatagaaaaaaaggtattgtgatgattgatttaagccaaattatatcaataatcaccttaaatgtaaagtatctaagtagccaaattaaaaaacagagattgctggattggataaaataaagacactactatgtgccgtataaggaaacacgctttaaaaagtgaaatatagctaaaaaagtgcaatgttaatgcgtgaaaaagacatatgacacaaacattgagccaaaataatttaaaggttaaatgaccatattattataaagtagacttcagagaaaggaatattattataggtaaataggctaatttcataatgatacaaggattaatttctcaagagaacatgatcatcctaaagcataagcacgtaaaatccagcttaaagtagagcaggctgagatcgagaaacgtaaagagaaatagaaaaatcccttccttacaccttatacaaaaatt

SEQ ID NO: 873269 - DNA, 631 bp, Homo sapiens
agtggaaccatattaaagttagattgcattaagttaaaaacttagaatctaagtgacagaaagagaggaaatagtaagacaatagtaaagattaaatagaaacattaaacaattttaatttattcaagagattaagatagaagacaaaactgagaaaactgtgtattagacaaatagaaaaaaaggtattgtgatgattgatttaagccaaattatatcaataatcaccttaaatgtaaagtatctaagtagccaaattaaaaaacagagattgctggattggataaaataaagacactactatgtgccgtataaggaaacacgctttaaaaagtgaaatatagctaaaaaagtgcaatgttaatgcgtgaaaaagacatatgacacaaacattgagccaaaataatttaaaggttaaatgrccatattattataaagtagacttcagagaaaggaatattattataggtaaataggctaatttcataatgatacaaggattaatttctcaagagaacatgatcatcctaaagcataagcacgtaaaatccagcttaaagtagagcaggctgagatcgagaaacgtaaagagaaatagaaaaatcccttccttacaccttatacaaaaatt

SEQ ID NO: 873270 - DNA, 647 bp, Homo sapiens
agttatatttagttttatgtagagtagcaacacaaaatagaaataatttgaagtcatgttttttctaattaggagttgtgacagctttattactttcagtttgaggcatttcaaactcaactttataagagtgacgagaagacttaaatagcctctatggaaaaaggttaatgaaaccatctgtgtggggcaggggaagttgaaggtaaattaaattgtattcaagagtattgtattggtagggtggagsggggcgtggatcgccctctattttcactaaggatagaacttaagaaaattagcttcatctgtaatagaaggaatttggcctagatattacaaagaaacattttcagcatgagggttgccgaaaaaaatgctaccatggaaattcttggtatttattttctcaaaaatgtatgttttcaatgaaagtgtaaacacataataattcgggagaattactgagatataacttttccctaaagtacaagggaataatagagaaacagtagtggttcttttgttcctttaattttctgttcactttgagatataagcattagtttcaaatgtaaaaaaaaaaaaaaaggcagtcaaagagatgcgctagaagagctaaggacactgcactgcggtgtgtggag

SEQ ID NO: 873271 - DNA, 647 bp, Homo sapiens
agttatatttagttttatgtagagtagcaacacaaaatagaaataatttgaagtcatgttttttctaattaggagttgtgacagctttattactttcagtttgaggcatttcaaactcaactttataagagtgacgagaagacttaaatagcctctatggaaaaaggttaatgaaaccatctgtgtggggcaggggaagttgaaggtaaattaaattgtattcaagagtattgtattggtagggtggaggggggcgtggatcgccctctattttcactaaggatagaacttaagaaaattagcttcatctgtaatagaaggaatttrgcctagatattacaaagaaacattttcagcatgagggttgccgaaaaaaatgctaccatggaaattcttggtatttattttctcaaaaatgtatgttttcaatgaaagtgtaaacacataataattcgggagaattactgagatataacttttccctaaagtacaagggaataatagagaaacagtagtggttcttttgttcctttaattttctgttcactttgagatataagcattagtttcaaatgtaaaaaaaaaaaaaaaggcagtcaaagagatgcgctagaagagctaaggacactgcactgcggtgtgtggag

SEQ ID NO: 873272 - DNA, 624 bp, Homo sapiens
gttcccttaggcagaggtctttccttcttcatttggctttcaattattgtctactgtctgtttattaagcatgaaggatttcccctgacatttaccttagagcatgtctactagccacacattatctcaaattttgtgtaatggagatatcttactttctccttcattttgaaggacaattttgcatgatatgaaattcttgattgacagtgttctctctattttaaatatattatctcaytgcctttggcttttatggttactgctatcaaactggtagttaattttattgaattttactttttggttatgcaccacttgtctcttgctgctttcaagagtttctgtttgtttttgtatttcaacagtttgaatatgtttctcagtcatagatttatgtattgggaagttttggctattatctcttcaaatattcctcctgcctctttatcttttttatcttcttctgggattctctttatacatatgttggtatactcaatggtgtcctacttctaaattcttctccattctcttataacttctgtctcttaaaacttctatattcttctccattcgtttcactttctgctcatcaaattgaataattttaattggtttgtt

SEQ ID NO: 873273 - DNA, 624 bp, Homo sapiens
gttcccttaggcagaggtctttccttcttcatttggctttcaattattgtctactgtctgtttattaagcatgaaggatttcccctgacatttaccttagagcatgtctactagccacacattatctcaaattttgtgtaatggagatatcttactttctccttcattttgaaggacaattttgcatgatatgaaattcttgattgacagtgttctctctattttaaatatattatctcactgcctttggcttttatggttactgctatcaaactggtagttaattttattgaattttactttttggttatgcaccacttgtctcttgctgytttcaagagtttctgtttgtttttgtatttcaacagtttgaatatgtttctcagtcatagatttatgtattgggaagttttggctattatctcttcaaatattcctcctgcctctttatcttttttatcttcttctgggattctctttatacatatgttggtatactcaatggtgtcctacttctaaattcttctccattctcttataacttctgtctcttaaaacttctatattcttctccattcgtttcactttctgctcatcaaattgaataattttaattggtttgtt

SEQ ID NO: 873274 - DNA, 624 bp, Homo sapiens
gttcccttaggcagaggtctttccttcttcatttggctttcaattattgtctactgtctgtttattaagcatgaaggatttcccctgacatttaccttagagcatgtctactagccacacattatctcaaattttgtgtaatggagatatcttactttctccttcattttgaaggacaattttgcatgatatgaaattcttgattgacagtgttctctctattttaaatatattatctcactgcctttggcttttatggttactgctatcaaactggtagttaattttattgaattttactttttggttatgcaccacttgtctcttgctgctttcaagagtttctgtttgtttttgtatttcaacagtttgaatatgtttctcagtcatagatttatgtattgggaagttttsgctattatctcttcaaatattcctcctgcctctttatcttttttatcttcttctgggattctctttatacatatgttggtatactcaatggtgtcctacttctaaattcttctccattctcttataacttctgtctcttaaaacttctatattcttctccattcgtttcactttctgctcatcaaattgaataattttaattggtttgtt

SEQ ID NO: 873275 - DNA, 603 bp, Homo sapiens
ctgtagttgcttgcttcatgtctttcctacgctaccttttaaagtttgtgttctttgtcatgtgtggtttctgaggttgctgttcctatagattctggtaagctgctggtttaaccaaaatttccttaaatttctggaaccataaaacaaaaggaaagaaaagaaaagaaaaaatagtcttttttaatttctgtgtttgccgattagctcagtattatatcactcctataaaacctagccactttgttagttctcttccttaaagatcagytggaaatgaaaagttagggcctcctcagtagttttctgagcatgtatttttcctcagtagatgcatgatgactttgttaatattccattatatgtaggagctttttgaagctatagtctccaaatttatattcttcagcttttcctctaaggctttttttctttttgcatgtctattgtaggtctgaactgtattttgttatcctaggcaaaagcagcttattaatttcccttataatggtatccaacaatgccattcatttagacacttttataccccatcagagtttgaattaggctaaacaaaggcaaatgcctcatatcaatcagaga

SEQ ID NO: 873276 - DNA, 622 bp, Homo sapiens
ctggagaatgagaacatgctttgtttacctatcacagttacctggccaggcacagacactcagacactgttaatggtttttcaatcctctggtgaactctaaatgagcaaagagaggtgttatttacaggaatgctgtgagtctgcatcgcataagtagctctacttgtcctctggaatgtctatctgctagagatggycattttcaagtcaatctaagcttatttaatacaacatccttgttgattagcggctcatgctacttcttcttcttccctcatattttatggagtctaacagagtgctattatatttatcaatttttgtcaaagactccagctacattggttagatacaatgattatgtgaaataatcagaggtttgggttaaatagagcaaaaattcttttcatgggactctaaaataaattatccttttctttttctatttgtagaaatttattgcttagaaacaccacaattttttttctgtgggcctttaatacaacttctatattgatctttagacatttcagtctttcagcatttcttgtagtttttcagtagcagactgataataaaggaaagacaatagcaattatgtcaagatactgttaggaggt

SEQ ID NO: 873277 - DNA, 554 bp, Homo sapiens
attatgtcatctgcaaacagagacaattttacttcctctcttcttatttgaataccctttatttctttctcttgcctagtttccctggccagaacttccaatactatattgaatacaagtggtgagacagggcatccttgtcttatgctggttttcaaagggaattcttccagctttttcccattcagtatgatattggctgtgggtttctcataaatagctcttattactttgagataagttccatcwatccctcatttattgagtgtttttttagcatgaaggggtgctgaattttattgaaggccttttatacatctattgagctaatcatatggtttttgtcattggttctgtttatgtgatggattacgtttgttgatttgcttatgttgaaccagccttgcatcccagggatgaagcctacttgattgtggtggataagccatttgatgtgctgctggattcggtttgccagtatttgattgaggattttcgcatcaatgttcatcagagatattgacctgaaatttcctttttttgttgtgtctctg

SEQ ID NO: 873278 - DNA, 622 bp, Homo sapiens
gttttttaatgtgataccaatgtagggtaagtaaacagtgcagccagaattgaattcaaattttacaactggtaaggtgcttgaactgaacaatcagaacaggcaacaaccaaatacaatcaaaataaccaaatctatattgactttggatgcataaagaatatttattgagcatttatatgagtgggatcctctgctgggtgcttgaagacaaacagagaatataatcattatatagattattgcaatttagtgataaatagatattarcattatgaacacctgaagtcaatcttatttttttactcattatttatcagactttttagtaaataaaatttattttataaaataaaattaagtaactaacctgcacatggtgcacatgtaccctaaaacgtaaagtataataataataataataataaaaacttttcaaaaaataaaataaaataaaattaaattaaaaacatctctataggtttcaaatgtcttatctttaacaaaggtaaaaagacatttgttttgaagatttatcattaaagttaacaaaatttccaagctcaaggcgcatagttgtagatcaagctacaactgcctacagacacattttcctagacat

SEQ ID NO: 873279 - DNA, 585 bp, Homo sapiens
gacataacgacctatcccacagaaatacaaattaccatcagagaatactataaacacctctacgcaaggaaactagaaaatctagaataaatggataaattcctcgacacatacaccctcccaagactaaaccaggaagaagttgaatctctgaatagaccaataacaggmtctgaaattgagacaagaattaatagcttaccaaccaaagaaagtccaggaccagatggattcacagccgaattctaccagaggtacaaggaggagctggtaccgttccttctgaaactgttccaatcaatagaaaaagagggaatcctccctaattcattttatgaggccagcatcatcctgataccaaagcctggcagagacacaacaaaaagagaattttagaccaatatccctgatgaacattgatgcaaaaatcctcaataaaatactggcaaaccgaatccagcagcacatcaaaaagcttatccatcatgatcaagtgggcttcatccttgggatgcaagactggttcaacatatgcaaaccaataaacgtaatccagcatataaacagaaccaaagacaaaaatca

SEQ ID NO: 873280 - DNA, 625 bp, Homo sapiens
agcatgatgcctccagctttgttatttttgcttaagattgtcttggctatataggctcttttttggttccatcagttcatccagtttaaattagttttttctaattctgtaaagaaagtcaatggtagcttgatgggaacagcattgaatctataaattgctttgggcagtatagccattttcacaatattgattcttcctatccataagcatggaatttttttccatttgttcatgtcctctcttattttcttgagcagtggtttgtagttctccttgaagaggtccttcacatcccttgtaagttgtgttcctagatattttattctcttcgtagcaattgtgaatgggagttcactcattatttggctgtctgcttgtctattgttggttttttaggaatgtttgtgatttttgcacattsattttgtatcttgagactttgctgaagttgcttatcagcttaaggagtttttgggctgagacaacggggttttctaaatatacaatcatgtcatctgcaaacagaaacaatttgacttcctctcctcctatgtgaatatgctttatttctttctcttgcctgattgccctggtcagaacttccaatattatgttgaatagg

SEQ ID NO: 873281 - DNA, 628 bp, Homo sapiens
ggcaggtggatcacctgaggtcaggagttcgagaccagcctgaccaatatggtgaaaccccgtctctactaagaatacaaaaattagctggcatggtggtgtgcacctacagtcccagctactcgggaggctgagacaggagaattgctggaaccygggaggtggaggttgcagtgagctgagatcacgccactgcactccagcctgggcaatagagtgagactccgtcacaaaacaaaacaaaacactatgcgtttacagtgtcttttaaatatgatttcttttctacctgaggatttttctatgttctctaattgtggagatgccttcaggagcagaagtgaaagctgatgactaagccaggcttatcaagttgctggacatcttgtgatttcctgcacaagaactacagaaaaattagagaccagaggcatttgaggcaggatttctcactgagatgtttcttagcctctaccccatttccataacacattagcctctctcattccatcctttctggttcacctccctgtaagtaattgctgttctggacccttaattgccaactgcaagcctaggtagtaccatcaagcaatgagagcttgcattgtggagctttataactaaa

SEQ ID NO: 873282 - DNA, 628 bp, Homo sapiens
ggcaggtggatcacctgaggtcaggagttcgagaccagcctgaccaatatggtgaaaccccgtctctactaagaatacaaaaattagctggcatggtggtgtgcacctacagtcccagctactcgggaggctgagacaggagaattgctggaacctgggaggtggaggttgcagtgagctgagatcacgccactgcactccagcctgggcaatagagtgagactccgtcacaaaacaaaacaaaacactatgcgtttacagtgtcttttaaatatgatttcttttctacctgaggatttttctatgttctctaattgtggagatgccttcaggagcagaagtgaaagytgatgactaagccaggcttatcaagttgctggacatcttgtgatttcctgcacaagaactacagaaaaattagagaccagaggcatttgaggcaggatttctcactgagatgtttcttagcctctaccccatttccataacacattagcctctctcattccatcctttctggttcacctccctgtaagtaattgctgttctggacccttaattgccaactgcaagcctaggtagtaccatcaagcaatgagagcttgcattgtggagctttataactaaa

SEQ ID NO: 873283 - DNA, 643 bp, Homo sapiens
  misc_feature 176, 179: n = A,T,C or G
caaaagtgaacaggagtaactattcttatatcagacaaaagaaagtactttaaagcaacaacaattaaaaaaaacaaagggggacattatataatgataaaaggatgagtccaacaggaaaatatcataatcctatcataatcctatatatatacccccccccccccctctctcantcntaaatccctaaaacacgtagtaatagacctaagaaatgagatagatggcaacacaataataatagtagacttcaataccccactgacagcactggacaagtcatcaagacagaaagtcaacaaagaaacaatgcacttaaactataccctacaacaaaaggacttaacagatatttatagaacattccatccaacaaccacagaatatacattctattcaacagcacgtggaactttctccaagatagaccatattataggccatgaaacaagtctcaacaaatttaagaaaattraaattatatcaagtatcctttcagaacacagtgaaataaaattggaaatcaactccaaaaggaatcctcaaaacgatgaaaatatatggaaattaaatagtctactcctgaatgatattttggtcaacaatgaaatcaagaaggaaatttaaaaattctttgaactga

SEQ ID NO: 873284 - DNA, 594 bp, Homo sapiens
gatctcgttcctttttatagctgcgtagtgttccatggtgtatatgtaccatattttcctttctaccactgatgggcatttgggttgattttgtgtctttgctattgtgaatagtgctgcaacgaacatacatgtgcctgtatcttyataatagaatgatttatattcctttgggtatatacccattaatgggattgatggattaaaaggtatttctggtcctaggtctttgaggaatcaccacactgtcttccacaatggttgaactaattttcattcccaccaacaatgtaaaaccattgctattcccccacagcctcaccatcatctgttgtttcttggctttttaataattgccattcttactggcataagattataggtatctcattgtggttttgatttgcatttctctaatgatcaatgatactgagctttttttcatatgtttgttggtcacataaatgtctttttttgagaagtgtcttttcatgtcctttgcccacttttaatacagtttcttttttcttgtaaatttaagatccttgtaatctctggatattaggcctctgtcagatggataggttgcaaaaa

SEQ ID NO: 873285 - DNA, 696 bp, Homo sapiens
taatattattttagtttgcaagtaaggacactgagatgcaaagatgctactgcttttctaagattagtaagtttgggcacaaaacttaaatccacatctttgtcatattttttctaataacaaagcatataaacaaatacaatttttgttaaatagaaatgtctgatttctgtttctaaattgatctgatagatgaggaaattatcaatasagctgttttataaaagcacacatcaaagcataaatactcttttcaattaatatttaaaactaaattttctaaagtaagttttaaaatttgtgttcgaagacatgtaacataaaattaaccatttaaaagtgaacagtttagtgacacttagtacattcacagtgttgtgaaaccaccgcctgtatccagttccaaaacattttcattactccaaaataaaatcctgaatacattaaaccggttctccatattagcctttaccctcagttctcccctcaggcaagcaccaatccgcttttgtctctaggaattcacttattctagatagttcatgtaaattgaatcgtacaacatatgatcttttatgtctgtttctttcactcagcacagccttttcaaggttcatccgcactgtagcctgtagcatgtatcagcatttcattcctttttgtggctaaataaattctactctgtgtgtgtgtgtg

SEQ ID NO: 873286 - DNA, 559 bp, Homo sapiens
gaataatcttcatatacaggtcaaacgaaacaaaacacaatacctcagtttttagaatattataatactggaatgctagctttagcttctaccactttgtttcacaaggtcatggaatttcacacagcaaaatcagagggaatccaaccttgggcacaaggtcatttctaagtttaaactgttcttaatttatctaakcaattcaaacattttgtagttatcctaaacacatcctttgtttccccacagagataaggttacatgaaccttttaatttctaatacacattccttaatgcccacttaacccacactaaactgaactagagccctggtaatcgagtcacaattgccgaattctattgcaagagactggaaacatctcctcagtttagctcctaagggatggtggagggagaagtactatttcaaaatggctacaactagctaccagttagttagcataagagaagataactccctagggcacggtatctcttcaactactagtgctcacagtactagtgactactgaatctcaggatgggggtggaggtgct

SEQ ID NO: 873287 - DNA, 642 bp, Homo sapiens
cttggattacaggcatgagacactgtgcctggatgaatatttctttctttctttctttctttcttttttttttttttttttttgagacagagccttgctctgtcgtccaggctagtgcaatcttggctctcagcaacttccacctccygggttcaagtgattctcctgcctcagcctcccatgtagctgggattacaggcacccatcaccacgcccagctaatttttgtatttttagtagagatgggttttcaccatgtcggccaggcttgtcttgaactcctgaactcaaatgatcctcccaccttgacctcccaaattgctgggattacaggcatgagccactgtgcctggccccagctaactttttctgtttctgagaattctctcccactggatcctgtttgctgtttctttcctagcatacccttctttgaaaacaaaagacaacatagcttagtggtttggagctttgggctggacttccagggtttaaaagctctgacacttgcaagctatgtgacgttattcaagttactttacttctttgtgcttcaattacctcatctgtaaaatgataatatccatttaacctacctcatagagttgctataaagattaaataacgatttaagtaccttgc

SEQ ID NO: 873288 - DNA, 642 bp, Homo sapiens
cttggattacaggcatgagacactgtgcctggatgaatatttctttctttctttctttctttcttttttttttttttttttttgagacagagccttgctctgtcgtccaggctagtgcaatcttggctctcagcaacttccacctcccgggttcaagtgattctcctgcctcagcctcccatgtagctgggattacaggcacccatcaccacgcccagctaatttttgtatttttagtagagatgggttttcaccatgtcrgccaggcttgtcttgaactcctgaactcaaatgatcctcccaccttgacctcccaaattgctgggattacaggcatgagccactgtgcctggccccagctaactttttctgtttctgagaattctctcccactggatcctgtttgctgtttctttcctagcatacccttctttgaaaacaaaagacaacatagcttagtggtttggagctttgggctggacttccagggtttaaaagctctgacacttgcaagctatgtgacgttattcaagttactttacttctttgtgcttcaattacctcatctgtaaaatgataatatccatttaacctacctcatagagttgctataaagattaaataacgatttaagtaccttgc

SEQ ID NO: 873289 - DNA, 623 bp, Homo sapiens
ttcttcattttatagattagaaaactgagccacagagggattaagaaactcgtctaaagtcacacagtgagaaagggcagtgcaggatgcggacctagtttgatttcagtggcagtgaattctcttaaccactaaggatgtgaaagagktttatatgctcaagcctcctagaagtaataataataagggctgatacttattgaacctttatgtgccaggcactattcaaagagctttacattcatttaattcttacaaccctctggagttggctctagtgttattcccattctataaattaggaaaactgaggcacaaaatgttaaataacttgcatgggatcgcagagctgccaagtggtagagatgcatttcaagcccggccagcccagttttcactctatccccaccccttattctctgatcttcactactggaagaatgagcagattctgagattctgagaggccaaggaagtagcagaactatatgcccaaaccccagctcaacctcaagccaggtgctctattccagcattcaccaggggttccagacaaatagcaaagtgagaaatgcattttagaagtcttgtggtctacagtgacccttgcaaatatctcgaac

SEQ ID NO: 873290 - DNA, 601 bp, Homo sapiens
cttctactcctactccacttgcttatctgtggagttacagcatatctgacttttaattagtttctagaccctttactgctctggggctatggccaagtgcggagaaggtaccatctatctctgtccagtggctctgacacctcctataactttgtcagaagcctgcttggctctattctcttctctacagctctcattccagggatgtgaaaatagatacatagaagtaagctcttcaggtacctcatggtcaaaaggcaagacagtagaaacgacaaagccattgcttgtgttcagcctcttatggaacggagggagtctcttcccagctaccagggctgccatcatgggcaggaacgaggcagataaggtgcctctccaagagatccacytggctttcctccctaaggtgtggagaccctgccacagccaccaaggagaggcacccacagatgctctcctcagggaaagcagcacctcctcttctttgtacagacctaaatagttcaatgatggggcagggcatatggttggagctgactgcactgccattccctgctcacgttggactgctctgaggctcctcagtggcgatttctgc

SEQ ID NO: 873291 - DNA, 600 bp, Homo sapiens
ggcttcctcttctccctctgaaaagagcattaatttctgccatcctaccctctggccaacaatttctgacttggtggatagggatgtggctctttctccctcttctgtctggatcacaaattaccttcatcgtcatgagtgagtgaatttgtgctaagggaggacgggggascacagattatcccaactctaaggtagtcatacatataaaatgctaagcttggcaaataaatctattggaactgattgtgtacaatagtattacttttttctttttgtgaagaaatgaagcacgctcccttggtgaatttagaataggatttgattttcaaaaactgatttacatacaacctttcaatcatcttctgtacatgtggctggattaagaaagctttagttgtacttccggtctgattatgggattgcccttgtaagggcctttaagtagtctttgctaaagtttgaccagccataatgagaggcataattgtttagtggttaagaggccaggttctggagtcagacagacttagattgcaatcctctctctgacgctttctagatgtgtgttattggacagatcagtcaatcgcctaaagc

SEQ ID NO: 873292 - DNA, 634 bp, Homo sapiens
ccagcaatgcgtaagggttccaatttctccatatgctggccaattctttttgttttctgttttgtttttttttaatagtagccatcataatgagtgtgagtaatatctcattgtggttttgatttgcatctccctaatgattagtgatgttaaacatcttttcatgtgcttttttgccattttcatatcatctttggagaaaggactattcaagccttttcccattttttaatcagtttgtttttttaagaaaacaattgctggccgggcgcggtggctcacgcctgtaatcccagtgttttgggaggccgaggcaggcagatcacgaggtcaggagatcaagaccatcctggctaacacggtgaaaccccgtctctactaaaaatacaaaaaattagccrggtgtggtggtgggcacctgtagtcccagctactcaagaggctgaggcaggagaatggcgtgaacccgggaggcagagcttgcagtgagccaagatcacgtcactgcactccagcctgggcgacagagcgagactccgtctcaaaataaaaaataaataaataaataaaaagaaaacaattgctgctgagttttaggagttctctatatattctggatattgatcccttactg

SEQ ID NO: 873293 - DNA, 487 bp, Homo sapiens
ctctatccttttattttgggcctatgtgtgtctctgcacatgagatgggtttcctgaatacagcacactgatgggtcattgactctttatccaattttcgagtctgtcttttaattggagcatttagttcatttacrtttaaagttaatattgttatgtgtgaatttgatcctgtcattatgatattagctggttattttgctcattagttgatgcagtttcttcctagcctcgatggtctttacaatttggcatgattttgcagtggctggtaccagttgttcctttccatgtttagtgcttcctgcaggagctcttttagggcaggcctggtggtgacaaaatctctcatcatttgcttgtctgtaaagtattttatttctccttcacttatgaagcttagtttggatggacatgaaattctgggttgaaaattcttttctttaagaatgttgaatattggcccccactctcttctggcttgtag

SEQ ID NO: 873294 - DNA, 750 bp, Homo sapiens
atctctaatcaaaataaagtgggagtagctctgtcagttgcagacagagcagacttaagaactaagaatgccatctgggattatggacaaatttgataatttagataacgggattgctgggtcaaaaatttagaaatagctcaatttaacaacctaacattacaaccagaagaactggagaaccaagagcacatcaaccccaaagctggcagaagacaagaaataaccaatatcagagctgaactaaagaagacagagacatgagaaaccattcaaaagatcaatgaattcaggagttgttttttgaaaaagaaaaaaataataataaaatagactgctagccagacaaataaagaaaagagagaagatccaaataaacacaattacaaacaataaaggggacrttactgctgaccccacaaaaatacaaataaccatcagagaatattatgaacacctctatgcaaacaaaatagaaaatctcaaagaaatgggtaaattcctggacacatatgccctcccaagactgaaccgagaagaaactgaatcctggaacagaccaataatgagctctaaaatggaatcagtaataaatagcctaccaaccaaaaagagccctggaccagacagattcacagccaaatgctatcagatgtacaaggaagatctggtaccattctcactgaagctattttttaaaatctaggaggagggactcctccctaactcattctgtaagaccagcatcat

SEQ ID NO: 873295 - DNA, 750 bp, Homo sapiens
atctctaatcaaaataaagtgggagtagctctgtcagttgcagacagagcagacttaagaactaagaatgccatctgggattatggacaaatttgataatttagataacgggattgctgggtcaaaaatttagaaatagctcaatttaacaacctaacattacaaccagaagaactggagaaccaagagcacatcaaccccaaagctggcagaagacaagaaataaccaatatcagagctgaactaaagaagacagagacatgagaaaccattcaaaagatcaatgaattcaggagttgttttttgaaaaagaaaaaaataataataaaatagactgctagccagacaaataaagaaaagagagaagatccaaataaacacaattacaaacaataaaggggacattactgctgaccccacaaaaatacaaataaccatcagagaatattatgaacacctctatgcaaacaaaatagaaaatctcaaagaaatgggtaaattcctggacayatatgccctcccaagactgaaccgagaagaaactgaatcctggaacagaccaataatgagctctaaaatggaatcagtaataaatagcctaccaaccaaaaagagccctggaccagacagattcacagccaaatgctatcagatgtacaaggaagatctggtaccattctcactgaagctattttttaaaatctaggaggagggactcctccctaactcattctgtaagaccagcatcat

SEQ ID NO: 873296 - DNA, 601 bp, Homo sapiens
acctcaagtcagtacctttgatgaacctcaatgcaaaaatcctcaacaaaatactagcaaaccaaatctagcagcatatcaaaaagcttatccatcataatcaaataggctttatccccgggatgcaagttcaattcaacctacgcaaatcarttattatgattcatcacataaacaaaactaaagacaacaaccacatgattatctcaatagatgcagaaaaggcttttgataaaattcaacaccctttcatgttagaaactctcaataaacaaggtattgaaggaacattccgcaaaataataagagctatctatgacagacccacagacaacatcatactgaattggcagaggctggacatattccccttggaaaccagcaccagacaaggatgcccttcttaccactcccattgaaggtagtatttgaagtcctggccagggcaattaggcaagagaaagaaacaaatgtattcaaataggaagtgactaagtcaaactatccctgtttgcatatgacataatttcatatctagaaaacattatagtcacagctcaaacatctccttaatctgataaacttcagtgaagtctcagga

SEQ ID NO: 873297 - DNA, 623 bp, Homo sapiens
aggattgagccccggctgcacgctgcattgcttgctcggtaacaccctgtgctggctgctttccctctcctgtctcatttccccaccccttaccagtactgcctggatccccttccagacaaacgacttgcccttggctccatgctcaaagtcgtcgtctagggarctcaagcttggatgctccttcgttttcgctaatcactctctgtatgtcccctggtcttcttacaatggtagcccttgtcaaagctctaatcatcttgtttttatgtctgctttctttctgctcactggaaggctgggtcctgagggcacagtgtccagcacggaggacacacagtaaatattcccagaaggagtgatgggtgaacgaataaatagaatctcaccctgccaccatgattaaattcagccccaaacttacctgtcccattgtttccatatcctgccacctctgaggcctaatctgaagaactgatttgtgccagtggacgagcactatttctctaggtgagacatgcaggtgtcaacaggaaatgtcctgagatgtaattcttcaacccaggaagccactccaatcaagagaacataaagcaatggtgatgggatgtgggggttccatg

SEQ ID NO: 873298 - DNA, 654 bp, Homo sapiens
aagcctatgggagttttcaaaatttttacccctaactaggatgatttttagcatatctttctggcctgctagaagagattgctagagtcagattaaatgctcagaatattattgaatattttcatgcctgagtttgtatttccaagcatactacatagaaatcagctcattagactgattagacttcctttctttgaaggccattttcttagctggaggaatggttcaagacctccaaacataatctttctcagtcaagaaaatattactctcagtaaaacaaacttgattctttttctttagaattcaaagtttgttacatraaatgccatagacataatttaaagataatctggtttagatggcgtcagaatagctgatacttaatgatggactcctttcaattctcagactaattttatttcataaggaaacattagtgagttaattaaaatttttagaatcctaagccaaatcacaacttacagtgtttatctttcattacttttcagcaacatcagaaaatattgagtatttcctatttctacaaatattttgttaatttgattatggaatgccttctcacactgttaattttccattaaaattaaattctgaaggccttggacacctacagagtcctccattatttag

SEQ ID NO: 873299 - DNA, 609 bp, Homo sapiens
ttctcactagtttttatgtgaaaatagttccttcttcaacgtgagtctcaaagcactcaaaaatatccctttgcagactctagaataacagagtttacaaactgctcaatgaaaagaaacgtttacctctgtgagatgaatacacatatcttaaagcagcttctcagaatgcttctttctagtttttatgtgaagatatttcctttttcaccatggtcctcaaagcgctctaaatatccctttgcagattgtacaaaaagactgtttccaaactgctcaatcaaaagaaatgttaaactctatgagataaatgcacacatcacaaaargtttctcggaaaacttttgtctagtttttatatgaagataattccttattcaccataggcctcaaagcactacaaatatccctctgcagattctacaaaaagactgtttgcaaactgctcaatccaaagaatgtttcaactctgtgagatgaatgcacacaccaaaagaagtttctcagaaactttctttatggtttttctgtgaagatatttcctttttcaccataggcctcaaagccctcacaaatatccctttgcagattctacaaaaagactgtttc

SEQ ID NO: 873300 - DNA, 624 bp, Homo sapiens
ctgaatcaaaagagaggttcaaatctgtgagatgaatgcacatatcacaaagaagtatctcagaaactttccttataatttgtatgtgaagatatttcctttgtcaacataggcctcaaagtgatcaaaaataccctttttcagattgtacaagaacagagtttccagactgatcagagaaaagaaatgcttacctctgtgagatgaatgcacacatcacaaggctgtttttaggaaacctgcttcacagttgttatgtgaagatacttccttttccaccattggcctcacagcattccaaatatccacttgcagattctacaaaaagagtgtttcaaaactgctcaatcaaaggaaaggttgaactctgagatgaatgcaaacatcacaaagaagtttctcagaatgyctctgtctaatttttatgttaaggtatttccttttccaccataggcatcaaagtgctccaaatatccacatgcagataggacaaaaaggctgcttccaaactgctcaatcaaaagtgtggttcaactctctcagatgaatacacacatcactaagaatgcttctgtctagtttttatatgaagatatttccttttccaacataggcctcaaatcg

SEQ ID NO: 873301 - DNA, 588 bp, Homo sapiens
cccaagctgctcaaacaaaacaggtgttcaactctgtgagttgaatgcacacttaacaaagaagtttcttagaatgcttctgtctagtttttatgtgaagatatttccttttccatcgtaggccaccaatggctccaaatatccacttgcagattgtacaaaaagagtgtttcaaaactgctgaatcaaaacaaaggttcaactctgtgagatgaatgcaaacatcacaaagaagtttctcagaaagcttctgtctaatttttatattaaggtatttccttttccaccataggcctcaaatcattccaaatatccacttgaagattctacaaaaagagcgtttcaaaacttctcaatcaaaagaaaagtycaattctgtgataggaatgcacacatcacaatgaagtttctcagaatgcttctgtgtagtttttatgtgaagatatttcctttgaacgtaggcctcaaagcgctaaaaatccaattgcagattctacaaaaagagtttttcaaaattgctgagtcaaaagaaaccttcaactcagtgagatgaatgcacccatcaaaaagaaggttctcagaatgctt

SEQ ID NO: 873302 - DNA, 636 bp, Homo sapiens
ccaccataggtctcaaagttctccaaatatccacttgcagatactacaaaaagagtgtttcaaaactgctcaatcaaaggaaaagtgcaactcagtgaaatgaatgcacacatcaaaaagaagtttctctcaatgcttcagtgtagatttatgtgtagatatttccttttccataataggcctcaaagggctccaaatatccacatgcagatgctacaaaaagagtgtttcaaaactgctcaaactgttcatcaaagaaaggttaaactctgtgtgatgaacgcacacatcacaaagaagtttctcagaattcttcagtktaatttttatgtgaagatatttccttttccacgataggcctgaaagagctccaaatatccacttgcagattaataaagtgtgtttccaaactactcaatcaaaagaaagattcaagcctgtgaaatgaatgcacacataacaaagaaatttctcagaatgcttctctgtagtttttatgtggagatatttccttttccgacataggccactaagggctccaaatacccacttgcagatactacaaaaagagaatttcaaaactactcatacaaaagataggttcaactctgtgagttgaatgctcccatcacaaag

SEQ ID NO: 873303 - DNA, 662 bp, Homo sapiens
gcctcaaatcgctccaaatatcaaactgcagattccacaaaacgagtgtctcaaaactgcactatgaaaacgaaggttcaaatctgtgagttgaatgcacacatccgaaagaagtttctgagaatgcttccttctagtttttatgtgaagatattccckattacccctaaggcctaaaagcggtccaaatatcctcttgcagattctacaaaaagagtgtttcaaaactgctctatgaaaaggaatgttcagctctgtgagttcaatgcaaacatcacaaagaagtttctgagaatgcttctgtctagtttttgtttgcagacatttccttttccaccatagacctcaaactgctccaaatattcacttgcagattctaaaatagagtgtttcaaaactgctctaagaaaaggaaatttcaactctgtgagttgaatgcacacatcacaaagaagatactgagattgcctctgtccagtttacatgtgaagatatacccctttccaccaaaggcctaaaagcactccaaatatccacttgcagattctacaaaaagagtgtttcaaaactgatctatcaaaaggaagtgttatcttcatgaggtcaatgcacatcacaatatagtttctgataatgcttctgtataatttttatatgaagat

SEQ ID NO: 873304 - DNA, 633 bp, Homo sapiens
tttgaaaagatcaacaaaattggtagactgctagcagactaataaagaagaaaagagagaagaatcaaatagatgcaataaaaaatgacaaaggggatatcaccactgatcccacagaaatacaaactaccatcagagaatactataaacacctctatgtaaataaactagaaaatctagaagaaatggataaattcttcgacacatgcaccctcccaatactaaaccaggaagaagttgaatctcygaataaaccaataacaggctctgaagttgatgcaataattaatagcttaccaacaaaagaagtccaggaccagatggattcacacccgaattctaccagaggtacaaggcggagctggtaccattccttttgaaattattccaatcaatagaaaaagaaggaatcctcactaactcattttatcaagccagcatcatcctgataccaaagcctggcagagacaaaacaaaaaaaaaagagagtattttagaccaatatccttcatgaacattgacacaaaaatcctcaataaaatactggcaaaccgaatccagcaacacataaacaagcttatccaccatgatcaagtgggctttatccctggggatacaaggctggttcaacat

SEQ ID NO: 873305 - DNA, 633 bp, Homo sapiens
tttgaaaagatcaacaaaattggtagactgctagcagactaataaagaagaaaagagagaagaatcaaatagatgcaataaaaaatgacaaaggggatatcaccactgatcccacagaaatacaaactaccatcagagaatactataaacacctctatgtaaataaactagaaaatctagaagaaatggataaattcttcgacacatgcaccctcccaatactaaaccaggaagaagttgaatctccgaataaaccaataacaggctctgaagttgatgcaataattaatagcttaccaacaaaagaagtccaggaccagatggattcacacccgaattctaccagaggtacaaggcggagctggtaccattccttttgaaattattccaatcaatagaaaaagaaggaatcctcactaactcattttatcaagccarcatcatcctgataccaaagcctggcagagacaaaacaaaaaaaaaagagagtattttagaccaatatccttcatgaacattgacacaaaaatcctcaataaaatactggcaaaccgaatccagcaacacataaacaagcttatccaccatgatcaagtgggctttatccctggggatacaaggctggttcaacat

SEQ ID NO: 873306 - DNA, 634 bp, Homo sapiens
gcctcctgggttcaagtgattctcctgcctcagcctcctgagtagctgagattacaggcatgtggcaccacgcccggctaattttatatttttagtagagacagggtttctccatgttgttcaggctggtcttgaactcccgacctcaggtgattcacccgcctcggcctcccaaagtgctgggattacaggcgtcagccactgtgcccggcygcaagactcttacaatgaatacatcaggtctctctctatgaatctgtgactccaatgcaatcccaaggttctaatgaacatcattctaaagttctgagctaattctaaagttcactttgggatggagggaacatgtgaaaacagccagaaaatgtcttaaaaggaatataaaaagggagaaataaccctactatacaaatagaaaagttacagtagttagaagagtgtgtctggcacaaggataaacagaaaaaaagaatagaacataaataaatgtctggaaaagaatccaagtatgtataaaaatatagggcttgaagcaggtggcatatcaaacccatggaaggggagacttattcaactcagtggccatgcagaaaaataaaataaaaaaataaataagtaaacctggatccctagc

SEQ ID NO: 873307 - DNA, 621 bp, Homo sapiens
tcatttatgaagcttagttacattggatagaaaattcttggctggtaattattttgtttcaggaggctaaagataggaccccaatcccttctggcttgtagggttttgctgagaaatctgctgttaatctgataggttttcctttataggttacctgttgcatttgccccatagctcttaagattctttccttcatcttgactttagataacctaacgattatgtgcctaggtgatgatctttttgcaatgaatttcctgggtgttctttgarcatcttgtgtttggatgtctagatctctagccagaccagaaaatttttccttgagtagtccctcaaataatttttccaaacgtttatatttctcttcttcctcaggaacaccaattattcttatgtttggtaatttaacataatcccaaatttcttggaggctttgttcattttttaaattattttttctttgtctttgtcaggttgggttaattcgaaagccttgtgtttcagctaggaagttctttcttctacttatttgattctgttaactttccagtgtattttgcatttctctaagtttgtctttcatttctagaacttgtggttgtcttctttatgacattt

SEQ ID NO: 873308 - DNA, 615 bp, Homo sapiens
aaaaaaaaataaaactcctttcctgaaaagggccaaacactatacatggaagacaaagcaaatacttatcttttatctaaaccgttaaaaaaatgaagatgtatattttttcatatcacacaaaatcatttacgtttcttatgaaaaacacaaaaaaaataaaaatgaaaaataatactatccaataatagttataaagktctgtacttgggagtattttcttccatgctattttctacgcatttaaaagataacttgatattataacataagcatttttcatgataaactttttgtaaatcatttcaaggtgctttttatcccatttaactttaccctatacattttctctttatatctctcaacaacattttgattgaatttgattcatttgactccagatttattataaaacatcctttttagtttttttttttttttttttttttttttttttttttttttttttttttaagagatgggatgtgtccctctgtcagcagactggagtgaagtgtagctcaccacagttctgaactcctgggctcaagcgatccttctgcttcagccttcagagtagctaggactacagatgtgtaccaccatgcccagccc

SEQ ID NO: 873309 - DNA, 615 bp, Homo sapiens
aaaaaaaaataaaactcctttcctgaaaagggccaaacactatacatggaagacaaagcaaatacttatcttttatctaaaccgttaaaaaaatgaagatgtatattttttcatatcacacaaaatcatttacgtttcttatgaaaaacacaaaaaaaataaaaatgaaaaataatactatccaataatagttataaagttctgtacttgggagtattttcttccatgctattttctacgcatttaaaagataacttgatattataacataagcatttttcatgataaactttttgtaaatcatttcaaggtgctttttatcccatttaactttaccctatacattttctctttatatctctcaacaacattttgattgaatttgattcatttgactccagatttattataaaacatcctttttagttttttttttttttttttttttttttttttttttttttttttttttwaagagatgggatgtgtccctctgtcagcagactggagtgaagtgtagctcaccacagttctgaactcctgggctcaagcgatccttctgcttcagccttcagagtagctaggactacagatgtgtaccaccatgcccagccc

SEQ ID NO: 873310 - DNA, 612 bp, Homo sapiens
gtcttgaagtgattaattaaatatttgggagtaaaaaagtagatttgtttacattttaaaatttggatgggcatgtgctatctatattaaaaataatgaagattccatgccacatttttatggacaattacataaaatagggtgcccacaagcrtgcaaattagcacatgcctgaaattacataatgtctgtcttcttgcttgactttcatggaaatctgtatttctggccaacttgagagctgagcaacaggcccatgtcctcctgttaacttggtggggcaaaaaaatttataagatatcactaaataaaaaataatgtcaggaataaatatttgaagatatctattcatgggcctactgtgtccaaggcagctctagggttacaaaactgaaagtcagtacctgtcacaatctatgttccacaaatccacatagacagtgtggggcatgaatattctgacagaggcatgtctaaatacagaagaagtagggccacctaatctacacataaaaggggctggggaggctcttacataggaagattttaagcaaggaatatgactagattttggaaacacctctctggtgctaatgcagggctcgggaagga

SEQ ID NO: 873311 - DNA, 612 bp, Homo sapiens
gtcttgaagtgattaattaaatatttgggagtaaaaaagtagatttgtttacattttaaaatttggatgggcatgtgctatctatattaaaaataatgaagattccatgccacatttttatggacaattacataaaatagggtgcccacaagcgtgcaaattagcacatgcctgaaattacataaygtctgtcttcttgcttgactttcatggaaatctgtatttctggccaacttgagagctgagcaacaggcccatgtcctcctgttaacttggtggggcaaaaaaatttataagatatcactaaataaaaaataatgtcaggaataaatatttgaagatatctattcatgggcctactgtgtccaaggcagctctagggttacaaaactgaaagtcagtacctgtcacaatctatgttccacaaatccacatagacagtgtggggcatgaatattctgacagaggcatgtctaaatacagaagaagtagggccacctaatctacacataaaaggggctggggaggctcttacataggaagattttaagcaaggaatatgactagattttggaaacacctctctggtgctaatgcagggctcgggaagga

SEQ ID NO: 873312 - DNA, 612 bp, Homo sapiens
gtcttgaagtgattaattaaatatttgggagtaaaaaagtagatttgtttacattttaaaatttggatgggcatgtgctatctatattaaaaataatgaagattccatgccacatttttatggacaattacataaaatagggtgcccacaagcgtgcaaattagcacatgcctgaaattacataatgtctgtcttcttgcttgactttcatggaaatctgtatttctggccaacttgagagctgagcaacaggcccatgtcctcctgttaacttggtggggcaaaaaaatttataagatatcactaaataaaaaataatgtcaggaataaatatttgaagatatctattcatgggcctactgtgtccaaggcagctctagggwtacaaaactgaaagtcagtacctgtcacaatctatgttccacaaatccacatagacagtgtggggcatgaatattctgacagaggcatgtctaaatacagaagaagtagggccacctaatctacacataaaaggggctggggaggctcttacataggaagattttaagcaaggaatatgactagattttggaaacacctctctggtgctaatgcagggctcgggaagga

SEQ ID NO: 873313 - DNA, 612 bp, Homo sapiens
gtcttgaagtgattaattaaatatttgggagtaaaaaagtagatttgtttacattttaaaatttggatgggcatgtgctatctatattaaaaataatgaagattccatgccacatttttatggacaattacataaaatagggtgcccacaagcgtgcaaattagcacatgcctgaaattacataatgtctgtcttcttgcttgactttcatggaaatctgtatttctggccaacttgagagctgagcaacaggcccatgtcctcctgttaacttggtggggcaaaaaaatttataagatatcactaaataaaaaataatgtcaggaataaatatttgaagatatctattcatgggcctactgtgtccaaggcagctctagggttacaaaactgaaagtcagtacctgtcacmatctatgttccacaaatccacatagacagtgtggggcatgaatattctgacagaggcatgtctaaatacagaagaagtagggccacctaatctacacataaaaggggctggggaggctcttacataggaagattttaagcaaggaatatgactagattttggaaacacctctctggtgctaatgcagggctcgggaagga

SEQ ID NO: 873314 - DNA, 693 bp, Homo sapiens
cacaggaagcagggaataagatgttgccatcctaaggaatttaggatgtcttgtaagagatgtgggaagccatccaaagttttgagaagaaaagtcagatgatctgatggatgcgttttgatgatcattccagctgctctgtgatcaaggatcagtgagggaccagaggggaagcaggaagcatattttggaggctactgtagtttccagatgagagatggcagtgcaggcaatctccaacttacaataggtcgacttgcaatttttcaactctatggtggtgcaaaagcaatacatattcagtagaaaccgtacttcaagtacccatacaaccattctgtttttcactttcagtacagtattcaataaattacatgagatatttgacaccttattataaaataggctttgtattagatgactttgcccaactatagattaatgtaaggtgggctaagctaacctatgatgttcagtaggttagaggtatcgaawgcattttcaacttaagatattttcaatttgtgatgggtgtatcaggagaaaacaccatcataaaccgaggagcatctgtactgaaaattaagggcgtagagttgagttacagagttaattgaaaatgcttttgagataccagagaaagaatttactgatgagttgtatatggagtttgagagattagaagataaatga

SEQ ID NO: 873315 - DNA, 609 bp, Homo sapiens
gtggtgagtcaacagaagctttagttgagtacagtaacttaactattaataaaccactctaaacaaagtttaaaaaatacatttactgtattaaaatatttattacacacacaaacacacattgttggctacattacatatgtgctttcaagttaaatactcctaaaaacttacatcctagtattaatgacaagtgtgcatttaaataatttaaataataaaaagtagtaaatccagctaaactgccagaaaaatacacgtagtcatgtactcttttcttatgatgacaaaygttattttaattttttatttttattttttggtgttatggtagcatattttttggtgtctatacacaaacatttaaaatattctgaataactcagaatgctttgtctacagaaatcgataaattctttatcttagaatattcttaggttttgtagcaatatttgcaggattgattaaaggtccccatagaaaaattttatgttatctatgtttcatttaaattgtagcattctcccaaagtgttaatttttatatagccatatgaagatttactctctgaggtcatttaatgcatagcagaaatagtttaataaatgg

SEQ ID NO: 873316 - DNA, 628 bp, Homo sapiens
agaaatgacttctttcaagtatagaaaacatactttgtattgtagtaactgttggaaacatatacgtattttaaatttatttatcccaattacattttctttagttcaaaatttcatgggtaaataaaagtgcattgttactgttgtattgaaaattaccaattcctaatataatgactccaatgtaggggtttgggtttttaaattcagaatgcagaacaatcaacaattttatattcaaaacaaacaacatctggaaatttaacttctatttttttttcattcttccctactggtttagaacagttaataaaaaattctgattaaattttatattttattaatttgtgattctcatacagtttttaagcacataarataagaatttagcataaacttaaaacactcgttggtagcaaacacattgggggaattcatcttatgagatgaatccatgtctctaccctaagctgacctattagtccttaccctgtgtagacctaatagtctgattctgtccaaactttaatgcaattagttaggttactattcttttatctagatcagttatttgcaagtgagtttaaatgatagatgaagtctcagttaagtgctctaagaataccta

SEQ ID NO: 873317 - DNA, 628 bp, Homo sapiens
agaaatgacttctttcaagtatagaaaacatactttgtattgtagtaactgttggaaacatatacgtattttaaatttatttatcccaattacattttctttagttcaaaatttcatgggtaaataaaagtgcattgttactgttgtattgaaaattaccaattcctaatataatgactccaatgtaggggtttgggtttttaaattcagaatgcagaacaatcaacaattttatattcaaaacaaacaacatctggaaatttaacttctatttttttttcattcttccctactggtttagaacagttaataaaaaattctgattaaattttatattttattaatttgtgattctcatacagtttttaagcacataagataagaatttagcataaacttaaaacactcgttggtagcaaacacaytgggggaattcatcttatgagatgaatccatgtctctaccctaagctgacctattagtccttaccctgtgtagacctaatagtctgattctgtccaaactttaatgcaattagttaggttactattcttttatctagatcagttatttgcaagtgagtttaaatgatagatgaagtctcagttaagtgctctaagaataccta

SEQ ID NO: 873318 - DNA, 665 bp, Homo sapiens
taaaaacaatttattattttggggggatgaaaaaatagatgtggaactattagaagtatggacaaaacaatttcacattctcaaatagttctaaggagtataaataaatatgtgacaaatcatgtcacatttgtaaaaaatttaagaactcttattttatcatataagtaaatattagtatgacaatagaccattattggtaaactacttctcagtttattttagccaggtacaatatttcttgctatgaaatgtaaatattaaacatttctctcttttaggataatgtgtttcyggtgctcatcattttcactccaaacaaccaatactttttcacaactaatttgatcatctggagaaatatagctaaaagataaagggaaaatgccctttactgtaagacatgtttgtggaaaaattaaccaaaagaagcctctaatttggaccttactttcttcttataaaattaaacgatagcaaaatagattgtgtatatgttacgtttggcaaaagaaaaaaaatgaatgattttgtacaaggttggttcagttggtcacgtgaatctcggactattgagactctttatttgattgattaatgtgtatttggtgtcaacctcataattacaagagcaatgggtgactatgtcaatcttagtttatttt

SEQ ID NO: 873319 - DNA, 628 bp, Homo sapiens
gaaccaaagagtgaccaattcatctatgtggatgggaagtaagagattctccaaaaagaagaaatggctccataacacaggaaatttttcttgcctggggttaatggtggattacagattccatttgttttaaagagatgaactgtatagaaaaaaacagggctgtctattcccataaaattttagcattcaaaatatgtttaagacatgattgcagctaattcctattaacttattaactgtgttttcctgyctttctatacaaaccttcatatgtgacagcacatccctggaccctgggccctcttgaaccctctttttgactcttgcctttatggattcaaaatggctttgaattgcctaccctgatataaaattctataaaaagaaacacattctattattgaggctgtgaaaaaacatgcacttcaacacattgctggtgggactgcaaagtggtacaacttttggcagtaaattttgcaatcctaacaaatacctacacatctacttactgtttaaccaacaatcccacttctaagaatcttccctgaagataccatttaaaaatccaaaagttcatatgcactcattctctgtaattgcaaaatattggaaataatataaa

SEQ ID NO: 873320 - DNA, 628 bp, Homo sapiens
gaaccaaagagtgaccaattcatctatgtggatgggaagtaagagattctccaaaaagaagaaatggctccataacacaggaaatttttcttgcctggggttaatggtggattacagattccatttgttttaaagagatgaactgtatagaaaaaaacagggctgtctattcccataaaattttagcattcaaaatatgtttaagacatgattgcagctaattcctattaacttattaactgtgttttcctgcctttctatacaaaccttcatatgtgacagcacatccctggaccctgggccctcttgaaccctctttttgactcttgcctttatggattcaaaatggctttgaattgcctaccctgatataaaattctataaaaagaaacacrttctattattgaggctgtgaaaaaacatgcacttcaacacattgctggtgggactgcaaagtggtacaacttttggcagtaaattttgcaatcctaacaaatacctacacatctacttactgtttaaccaacaatcccacttctaagaatcttccctgaagataccatttaaaaatccaaaagttcatatgcactcattctctgtaattgcaaaatattggaaataatataaa

SEQ ID NO: 873321 - DNA, 587 bp, Homo sapiens
ggaaggagaaagtcctctctgggcacttattaaagatggtgaggcagtctttattcaagaggtgccattgcaacaggtataggaaccatggcaatgaggtcttgcaatgggagcgagattgaactcaattccaaatacagtatggacaagtgggaattgatagccaagtagcaaggtccagttaatgaatggaaaattactaagataaaacatcaggagtaagggaaatttttgttygactcatcagaattatctctgaaagtaggccgaggtaataagatacagatggtagtcagataccaagatcggggaattttcactaaattgatttagcagaattctttctcaggctaaggtcgaacctggtcagaaagtactcaaaggagagttactaaaggtttgatggaaagagtcttttcaggaatggagtgccaggttcaacagaaatccatagggcactagatgaggcaaaaacaaaaaccactccataggggccatttttaccacctaggaaatggaactgccacaaaaaacaatcttcactgaggtaaattcacagggcaaaaaatctcaagtcacataagaaa

SEQ ID NO: 873322 - DNA, 610 bp, Homo sapiens
gatataccataaagttcactcgtttcacatatacagttaattttagtaaatttacaaatgtgtgcaaactttactaccatctaattttagaaaatttacattatccccaaagaaacctcatgcttatttgtagacattgttaattcccatctccatctcctggcaaccactartctactttctggctctataaattttcctttctgatctctggtgtctggattcttcttagtgtcactttttttgaggttcatctatgttgtagcaggtttcagtactttgttcctttttattgctgcatagtatttcattgcatggatatactacattttgtttatccatttaccaggaaatgaaaattggataggttccactttttggttgttgtcaataatactgctatgaacatttccatgcaagtccttgtgttaccatatgttttcatttctctaacagtgggattgttgagtcatacagcaagtttacagttaaatttttgaggtactaccaaaccaaaccgtttttcaaaatgtcttcaccattttacattttcaccagcagtgtatgagagttccagttgtgacaacactttgtatgctccgtaacaaat

SEQ ID NO: 873323 - DNA, 603 bp, Homo sapiens
gcaagtccttgtgttaccatatgttttcatttctctaacagtgggattgttgagtcatacagcaagtttacagttaaatttttgaggtactaccaaaccaaaccgtttttcaaaatgtcttcaccattttacattttcaccagcagtgtatgagagttccagttgtgacaacactttgtatgctccgtaacaaattgtagctgtgaagtggtatttcactttatttcttatttgcattttcctagtgactaatgatgttgagcatctttccatgtgcttatcagaaatttgcatatcttctttaataaaatatttattcaaatgttttatattttyaatttgatttttctatttcaactggattattttaagtctccttattgaattataatatttctttatgttttctggcagttcattatcagatatatcatttgaaaacatcttctctttctctcaagctgtgacctaccttttcacattcttgataatgactttgatgtgcagacatttttagtttttatgaggtatgtcaatttttcatttatcgatagtgtttttggttttgtagctaagacgtcatcatctaaccaaaggtcacaa

SEQ ID NO: 873324 - DNA, 604 bp, Homo sapiens
tttcacccaattttgattcttgtttcacttgatattactctgtgaccctgaacttctgctactatcagttgggatacaatactctacgggtccctcacatttaagcccatattatgagcaaaggcactgtctaccctcattctgaaatgccttttcaaggatgtctacatggtgaacagccttagaagaagatgaaagtgtctcccttgagagtaaaaaggtttgcttatgtcctggaamataagaggtaatgtttctcacccagtgaaaagggaaggtttgtctacagcccattacaaaagatacagtttcctaagctcaagtttcctttcctgtagtgcaacacactatacaggcaggtatcacctgtccttgttgtgtcatctggcccttatcacattgccctgtgaatcagaccttcgggaaacagcaagaaaatgattatcctctgactgctcctgtcgctgtgggtaataaactgaccttggtttcttgccttgagtctgggccttctgccaatattcataaaacgatgtcaggctactgtgtaagtagggtaagcattcagactcatcatgttcttgacactattcttctaacacaa

SEQ ID NO: 873325 - DNA, 611 bp, Homo sapiens
acatattctgctaattgcttattgcataaactatttttaaagaatataattgttgataaataatgatatctttaaaaaacaaagaggaagttactttagttccaaatgttaaagtttgccagtacaatcttttttccaatagaaacattatagtactttcttaaatattttatagttttttcctaatcacaagttatatagctgtttcttttctgtgcttaacaaatatatagcattaaatcaaataggaacagtatatatttataatagtgcattcctacatatactgagtatatgaataaataattataaattgtgacatcttacaagaggtatggccaacaataaatgtataatgatcattttggattttcaaccctttattttctctgataacctatcaccccagcataaaaaagtatttatgacataaatattatgactcaatttttgtgatgttatcartacaaatcctccaagtgtcatattctaatgaagagcacaagtagaattccactaataatacttctttattaagtaaaatgtttttgtcatattacatcttattttaaggcatatatttaactttgaaaaagctgaaatgcagtcac

SEQ ID NO: 873326 - DNA, 643 bp, Homo sapiens; identical to SEQ ID NO: 871826

SEQ ID NO: 873327 - DNA, 640 bp, Homo sapiens
tatgaaaaaatgctcaaaatcactaatcataaaagaaatgcaaattaaaattgcaatgagataccatcccacaccagtcagaatggctattattaaaaggttttaaaaaaacagatgttagtgaggatgcagagaaaagagaacacttatacactctaggtagggatgtaaattagtacaacttctatgtaaaatggtatggagatttctcacagaactaaaaatagaactaccgtttgacccagtaatcccactactgggtatctgctcacagaaaaagagatttatttatcaaaaagacacctgtattcatatgtttatcatagcacagcaccactcacaatagcaaagtcatggagccaacctaaggatgtctctgatggatgtgaatgactggtatacatatatatatatatatatatatatatatatatatatatatatatatayacacacacacacacacacacacacacatatatgtactggaatattacacaaccataaaaaataatgaaataatttttttagcagcaacatggatggggctttgccattatcctaagtgaaataactcagaaacagaaaatcgaataccgtatattctcacttataagtggaagctaaacaatgggtacat

SEQ ID NO: 873328 - DNA, 646 bp, Homo sapiens
ccatgactcattccaggcacattaattatgccgcttttacacaaaagttagttactcttatatgtgagaattgttcacaactagcagtattagtggacatgctggcagtgaattggaaagataatgatagtttttagagtcttattcaaatctgcatatctacaatagtgtaacagtttgggatggccaaagttacagataatttggacaaataaaatacgggcccagcagtaaaataatgactgtatctccagaagctttaagattaaatggaaagaagaaaagactaaaggcagatcaagctatcatgctgactacagacatattaaaggctttccacagaaagagaaaataaattagtcttgttttactctagtcaagagggtagaattatagaamtggagattgccgctgcactataagatagaaatttttttttttttttttttttttttttttgagacggagtctctctctgtcacccaggctggagtgtagtggtgcgatctcggcccactgaaacctccgcctcccaggttcacaccattctcctgtctcagcctcacaagtagctgggactacaggtgcccgccaccactcctggctaatttttgtgttttttttttttttgtatttttagtagaga

SEQ ID NO: 873329 - DNA, 629 bp, Homo sapiens
tgatattgtttgctccacatcatgggccaatacagacaaatgctgtgaacttccaggcctggtaagaattcttccttcatttctattgattttttaaattgtatttaattttctggaaatgagaagctatttctcaacattcatatcataggcaactcgttgagatgataaaattagaaagagattaataaagaggcatgtctgaaattaacaagatttctcctgtataacctaggatcacatacagcgtgaactgcccaactcagagggtgctatttacacatagtccagatgttcccagattccatggctcatgaagcccttagtgtctcaagytttttcttgcacccctaagccaaaagaaacaccttgcagttccatttatgaaataataggtccaaacatcttactaaatatttatgtcctaacaactcagtagccatataaaataacaatgcacatacattgaaagaaaaaagtgatatttatattttattcttaaatgaccaaaattgcttattgttgggatgtgtgtgctacctgagccctgcagcatttctcatatcttgggatcacattggccactgccatcctcacttctttttctacattgcttttttcatagtact

SEQ ID NO: 873330 - DNA, 635 bp, Homo sapiens
caaacacacaactctgtttttcattcttactgcccagggtcatcaaatgtggtggttcaggttgtacattgttcaaaggcacctgccaagagaccaagccatgccaagccatgtcaaggaacacgtttttctactttgcacaaaggcatcctgaggactggcagaagcccagwcactaatggagttcaggcctcaccatcttctctccagctcttggcaaatcttctaactggtcttctgtcccaagtggcttaacatttcgattgattcttcacatctgcccccagattaatttccttaaagtctatgctggatcatatcatacttttcaaaaacctgcagtcacatgctgttgccttcagaataccgttcaccctctttgctgaggcatttaaggccctttgtaacttgactcccatctcattttcaccatgttgctccacatgttctcctctccatccatcttgcttgacttactgctcagtatggtttcttattaaatttacatagcatttattcatggagaggagaacattgcaaggttttttaccataaaattggaaacagatgaagcaaggtagaagaaaatattgggataaaaaagaagtaaatgaaagaaggctaaagacaattaa

SEQ ID NO: 873331 - DNA, 629 bp, Homo sapiens
gttatgcttatgcactcctgatgacaatcagatgaaattcttctagcgttagacctccagttttcctctagttcctcccttactgcccttgataagatagttttgaataattctgacacttttcctctggcctccagcaaagtttattattctcaacttgtgaattctccagtggtaagaaatcttaactctgtctgaaataagttttcaaatgtcttcattcttaaaataacttttaatatatcatttttaaaacaatcagataccttacagctatgaggactgatattgattttggcagagtgagtctcccgtaggaatgctcgggcttctcttacttgtaacttccttcttgtctaagaattttctattgagtatcttgtctccatacctgcagggctgactgttgtcaaattaagcgatgttttggcttcagaaattgcaaaatrtcaggattggttcgttattaatgaattggagtaaccgggataattgagttgtgttttgtgaaaatcaccttaaatgaccaaagtaaacatacagccagatcatgtagtattatatacacagagctgaaaataaatgggaatataatacactggctcctgaagttgagcaaatttcatttt

SEQ ID NO: 873332 - DNA, 636 bp, Homo sapiens
tgcaatatcataagtaacttgacaattttccatttatacagggtgtccctggagcaaagggggaacgaggagagcgggtaagtatcctgtggctctgctttctggccccagcttgttgcaccccttccattgcataagcctgataaaggatcatcatttaataccattaatattcattgcaattgtaccagtctctgtttctccctttccccaattcattagactgtggccatattttccagacataaaatccctgtgggctgggagtcaggagagctagtttctaattgcatatctgctaccatccaggtcaatgaacttgggctcttttctttaaggataaaatggagagaatcaccstcatataatttacaaagtgggtttgatgagaacgttatataatagatgtgaaaaggcttcagaaaagtaaaaactctatacaagtgacaagtggcagcatggcactcctgggctttttgatgctcccaggttcacacccaggaagacaatggcaggcatagaatcaaagaactggcccccaaactgaagtcagcttaatttaagggtcgtctctctcctttcagcaattgtgcagctgctaatataattgtgccattggctatagcagaaacagca

SEQ ID NO: 873333 - DNA, 632 bp, Homo sapiens
atgtcaaagttgagaaaaaacaaaacaaaacagcagttctaatatttggggatgagtttgtaccacggagctcatttctatagatacttttagggctttcaagggttttagtaaaactcactgaatattttcttttagattttagtataacatggtgctgtatctctacttttcttccagttaaagatttagaaaaaagaaaggatccaaagcccagagtcaaagttgtggacagaggaaatgggagtagaccatcttcaccagaaggtcagagacgattttaattaactcatattgggagttgggttgttttaattacacaggcaatactcacatgtggggttgctggtcccatctaagaagggcaggtctaatacgaagatcgcctgtggcctctttgtactcttccttcctttcccacacaagatgacccccaaccacttggcaygtgacctttcaggcacctttctcagaatggtgcatatatgtacagcctgtcatatttcttgttctgtgcataccttttcacttggaaacctttacatgccaattcatataggaggcaggatcacccagtgtaaattgcatgggctctcccacttgcctgcctaaattcaaagcctgcctttacc

SEQ ID NO: 873334 - DNA, 624 bp, Homo sapiens
atttgccagtctgtgtcttttaattggggcatttagcccatttacatttaaggttaatattgttatgtgtgaattcgatcccgtcattatgatgctagctggttatttagcccattagttgatgcagtttcttcgtaatgtcaatggtctttgcaatttggtatgtttttgcagtggctggtaccggtttttactttccatatttgttacttcctccaggagctcttgtaaggcaggcctgggggtgaaaaaatccctcagcatttgcttgtctgtaaaggattttatttctccttcacttatgaagcttagtttggctggatatgaaattctgggttgaaaattcttttctttaagaatgttgaaygttggcccccacgctcttctggcttgtagagtttctgcagagagatccgctgttagaccgatgggcttccctttgtgggtagcccaacctttcgctctggctgcccttaacattttttccttcatttcaaccttggtgaatctgatgattggggttgctcttcttgaggagtatctttgtgatgttgtctgtatttcctgaatttgaatgttggcctgtcttgctaggttggggaagttctcctggataatatcctg

SEQ ID NO: 873335 - DNA, 695 bp, Homo sapiens
taaaagactgagattgttgaattgttttatagtcttgtccttaaaatataaattagtgagtttattatttattctctctatttctcccaagcaaaagaaaatctcccacaatggcaaataaattaatataaggtattttaaaaatattttgtgtggttacataaatcattaacattgataaaagttatataaatcagggccgggtgcagtggctcaygcctgtaatcccagcactttgggaggctgaggcaggtggatcacctgaggtcaggagtttgagaccagcctggccagcatggtgaaaccctgtctctactaaaaatataaaagttagtcgggtgtggcggcatgcacctgtaatcccagctactcaggaggctgaggcaggagaatcgcctgtacccaggaggtggaggttgaagtgagctgagattgtgccactgcactccagccagggtgacaagagcgagactccatctcaaaaaacaaaacaaaaaagttatataaatcaattaacattaatttcatttgtttttgttaggggaagagagattgtttaattggctttaggaaaaaagtcttctttctttgctgtaacagaaaggaacagtgtaaatgtataaattatagttagacaagattatttttaccatcttgaaaagataattccgaggtatttttattttgtgagtaag

SEQ ID NO: 873336 - DNA, 695 bp, Homo sapiens
taaaagactgagattgttgaattgttttatagtcttgtccttaaaatataaattagtgagtttattatttattctctctatttctcccaagcaaaagaaaatctcccacaatggcaaataaattaatataaggtattttaaaaatattttgtgtggttacataaatcattaacattgataaaagttatataaatcagggccgggtgcagtggctcacgcctgtaatcccagcactttgggaggctgaggcaggtggatcacctgaggtcaggagtttgagaccagcctggccagcatggtgaaaccctgtctctactaaaaatataaaagttagtcgggtgtggyggcatgcacctgtaatcccagctactcaggaggctgaggcaggagaatcgcctgtacccaggaggtggaggttgaagtgagctgagattgtgccactgcactccagccagggtgacaagagcgagactccatctcaaaaaacaaaacaaaaaagttatataaatcaattaacattaatttcatttgtttttgttaggggaagagagattgtttaattggctttaggaaaaaagtcttctttctttgctgtaacagaaaggaacagtgtaaatgtataaattatagttagacaagattatttttaccatcttgaaaagataattccgaggtatttttattttgtgagtaag

SEQ ID NO: 873337 - DNA, 802 bp, Homo sapiens
catattttacaattttagtttaaacgcagagttaagatccttaacagaagtggctgtgcagttaaagttacagttaagattgtttccaatctactgtacatgtttctttaataatgcaaaatgaactcacaaacaaaaatggtacttgcctttgagcataatattggcacatttgcattaatggctatttctctatcgttgtccaaacagctttctttaatcatttttggagttttgcacaagaatgcagaacctgattggaaataattaagagactgataggaaaaacagcatagggcttttttttccttctttttcagtgatttttaaaattaagatcaccagccttctttgttttgtttttaatggattttttaaaatactgtagtctctacggtgatataaggggtgactctcagtgttctcattttctgggggaaaaatgagatgagcttaaattattctttccagaagtcagcaaactatggcccatgggcgaaattcagtcttctattttttaaaataaggttttattggaacacagctatgctcattcctttacatattgtctatggcygccgtcccacaatatcagagttgagtatttgcaacagagatcatatggcctgcaaagactaaaatattttctgttttgcttttttcagaaaaagtttgcttatctttgtcttagaatgtttaaaatttttgaatgtgttggcacacaatccttcactaaaccaagtaatgaaatgcttttccgaggacaactgttctattttgctatttcataattgcataggct

SEQ ID NO: 873338 - DNA, 587 bp, Homo sapiens
tattattttcaaagcatgctatcataacatgggttgtcaataacttgattctagtaatatggtagaaagggcattgaattaggaatcagataacctggattttattttcaccctgctatttaccaggtttgtgactatggtcatgtctcttcaatactttggatctctgccttctcatctsttcaacaggaataataaataccctacacctccttgcctcttaatgttgttgtgaggatcaaataaggtcctagttgttaaataactttgaaactataaagtgctatacaatataacacattctgctcattattacctcagaattcctctcagattacattgcctcaaatgcattatttaggaaaagtacaaacttgaatgccatatggagtccttgttgacactgcagatgttggttaattttagattctaaaagaacaaaagaacagaagcactaccaagcaaattagcctctctttagctttttcttcgaaatctcatattatacgaataccaaactaaaaatggcaggctaaatattatagacaattacatcatttgaagcattgaaattctgtatatccaag

SEQ ID NO: 873339 - DNA, 622 bp, Homo sapiens
aagctcatatgagacatcttggtgagcaaataaatatcacttaatgtaccttaatgcctctcagacagactcttagtacttaaattattcttcactgaatttgttaataattttattttcaaaatggaaccatagagctttactttttcagtaggattcactcaattctgaaggatcaaacagacttaaaagaataaaatcatgcctttaggtaaatatgyatgtaacactaatggaacagtgcagtgtatatcctgcccgatagtattgtactgtacaagtgtgtctgtttaagtggacacaagtcacaatgtaaggctcattacccttagacttagtaagtaatttaactcaagtcctgaacattctctgctgtaaaacctgcaaatgcatagggatttgcaaagggaacgggaatggaatgtgagacaaatgaaacttaattgaccaataacaagttctgaaattgaggcaataattaatagcctaccaaccaaaaaaagtccaggaccagatggatttacagccaaattctaccagaggtacaaggaggagctgggaccattccttctgaaactattctaaacaacagaaaaagagggaatccaaagtaactcatttc

SEQ ID NO: 873340 - DNA, 663 bp, Homo sapiens
ttcaactaaacaaggcaaaaagtagcacaatttctgagcacagaaaaaagaactcacatttagaaagaagaactaacattgagagcacttggatatggtctggacactgtgctcagtactttatatccactatcttatttaatcttcacaacgttcttataaaattggtactgttattactgtcttcattttacagataaggaagctgagcttaggaaaattaaatgtcttgtctaatatcatctaacatggactagcatagacaagaaattaagaaayaaaacaaaaacaaagcagtctgtatcctcccaccttaaccactatgaaacagttcatccaatctggcaggaggaaagagagataagacagtattacatcagaagtaagattagattaagagagagtataaaaataagactaaaagaggaaaaacaagcaattttagaaaacattaaggatcttatttccctcgtattttttaaaatctgagtttacaatgcttgtgaatgattctttttttaactcatgagtggaggttgtaacaactctgtgaccacaacatagtttttcctctgaacagaaagtcctacatcattgagttactctcagcggagggtactttggctacaagaactggttacaagaactatccaagtcccactg

SEQ ID NO: 873341 - DNA, 614 bp, Homo sapiens
aaaagtgcatgaacagcctcctttactgttacagggcaatgaaggatcccactgaaagctgtaaaaagaaactttttccatgaattggtattgcttgggaataatctttaagttttataagcctcagtagattttggatcattaaatacttcctattctatatattttctttttttattattatactttaagttctagggtacatgtgcacaatgtgcaggttagttacatatgtatacatgtgccatgttggtgtgctgcacctattaactcgtcatttaacattatttatatctcctaatgctatccctcccccctctccccactccacaacaggccccrgtgtgtgacattccccttcctgtgtccatgagttctcattgttcaattcccacctatgagtgagaacatgaggtgtttggttttttgtccttgtgatagtttgctgagaatgatggtttcaagcttcatccatgtccctacaaaggacatgaactcatcattttttatggctgcatagtattccatggtgtatatgtgccacattttcttaatccagtctatcattgatggacatttgggttggttccaagtctttgctattgtgaataatg

SEQ ID NO: 873342 - DNA, 613 bp, Homo sapiens
gcataatgcttgttttccttggggagaagattttgagacttccgcatgtttcaataatgtccccatgtctgtatggagatccaaataaatgctgtgtgcctgatagttttggcctcttaaacagccatatcttatacagtttagtcaatgacaaaaaatcatttacccaaattattctgtctgataaggagtttggagcaggtaatttcaggaatttttttctgtctaaatggatataataatcaagaagacacttgtagaaataattccatgcagagctatagggaacagcttcaagacttaaatcttaattacatcagaaccagttatagacatagttgcctaaactcaaaagttttcaacaggttaaaaaaaaaaaaaagtgmagcattttaaaaataacaatattcaactattcaaatactgattattttagatttatgcctttaaaattctaaatgaagcctattggtcaaaataatagtgattcagcttttaggttctgaaatcagatattctgggtatgaatcctggctttaccactgttgggagctgtgtggacttgggaatatttgtaaatacgcctcagtttctgcagctataaagtggatat

SEQ ID NO: 873343 - DNA, 632 bp, Homo sapiens
aaaagacataaaaatggccaacaagtatatgaaaaggtgctcagcatcattaatcatcagggaaatgcaaatcaaaaccacaatgagctatcacctcacactgctagaagaactattatcaaaaagacaggcgatagcaaggtcatggcaagggtgtgaagaaaagggaaccctgtgcactattcataggaaggtagattagtacagccattgtggaaaacagtatggaggctcctaaaaaaattaaaaatgaaattactatgacccagggattctcttctgggtatatacccaaaggaacagaatcgccaccttgaaaagatatctggactcccatgtccattgcagtattactcacagtagccaagatatggaaacaaccgaggtgcccatcagtggaccaatgaaagaaactctggtatatacagtcgtgcactgcataacaacatttcagtaaatgatggaccacatatatgaccgtggkctcataagattataataccatatctttactgtactttttctatgtttagataacacaaatattcaccattgtgttctgactgcctagagtattcagaatagtcacatgctgcacagatttgcagcctagcagcaataggttacaccat

SEQ ID NO: 873344 - DNA, 646 bp, Homo sapiens
actgtgataatgaaatactgcctgacttagccttaaattttgaagttgagatccatattgaataaattttgaagtctggtttcctgaacttttaaaattacatatgaatttaaaatttgttttgcccaatggtgtgaagtaaagacttgatatggttaaggtgaatttggtcacataatcaaacttacgtattcatgttgataacttgccttccctctggttacctcctctctcttttcttcccaccctaccrtgggacttgatttgagtacctgtcctgatcctcttaactctgccccacatttagattcgaattacctttaattacactctcaaggtgcccagttttctttgtgaaagaattgtcctacagagttccatagttacataagaatcaggcccattaatttctctgttgattttaatttctcctgagtatcagatctttggcaaaagtataaaaattcaccaggagactaagaaagaagaagaaacaacattccagatcagaagtaatttatatgaagacacaaattattgtgatcagtgaggacatttggttccctaaaccagaatgttactagcccagctacgcagaatagtatatgttcaggctccaaaagaaatttcataagatctgttgtac

SEQ ID NO: 873345 - DNA, 646 bp, Homo sapiens
actgtgataatgaaatactgcctgacttagccttaaattttgaagttgagatccatattgaataaattttgaagtctggtttcctgaacttttaaaattacatatgaatttaaaatttgttttgcccaatggtgtgaagtaaagacttgatatggttaaggtgaatttggtcacataatcaaacttacgtattcatgttgataacttgccttccctctggttacctcctctctcttttcttcccaccctaccatgggacttgatttgagtacctgtcctgatcctcttaactctgccccacatttagattcgaattacctttaattacactctcaaggtgcccagttttctttgtgaaagaattgtcctacagagttccatagttacataagaatcaggcccattaatttctctgttgattttaatttctcctragtatcagatctttggcaaaagtataaaaattcaccaggagactaagaaagaagaagaaacaacattccagatcagaagtaatttatatgaagacacaaattattgtgatcagtgaggacatttggttccctaaaccagaatgttactagcccagctacgcagaatagtatatgttcaggctccaaaagaaatttcataagatctgttgtac

SEQ ID NO: 873346 - DNA, 646 bp, Homo sapiens
actgtgataatgaaatactgcctgacttagccttaaattttgaagttgagatccatattgaataaattttgaagtctggtttcctgaacttttaaaattacatatgaatttaaaatttgttttgcccaatggtgtgaagtaaagacttgatatggttaaggtgaatttggtcacataatcaaacttacgtattcatgttgataacttgccttccctctggttacctcctctctcttttcttcccaccctaccatgggacttgatttgagtacctgtcctgatcctcttaactctgccccacatttagattcgaattacctttaattacactctcaaggtgcccagttttctttgtgaaagaattgtcctacagagttccatagttacataagaatcaggcccattaatttctctgttgattttaatttctcctgagtatcagatctttggcaaaagtataamaattcaccaggagactaagaaagaagaagaaacaacattccagatcagaagtaatttatatgaagacacaaattattgtgatcagtgaggacatttggttccctaaaccagaatgttactagcccagctacgcagaatagtatatgttcaggctccaaaagaaatttcataagatctgttgtac

SEQ ID NO: 873347 - DNA, 590 bp, Homo sapiens
gctgtcttaaagagactcacctaatgcataagggctgacataaactcaaggtaaaggagtagaaaaagatattccatgcaaatggacaccaaaagtgagcaggaattgttattctatcagacaaaggactttaaagcaacaacagttaaaaaagataaagagggacattacataatgataaaatgatcagtccaacaggaaaaaatcgcaaccctaaatatatatgcacctggagctcccaaatttataaaacaattattactaggcrtaagaaattagatagcaatacaatcatagtgggggacttcattactccactgacagcactagacaggtcatcaagacaggaagtcaaaaacaaacaatggacttaaactacaccctagaacaaatggacttagcaaatatttacagaacattctacccaacaactgcagaatacacattcttttcatcagcacttggaatactcaagatagaccatatgatataccacaaaacaagtctcaagaaatttaagaaaatctaaattatatcaagtactctctcagaccacagtggaataaaattggaaattaattctaaaagga

SEQ ID NO: 873348 - DNA, 590 bp, Homo sapiens
gctgtcttaaagagactcacctaatgcataagggctgacataaactcaaggtaaaggagtagaaaaagatattccatgcaaatggacaccaaaagtgagcaggaattgttattctatcagacaaaggactttaaagcaacaacagttaaaaaagataaagagggacattacataatgataaaatgatcagtccaacaggaaaaaatcgcaaccctaaatatatatgcacctggagctcccaaatttataaaacaattattactaggcgtaagaaattagatagcaatacaatcatagtgggggacttcattactccactgacagcactagacaggtcatcaagacagraagtcaaaaacaaacaatggacttaaactacaccctagaacaaatggacttagcaaatatttacagaacattctacccaacaactgcagaatacacattcttttcatcagcacttggaatactcaagatagaccatatgatataccacaaaacaagtctcaagaaatttaagaaaatctaaattatatcaagtactctctcagaccacagtggaataaaattggaaattaattctaaaagga

SEQ ID NO: 873349 - DNA, 597 bp, Homo sapiens
atatgaattccaaggagcacaatgaaagggtctcaggagttgaaggatggggcaaaaacaacaatacagaggcacgtggggttgcaagtcaggagggtgcaatgatctgggaattctgggtttcctgtgatggctgccaccttctgattaaagagcataatgagattagactcaatggtmtcaagcagagagtagtggcaaaactgtgtgtcaggtcttaaaattgagattaattacatataaaagtcaagcaattatgcaacaagcacacgaaaaaaatgcccaacatcattactcatgagggatgtgcaaatcaaaaccaggtaccgtttcacaaccactaggatggctgtcattaaaaaaggagaaaatttttaaaagctggcaagaatgtggaggaattggaaccttcttataccgttggtgagaatgtaaaatggcacagcttgctacgaaaaacagttgggcagttcctcaaaaagttaaacataaaattaccatatgacccagaaatttctaaccccaaataaatgaacactggtacctaaacaaatataagctcacaaatgttcacagcagcactattcacaatagcca

SEQ ID NO: 873350 - DNA, 547 bp, Homo sapiens
caatgttcattggggatatgggcctgaagttttctttttttattgtgtctatccccagttttggtatgaggatgatgctagcttcataaaataagttagggaggagtccctccttttcaattatttggaatagtttcagaaggaatagtaccagcttctctttgtgcctctggtagaatttggctgtgaattcatctggtcctgggctttttttgattggtaggctattaattactgmctggatttcagaccttgttattggtttattcagagattcgacttcttcctggtttagccttgggagggtgtatgtgtccaggaatttatccatttcttctagattttctagtttatttgtatagaggtgtttatagtattctctgatggtagtttgtatttctgtggggtcagtggtgatatcccctttatcatgtttattgggtctatttgattcttctctcttttcttctttaatagtctagctagtggtctatttttttaagtttttcaaaaaaccagctcctggtttcattgattttttggaggg

SEQ ID NO: 873351 - DNA, 610 bp, Homo sapiens
ttatttctactagttcttattagtgccacttaaagaatctaacacatgcctctgagataagattttttatttatccttgtagagcttataggattccaatggaaaagatgccaatggaaaaacttattcagtacatgtgaacatttaatatagtgtgaattagttgaattagttgttgagaaggtcaaagttcaatatctctaaaaatcagagagggtccccaaaggcaaaattcttatttctctacgatcatactgcatcactaactctgagtgcccttgcaaatctgcatctttagatattaaaaagggaaagcaactctatgtgcayaccccacagccaagtatgttaatgtgttgtatttattataaaaaaaagctttttaataaactccacagttgtaaagatttcatctctgatcatatattaagcggttttataagcttccagttcaaaatataaatatcgtagttacacttagaacaacctctagtaaagccaaatatattttaaacattcttatatgaagatgtttgaccctgaaaagtctactgtaacatatctgaaaaatttttaagcacctaaaatttctctaccaatagcacaaaca

SEQ ID NO: 873352 - DNA, 610 bp, Homo sapiens
ttatttctactagttcttattagtgccacttaaagaatctaacacatgcctctgagataagattttttatttatccttgtagagcttataggattccaatggaaaagatgccaatggaaaaacttattcagtacatgtgaacatttaatatagtgtgaattagttgaattagttgttgagaaggtcaaagttcaatatctctaaaaatcagagagggtccccaaaggcaaaattcttatttctctacgatcatactgcatcactaactctgagtgcccttgcaaatctgcatctttagatattaaaaagggaaagcaactctatgtgcacaccccacagccaagtatgttaatgtgttgtatttattataaaaaaaagctttttaataaactccacagttgtaaagatttcatctctgatcatatattaagcggttttataagcttccagttcaaaatataaatatcrtagttacacttagaacaacctctagtaaagccaaatatattttaaacattcttatatgaagatgtttgaccctgaaaagtctactgtaacatatctgaaaaatttttaagcacctaaaatttctctaccaatagcacaaaca

SEQ ID NO: 873353 - DNA, 587 bp, Homo sapiens
atttgactatggtgaattcaaataaagcctgtggtgcccactgggataatatgtgttagttactccgggtgtggtaaaactgcaactgtgaactgctgctctagagactggaaaatgaaactctaaaaaaaaaaaacaaaattagaaaggtgataaactaccagttaatttttattacttagtagtttagatgatttcacatttatcatctgtttgaaaatcaaccactttttacatttgaagagagatggcctctggtcgctatgattccagcactagagaggactcaacatgaataaagagtggaaaatgaatcatgaagcasaactgtatccaagaatttctgcaagataaacactcacatgaaatctggatgtagtttttttctcacaatgcatgaaatgcaattttccacagagggacacaagcatgtcgctttgttagggtgattcattccgatgatgccatgcaatgaggagaagtccaaccctgtctgatttaacctggggtttagggaagaatacagtatcttttctagattaaaataagattcagagttacagtggttatagaaatagcaaaatgag

SEQ ID NO: 873354 - DNA, 608 bp, Homo sapiens
ccttcactctttgcaggtaaaaggctgattggagtttggcttcttatttctctccggacaactgtggcagagaatacaaccatcctatgcataacagcctctttctagctgaacaagcagcctgcactaccactccattatgagaagacctaggtagcctgagtgttcatccagcagcagyctgtgggtcactgtgagttcagaccctgctctgggcagattcaaaaggcagggtgtgaggatggcaatgcccacatggcaaaagcctgtcctttagatgcggcaccactgagagatgctgtgtcacaggaggttggcctggcttatccagctgtctgttcagatgttcccataggattctctctgccagcagagtccacggcgaatgtggataaacagtagtaccattaggacagcagatatcaggcaaaaggcaacagcaaagatgacctttagaactgtgggaaaataggaaaagtattaatgtaaaattaatgcattaggaaaataggaagatcacatgtgagtgttgctttctgccttaattgcaaatttcagaggagttgctaaagaggccttgaaatcagcattatgtgtgtgctaagaag

SEQ ID NO: 873355 - DNA, 627 bp, Homo sapiens
tgcccaccaaagtttgctaccaagctgggccgagttgtggtcaaagaaggacagatgggacgattctcctgcaagatcactggccggccccaaccgcaggtcacctggctcaaggtgaggtttctgtctgccctgaccctgatccakcctgtattagtctgttctcatgctgctaatagacatacccgagactgggtaatttatgaaggaaagaggtttaatggactcaccgttccacatggctggggaggcctcacaatcatgacagaaggtgaatgaggagccaagtcatgccttatatggcggcaggcaagagagcatgtgcaggggaactcctctttataaaaccatcagatcacatgagacttattcactgtcatgagaatagcatgagaaaacccaccctatgattcagttacctcccactgggtccctcccacaacacgtgggaattatgggagctacatttcaagatgagatttgggtggggacacagccaaaccatatcatagccctagggaccctgaaaattcagggttagacccttcaactagtaggagtctttccattctgttcctcctgtttcaggcggttctcaggggttctctgtatgtttgttagggatgc

SEQ ID NO: 873356 - DNA, 549 bp, Homo sapiens
gaagaatgtcgttggtaatttgataggaataacatgtaatgatattgattcttcctatccatgagcatgggatgtttttccatttgtttgtgtcttctctgatttcttcaagcagtgttttgtaactcatattgtagagattattcacctccttgcttagctgtattcctaggtattgtattctttctgtagtaattgtgaatgggattgcttttctgatttggccctcagcttggtattgttggtgtataggaatgctagtgattttttgtatcctgagactttgctgaagttatttatcagctgaaggagcttttgggctgagactakggggttttttagatatagaatcatgttctctgcaaacagatttagtttgacttcctctcttcctacttggatgccctttatttctttctcttgcctgatttccctggccaggacttccagtaccatgttgaataggcgtggtgagagagggcattcttgtcttgtgccagttttcagggagaatgcttccaccttttgcccattcagtacgatgtttgt

SEQ ID NO: 873357 - DNA, 548 bp, Homo sapiens
gggtttgcatggcatattgccgttggcttagaatgcaagtggtagaaggaggatgtatttacatctatgctaagatgatcagagaatataacaggaaagtttcataagaaattatcttggcagaggagtgcctgggagactgaagttcagagataaaagaagactttgttttcaccgtttacacttttacaatttttgaatttctaaamccatgtgtatgtattaactatttcagatagataggtgacagatagatggataaatagcaatagctagtaggatttcttacatcttccccctccatatctattttgttaaccttgcttatgccttgagaggctgacctttggtttcctgttgggtttggtcaatgggagcaccagcagcagatcagaggagaggaaaggaaaggaaaagagtccggtcgagctgtctattctgtcatcttcctccctgtggggttatagtgcactccagaagtcaacagaagggcatagttcttgtcaggaggccctctccacacaggcttctctatctataagttcaag

SEQ ID NO: 873358 - DNA, 572 bp, Homo sapiens
cttaattcttcatgttcatctttcagtatctctaccccctgcccctattaaatattgaactctagatgcactgttttatttacttgaagttccccagtaatggcttttctccagctggaatgcctttcccacaattatttgcttcatcaactcctacccatccttaaagacagagctcaggcatcactactactctctggaagtctctgtctttccaatctgccataggtatccttcttatgtgctcccatagaatttcattttattctataatatcacttagagtattttattatttggaatttttgcctcacatattagactgtawcttgaaggaaataactgtgttttgtatttttgttaccaatatttagtatatattctcaacaaataatttttgtgtgagtaaatgattgcatgcatatgtggctcaacagagttacataaacaaatgaaagaaacttctcctctattacataaactataaacgtcaactttttcataattacatacaacgtggaaaaatatatttacatgtcttagagtcttagaagtctcattcctaaaaacta

SEQ ID NO: 873359 - DNA, 587 bp, Homo sapiens
tttctcggggagtatctttgtggtgatctctgtatttcctgaatttgaatattggcctgccttgctaggttggagaaggtgtcctggataatatcctgaagagtgttttccaacttggttccattctccccgtcactttcagatacaccaatcagatgtagattttttcttttcacatattcccatatttcttggaggctttgttcrtttcttttcactcttttttctctaaatttttcttctcacttcatttcattaatttgatcttcaatcactgataccctttcttccacttgatcgaattggctactgaagcttgtgcatgcatcacatagttctcttgccatggttttcagctccatcatgtcatttaaggtcttctctacactgcttattctagttagctgttcatctaatcttttttcaaggtttttagcctccttgtgatgggttggaacatcttcctttagctcagagaagtttattaccgactttctgagacctacttctgtcaactcatcaaagtcattctctgtcctgctttgttccattgctggcaaggagctgcgatcctttggaggagaagg

SEQ ID NO: 873360 - DNA, 607 bp, Homo sapiens
attaagatttagttattaccatgatggaatttatttttaaagaaatgtaggccaggtacggtggctcacgcctgtaatcccagcactttgggaggccgaggtgggtggatcacgaggtcaggagttcaagactagcctgaccaacatggtgaaaccccatctctactaaaaatacaaaaattagccaggcatggtggcgcatgactgtaatcccagctactcaggaggctgaggcaggagaatcacttgaacccaggaggtggagattgcattgagctgagatcgtgccactgcactctagcctgggtgacagagcgagactctgactcaaacaaaaaaaagkggccgagctcagcggctcaagcctgtaatcccagcactttagaaggctgaggtgggtggatcacctgaggtcaggagttcgagaccagcctggctaacatggtgaaagcctgtctctactaaaagtaataaaaaaaaaaaattagctgggtgtggtggcaagcatctgtagttccagctacttgggaggctgaggcaggagaatcgcttgaacctgggaggcgtaggttgcagtgagctgagattgcaccattgcactccagcc

SEQ ID NO: 873361 - DNA, 654 bp, Homo sapiens
gtaaactaatacatacatggacaatttgaagagagataccaaatgttgagacattcttgcagtattgttaagaaaatatccaccatttaaaaagatcttcatttattctaccacaagaaaatgctttctattttgaatttctagaactctaatgatttcattagcattaacaaatcaagaaacttaaattggatcctccatagcaatgataattaatagagaagagctacctcacctaatagatgtattaggttgaatgggaaaaaaatctgttctatgtttttatacctgaatatgaaactacatctttacagctctaaaaggaccaatgcaatcacactgatgtaacagtaaagtcaaaaataatgataartggttgttttattacctgaatattgatctagcactaggcttggggtagttggttttgcactcaccagacttaacctcaggtagtgaaaatttgttcttcttacataattagacactgaagaatgtgcattgtcttggaaagcattttattctttaaaccgttagagactaagacctgaggctgagaatctgtatttcaattattaaaagtaattgcttttaaatcctttcttccagctgtaatttctcttcccttacaacatacagctgacatttaaaaat

SEQ ID NO: 873362 - DNA, 594 bp, Homo sapiens
ttcatttcaaattagatcataatggaaatctttgagtgtaatgagctttaaaacctaattcctataaaaatgatccattttagcctaaataactaagaccttaatcttggcaatattaatttctgtatctcaaagaaktaataatcatttgaaaatatgtagaaaagcttttctcgtgtactgttgcaataataataaaacaaactttttattctattttgacaaatgactccgtacacatgattcagttctgagtattgaaatattgaatttatacttgaacagatttcagtcttgctgaaagtgcctggaaatagttttcagaaagcctcttagaaatatgtcaatcttattcaaagtggagatgtttgccacttaatgtcaaagtcttaagctcaaggctgaaatatttctttattggctaaaatgttgaaatagtttaatgtgggattctcattgggtctcatttgcctgttccagggcagaaattattaaatgaataatgaaaaagtacaagtttacaaaactgtcatcttttaaaataccacctctctcaataatctaggtttgtacataaattattaaacattttta

SEQ ID NO: 873363 - DNA, 633 bp, Homo sapiens
tttcattttttattaaattaaaatgccatcaaatatttagggcttttcatgcctttgagatttttaaaagagtaagtatcattggatttgttctgatctagaatgtatgctttagtttgatttctaggaagtattttaatgagttcactggactttgacatgagaatcttttaaatgggatcattataaaaactcacaaacctgaataaactyaggttcttaactttgcttcttattctccatacagatttagacaattcattgcttggaatttgaaaatgtcagacatttcaaaggatttgtacctgacattttcaaggacaacagagttcaacttaaaaaaaaaataaaaaaacatgctgatctgaaatagcatctgcctttagaacaagggcgcttagttgcacttgatattagccatttgaccttcctaatataaagggcaagttctgtcatgtgggggaagctgtttaattgagcaaactataccatataccatatttttgttctcttctttcttctcctattttttcccgtgtgcataataaacctatttatgtggctgagaagactcatgatctagtgttaaacgtggctgttttctataccgctttgaatcttgagcgaaaaaaa

SEQ ID NO: 873364 - DNA, 633 bp, Homo sapiens
tttcattttttattaaattaaaatgccatcaaatatttagggcttttcatgcctttgagatttttaaaagagtaagtatcattggatttgttctgatctagaatgtatgctttagtttgatttctaggaagtattttaatgagttcactggactttgacatgagaatcttttaaatgggatcattataaaaactcacaaacctgaataaacttaggttcttaactttgcttcttattctccatacagatttagacaattcattgcttggaatttgaaaatktcagacatttcaaaggatttgtacctgacattttcaaggacaacagagttcaacttaaaaaaaaaataaaaaaacatgctgatctgaaatagcatctgcctttagaacaagggcgcttagttgcacttgatattagccatttgaccttcctaatataaagggcaagttctgtcatgtgggggaagctgtttaattgagcaaactataccatataccatatttttgttctcttctttcttctcctattttttcccgtgtgcataataaacctatttatgtggctgagaagactcatgatctagtgttaaacgtggctgttttctataccgctttgaatcttgagcgaaaaaaa

SEQ ID NO: 873365 - DNA, 644 bp, Homo sapiens
ttttaacagaggtgtcaagaacacacaatagagaaagaccagtctcttcaataaatggtacctggttaactttgtatccttcaattgtttgaactggccttatgtgaaatgtactggtttgagacaggttattcccaaataccttattttgaggcaggggtgagtagaagtcccattttcactgttattcaagttttgaatgaaaggagaaagactttgacataatataatacagctgtcctgccagggttgtgctcattgtgattgcacattgtccatggtggatatagtgttcatagactacatttatactgagattcacctactggtacaagcagaccattgtccggcctcttgctagtattgcctcctgctccagcaggacacatggatraacatagtgtcctgtgtgtagtaaagactctatgtctttgatgaattcatttgaataggctttgtgccagtattaggtttcttttacaactgggatcttgacacttttatgttgatggttgaccttgctttaccttggtttcaggtactgctataatttttggcatctaactgttggtcttgactttacttaaattctaaatttccctcatgaccctcttattggtctcccaaatatctacctgtctacc

SEQ ID NO: 873366 - DNA, 561 bp, Homo sapiens
tgttcatagactacatttatactgagattcacctactggtacaagcagaccattgtccggcctcttgctagtattgcctcctgctccagcaggacacatggatgaacatagtgtcctgtgtgtagtaaagactctatgtctttgatgaattcatttgaataggctttgtgccagtattaggtttcttttacaactgggatcttgacacttttatgttgatggttgaccttgytttaccttggtttcaggtactgctataatttttggcatctaactgttggtcttgactttacttaaattctaaatttccctcatgaccctcttattggtctcccaaatatctacctgtctaccaccatcctcactttcccactgtgttgaagagaaattgaattcaacccctctagaaaagcagcagaccattgttttcgttgttcctttaataggctggtcatgaaaacagtaaactcttgatttaactggaggtctttaatatccagagagtgaaagagctatatctgagatttttgggctggctcatttattctgccatctctcaag

SEQ ID NO: 873367 - DNA, 618 bp, Homo sapiens
ctctgctaatgacttctgttatctgcttcataaagtcaaaaccttagcttgatattcaagatccacaatcaactgatcccaaattgtctttctacctctttgttaatccgtttcctgttcttgattatagatatttatgtgtccacttgaaagggcttttaattgcttctgcctattgaattctacccattcaggcagggccaatattaattgtaattttctacraagagtatgctctgactccctgctaaaagtgacccttttcacctaaagtctcacaatactctgcaatattataggatacttactatatacagatatatagtggttatttttgtatatggctcatgttcccaactagattttaatatgcttgtgtcatagttcatgtcctttacgtatttctatttcccacagtctttgaatgtcatcatgccttgcaaataaaaacttcctaatttaatgaaccgtgaacttacaagtttgccgttctcttgctggtttcttaatagtttctttaattcactaatcacacaataatcttccaatatatggagtattttaaatcccttctctgccaactaatactatataatcttgggcaacttaatatctctg

SEQ ID NO: 873368 - DNA, 600 bp, Homo sapiens
agttctcatctgagacaaggcaagtcccttctgcctatgagcctgtaaaatcaaaagcaagttagttacttcctagatacaatggggttacaggcattgggtaaatatagccattccaaatgtgagaaattggccaaaacaaaggggctacaggccccatgcaagtccgaaatccagtggggcggtcaaatcttaaagctccaaaatgatctcctttgactccatgtctcatatccaggtcacgccgatgcaagaggtgggttcccatggtcttgggmagctccactcctgtggctttgcaaggtacagcctccttcctggctgctttcatgggctagtgttgagtgtctgtgacttttccaggtgcacagtgcaagttatcagtggatctaccattctagggtatggaggatggtggccctcatctcacagctccattaggtggtgccccagtagggactctgtgtgggggttctgacctcatgtttccctcccacactgccctagcagaggttctccataagagccccagcccagcagtaaacctctgcctggacatccaggcacttccgtacatcttctgaaatctaggcagaggtt

SEQ ID NO: 873369 - DNA, 633 bp, Homo sapiens
catctctctcaagttcaaagttccacaaatctctagggcaggggcaaaatgccaccagtccctttgctaaaacataacaagcatcacctttgctccagttcccaacaagttcctcatctccatctgagaccacctcagcctggactttattgtctatattgctatcagcattttggacaaagccattcaacaagtctctaggaakttccaaactttcccacatttttctgtcttcttctgacccctccaaacaattctaccccgtgctgttacccagttccaaagtcacttccacatttttgggtatctgttcagcagtgccccactctaccggtatcaatttatggtattagtctgttttcacactgctgataaagacatacccaagactgggaaatttataaagaaagacttggacttacagttccgtgtggttggagagccctctcaatcatgcaagaaggtgaaaggcacatattacatggaggcagacaagagaagagagcttgtgcagggaaactcccccttaaaatacatcagatctcgtgagactcattagttatcacaagaagagtatgggaaagacctgaccccatgattcagttacctttcactgggtgcctcccacaacac

SEQ ID NO: 873370 - DNA, 633 bp, Homo sapiens
catctctctcaagttcaaagttccacaaatctctagggcaggggcaaaatgccaccagtccctttgctaaaacataacaagcatcacctttgctccagttcccaacaagttcctcatctccatctgagaccacctcagcctggactttattgtctatattgctatcagcattttggacaaagccattcaacaagtctctaggaagttccaaactttcccacatttttctgtcttcttctgacccctccaaacaattctaccccgtgctgttacccagttccaaagtcacttccacatttttgggtatctgttcagcagtgccccactctaccggtatcaatttatggtattagtctgttttcacactgctgataaagacatacccaagactgggaaatttataaagaaagacttggacttacagttcygtgtggttggagagccctctcaatcatgcaagaaggtgaaaggcacatattacatggaggcagacaagagaagagagcttgtgcagggaaactcccccttaaaatacatcagatctcgtgagactcattagttatcacaagaagagtatgggaaagacctgaccccatgattcagttacctttcactgggtgcctcccacaacac

SEQ ID NO: 873371 - DNA, 600 bp, Homo sapiens
acccagacctagagggctgctgcttttctgagaaaagatgaaacttacaagctcttacacaagctaactaagatcagaattgaaacccctggcttgtaatgaggcctattttaatgttctgtgaattttctttgattcacctgtgttttatcacrgttgttcacaaaatctttttgaagaggcaaacagttttttagctttaccagggggaagtgaacaggagtgtgtttccacttttggatgctgacacgatggtggcagtggtaagcaaagtgattccactgagaaaagagaaacgagcaacaatgtctgggcatttggttggctttcttctctctcatgaatattgtttttctactactaaaactttggaggttctaaattttttaaaaaatgattcgttatgacttaacttctattctagaatagtgctgactgatgaaaaatataagatgagccacatatatttgtattttctaataggcatgttttaaaaataaaatagatgaaactaattttcacaatgtattttatttcactcgatatatctccaatattataatttcaacatgtgtctctagtcacaactcaagtgtcaat

SEQ ID NO: 873372 - DNA, 600 bp, Homo sapiens
acccagacctagagggctgctgcttttctgagaaaagatgaaacttacaagctcttacacaagctaactaagatcagaattgaaacccctggcttgtaatgaggcctattttaatgttctgtgaattttctttgattcacctgtgttttatcacagttgttcacaaaatctttttgaagaggcaaacagttttttagctttaccagggggaagtgaacaggagtgtgtttccacttttggatgctgacacgatggtggcagtggtaagcaaagtgattccactgagaaaagagaaacgagcaacaatgtctgggcatttggtyggctttcttctctctcatgaatattgtttttctactactaaaactttggaggttctaaattttttaaaaaatgattcgttatgacttaacttctattctagaatagtgctgactgatgaaaaatataagatgagccacatatatttgtattttctaataggcatgttttaaaaataaaatagatgaaactaattttcacaatgtattttatttcactcgatatatctccaatattataatttcaacatgtgtctctagtcacaactcaagtgtcaat

SEQ ID NO: 873373 - DNA, 596 bp, Homo sapiens
caccgatgcaaaaggtgagctcccatagccttgggcagctccacccttgtggctttgcagggtacatcccccgctcctgcctgctttcataggtgttgagtgtctgcagctttttcaggtgcatgctacaactgtcggtggataccattatgsggtctggaagatggtggccctcttctcacagatccacaaggcagtgtctcagtgggcactccgtgtgagggttccaacaccacatttctcttctacactgctttagctaaggttctccatgagggccccacccctgcagcaaacttctgcctggagatccaggcatttccatacatcttctgaaatctaggtggaggttcccaaacctcattcttaacttctctgcaccaacaggcccaacaccacatgtaagctgccaagacttggggcttgcaccctctgaagcaatggcctgagctgtacattgaccccttttagccatggctgaagttgaagcagctgggatgcagggcaccatgtcctgaggctgcatagaagagtagggcactgggcccagcccacagaattatctttttctcccaggcctccagtcctgtgatggg

SEQ ID NO: 873374 - DNA, 596 bp, Homo sapiens
caccgatgcaaaaggtgagctcccatagccttgggcagctccacccttgtggctttgcagggtacatcccccgctcctgcctgctttcataggtgttgagtgtctgcagctttttcaggtgcatgctacaactgtcggtggataccattatgcggtctggaagatggtggccctcttctcacagatccacaaggcagtgtctcagtgggcactccgtgtgagggttccaacaccacatttctcttctacactgctttagctaaggttctccatgagggccccacccctgcagcaaacttctgcctggagatccaggcatttccatacatcttctgaaatctaggtggaggttcccaaacctcattcttaacttctctgcaccaacaggcccaacaccacatgtaagctgccaagacttggggcttgmaccctctgaagcaatggcctgagctgtacattgaccccttttagccatggctgaagttgaagcagctgggatgcagggcaccatgtcctgaggctgcatagaagagtagggcactgggcccagcccacagaattatctttttctcccaggcctccagtcctgtgatggg

SEQ ID NO: 873375 - DNA, 510 bp, Homo sapiens
ttcaaacctctgcctgttacccagttccaaagtcacttccacattttcgggtatctttacagaagcaccccactacccagtaccaatttactgtattagtctgttctcatattgttaataaagacatacccaagactgagtaatttataaaggaaaggaagtttaaaggactcacagttccacctggctggagaggtctcacaatcatggcagaaggcaaaggaggaacaaagtcacgtcttacatggcagcaggcaagagagcatatgcagaggaattgccctttataaaaccatcagatctcgtgagacttattcactatcatgagaactgcacaggaaaaacccacycccatgattcagttacctcccactgggtccctcccatgacatttgcggattatgggaactacaattcaacatgagatttgggtggggacacagccaaaccatatcactttgtaaaagagtttatgacatcatcctcataacttaccgagtgtgatattct

SEQ ID NO: 873376 - DNA, 574 bp, Homo sapiens
agcacaggagatagtttctatgatatttttaaatctgagcattgattgtatgccatctccagctttgaactggttggaaatatggaaagaagtcacgtattgacatcttattttaaagktagtgacagttgttcatcttttagatgtaaagctgttacagagataatatatatttccttggttttatagtttggctagaactcttcaattacatcattttgtagacagcctcggtgtaacaggttaccaagaggctggattcctatagtaccataccagaaagatacaggttttttttttttttttttttttaacattcctgcaccatgattacatcaatagattttaataaaatagtttaactggcagaggttcagagatggaagtggtatccacaggtatagctagctaagtcctataaagtcataaaactgtgtttgatagaagttatactgctattctagtcatgtgcaatgaataagaaaaatttgatgtgtatgcatgaaaatattcaaagaaacagaacccattcttagaaattatataatgacagatcagaggcaggatgtatatc

SEQ ID NO: 873377 - DNA, 694 bp, Homo sapiens
aaagacatatatttggtaaagttcatggaaaagtgtctagcttcttaaaagagattccaacatacctgtaataaagtagaccaaaacaggtaatcacagacacagctcaaaactccacatggattggccaatttaatgaaaaaaacttgacatgatcttgttgatggaaacaaagaaatgataatactgtctgcttacttgaaaaattattcactgttcagaaattaatagataccaatgaaagtcataggttaaaaacaagcatcattaaaaaacaaacattaatcttcagcaacactcaggtaaatgcatagtaaggccaaaaatggatatcattttatacccacttgatatggtttggctatatccccacccaaatctcatcttgaattgtagttctcataatccccacatgtcatgggagggatctgatggaaggtaattgaatcatgggagtggttctcccatgctgttctcatgatmgtcactgagatctgatgggtttatatggggcctttccccctttgctcagcacttctccttcctgctgccattggaggaaggacgtgtttgctttcccctccagtatgtttgcaagttgcctgaggcctctccagccatgcttaactgtaagtcaattaaatctttttcctttataaattacccagtcttgggtatgcctttattagcagca

SEQ ID NO: 873378 - DNA, 645 bp, Homo sapiens
aaacttacacattgttgctggtggggatgtaaattaggataatcactttggaaaactatttaggcttatcttgtaaacataaacacatgcattccctatgaccaataattttttctcatgcataagtcctagaaaaactcttacacatgtgaaccaagagatatgtataggaatacttctagttgtattgttcacaatggcaaaaacctggaaatatgccaaatatcccttgacaagaaatggatgtgtatactttgttatattcatacaatggattatacaactgtgaaaatgaatgaaatacaactggatgcaacaacacaaacycagcttcgaaatacagtcttcccttagtattcgaggaggattgattttagaatctcccacagatgctcaggtgtctgctataaaatggctgtagtatttgcctataacctatgcaaatcatcttgtgtactataaatcatctctagatcacttataatacctaatagaatatgaacgctacataaatagttgtgatactgtattgtttagagaataatgacaagcaaaaaagtctatacattttcagtacaggtgaagtttttaattttttgaatatttttgatccacggttggatgaatccatgtgatatggtttgg

SEQ ID NO: 873379 - DNA, 645 bp, Homo sapiens
aaacttacacattgttgctggtggggatgtaaattaggataatcactttggaaaactatttaggcttatcttgtaaacataaacacatgcattccctatgaccaataattttttctcatgcataagtcctagaaaaactcttacacatgtgaaccaagagatatgtataggaatacttctagttgtattgttcacaatggcaaaaacctggaaatatgccaaatatcccttgacaagaaatggatgtgtatactttgttatattcatacaatggattatacaactgtgaaaatgaatgaaatacaactggatgcaacaacacaaacccagcttcgaaatacagtcttcccttagtattcgaggaggattgattttagaatctcccacagatgctcaggtgtctgctataaaatggctgtagtatttgcctataacctatgcaaatcatcttgtgtactataaatcatctctagatmacttataatacctaatagaatatgaacgctacataaatagttgtgatactgtattgtttagagaataatgacaagcaaaaaagtctatacattttcagtacaggtgaagtttttaattttttgaatatttttgatccacggttggatgaatccatgtgatatggtttgg

SEQ ID NO: 873380 - DNA, 666 bp, Homo sapiens
aggtgattggatcatggggaaagtttaccctatgctgttcttgtgatagtgagtgagttctcatgagatctgatgattttataagtgttggacagttcctccttcacactcattcctctctctctcacctgctgccatgtaagacatgcctgcttccccttctgctatgatagtaagtttcctgaggcttcccaagccatgctgcactgtgagtcaattaaacttctttttttttataaattactcagtcttgggcagttctttatagcagtgtgaaaatggactactatatcatggttgcggaacctacagatatatcctgtaaaatgttgagtgaaaaaagcaagtttcaggaaattgcacatagtataatgtcatatttatgaagctgaaaccaaacaaattgaaataatacattcrttaaggatgtacagtcagcatcattttgtctcaaggatttgcacatccactctacatgggtcctaaaatgaatcccctgcagataacaaggggtttgtctttcaagaccaatggtaatgttattgttattaaattggtgatgggtttggtaggtagtggttcatatttgtcttattattttgctttctaaatatacctatgttacttattttatatgtatcaaataatatggaaaagtaatattgc

SEQ ID NO: 873381 - DNA, 590 bp, Homo sapiens
tatgtctatatttgtttatgtgagtatataatagcagggtaattttgcacaaactaaaacatagaaaatatttgattataagtggaatatttttatgtacgtgtatctttggagttgtttattaaatttgaaaccaacagactcatattcactatgttctttctgttaaaatggaagagttgtctccactgctattcaaagccaacccatccatcatggtctggatcttattccctctcatgagctttcgtcctgccattctcccctctcactcctgaatcttccacttcaccctctctaccagatcatttccatttcacacacacatcgtcctgtatctccccaaccctacgtgctcccatagctgctacccagtttttgttctccctttcatagcaaagcttattggaagaggtttctatattcattgtrttcacttctttatctctttatctcactccagagggtcttctgttcctcctactttcctcccacttcactgtagctgctgttttcaaggtcaccaagccttgcttgcatgctgccaagtgtaatggttacttgtttaagctcatcctattcaaccccta

SEQ ID NO: 873382 - DNA, 530 bp, Homo sapiens
tgagaatcctcttcatgagtcaactttaaagtttgtccaaaaattaacatatgagacatttaggttttctctaaggtaaaaatacatgtcatgcattcacaagcaaccacaagtttattaaagaatagccagcattctgttttctaggggaagacaaagcaaatggccagaatgactcttgggggagaagggagtragacacaaagtgggagcattcacagtgcaaaaaagaaatagtagaatagatctattggaatgcatgacaaagacctgaatagccagaaaggtctataaattactatacacagatcactgtcactgaagaatccatcgattgcaaaatgtgaaaatttctgaaatagaaagctgagtaatacatttctcagttgggaaaatgggtgccagcttctgaaagaggaaaacatttaagaacagagcagcatctatgccttatttatttatttttggttgttatagaaaatagaaaggaaggaataagttgaattcagctgatagtattcagagctaag

SEQ ID NO: 873383 - DNA, 577 bp, Homo sapiens
atttgattgttctctcttttcttctttgttagtctggctagtagtctatctcttcaaaaaaccagctcctggatttattcattttttgaagggttttttgtgtctctatctgcttcagttctgctctgatcttagttatttcttgtcttctgttagctttcraatttgtttgctttgcttctctagttcttttaattgtgatgttagggtgttgattttcgatctttcctgctttctaatgtggtcactgagtgctttaaatttccccctacacactgctttagctgtgttccagagattctggtatgttgtatctttgttctcactggattcaaagaacttatttatttctgccttaatttggttatttacccagtagtcattcaggagcaggtttttcagtttccatgtagtcatgcagttttgagtgagtttcttaatcttgagttgtaatttgattgcactgtggtctgagagattgttatgacttccgttcttttgcatttggtgagaagtgttttacttccaattatgtggtcaattttagaataagtgtgatgtgttgctcagaagaatg

SEQ ID NO: 873384 - DNA, 658 bp, Homo sapiens
tgctgcacccatcaacccatcatctacattaggtgtttctcctaatgctgttcctcccctagcctcccaccgcctgacaggccccggtgtgtgatgttcccctccctgtgtccatgtgttctcattgttcagctcccacttatgaatgagaacatgcggtgtttggttttctgttcgtgtgtcagtttgctgagaatgacagtttcccttctgttcttattcttatcatccaaagtggaacacttctcagtgaagggtgtgttgttgacagctcatctaggacagtggctttgcctggatttgattctggcaaaccaggctgtgtgatcattgtacttatggagtttgaatttctggaggaagttattggagaattttaatkggtgatatatcatatttaatctcctgtgactgttgtgtggagagtagaccctacaatagagtaactaacatcagttagttggagatggggtgagtgaagcctattgatggacagcggtaagatgaaggtaacactggattcttcctttgttattgattagtgttagacctggttgagattggtgtataaatactactgacccgtcaccacacacacacacacacacacacacacacacacaccaatttgcttacttttagaggccccatgctacat

SEQ ID NO: 873385 - DNA, 632 bp, Homo sapiens
ggctggagtgcagtggcgtaatctcggctcactgcaacttccacctcccgggttcaagtgattctcctgcctcggcctcccgagtagctgggactacaggcgtgcgccaccatgcctggctaatttttttttttttgtatttttaatagagacggggtttcactgtgttagccaggatggtctcgatctcctgacctcgtgatccacccatctcagcctcccaaagtgctgggattacaggcatgagccactgcgcctggccaacttttatttcttatctattggaactcagcagttggagccacattcttatgcttatgtgtataataatttttcttagttaatggtgtgataatgtagttatttgtgcctgatctctccaatattgtaagctctgttcatagrcgttcccctttgaatcctccaaataattggtagcagaaattcagtattgttttttgagccgaactgaattgcttcaacatcttagaataactgaatctccaatatattaccattattttgtcttttactcccattatgttcttgtctgaacagttaactttaacccaaacagtaatgaaaacacagaattcttctctactgcagtaaccattgctttggtgttcttg

SEQ ID NO: 873386 - DNA, 609 bp, Homo sapiens
gggttgtgtgtcggaattctgtctctagaaggtcctcagcagtgcagtggaaagggcaatggcctagagctcagatatgtggccttgtcaggtctgggttattttggagaacacacattgaacttgggaattagtctgtactttagtcctgattgtgccgtgtggtagacatacttaggcttccatttcctcatttctcagggagtgataaaaatgcctgttccacctgcctcccaggatggtggtgatgattaaatgtcatgatgtagggaaaaagtgctgaggaaaccacagggctctcaaggaagtttctctgatgagaattttgagtgtacaatggtgcgtgagaacagtggggctgaccttggagatgtgaggaggatggatgyggatgtgaagagcagcaggtttgctttatttcatttttgtttttggcagcagcttgtttcctctaccatcgcttcactggtgaagtataatgttccactgtctacctggtgttgtactgcctagtgctgaatgctctaggatttcactggaatttgtccctgccaaattccttggattcactctccccaaaactctcatctctttggtgaaatgagttgt

SEQ ID NO: 873387 - DNA, 625 bp, Homo sapiens
atgttctcactcataggtgggagttgaacaatgagaacacttggacacaggcccccatcacacactggggcctgttgtggggtggggggagaggggagggagagcattaggagatatacctaatgtaaatgacaagttaatgggtgcagcwcaccaacatggcacatgtatacatatgttaagaaacctgcatgttgtgcacatgtaccccagaactgaaactataatttaaaaataatagtaataataaaaaagaaatttacataataagaaacaaatatttgctcatgtagctataatttctgatgcttttcattcctttgaatagaggtagatttcactgggtgtcatttccttccgcctgaagaatttccattagcatttctttgtgatatggttctgctactgatttcttttagcttttgcatgtctgaaaagctctttattttgccttcatttgtgaaaatctgatttccctgagtacaaatactatagaactatttcagtacttttattttatttccgtattttagaaaagctatacttgttttcttgattgcatttctttcaatgaggaatatgctttcattcttttctcattctttgttagtttgtatctcatgtg

SEQ ID NO: 873388 - DNA, 532 bp, Homo sapiens
tctctttattttgagcttatatgtgtctttgcatgtaagatgggtctcctgaatacagcacaccaatgggccttgactccttatccaatttgtcagtccgtgtcttttaattggagcatttagcccatttacatttaaggttagtattgttatgtgataatttgatgctgctatcatgatgctatttggttattttgcacaccagttgattcagtttcttcatagcatcattgatctttatactttggtgtgttttgtagtggctgatacagttttcctgccatatatagtgcttctttcaggagctcttgcagagcaggcccagtagtaatgaamtccctcagcatttgcttgtttggaaaggattttatttctcctttgcttatgaagcttaggttgcctggatatgaaattctaggttaacagttcttttctttaagaacgttgaatattgccccccaatctcttctggcttgtagagtttctgctgagaggaccactattagtttgatgggcttccatttgtagacaa

SEQ ID NO: 873389 - DNA, 633 bp, Homo sapiens
ttaagaaacaatgaaatactctaaaatcattgacttgaatggtttaactaggaaaattgtattttatgtcaatcatatatcaataaaattatttcaaaaatggcagacgagttctaagttatgacccaatgaatcacctggatgccaaacatatttttcattttacctatcatttaataataaccctatctctttcttctgatgattacagtcactatctctgccaagatagtgacttttttcttccctgcttgtttttagtattaggagactaacattatgtggcagccataccttgaaatttgctgaaattctggccgtcatccctggtagaagtgtatcctcrtggggaacctagactttcagatctgaagagactacagttgtagatatggcaagcccacattcaccaagtcagtcactgagagtaacggtaattacagtcattcctacttccatctcttggttctgaagcttacttattttagataatgaggaaagataccacattattatattgatttagtgtgtatattgttcctaaaatatggtgccccatctgagcagggtgttgttaccaacctagcttctgtaacatgcctcaattttccatttcttcatatcctttcctgt

SEQ ID NO: 873390 - DNA, 618 bp, Homo sapiens
cacacaccattggttgtttctctggagaactttgactaataaagcatcataaggtaacataaagatcttcactctttttgcttacccccctcatttatgcacacgccttttctgtagacctctctgtctcagtcttctaagctgtctgcttctaggcccctgataaacaaagcaagtctttccccactgccaatgagttcatatatgttgtcatctatggaaactattcttgccacacaatatgaatgaccaagtatatcacctgaagctctgcccacatgaaaattcctcttcaccaatgtcattcatgaccacttcttcagaaatgaagtctactaaacatgttgcttatttctttatggggggagttgtgagatactgtaatttgggtttctttatgtttgaggaacatttcagaacaccccaggtcattggacccccaaacaatgcacttatcgatacgttgagtcccaraaacattatagagtatatttctcacactcttgagtgtatgagctttaagaaggcccaccttatacagtagaattagcgcatttttaatttgcaaccacaagccaatgtactcataatctttttcttggcctttgccttcaatat

SEQ ID NO: 873391 - DNA, 591 bp, Homo sapiens
ctcaaatatgttttccacattgcttgctttctctccctgtcttcggggacaccaatgagtcataggtttcatctcttcatataatttcatatttcttggaggttttttcattaatttttattattttttctttatttttgtctgactgcattgatttgaaaaatctatctatgagttatgagagtctttcctcagctcggtctattctgctattaatacttgtgattgtattatgaaattatcgtagtgagtttttttttaacctctatcagatcaatttggttcttccttaaaatgactctctcatctttcagctcttgtattatcttaytggattccttagattcctggattgggattgggtttcaactttctcttgaatctcaatgatctttgttcctatacagatgctgaattctatgtctgtcatttccaccctttcagcctggttcagaaccattgcatggggaactagcatggtcattaggaggtaaggagacactctagacttttgagttgccagagttctttccctggatcttttccatctgtgtgaaatgatgttcctttcatcattgaagttgctgccct

SEQ ID NO: 873392 - DNA, 621 bp, Homo sapiens
ctcttttatcatcataaatttgttttaacctgttccttaatggcatataaatgaaactacatagcatgcttttgctcaaaatagtgcttgtgaggttcatccaggttgctgtatgtatacttcaattattattattgctgagtagtattccattgcctggatatatcacaaattatttatccattcttctgctgaatatttgagttatttgcagtttaggcctataataartgaagccgctaggaacatttatgtgttcctcttattttggttgcatgcaatcatttctcttggtataaacctagcagtgtattttctgggtcaactggcttaggtttaggttaactgtattcgtttacaccattttatactcccgtcagcaatatatgagttccaggtattctgcatcctcaccaacacttggagcctttctggtaggtgtgtagtggcattgcattgtgctttcaatatgcatttttctgctgactaatgcactcctttttatatgcctattattcacatatctccttttatgaagtaggtattcaagtcttttattcacattttatgttttgttatggccacatctcacttccagaatctgtattggttatctatcgc

SEQ ID NO: 873393 - DNA, 619 bp, Homo sapiens
agggctgaggcttatggttttcagttgaatgtagctgtgcttacagtaggctctaccctctcccagtagacctccaggcagaggggtgcaggagtgagagctgactgttacagtttaggaattttgcaacctggtggtcaaacacagccattatttaagcttaaattatatgccattattgtataaattatataaaaattatatattgaaaacaaaggtaataaatactcaaaaaccatcaattcttaattgtcttactacactttgctgctgttcttgaggttatttggtgcctgtstgggggaaataccacataatcatgtactgctacatgtcctgcccaactccacattcagtgacgtcagccatgaaatcagctgcggttggagtttttacatcatagaattacaaatattgaaagccagggcttgatttattatttttttgattgtgtagatttaagaaatggttgaaccatggaatgctatgtagtcataaaaaatgaaattatgtcctttgcagcaacatggatgcagctggagttcattatcctaggcaaatcaatgcaagaacagaaaaccaatacagcatgtaacttgtaattgggagctagacatga

SEQ ID NO: 873394 - DNA, 619 bp, Homo sapiens
agggctgaggcttatggttttcagttgaatgtagctgtgcttacagtaggctctaccctctcccagtagacctccaggcagaggggtgcaggagtgagagctgactgttacagtttaggaattttgcaacctggtggtcaaacacagccattatttaagcttaaattatatgccattattgtataaattatataaaaattatatattgaaaacaaaggtaataaatactcaaaaaccatcaattcttaattgtcttactacactttgctgctgttcttgaggttatttggtgcctgtctgggggaaataccacataatcatgtactgctacaygtcctgcccaactccacattcagtgacgtcagccatgaaatcagctgcggttggagtttttacatcatagaattacaaatattgaaagccagggcttgatttattatttttttgattgtgtagatttaagaaatggttgaaccatggaatgctatgtagtcataaaaaatgaaattatgtcctttgcagcaacatggatgcagctggagttcattatcctaggcaaatcaatgcaagaacagaaaaccaatacagcatgtaacttgtaattgggagctagacatga

SEQ ID NO: 873395 - DNA, 577 bp, Homo sapiens
atcattgaaaaccaagctttttcttctttcgttttttatttttttattttactgtaagttctgggatacatgtgcagaacgtgcagatttgttacatagctatatgtgtgccctgcggtttactgcacctgttgacccatcctctacattccttctcctcaccccccacctgtttatgtgatggattacatttattgatttgcatatgttgaaccaggcttgcatcccagagataaaggtgacttgatcatggtagataagttttttgatgtgctgccggattgggtttgccagtattttactgaggatttttgcatctatgttcatcaggatattggcctgaagttttcttttttgttgtgtctctgccaggttttggtatcaggatgatcttggcttcataaaatgagttaggaaggtgcccctccttttcaattgyttggaatagtttcagaaggaatggtaccagctcctctttgtacctctggtagaattcggctctgaatccttctggtcctgggctttttttctttggtcagctattaattactacctcaatttcagaacttgttattgg

SEQ ID NO: 873396 - DNA, 584 bp, Homo sapiens
acatgtaaaagaaaataagacttgtggagattagaaatcaaaatgaaaacatatagagaatagaggaatagatggagatttttaaaaatactaatgaagaaatatttgataaaataaggaaaataaaatcacccaatttaaagaaagctgaaagtggtccatacagagcaaaaaacactagacaaaaaacctcacccctaggcatattgtagtaaaatgtaataacataaaaaacaagataaaattctgaaagcttccaaaatgaaaaagtagacatattggagaaaaaaaacaagaattacatttgaaagaagcaagaagtcaatacagtattatttctaatctgcagaaggaacatatctgtgatygtagaattttatatttgccaatatgtcatttaaatctgatgagaaaaaaatattctcagacttctaagatatcacaaagtttgccaagttcccaccttcaaattcctccttagacaagatattaaaacaaaaacagggttaatttcgggaggataattgaagagatctggacaataaatttcatcaaatcccttttaaaaatgtctaacaaacaaa

SEQ ID NO: 873397 - DNA, 616 bp, Homo sapiens
taatttgattgcactgtggtctgagagactgtttgttgttatttcagatcttttgcatttgctgaggaaggttttacttcccattatgtggtcgattttagaataagtgccatgtggcactgagaagaatgtatattctgttgatttggggtagacagttctgtagatgtctatcaggtccacttggtccagagctgagttcaaatcctgaatatccttrttaattttctatctcattgatctgtctaatattgacaatggggtgttgaagtctcttactattattgtgtgggagtccatgtctctttgtaggtctctaagaacttgctttatgaatttgggtgctcctgtattgggtgcatatatatttaggacagttagcatttcttgctgcattgatccctttatcattatgtaattccttctttgtctgttttgatctttgttggtttaaagtctgttttgtcagagactaggattgcaacccctgctttttttttttctttctgcttggttgataaattttcctccacccctttattttgagcctatgtatatctttgcacatgagatgggtctcctgaatacagcacatcgatgggtcttgactctttat

SEQ ID NO: 873398 - DNA, 681 bp, Homo sapiens
ttaacatttccgctaacgaaagttaccttgctgagaaaaggtgaaatgattgtcatttttgggggaataaacattgtgatttagaaactcaggtgcatgtaaatctttagtgttcataactttaacccctgctgctggtggagattgctgacccttgctagttaaagagaagataactataaatagagccaccaaaagtgagaggtatggcaaagtagcctttagtcattcggggtgtttgtagattctcattatttttttaaacacmtttattgaggttgtacaccacaaaattcacccatcttaagtgtacgattcgatgactttaagtaaatttacagagttgtgaggccattgttggaattcagtggtagaacagtttcatcaccccgaaaagatccccatgcccatccattcctctcactctttgtttccttcttcagtctcagactaccaccaatatgctttctaatctatagatttgccttttttggacatttgccataaatagaatctcatgtacttttctgacagtgtggggaagaaaaaaagcctttttctcatgaacacatagcaatggaggggtctggtctcattgccatcaacatctagaatgtaacaggagacagatgtggcggtgaatcttgggagaatcatttaatattgaagtctgttttctgt

SEQ ID NO: 873399 - DNA, 588 bp, Homo sapiens
tatgcaatttcaatatgatgaggtaaggtgtgtgggagcaaaacactatggaaacacagagggaaggtacctgctttatgcaagcctacataagaagaatttcaaaaggtagagatatttataacatacctaaaggataaatttggaaaaaaaaaaaaaaaaaagaaagaaaggctgggcatggtggttcacacttgtaatcccagcactctgggaggccaaggaggtgaatcacgaggtcaagagattgagaccatcctgggcaacatggtgaaaccctgtctctactaaaaatacaaaaattagctgggcgtggtggcgcacacctgtaataccaactactcagtaggctgaggcaggagaattgcttgaacgggagaggcggggattgcaccmctgcactccagcctggtgacagagcgagagtctgtgaaaaaaaaaaaaaaaaaaaagagggcaaggtctatgaaaggtcaataggcctgaaggcaagtccacacttggctagatggaggacataaaaaaaaaaaaaattaggttaaataatagcaaaagggtgcaggagtgatgagggagaagtaagttcaa

SEQ ID NO: 873400 - DNA, 704 bp, Homo sapiens
ttcaaaaccaatcatgtgttcccaacagtcccccaaagtcttagctcatttcagcactaactcaaaagtccataatccaaagtctcatccaagacaaggcaagtcccttccaccttgagcctgtaaaatcaaaagcaagttagttacttcctagacacaagtattgggtaagtacagccattcaaaatgggataaattggccaaaatgaagggactacaggccccaggtatgtccaaaatccagtggggcagtcacatcttaaagctccaaaattatctcctttgactccatgtctcacatccaggycactgtgatgcaagagatgggttcccatggtcttgggaagctctgcctctgtggctttgcagggtacagcctccctattgactgctttcacaggctggcattgagtgtctgtggcttttccaggtgcatggtgaaaactgtcagtggatctaccattctgaggtctcgaggatggtggctatcttctcacagctccaccaggtggtgccccaatgggaacactgtgtgagggctccaaccccacatcttccttcttcactgccctagcagaggttctccatgaaatccctgatcctgcagcaaacttctgcctgggcatccaggcatttccatacatcttctgaaatctaggtggaggtttccaaaccccaattctagacttctgtgcacttgtggg

SEQ ID NO: 873401 - DNA, 683 bp, Homo sapiens
aaatagtgacaacaccaaatgctgatgaggtatggaaaaactggatttctcaagcattgctggagggaatgtaaatgttgagctattttggaaaactgatagtttcttttaaaactaaacattcaactacaatgtggcccaatcattgtactcctaagcatttatttcagagaaatgcacccttatattcacaaaaagcctgtacatagttgtttatagaagttttatttgaaatagacagaaactggaaacaacccatatgtctttcaatgggtgaatgtttaaataaactgtgatacatccaaaccatgaaatactattcagcaatagaaaagaatgaactactgtattgatacatgcaataacttcgatggatctcctggaattatgctgagtgaaaaaagctaattctagtaggtcatatactatgtgatcccacytctatgacatacttggaatgtcaaaattatagaaatgaagagaagattagttgttgccacctgttggggacagcgttggagagatggaagtggttgtggtttaaaaggcaacacagggaatccttgcaatgatggaactgttctgtattgttctgtatctttactataccgatatcaaaatcctgtttgtggtatcatactagagttgtgaaagatgttatctttggggaaaaataggtaaag

SEQ ID NO: 873402 - DNA, 680 bp, Homo sapiens
aaatatttgcaaactacacatctgagaagggactaataactagaatgcataagctaaaacaactcaataggaaaaaaaaatcaaataacctaacaaaaaaagtgggcaaaagagctgaatagacatttccttagaaaactggcaygagacaagtatgccctctctcaccactcctattcaacatagtattggaagtggctggcccagggcaatcaggcaagagaaagaaataaagagtatttgaataggaagagaggaagtcaaattgtctctgtttgcagataacatgattgtatatttagaaaacctcatcatctcagcccaaaatcttcttaagctgataagcaacttctgcaaagtctcaggatacaaaatcaatgtgcaaaaatgacaagcattcctatacaccaataatagacaagcagagagccaaataatgcgtgaactcccattcataattgctactaagagaataaaatacctaggaatacaacttacaagggatgtgaaggacctcttcaaggagaactacaaaccactgctcaaggaaataagagaggacacaaacaaatggaaaaacattccatgctcatagatagaaagaatcaaaatcgtgaaaatggccatactgcccaaagtaatttatagattcagtgctctccccatcaagctaccactga

SEQ ID NO: 873403 - DNA, 614 bp, Homo sapiens
gttttgatttccattgctatgatgacaagtgatgaggagcattttttcatgtgcttgctggctgcataaatgtcttcttttgagaagtgtctgtcatatcctttgcccactttttgatggggttgtttgtttttttcttgtaaatttgtttgatttctttgtagattctagatattagccctttgtcagatgggtagatttcaaaatttttctctcattctttaggttgccttttcactctgatggtattttcttttgctgtgcagaagctctttagtttagttagatcttatttgtcrattttggcttttgttgccattgcttttagtgttttagtcatgaagtccttgcccatgcctatgtcctgagtggtattgtctaggttttcttctagggtttttatggttttaggtctaacatttaaatctttaaatcatcttgaattaatttttgtataaggtgtaaggaagggatccagtttcagctttctacatatggctagccagttttcccagcaccatttattaaatagggaatcctttcttcatttcttgtttttgtcaggtctgtcaaatatcagatgattgtagatgtgtggtgttatttctgaggcc

SEQ ID NO: 873404 - DNA, 591 bp, Homo sapiens
ctcactaccatgagaacagcatgggggataccatccccatgatccaattgtctcccaccaggttattccctcagcatgtgaggattacaatttgagatgagatttgggtggggacacaaagccaagccatatcattctgcccatagcccctcacaaatctcatatcctttttacaattcaaaaccaataatgccttcccaacartctcccaaatcttatctaattccagaattagctcaaaagtctaagtacaaaatctcatctaagataaggtaagtcccttccacctatgagcctgtaaaataaaaaacaggttagttacttccaagatacaatgggggtacaagcattgggtaaatgttcccaatacaaatgggagaaattggccaaaactacggagctacagtacccacgcaaattcaaagcctgttaggacactgattaaatcttaaagatccaaaataatctccttcgactccatgtttcacatccagggcacgctgaagcaaggggtaggctcccaacgccttgagcagcttcaactctgtggctctgcagggttcagcccctgcagctgctttcacaggctgg

SEQ ID NO: 873405 - DNA, 648 bp, Homo sapiens
tttttcaccataggcctcaaagcactcccaaatatcccttcacagatatttccaatacagtgtttccaaactgctcaatcaaaaaaagggtttaactatgtgagaagaatagacacatcacaaaacggtttctgagaaagcttctttctattatatatctgaagatatttcatttttcatcataggacttaaagcactccaaaatgtccccttgcagatactaccaacacagtgtttccaaactgctcaatcaaaagaaaggtttaactctttgagatgaatgctctcatcacaaggcagtttctcagacagcttctttctgaagatatttccttttccaccataggcctcaaagtgctcccaaacatccctttgccgaatctataaagtcagtgttgccaaactgttcaatgaaaggaaaggtttaattctgtgagatgaatgcactcattccaaagcagtttctctgaaagcttctttctagttttctstgaagatatttcatttttcaccataggcctcaaagcactctcaaatatcccttcgcagattctataaagccagtgatgccaaactcgtcaatcaaaggaaaggtttaactctgtgagatgaatgcacacatcaataaacagtttcttagaaagcgtc

SEQ ID NO: 873406 - DNA, 559 bp, Homo sapiens
ctttagatagaccagcatttaaacactcctttttgtagaatctgcatgtggatatttcgaacacattgaagaattcgttggaaacgggtatcttcacatgaaaagtagacccatgcattctccgaaagttcactgggatgtgtgcattcaactcacagacttgaaactttcttttgatagagcagtgtagaaacacgctttttgtacaacctgcaagagttcctttggagcgctttgttgcctatggtggaaaaagaaatatcttsaaataaaagctagacagaaggattctcagaaacccctttggatgtgtgagttcaattaacagagtagaacctttctattgatagatcagttttaaaacactgcttttgtagaatctgcttgtggatatttggagctctttgaggaattcgttgtaaatggaataccttcatatacaaactagacagaagcattctcagaaactgctatgtgatgtgtgtattcaactcacacagttgaaacttccttttgagagagcagttttgaaagtctttttgtagtatctgcaagtgga

SEQ ID NO: 873407 - DNA, 605 bp, Homo sapiens
tccaaactgctcaatcaaaggaaactttcaactctgtgagatgaatgcacacatcacaaagaagcttctcagaataattctgtgtagtttttatgtgaagatatttccctttccacaataggcctcaaagcgctccaaatatacatttgtagattctacaaaaagagtgtttacaaactgctcaatcaaaagaaacattcaattccctgagatgaatgcacactttgcaaagragtttctcagaatgattttgtgtagtttttatgtgaagatatttccttttccaccattggccccaaaggctccaaatgtccacttgcagattctacaaaaagagagtttctgctctatcaaaagataggtttaactctgtgagttgaatgcacacatcccaaagatgtttctcagaatgcttctgtgtagtttttatgtgaagatatttccttttccacagtaggtcaaagtgctccatatatccccatgcagattctacaaaaagagtgtttcaaaactgctcaatcaaaagaaaggttcaactctttcagatgaatgcacagatcaaaaagaagttcctcagaatgcttctgtgcactttttatgtgaaa

SEQ ID NO: 873408 - DNA, 605 bp, Homo sapiens
tccaaactgctcaatcaaaggaaactttcaactctgtgagatgaatgcacacatcacaaagaagcttctcagaataattctgtgtagtttttatgtgaagatatttccctttccacaataggcctcaaagcgctccaaatatacatttgtagattctacaaaaagagtgtttacaaactgctcaatcaaaagaaacattcaattccctgagatgaatgcacactttgcaaaggagtttctcagaatgattttgtgtagtttttatgtgaagatatttccttttccaccattggccccaaaggctccaaawgtccacttgcagattctacaaaaagagagtttctgctctatcaaaagataggtttaactctgtgagttgaatgcacacatcccaaagatgtttctcagaatgcttctgtgtagtttttatgtgaagatatttccttttccacagtaggtcaaagtgctccatatatccccatgcagattctacaaaaagagtgtttcaaaactgctcaatcaaaagaaaggttcaactctttcagatgaatgcacagatcaaaaagaagttcctcagaatgcttctgtgcactttttatgtgaaa

SEQ ID NO: 873409 - DNA, 605 bp, Homo sapiens
tccaaactgctcaatcaaaggaaactttcaactctgtgagatgaatgcacacatcacaaagaagcttctcagaataattctgtgtagtttttatgtgaagatatttccctttccacaataggcctcaaagcgctccaaatatacatttgtagattctacaaaaagagtgtttacaaactgctcaatcaaaagaaacattcaattccctgagatgaatgcacactttgcaaaggagtttctcagaatgattttgtgtagtttttatgtgaagatatttccttttccaccattggccccaaaggctccaaatgtccacttgcagattctacaaaaagagagtttctgctctatcaaaagataggtttaactctgtgagttgaatgyacacatcccaaagatgtttctcagaatgcttctgtgtagtttttatgtgaagatatttccttttccacagtaggtcaaagtgctccatatatccccatgcagattctacaaaaagagtgtttcaaaactgctcaatcaaaagaaaggttcaactctttcagatgaatgcacagatcaaaaagaagttcctcagaatgcttctgtgcactttttatgtgaaa

SEQ ID NO: 873410 - DNA, 611 bp, Homo sapiens
gattctacaaacacagtgtttcctaactgtccttgtgaaagaaggacttaaatctgtgacatgaatgcacatagcagaaagcattttctcataatgcttctttccagtttttatctgaagatatttccttcttcaccattggcctttttgtgatacctaacatcctttcacagattctaaaaaaacagtgtttccaaactgyccaatcaaaagaaaagtttaactctgtgagataaatgcatacatcaaaaagaagtttctcaaaaagcttctttctcgtttttatctgatgatatttccttcatcaccataggcttcaatgcattcccaaatatcccatcacagattctaaaaaaacagtgtttccaaactgctcaatgaaaaaacaggttaaactctgtgaattgactgcatacatcacaaagtagtttctcagaaagcttctgtcttgttattctctgaagatatttccgtttccaccacaggcctcaatgcactcccaaatattccctcatagattctacaaaaacagtgtttctgaaatcttccatcaaaagaaggatttaactctttgagacgaatgcacacatcagaaagcagtttcccattgt

SEQ ID NO: 873411 - DNA, 611 bp, Homo sapiens
gattctacaaacacagtgtttcctaactgtccttgtgaaagaaggacttaaatctgtgacatgaatgcacatagcagaaagcattttctcataatgcttctttccagtttttatctgaagatatttccttcttcaccattggcctttttgtgatacctaacatcctttcacagattctaaaaaaacagtgtttccaaactgtccaatcaaaagaaaagtttaactctgtgagayaaatgcatacatcaaaaagaagtttctcaaaaagcttctttctcgtttttatctgatgatatttccttcatcaccataggcttcaatgcattcccaaatatcccatcacagattctaaaaaaacagtgtttccaaactgctcaatgaaaaaacaggttaaactctgtgaattgactgcatacatcacaaagtagtttctcagaaagcttctgtcttgttattctctgaagatatttccgtttccaccacaggcctcaatgcactcccaaatattccctcatagattctacaaaaacagtgtttctgaaatcttccatcaaaagaaggatttaactctttgagacgaatgcacacatcagaaagcagtttcccattgt

SEQ ID NO: 873412 - DNA, 611 bp, Homo sapiens
gattctacaaacacagtgtttcctaactgtccttgtgaaagaaggacttaaatctgtgacatgaatgcacatagcagaaagcattttctcataatgcttctttccagtttttatctgaagatatttccttcttcaccattggcctttttgtgatacctaacatcctttcacagattctaaaaaaacagtgtttccaaactgtccaatcaaaagaaaagtttaactctgtgagataaatgcatacatcaaaaagaagtttctcaaaaagcttctttctcgtttttatctgatgatatttccttcatcaccataggcttcaatgcattcccaaatatcccatcacagattctaaaaaaacagtgtttccaaactgctcaatgaaaaaacaggttaaactctgtgaattgamtgcatacatcacaaagtagtttctcagaaagcttctgtcttgttattctctgaagatatttccgtttccaccacaggcctcaatgcactcccaaatattccctcatagattctacaaaaacagtgtttctgaaatcttccatcaaaagaaggatttaactctttgagacgaatgcacacatcagaaagcagtttcccattgt

SEQ ID NO: 873413 - DNA, 608 bp, Homo sapiens
tgggctcccaaattcgtttttgcagttactacaaaaacagtgtttccaaactgataaaataaagaaagttttatctctgtgagatgaatgcacacatcacaaaacagtttctgaaaaagcttctttccagtttttatttgaagatgtttcccttttcaccataggcttcaatgtgctcccaaaaatcccttcgtagattctgcaaaaacagtgtttccaaactgcttaatcaaaaaaaagttttaactctrtgagatgaattcacacatcacaaagtattttctgagaaagcttctgtctagctcttctcagaagatatttccttttccaccataggcctcaatatgctcccaaatacccctttgcagattctacaaaaacagtgtttccaaattattccatcaaaagaaggacttaactctgttagatgaatgcacccatgagaaaccagtttttataacactgctttccagtttttaactgaagacatttcctttttcaccataggcttaaatttgatcccaaatatcccttcacatattctacaaatacagagtttccaaactgttccatcaaaagaaggacttaactctgtgagatgaggtcac

SEQ ID NO: 873414 - DNA, 548 bp, Homo sapiens
gttactacaaaaacagtgtttccaaactgataaaataaagaaagttttatctctgtgagatgaatgcacacatcacaaaacagtttctgaaaaagcttctttccagtttttatttgaagatgtttcccttttcaccataggcttcaatgtgctcccaaaaatcccttcgtagattctgcaaaaacagtgtttccaaactgcttaatcaaaaaaaagttttaactctgtgagatgaattcacacatcacaaagtattttctgagaaagcttctgtctagctcttytcagaagatatttccttttccaccataggcctcaatatgctcccaaatacccctttgcagattctacaaaaacagtgtttccaaattattccatcaaaagaaggacttaactctgttagatgaatgcacccatgagaaaccagtttttataacactgctttccagtttttaactgaagacatttcctttttcaccataggcttaaatttgatcccaaatatcccttcacatattctacaaatacagagtttccaaactgttcca

SEQ ID NO: 873415 - DNA, 608 bp, Homo sapiens
tgggctcccaaattcgtttttgcagttactacaaaaacagtgtttccaaactgataaaataaagaaagttttatctctgtgagatgaatgcacacatcacaaaacagtttctgaaaaagcttctttccagtttttatttgaagatgtttcccttttcaccataggcttcaatgtgctcccaaaaatcccttcgtagattctgcaaaaacagtgtttccaaactgcttaatcaaaaaaaagttttaactctgtgagatgaattcacacatcacaaagtattttctgagaaagcttctgtctagctcttctcagaagatatttccttttccaccataggcctcaatatgctcccaaatacccctttgcagattctacaaaaacagtgtttccaaattattccatcaaaagaaggacttaactctgttagatgaatgcacccatgagaaaccagtttttataacactgctttccartttttaactgaagacatttcctttttcaccataggcttaaatttgatcccaaatatcccttcacatattctacaaatacagagtttccaaactgttccatcaaaagaaggacttaactctgtgagatgaggtcac

SEQ ID NO: 873416 - DNA, 616 bp, Homo sapiens
atattctacaaatacagagtttccaaactgttccatcaaaagaaggacttaactctgtgagatgaggtcacacatcagaaagcagtttcttgtaacgcttctttccagttttcatctgaagacgtcttcttgttcaccataggcttttttacactacctgatattgcttcacagattttgataraacagtgtttccaaactgctcagtaaaagaaagtttgatctctgtgagtcaaatgcacaattcacaaaacagtttctcaaaaagcttctttctagtttttatccaaagatatttcctatgtcaacataggcttcaatgtgctcctaaatatcccttcacagattctacaaaaacactgtttccaaactgctctatcagaaaacaagtttaactctgtgagttgaactcatacatcacaaagcagtttctcaaaaagcttcttcctagtttttatctgaagatatttcctttttcaccataggcttcagcgagctcccaaatatacctttgcatattatacaaaaacagtttccaaaaggctcaatcaaaatacaggtttaactctacgagatgaaggcacacatcacaaagctgtttctcagatagcttgtc

SEQ ID NO: 873417 - DNA, 596 bp, Homo sapiens
acactgtttccaaactgctctatcagaaaacaagtttaactctgtgagttgaactcatacatcacaaagcagtttctcaaaaagcttcttcctagtttttatctgaagatatttcctttttcaccataggcttcagcgagctcccaaatatacctttgcatattatacaaaaacagtttccaaaaggctcaatcaaaatasaggtttaactctacgagatgaaggcacacatcacaaagctgtttctcagatagcttgtctagttcttctctgatgatatttccttttccaacataggcctcaatgtgctctgaaaaaaaaaagtgtttccgaactgttccattaaattaaggattgaactctgtgagatgaaagcacacatcagaaagcagtttcccataacgcttctttccggtttttatctgaaggtatttacttgttcaccataagctattttatgctacctagcatcacttcacagattatacaaaagcagtgtttccaaactgctctgtcaaaagagaagtttagctttttgagatgaatgcatacatcaaaaagcagttcctcaaaaagcttctttctagtttttatcc

SEQ ID NO: 873418 - DNA, 596 bp, Homo sapiens
acactgtttccaaactgctctatcagaaaacaagtttaactctgtgagttgaactcatacatcacaaagcagtttctcaaaaagcttcttcctagtttttatctgaagatatttcctttttcaccataggcttcagcgagctcccaaatatacctttgcatattatacaaaaacagtttccaaaaggctcaatcaaaatacaggtttaactctrcgagatgaaggcacacatcacaaagctgtttctcagatagcttgtctagttcttctctgatgatatttccttttccaacataggcctcaatgtgctctgaaaaaaaaaagtgtttccgaactgttccattaaattaaggattgaactctgtgagatgaaagcacacatcagaaagcagtttcccataacgcttctttccggtttttatctgaaggtatttacttgttcaccataagctattttatgctacctagcatcacttcacagattatacaaaagcagtgtttccaaactgctctgtcaaaagagaagtttagctttttgagatgaatgcatacatcaaaaagcagttcctcaaaaagcttctttctagtttttatcc

SEQ ID NO: 873419 - DNA, 645 bp, Homo sapiens
tctcagaggtctttttactttttatctaaggttatttccttttccaccatatgcttcaatgcattcccaaatatctcttcgcaaatttttccaaaacagtgtttccaaactgctcaaccaaaagaaaggtttaactctgtgagatgaaagcacacatcacaaagcagtttttcagaaagcttctttctagtttttgtccgaagatatttcctttatcactataggcttcaatatgcttccaaatctcccatcgcagattctacaaacacagtctttccaaactgctcaatcaaaagaaaggattaactgtcaggtgaatgcacacatcagaaakcactttctcagaaagcttctttctagtttgtatgtgaagatatttcctttttcaccataggcctcaacgtgctccgaaatatcccttcacagattcaacaaaaacagtgtttccaagatgctttatcaggagaaattcagccaaatatcgggtgaaatttacccccgacatttctagtaggttcttttttattttcccttagtgtcatctggtctgagaaataaagggataaaatataacagagagaaattttaaagctgagtgtccaggggaggcatcacatgtcggcacattccatgatgccccctgag

SEQ ID NO: 873420 - DNA, 613 bp, Homo sapiens
caaagagctcccaaatatcccttctcaaattctacaaaaacagtgtttccaaactgcccaatcaaaacagttttaactctatatgctgaatgcacacatcacaaagcagtttctcagaatacttctttctagtttttatctgaagatatttccttttttaccctcagccttaaaatactcccaaatatcccttcttaagtaattcaaaaaragtgttgccaaagtgcccaatgaaaagaaaggtttaactctgtgaggtgaatgcactcttcacagagcagtttcttagaatgcttctttctagtttttatctgaagatatttctttttccaccataggactcaaagagtgcacaaatattccttcacggatcctaacaaaacagtgtttccaaagtgctcaatcaaaagagagttttaactgttacagatgaatgagcacatcataaagcagtttcccagaaagattcttttaatttttatctgaagatatttcgtttttcaccataggcctcaaatcactccaaaatattccttctcagattgtaaaaaaatcatgtttcctaacttctcaatcaaaaaagggttaactctatgaaattagtgtactcatt

SEQ ID NO: 873421 - DNA, 613 bp, Homo sapiens
caaagagctcccaaatatcccttctcaaattctacaaaaacagtgtttccaaactgcccaatcaaaacagttttaactctatatgctgaatgcacacatcacaaagcagtttctcagaatacttctttctagtttttatctgaagatatttccttttttaccctcagccttaaaatactcccaaatatcccttcttaagtaattcaaaaagagtgttgccaaagtgcccaatgaaaagaaaggtttaactctgtgaggtgaatgcactcttcacagagcagtttcttagaatgcttctttctagtttttatctgaagatatttctttttccaccataggactcaaagagtgcacaaatattccttcayggatcctaacaaaacagtgtttccaaagtgctcaatcaaaagagagttttaactgttacagatgaatgagcacatcataaagcagtttcccagaaagattcttttaatttttatctgaagatatttcgtttttcaccataggcctcaaatcactccaaaatattccttctcagattgtaaaaaaatcatgtttcctaacttctcaatcaaaaaagggttaactctatgaaattagtgtactcatt

SEQ ID NO: 873422 - DNA, 687 bp, Homo sapiens
tttacaggaacagtgtttccaaaatgcttaatcaaaaatgaaattaaactctgggagaagaatgcacacatcacaaagtggtttctgaggggcttctttctagtatttatcagaagatgtttcctttttcaccataagcctcaaagtgctccaacaaatcccttctcagattccacaaaaacaatgtatccacactaatcaatcaaaagaaaggtttaactgtgtgcaaagaatgcacacatcacaaaycagtttctcagaaatttctttctagtttttctctgaagatatttcctttctcaccataggcctcagggctcccatatgtcccttcacaaattctacaaaaacagtgtttccaaactgcacactcaaaagaaaggttcaactctgttagatgaatgcacacatcacaaagcagtttctgagaaagcttctttctggcttttatctggagatatttcctttttcaccataggcctcaatgcacttccaaatgtcccttcacagatttaaaaaagcagtgtttccaaactactcaatcaaaagaaaggtttacttctgtgagctgaatgcactcatcacagagtagtttctcagaaaacttctttctagtgtttatgtgaagatatttcctttttcaccatgggtctcaaagcactgaaaaatgcccctttgcagattcta

SEQ ID NO: 873423 - DNA, 687 bp, Homo sapiens
tttacaggaacagtgtttccaaaatgcttaatcaaaaatgaaattaaactctgggagaagaatgcacacatcacaaagtggtttctgaggggcttctttctagtatttatcagaagatgtttcctttttcaccataagcctcaaagtgctccaacaaatcccttctcagattccacaaaaacaatgtatccacactaatcaatcaaaagaaaggtttaactgtgtgcaaagaatgcacacatcacaaaccwgtttctcagaaatttctttctagtttttctctgaagatatttcctttctcaccataggcctcagggctcccatatgtcccttcacaaattctacaaaaacagtgtttccaaactgcacactcaaaagaaaggttcaactctgttagatgaatgcacacatcacaaagcagtttctgagaaagcttctttctggcttttatctggagatatttcctttttcaccataggcctcaatgcacttccaaatgtcccttcacagatttaaaaaagcagtgtttccaaactactcaatcaaaagaaaggtttacttctgtgagctgaatgcactcatcacagagtagtttctcagaaaacttctttctagtgtttatgtgaagatatttcctttttcaccatgggtctcaaagcactgaaaaatgcccctttgcagattcta

SEQ ID NO: 873424 - DNA, 572 bp, Homo sapiens
gaagcagtctcaggaactgctttgtgatgtgtgcattcaactcacagatttgaattttccttttgagagggaggttttgaaacagtctttttgtagtatctgcaagtggatatttgtagtgacttggggcctcagatggaaaaggaaataccttcacatacaaagtagacagaagtattctcagaaactccattgtgatgtgtgcactcaactcacagagttgaascttccttttgagagagcagttttgaaacagtctttttgtaatgtctgcaagtggatatttggagcgattcgagtactgtgatggaaaaggaaatatcttcacatacaaactaaacagaagcattctcagaaacgtcttgtgaagtgtgccttcacctaacagagtggaaccgttcttttgatagagcagttttgaatcagtcttttggtaggacctgcaagttttcatttggagcgctttgaagcctatggtggaaaagggaatatcttcacaaaaaactaggcagaagccttctcaggaacttcattgagatgtgtgcattcaactaacagagttgaaactgtct

SEQ ID NO: 873425 - DNA, 564 bp, Homo sapiens
ttcagataaatactagaaagaagctttctcagaagttgttttgtgatatgtgcattcttcccacagagttaaatatttcttttgatttagcaatttggaaacactgtttttgtagaatctgttgcgggatgtatgggagtgcattgaggcctatggtgaaaaaggaaatatcttcagagcaaaactacaaagaaactttctgagaaactgctttgtggtgcatgctttcttctcacagaatttagactttcttctgattgagcagcctggaaacactctttttgtagaatctttgaaggaatatacgagagcgcatttagscctatggtgaaaaaggaaatatcttcagataaaaactggaaagaagctttctcagaaacttctttgtgatgtttgcattcttctgacagagttaaacctttcttttgatttaacagtctggaaacactgttttggtagaatctgtgaagggatatgtgggatcgctttgaggcctatggtgaaaaaggaaatatcctcagagaaaaactagaaagaagctttctgggaaactgtgatgtgtgc

SEQ ID NO: 873426 - DNA, 564 bp, Homo sapiens
ttcagataaatactagaaagaagctttctcagaagttgttttgtgatatgtgcattcttcccacagagttaaatatttcttttgatttagcaatttggaaacactgtttttgtagaatctgttgcgggatgtatgggagtgcattgaggcctatggtgaaaaaggaaatatcttcagagcaaaactacaaagaaactttctgagaaactgctttgtggtgcatgctttcttctcacagaatttagactttcttctgattgagcagcctggaaacactctttttgtagaatctttgaaggaatatacgagagcgcatttaggcctatggtgaaaaaggaaatatcttcagataaaaactggaaagaagctttctyagaaacttctttgtgatgtttgcattcttctgacagagttaaacctttcttttgatttaacagtctggaaacactgttttggtagaatctgtgaagggatatgtgggatcgctttgaggcctatggtgaaaaaggaaatatcctcagagaaaaactagaaagaagctttctgggaaactgtgatgtgtgc

SEQ ID NO: 873427 - DNA, 636 bp, Homo sapiens
gtggattcatcttactgagttgatccattcttttgattaagcagtttgaaaacactctttttgtagaatctgcaaatggatatttgcggttctttgatgtctatggtggaaaaggaaatatcttcacataaaaaatacacagaagcattytgggaaacttcattgtgatgtgtgcattcaactaacagagttgaacgtatcttttgattgagaagttttgaaactcactttttgtacaatctgcaattggatatttggagacctttgcggcctatgttggaaaaggaaatatcttcacataaaaactgcacagaagctttctgagaaacttctttgtgatgtgtgcattcaactcacagacttgtacctatcttttgattgagcaattttgaatctctctctttgtagaatctgcaagtggatatttggagccccttgcggtctacggtggaaaaggaaatatcttcatataaaaaatacacagaagcattctgagaaaattctttgtgatcagtgcattcttctcacagagttgagcttttctttctattgagtattttgaaaaactctttttgtacaatcagcaagtggataattgtagtgctttgaggtctattgtggaaaaggaaatatctt

SEQ ID NO: 873428 - DNA, 636 bp, Homo sapiens
gtggattcatcttactgagttgatccattcttttgattaagcagtttgaaaacactctttttgtagaatctgcaaatggatatttgcggttctttgatgtctatggtggaaaaggaaatatcttcacataaaaaatacacagaagcattttgggaaacttcattgtgatgtgtgcattcaactaacagagttgaacgtatcttttgattgagaagttttgaaactcactttttrtacaatctgcaattggatatttggagacctttgcggcctatgttggaaaaggaaatatcttcacataaaaactgcacagaagctttctgagaaacttctttgtgatgtgtgcattcaactcacagacttgtacctatcttttgattgagcaattttgaatctctctctttgtagaatctgcaagtggatatttggagccccttgcggtctacggtggaaaaggaaatatcttcatataaaaaatacacagaagcattctgagaaaattctttgtgatcagtgcattcttctcacagagttgagcttttctttctattgagtattttgaaaaactctttttgtacaatcagcaagtggataattgtagtgctttgaggtctattgtggaaaaggaaatatctt

SEQ ID NO: 873429 - DNA, 601 bp, Homo sapiens
tagaaagaagcattctgagaaactgctttgtggtgtgtgcattcatctcacagagttaaaattttttttttgattgggcagtttggaaacactgtttttgtagaatctgcaatgcaatattttggagtgcttttaggggtatggtgaaaaaggaatatcttcagataaaarctagaaagaaactttctgagaaacagctttgggatgagtgcattcatctcacagagttaaacctttcttttgatcaagcagtttggaaacactgtttttatagaatctgcaaagggatatttgggaatgcattgaggcctgtggtgagaaaggaaatagcttcagatgaaaactagaaagaagatttatgagaaactgctttgtgaagagtgcattcatctcacagacttaaacctttttttgattgaggagtttggaaacggagtttttgtagaatctatggagggatatttgggaatgaattgaggcctatggtgaaaaaggaaataccttcacatataaactagagagaagctttctgagaaactgctttgtgatgtgtgcattcatctcacagaggtaaacgtttcttttcattgagcagtttgga

SEQ ID NO: 873430 - DNA, 637 bp, Homo sapiens
gtttctgagaaacagctttgtgatgactgcattcatctcacagacttaaacctttcttttgattgagcagtttggaaacactgtttttatagagtctgtgaagtgatatttgggaacgcattaaggcctatggtgaaaayggaaataccttcagatgaaaactagaaagaaggtttatgagaaacttctttgagaagagtgcagtcatctcacagacttaaacctttcttcttattgagcagtttggaaaacactgttcttgtagaatctgcaaagggatatttgggaacttattgaggcctatgttgtaaaaggagatatcttcagatgaaaactagaaagaatctttctgaaaaactcctttctgatgtgtgcattcttctaagagaattaaaactttctattgaatgagcagtttggtaacactgtttttgcagaatctgtgaagacatatttaggaacgcattgaggcctatggtgaaaaaagaaatatcctcagaaaaaaacgagaaagatttctgagaaatagcattgtgatgtgtgcattcatcccacagagttaaacctttctttagttgaacagtttggaaacactctttttgtagaatctgtgaaaggatatttcagagaccattga

SEQ ID NO: 873431 - DNA, 637 bp, Homo sapiens
gtttctgagaaacagctttgtgatgactgcattcatctcacagacttaaacctttcttttgattgagcagtttggaaacactgtttttatagagtctgtgaagtgatatttgggaacgcattaaggcctatggtgaaaacggaaataccttcagawgaaaactagaaagaaggtttatgagaaacttctttgagaagagtgcagtcatctcacagacttaaacctttcttcttattgagcagtttggaaaacactgttcttgtagaatctgcaaagggatatttgggaacttattgaggcctatgttgtaaaaggagatatcttcagatgaaaactagaaagaatctttctgaaaaactcctttctgatgtgtgcattcttctaagagaattaaaactttctattgaatgagcagtttggtaacactgtttttgcagaatctgtgaagacatatttaggaacgcattgaggcctatggtgaaaaaagaaatatcctcagaaaaaaacgagaaagatttctgagaaatagcattgtgatgtgtgcattcatcccacagagttaaacctttctttagttgaacagtttggaaacactctttttgtagaatctgtgaaaggatatttcagagaccattga

SEQ ID NO: 873432 - DNA, 608 bp, Homo sapiens
cacttccagattctacaaaaagagagtttcaaaactgctccatcaaattataggttcaactctgtgagttgaacgtacacatcacaaaagtttctcagaatgcttccatctagtttttatgtgaagatatttccttttccatcatagggctcaaagcactccaaatatccacttgcagattctgcaaaaacaatgtttccaaactgctcaatcaaaagaaaggttcaactctgtgagatgaatgaacacatcagaaaggagtttctcagaatgattwtgtgtagtttttatgttaagatatttcctttcccaccataagccataaatggctccaaatatccaattgcagattctacaaaaagagtgattcaaaactgcttaatcaaaggaaaggttcaactctgtgagttcaatgcacacatcacaaagagtttctctgaatgcttctgtctagtttttatgtgaagatatttccttttccatcataggactcaaagcgctccaaatagccactagcagattctacaaaaagattgtttgctaagtgctcaatgaaaacaaaggttccactccatgagatgaatgcatacatcacaaagtagttactc

SEQ ID NO: 873433 - DNA, 670 bp, Homo sapiens
caaaagacaggttcaactctgtcagatgaattcacacatcataaagaagtttttcagaatgcttctgtctcatttttatgtgaccatatttccttttccaccatagacctcaaagctctcaaaacatccacttgcagattctgcaaaacgagtgtttccaactgctcaatgaaaacaaagcttcaactctgtgagatgaatgcacagatcagaaagaagtttctcagaatgcttttgtctagtttttatgtgaagatatttccttttccaccatgagtctcaaaatgctccaaatatccacytgtagaaacgacaaaaagagtgtttcaaaactgctccatgaaacgaaaggttcaactttgtgagttgaatgtgcacatcacaatgaagtttctcagaatgcttctgttttatttttctcttaggatatttcctttaccaccacagacttcaaagccctccaaatacccacttgcagattctacaaaaagaaagtttcacaactgctcaaaagaaaggtacaactatgggagacaaatgtacacatcacaaagaagtttctcagaatgcttctgtctagtttttatgtcaagataattccttttccaccataggcctcaaagcgctccaaatatccaattgcagattttagaaaaagggtgtttcaaaa

SEQ ID NO: 873434 - DNA, 632 bp, Homo sapiens
aatgcttctgtctagtttttatgtcaagataattccttttccaccataggcctcaaagcgctccaaatatccaattgcagattttagaaaaagggtgtttcaaaaatgctcaatgaaaataaagtttcaactctgtgagatgaatggacatatcagaaagaagtttgtcagattcttctgtctagwttttatgtgaagatatttccttttccaccataggcctcaaaacgcttcaaatatccacttgtagaatctacaaaaagagtgtttcaaaactgctcaatccaaagaaagtttcaagtatgtgagtggaacgcacacatcaaaatgaagtttctcagaatgcttctgtgtagtttatatgtgaagatatttacttttccatcaaaagcctcaaagcgctccaaaatatcctcttgcagattctacaaaaagagtgtctcaaaactgctcaacgaaaacaaagttttaactctgtgtgatgaatgtacacatcagaaagaagtttctcagaatgcttctgtcttgtttttatgtgaagatattgcctttaccaccataagcctcaaagtgctccaaatattcacttgcagaatatacaaaaagcatgtttcaaaactgctcaatgaaac

SEQ ID NO: 873435 - DNA, 631 bp, Homo sapiens
atttcctttttcaccattggcctcaaagcacccaaaatatcccttctcagattctacaaaaacagtgttgcaaagctgctcaataaaaatgaagttttaacacagagagatgaatgcacacataacaaagcagtttcccagaaagtttctttccagtttttctctgaagatatttcctttttcaccatagcccacaatgcaattccaaatatctgtttgcagatcctgccaaaacattgtttccaaactgctcaagcaaaagaaagcttgagctttcttttcacaaarcagtttatcagaaagcttctttctagtttttatctgaagatacttcctttttcaccataggtctcaatgcacttccaaatagcccttcccagattgtacaaaaatagtgttttcagactgctcaatcaaaaggaagttttaactctgtgagatgaatgcacacatcacaaagcaggatgtcagaaaatttccctctagttttactctgaagatagtttatttttcaccctaggactcaaggtgctctcatatatacattctcacattctacaaaaactgagtttccaatctgctcaatcaaaagaaagtttaactgtgttagaagaatgcacacatcacaaag

SEQ ID NO: 873436 - DNA, 660 bp, Homo sapiens
aatgtattggtccattctcatgctgctatgaagaaatacccaagactgggtaatttataaagaaaagaggtttaattggctcacagttctgcattgctagggaggtctcaagaaacttacaatcatggcagaaggcaaaggagaagcaggaaccttcttcacagggtggcaggacagagtgagcacaagcaggagaaaagccagatgtttataaaaccatcagatgtcatgagaactcactcactatcatgagaagagcacaggggaaactgacccatgactcaattacctcyacctcgtcttgcccttgatatgtggagattatgggaattacaattcaagatgagatttgggtggagacacaaacctaaccatatcattctgcccatggcccctcctaaatctcatgtctccttcacatttcaaaatcaatcatgtcttcccaatagttccccaaagtctttattcattccagtactaacccaaaagtctaagtccaaagtctgatctgaaacaaggcaagtcccttctgcctatgagcctgtaaaatcaaaagcaaattagttacttcccagatacaatgggggtcacaggaattgggtaaatacacccattccaaatgggagaaattggccaagatgaaggggctatgggccccat

SEQ ID NO: 873437 - DNA, 589 bp, Homo sapiens
atcaaaaagtgggcaaaggatatgaacagacacttctcaaaagaagatacttacgcagccaacaaacatatggaaaaaagctcattatcactagtcattagagaaatgcaaatcaaaaccacaatgatataccatctcacgccagttagaatgtaatcatcaaaaagtcaggaaacaacagatgctggagaggatatggagaaataggaacacttttacactgttggtgggagtataaattagttcaaccattgtggaagacagtgtggagattcctcaaggatctagaaccagaaataccatttgacccagcaatctcattactgggtatatacccaaagcatcataaatcattctattataaggacacatgcacacgtatgtttattgcagcactattcacaayagcaaagacttggaaccaacacaaatgcccatcattgatagactggataaacaaaatgtggtacatatacaccatgaaatactatgcactcatttaaaaggatgagttcatgtcctttgcaggcacatggatgaagctgaaaccatcattctcagcaaactaatgcaagaacagaaaaccaaa

SEQ ID NO: 873438 - DNA, 559 bp, Homo sapiens
ttctctgtacttctcttgcagggggaatgtcagatgtcagatatttcaggatgtaagactgaagtgtgtggtagtggaggcagacgggtccctcagagaacaaggcagcaaataagtatacaccttgcaattttcatccatctgggttgtgggtaacacacagaagtgccctggactcctaaataccctgcasagtggtctaacccttgtgatgcttggggaggacacctggcttctaggtccccaggaatacacggaatctagaagggagcccatgttctgtgctatttcccatgatgaccctggaagcttccccaacccaccccctctcctccaccatctgggcttgtgtctggtccagttctgtgcctgcacagcaagatcatctctcctgaatactttaatagttggcttgcaggtccaggtaaggaaaaccaagagccacttgtcttcacgcagcccctcaggcttgcctgtgaagctgagaggagatggggaagctggcactcctgaaacggttaaaagccccagcacaggagtaagaagtggcaactcactg

SEQ ID NO: 873439 - DNA, 682 bp, Homo sapiens
gtaaactcaatgatgtttgtccaatgaagccataatggtggagttgatgataaacagacataggagttttctgggtcttcttaacccatgcctgggaagctgttgtagaatttcttagcatggtcattgggtattaggggagggaatgttaggggtctatatgagaatctaaaatctgtattaagaatccatcaatgcctataatcccagcactttgggagaccgaggcaggaagactgcttgagtccaggagttcaagaccagcctgggcaacagagcaagacctcaactctatttaaaaaaaaaaagaatcaayccaaggtgacaatcttttatggcttgtgaccctagataatatagaacagttctttccctgtgggaggctggggagggtgtggagtcctagggaagaggggtgcctcttcccaggttcttcatcttagttggggtccctccacttggctcaagtcttgggggcatactgtatgaagctgaagaaccaagaagctgtaaaaaagaaagtgctcaggggctagcactctctcaccatctcaaatggactgtaggatccatctatctgtgtatggctcctctctcttgatgaggcagacatttccagagcctcatctgtattcctcagagctttccgtgtgcttctgatcattgcagctgccagtatatc

SEQ ID NO: 873440 - DNA, 627 bp, Homo sapiens
ccctggaaccttgcatcctacacgtaatttgtcactcatgctagctttgtcactgttgagaagtgaatgtttctgtgttcttagtcctgcttcttctcttttgagggactccttactaggtccttcccaagggagggataattactgattagattctacatgttctggacagagcttagaatatgccttggatcttgttttattagttggttgggtggttactgtgagtcaatggttggagcttgtgtgaggccttctcttctgttttcctaggagggcctgaccaggttgctttctctctttttatttcttctgaagataaaattgagcatctaagcttgttaccacaaagcggccccaatctasatcccaagagagagttcctggacctcatgcaagaaagaattctaggtgaggctatagagtaaagtgaaagcaagtttattaggaagtaaaggaataaaaaatggctactccataagcatagcagcagcctgaactgctcgactgaatatacttatagttatttcttgattatatgctaaacaaacggtggattattcatgagttttccaagaaaggagtgggggctttctggaactgagggtccctccccttttagactat

SEQ ID NO: 873441 - DNA, 603 bp, Homo sapiens
tgagaatgatgatttccagcttcatccatgtccctacaaaggacatgaactcatcattttttatggctgcatagtattccatggtgtatatgtgccacatttgcttaatctagtctaccattgttggacatttgggttggttccaagtctttcctgttgtgaatagtgccgcgataaacatacgtgtgcatgtgtctttatagcagcatgatttataatcctttgggtatatacccagtaatgggatggctgggtcaaatggtatttctagttctggatccctgaggaattgccacactgacttccacaatggttgaactagtttacagtcctaccaacagtgtaaaagtgttgctatttctccatatcctctccagcacctgttgtttcctgacttaaagtttttaagagctaagcttctgtatccactgacagaaatgcaatacytagtttatgatgacttgaaacaaaacaaatacccataaggaaaaagctgtattttatctaaatttactttcagtcaatagttaagtagcgttttcctcccagtactatatataaggctgttcttgggagccagacggtttaggtaataaggtagcc

SEQ ID NO: 873442 - DNA, 579 bp, Homo sapiens
gcagaaacaaagctttgctccagaatgcagatgctatgactctccttttgtgacttgccagagactccacatagtgttcttattcaccttggctacctgtatcaccattggctctactagatagtagggcctgagtgtcagggcaatttatatacagtctaaatttgctatagagttctcccttgctgtagatccacttaaaacwgtcacttcagagttacctgacaaatgtaatattcctaaatattgagtatgttgctttcaaaatcaaaaaggttttgaaaggcttgtgctttattcttggttttttgaagtacaacttacaacagctttcattattacctttaaatggaattcccagcattgcccagatctttagatccttggaatattcacaaatgtgggagacttatgaatttctgtggagttttctgcagcatgacattctccagaatgtcaagttgattgaggttcccatagattgtattttagcagagagcaatagagttaatgtggctctgaggcaagataatgattgtgtattgaatactttccatgtgcaagtgaatggttttgacc

SEQ ID NO: 873443 - DNA, 631 bp, Homo sapiens
tgaaaagagataaacgtgttgatgggaagctttagtgataaagatagaaatggcattttacattttttgtttgaaaacagaataacaaagattgtaaaacctgtcaagaaagaaatgtagaatgaagcatgtttggtaaataagtttgtatacatgatgacaaaattaatawctggaaatttgaaaacagttattttgttgattcttccacattgtggcaataacaggcttgatattcccttctctttaaatagataatccttttcttgattcccccagggaaatcaatattaggataatacattgaaatacagatgtatatttcagtgatgagatatgcttgcaaaaataattggtatttattattagttatatataagatcttagttcactagtatccatttccttgatttaatgaaaaatattttgctgtgggcattgtcttcacaaagggacatggtcttgtccatggcctaagattttatctgccaaagtttgcatgttgagacttcctcatatgttagccacatagtaggatacagactgtttctggtattttcatcaccttttccttgtagattaccccccaaaatcagcaacttcagccatccagatcacgcaccttctgaaa

SEQ ID NO: 873444 - DNA, 631 bp, Homo sapiens
tgaaaagagataaacgtgttgatgggaagctttagtgataaagatagaaatggcattttacattttttgtttgaaaacagaataacaaagattgtaaaacctgtcaagaaagaaatgtagaatgaagcatgtttggtaaataagtttgtatacatgatgacaaaattaatatctggaaatttgaaaacagttattttgttgattcttccacattgtggcaataacaggcttgatatycccttctctttaaatagataatccttttcttgattcccccagggaaatcaatattaggataatacattgaaatacagatgtatatttcagtgatgagatatgcttgcaaaaataattggtatttattattagttatatataagatcttagttcactagtatccatttccttgatttaatgaaaaatattttgctgtgggcattgtcttcacaaagggacatggtcttgtccatggcctaagattttatctgccaaagtttgcatgttgagacttcctcatatgttagccacatagtaggatacagactgtttctggtattttcatcaccttttccttgtagattaccccccaaaatcagcaacttcagccatccagatcacgcaccttctgaaa

SEQ ID NO: 873445 - DNA, 631 bp, Homo sapiens
tgaaaagagataaacgtgttgatgggaagctttagtgataaagatagaaatggcattttacattttttgtttgaaaacagaataacaaagattgtaaaacctgtcaagaaagaaatgtagaatgaagcatgtttggtaaataagtttgtatacatgatgacaaaattaatatctggaaatttgaaaacagttattttgttgattcttccacattgtggcaataacaggcttgatattcccttctctttaaatagataatccttttcttgattcccccagggaaatcaatattaggataatacattgaaatacagrtgtatatttcagtgatgagatatgcttgcaaaaataattggtatttattattagttatatataagatcttagttcactagtatccatttccttgatttaatgaaaaatattttgctgtgggcattgtcttcacaaagggacatggtcttgtccatggcctaagattttatctgccaaagtttgcatgttgagacttcctcatatgttagccacatagtaggatacagactgtttctggtattttcatcaccttttccttgtagattaccccccaaaatcagcaacttcagccatccagatcacgcaccttctgaaa

SEQ ID NO: 873446 - DNA, 618 bp, Homo sapiens
tttcatgtgtctgttggctgcataaatgtcttcttttgagaagtatctgttcatatactttgcccgctttttgatggggttgtttgttttttcttgtaaatttgtttaagttctttgtaaattctggatattagccctttgtcagatgggtagattgcaaaaattttctcccattctgtaggttgcctgttcactctgatggtagtttcttatgctgtgcagaagctctttagtttaattagatgccatttgtcgattttggcttttgttgccattgcttttggtgttttagacatgaagtccttgcccatgcctatgtcctgmatggtaatgcctaggttttcttctagggtttttaggtctaacattaaaatctttcatccatcttgaattaatttttgtataaggtgtaaggaagggatccagtttcagctttctacatatggctagccagttttccaagcaccatttattaaatagggaatcctttctccatttcttgtttttgtcaggtttctcaaagatcagatggttgtatatgtgtggtgttatttctgaggcctctgttctgttccattggtctatatcactgttttggtaccagtaccatgctgtttt

SEQ ID NO: 873447 - DNA, 604 bp, Homo sapiens
tttattgaggatttttgcatcgatattcatcagggatattggtctaaaattctgttttttgttgtgtctctgccaggctttggtgtcaggatgatgctggcctcataaaatgagttagggaggattccctctttttctattgattggaatactttcagctcctctttgtacctccagtagaattcagctgtgaatctgtctggtcctggactttttttggttggtaggctattaattattgcctcaatttcagagcctgttattggtctrttcagagattcggcttcttcctggtttagtcttgggatggtgtatgtgtccaggaatttgtccatttcttctagattttctagtttatttgcatagaggtgtttatagtattctctaatggtagtttgtatttctgcaggatcggtggtgatatcccctttatcattttttattgtgtctatttgattcttctctcttttcttctttattagttttgctagcagtctatcaattttgttcagaaaaccagctcctagattcattgatattttgaagggatttttgtctctatctcttcagttctgctctgatcttagttatttattgccttctg

SEQ ID NO: 873448 - DNA, 600 bp, Homo sapiens
ggcactttttaggtctgataagagctctaaagttttttgttgttgttgttgttgtgtgtgtgttttttttttttttttttttttttttttttttttttgagacgggagtctcgctctgtcgcccaggctggagtgcagtggcgcgatctctgctcactgcaagctccacctcccgggttcacgccattctcctgcctcagcctcccctgctcactgcaagctccacctcccgggttcacgccattctcctgcctcagcctccccagtagctgggaccacaggtgcctgccaccacgcccggctaatttttttgtatttttagtagagacagggtttcaccatgttagccgggacggkctggatctcctgaccttgtgatccgcccacctcggcctcccaaagtgctgggattacaggcgtgagccaccgggcccggccaagaactctaaagttctcatctgcataataacttctggaggtttcatctgcataatgaaaaccttggtctccacatcctcttaccttaacttagacactcctttctattgattccaggtctttagataataactctttcaaccaattgcctattaggaaatc

SEQ ID NO: 873449 - DNA, 641 bp, Homo sapiens
aaattattaatgttagttggctttctgttccccacgtctttatgctccaagaccaagtaaaaggggcaaggtttttgacatgtagatgcaagagggcctactttatcttagatggcttaaatgcatgcgttacctttaatattcttaaccattttacaacatgcttatttttattcccgtttataaggtagaaaaaccacagctcactgagattcgataacctgttaaagttccatagctagcaaatgagcccagattttgactgaatgcctcccacctctaaagcttatgccatttccactgtttctctactttgtcaccttttccatgaagtcttttccaatcgatatcataaaggtgatatttcacctcctggtttctttgcctcacccattggtaacatgaattctgcaaacacttagtttacactagaatttaatttgagaraatctctattagtgtcaccctctgaagcttggaatgcactgaaaggtagcccatgtgcagcacatccacaacgcttgggatacagaaatattatttggaacgtgatccctgggactgagatgtggatgactgtcctataatgcgatcttaaaatccacatacttagtctttggtgtttccaggaaataaccata

SEQ ID NO: 873450 - DNA, 532 bp, Homo sapiens
gcaaattagcttttcttccctagatctttcatcatttcattcagcgttggcttccatcctcaccaatttccctgatatcctgtgcatccatggagccaggaagtgccaattaggaggtttgtgactatattccaggccttgatgctcccaggatccagacattgaagtggtaaaatgtgtgtagcaagggatgagagcctaggatgtatttggcttaagtatgaatgatcagaatgaagtagaaaatgaagaattgttaagaagcatagggtagcaattttggttgcttccagtgtaccagtcaatgtggtaaattctgcacataaacgycttttttttttttttttttttttttggtgagacggagtctagctctgttgcccaactggaatgcagtgacgtgatcttggctcactgcaacctctgcctcccggtttcaagcgattctcctgcctcagcctcctgagtagatgggattacaggagcccaccacaatgcccaactaaattttttgtattttcagtagagacag

SEQ ID NO: 873451 - DNA, 640 bp, Homo sapiens
cctactctcttatggcttgcagggtttctgcagagagatcagcgctagtctgatgggcttccctttgtagataacctgacctttctctctggctgccctcaacawtttttccttcatttcaaccttggataatctggtgattgtttcttggggttgctctcctcaaagagtatcttaggggtggtttctgcatttcctgaatttgaatgttggcctgtcttgctaggttggggaagttctggataataacatgaagtgtgttttccaacttggttccattctcccgtcactttcaggtaccccaatcaatcgtaagtttggtctttacatgtcccatttttcttggagcctttgttcatccttttttttttttttccttttttctcgaattttgtctgtcttcacaccttatttcagtaagttgttcttcaatctccgatatccttttgaaggaatatgattgattcagctgttaatacttgtgtatgcttcacaatgttcttgtgctgtgtttttcagctccatttatgttcctttctaaactggttattctagttagcagttcctgtaaccttttgtcaagattcttagcttccttctgttgggttagaacatgctcctttagctcagagcagtttgt

SEQ ID NO: 873452 - DNA, 640 bp, Homo sapiens
cctactctcttatggcttgcagggtttctgcagagagatcagcgctagtctgatgggcttccctttgtagataacctgacctttctctctggctgccctcaacattttttccttcatttcaaccttggataatctggtgattgtttcttggggttgctctcctcaaagagtatcttaggggtggtttctgcatttcctgaatttgaatgttggcctgtcttgctaggttggggaagttctggataataacatgaagtgtgttttccaacttggttccattctcccgtcactttcaggtaccccaatcaatcrtaagtttggtctttacatgtcccatttttcttggagcctttgttcatccttttttttttttttccttttttctcgaattttgtctgtcttcacaccttatttcagtaagttgttcttcaatctccgatatccttttgaaggaatatgattgattcagctgttaatacttgtgtatgcttcacaatgttcttgtgctgtgtttttcagctccatttatgttcctttctaaactggttattctagttagcagttcctgtaaccttttgtcaagattcttagcttccttctgttgggttagaacatgctcctttagctcagagcagtttgt

SEQ ID NO: 873453 - DNA, 603 bp, Homo sapiens
gcactaaatatggaaaagaaaaaccggaaccagccacctgaaaaacataacaaattgtaaagaccatcgacactatgaagaaactgcatcaactaatgggcaaagtaaccagctagcatcataatgacaggatcaaattcacacatagcaatattaaccttaaatgtaaatgagctaaatgccccaattaacatacacagacacaaattggataagtcaagacccattggtgtgctatattcaggagacccatctcacatgcaaagacaaacataggttcaaaataaagggatggaagaaaatttactaatcaattggaaagcaaaaaataaaaaaagccaggtttgaaatccaagtctctaataaaacagacttcaaaccaacaaagattaaaaaagacaaaatgggcattrcataatggtaaagggatcaatgcaacaagaagagctaactgttctaaatatatatgcacccaatacaggagcacccagatttccacttaaacttagactcccatacaataatagtgggaaatttaacaccctaatgtaaatattagacagattaatgagacaaacaattaacaaggatattcagaacttg

SEQ ID NO: 873454 - DNA, 612 bp, Homo sapiens
acaaagaataactttttattattctctttctggtttcactgaaatacaatccatgcagagtaaatacatgatattttccaattttcagaataatgagttagttcctgtgaaaaccccaactttgatgagaatttttaaaagatcatgaacacatgtatttttaatgttttgatgtgtttcaattcattgaagttattactatttagatagttatgtttggcccctatttttggccagtaagcttccctaaaagtcaatttgtatgtccttctgacattaccccacactttgcatatctcttggcttttagagacaacaagataaccacactcattttggagttgtcttgccctagagaggaactacagtctctttcattccaaattttggcagaagaagaagagtgtttcatactggtgtgtctgcaggctaggaagagggaagagtctgaaattgggagyagggggaatggagataatgctccttctgtggatttcaataagaactggctctgtagggggtttctctctgtgtatttctttctgttattttttgaaagcctaagggctttcatcactgacttcttgaatgattatgtcacatttatctcac

SEQ ID NO: 873455 - DNA, 590 bp, Homo sapiens
ttctcacacttagtttgatgtttgatggaaggctctggatgtgtcttattcaccatcgcactcactgcatgaacccattgttttacaccaagtgcaggtactcaaaacatgagtattttctggggctgtcagtaaagtcagtgttgaagtgcagaagcaagataatcagaacaaattctgggccccacagtaagtatgaacatcctctctctatggaagaaaataacttataaaattatcaaatattaatgacagaggaaaaattagagatcttggaatgtaacatttcttytgcaattgaagtttttcaggccaattaagtgaggtaatgtgtatattacattactaattctatagtcttacctgttctaccggggagcatttgtatttaaaaaaaaaaaaaaaacaacatgtagattttcatagtttacagtgcactttagcacccattaacacatttcatgctcctaaaaaccctatgaagaagacactgcaaattttgtcttcttgagaaacaaagtcaaattgaggtgaaatggtttgctgaatattggataactatgaaatggtagagttcagagagaggaacc

SEQ ID NO: 873456 - DNA, 558 bp, Homo sapiens
gttataattattaattggctcattgtccgttaatatcacatatatttaatggaatactaaatataaacataaaaaatacattttttgcttgtatttaaaatgaggatattatttatctcatttcctaaatataattttgaggatttaatgatttaataaagaacttcatacagcagtatgatgaagcagccttatggtaggtcagtttgatagattttgtacattattaaaattgttatttattttatgttctctcattttttccaatgcttgtattgttttaagactttcaaatatttagaagagatttataggcaaatcaaaatcttcrtaaacattattcaggacttctaatataatttgcttcaagatctaaaaacatctgtcatttgatacaatgtggttttatgttaattcatggagaagaagaaaaatattgcataaaatgaggtatacttttattacaatgaatcatggaacacagttttatttaacaaactaaattattggtactgtaaacaagattagaaagataaatgtcatttttaatgaagtatt

SEQ ID NO: 873457 - DNA, 578 bp, Homo sapiens
agttctcttgaaggtaagtacacatgtactttatttacagtaattttactaacataaaaaatactcctaaggagttgaataataatattcattgcagtgccattcataaccacaagcagaaaaagaaatccatcaacaagtgaatggataaacagattccaatgtgctcttaaaatggaaaaactcttcaataatcaaaagaaacaaactyttgatacagaaaacttgaatgaaattgaaaaggcttgttctaagtaaaaaaaaaaaaaactattacagatgaaagggtatttcatgtataattacttttacatgtccattaaaaatagtataagtcaacttgatcatccttgcaatgtacacattttatttccaggttggctttttcatagtgacataatatcactattgttctataaatcatgcttctttagatttacacatacagtgactactttcactgataaggcttcttttttgttttttcactcttctgaaaagatctgtaacctgaattatatctttcatgatgctttattgaggttctgtcaatagaaaatgctccatattatctcatt

SEQ ID NO: 873458 - DNA, 611 bp, Homo sapiens
tttatccaaatcacgtctccaattctctccccgctgagtgctctctccaggcactctcacatcgtgctgatccttcagtcaccccaggatccttgcagttgcctggttgttttccctcacatgctctttcctcagatatttacaaggttccttctgtcatggccttcagctatcaccttccaattgggctttccctgactcctccctctcctctcatgatgtgctccttatttccactctctctttttttttttttttcgtttcccccatggtacatattaaaattgtttttcttctatgggaacacagacatggatttttgtctctctgtctttatttctgtatcccactgccaggagtggagcttggcmgagagtaggcaaacagttaatgttgagtgaatgctgaagcattggaagaaatcaaggaaggaaagaaagcagtaggagtgaacgaattatggcctccctgatgttaatgtcaatgctggcatctttctttgtggaaacaacagggactagtaagtacaacaataaaatcagtcactctcatacaccctaacattcatatgaaagtacttcactaaggcaatcatagtctttccatgcatt

SEQ ID NO: 873459 - DNA, 703 bp, Homo sapiens
agcatttctttcacttttaatggcatgcagtataataggaagacaagaagaggggtgtttttcttacagtgttatggttaaagacagtgacaaagaaaaggatatgactttgatgatgttccatcatcaatgctgaaatagacatcaattatattatcagtctatacaaactgcatacacacagttaaagtaaaacaagatgcactttcttcacaaagctgtaactgctgacaaccatcaagaacaaaaatataatgcaattgaggtggacaaaatgattcgtttctggactcaactgtatcaattatcaaacgaagttcacagaaatttaaatgtaattaatttattattatttgaaaatatactaagcaattagagagactttgggatcctgtattagtccagcttcttaatgtgttattttcattwggtttccaattctttcaaattgatttaagttaaatttaacatatagcatgaatttcttcttgctttaatattaattacatttttaggatgaacttcttcctgctttttatcttaaatgtacagaataaacattgaaagtttggagaaaaaattactaaggctatgtctgtaggtctattggcagaaatctcaacctaacttctgcttgaattttatcgacctgccttttatctccagtgacatataggagctaaaatatccagaaaatagtgtt

SEQ ID NO: 873460 - DNA, 617 bp, Homo sapiens
tacttttggtaaaatggatttaaatcagcatgtgctccagtctgaactgggatgtattcctaaaagaaatccaaccagagggaggtgaataaaaatattaagtatttttgtaagacaaagaaggaaaaaaggcggtatttgcattcattcaaatctatatttttctcattgtcaccattactattttgttaaaatacaggaagcgtatactttttaatagtggtgagagtatcagaaaatatcatctctgtcctataatttaatgtcatccagcccttaggtatagcaaaacctttttatcttggcatatacatactaaaagaattgtagaaaaacatactgtaatcatgtatgcatcattctgtggcaactaaaaagcagccaggccaagagaggtcataacgttagtaagtagtttgtacctggctcattccttctacattctactttggctcctgrattccaatcatctcttttgaaataactatattctaaagtctttctttagtttgtaatttttacctctggggttttagggcaagattttaatttttgctttaaaaatttaatttttgtctatctgcttaattaaaatataaagataactttgttttcat

SEQ ID NO: 873461 - DNA, 626 bp, Homo sapiens
tccattgttttaagtcacttaatttgtggtactttgttacagcaacccaaggaaactaatacaccatcccttcattttttaacataaatattgtatacaccattctacactttattttttcacttatatgttctcatatttaattacactaaaatgtgaattttgctttacttctttttgttctttttttagacactgcagtgaatgcatgttttacttcttatattttctccatctgaagacattgatatttttatcaacttattttctgaacacttttgacctgaaattcactggatttttgtttccatatccagttattttctctattggtctctataggattatgctaaatggttttctcttggcatttttctccttcctgttctgatcatcattagtgaaaatctgtgaaacaaaatcaagctatttccctggcccactcargataaatcctcattattcactcctatttcatatcgtttcaactaagccaattctacattttcttcaaagggttaatgtttgcaacccaacccctatataccaatacccttagtttaaaatctttattaaagtggtagtatatgctgagctcggtggctcacgcctgtaatcccagcact

SEQ ID NO: 873462 - DNA, 613 bp, Homo sapiens
agtcacagaaactgccactttgaatcttatatgaagggtgagagaataacaatctggaaaacaccagccattcattttcaggcagtcctgcacattttctaagaattattctataatttctctgtagtgacaagaatagcagttcattaggcatcctgtataataaaacagtagagtctggtagctcatgaagtatgttttttgaacttataagacaatatttaacagcagctgctattactatgttgaatgtctcaaaatctttcttaaaacatgaagcttaaatgcttcagcttcaggagtttttccgctgacaatttgatgttttgacttttatttctcaaattgattcttagagattttgttgagcttcttggctgaatagttttcttcaagaagagcttttacatggtttcggatttaggaatattatacatactttcactttatttgataggacttggtttgtgatacttwaaaacttacatatttataataaatacaatttaattgtatggaaccatggatatgccatctcttagatatcaggttgtaaggcaaaggcaaatggaggcacattttgttgatgtttgtaaagaaccatcattccagc

SEQ ID NO: 873463 - DNA, 648 bp, Homo sapiens
taagtagagctggagaaaggcacttaaaacttaaaacaaaaaacaaaaaacttatgggcagggaatggtggctcatgcctgtattcccagcactttgggaggccaaggtgggcagatcacctgaggtcaggagtttgagaacagcctggccaacggggtgaaaccccatctctactaaaaataaaaaattaggcatggtggtgggcacctgtaatcccagctactcgggaggctgaggcaggagaattgcttgaacccgggaggcagaggttgcagtgagctgagatcgcaccattgcactccagcctgggtgacaaagcaagactctgtcaccaaaaaaaaaaaaamaaaaaaaaaaaacctttgtacaaaattcttaccatctttctggaaaaattagatttctgtgtaccaaatggttggtactgaaattttgtttcaatacattacaacgactacacacagaaagactctattcttaatccccttcaatgtgccagatactgctctaaaggctttacctatatgagctcatttaatcatcactattagtctgtagggtaggccatgtttttatttcatttgcagaaaggcttagtaacttcctcaagatccttagctggtacctggcagagccagaactagaat

SEQ ID NO: 873464 - DNA, 644 bp, Homo sapiens
cagggaaagtgtgtgcttaaagcccacccactctgagagtattattcaccagggattatattatttataaatataatttccatatcatatccataaagaatgtaaaaaagaggccaggcacggtggctcacacctgtaatcccagcactttgggaggccgaggcaggtggatcacgaggtcaggagatcgagaccatcctggctaacatggtgaaactccatctctactaaaaatacaaaaaataaaattagccaggtgtggtgscgagtgcctgcagtcccagctactcgaaaggttgaggcgggagaatggcctgaacctgggaggtggagcttgcagtgagccgagatcgtgccactgcactccagcctgggcgacagagtgagactctgtctcaaaaaataaaataaaataaaagtaaaaaagcacaaattcttattttgaaaaatatttcacttctctaaccttctaaatcttgcttcatgtgaagataaaccattgtatttcagggttgcttcaaaacatatctttgaggctgggcacggtggctcacgcctgtaatcccagcactttgggaggccgaggcaagtggatcatgaggtcagaagatcgagaccatcctggctaacacggtgaaaccccg

SEQ ID NO: 873465 - DNA, 644 bp, Homo sapiens
cagggaaagtgtgtgcttaaagcccacccactctgagagtattattcaccagggattatattatttataaatataatttccatatcatatccataaagaatgtaaaaaagaggccaggcacggtggctcacacctgtaatcccagcactttgggaggccgaggcaggtggatcacgaggtcaggagatcgagaccatcctggctaacatggtgaaactccatctctactaaaaatacaaaaaataaaattagccaggtgtggtggcgagtgcctgcagtcccagctactcgaaaggttgaggcgggagaatggcctgaacctgggaggtggagcttgcagtgagccgagatcgtgccactgcactccagcctgggcgacagagtgagactctgtctcaaaaaataaaataaaataaaagtaaaaaagcacaaattcttattttgaaaaatatttcacttctctaaccttctaaatcwtgcttcatgtgaagataaaccattgtatttcagggttgcttcaaaacatatctttgaggctgggcacggtggctcacgcctgtaatcccagcactttgggaggccgaggcaagtggatcatgaggtcagaagatcgagaccatcctggctaacacggtgaaaccccg

SEQ ID NO: 873466 - DNA, 684 bp, Homo sapiens
gcatcaagatcaggcattcttgcttgtccctaaccttaggaggaaagcattcagtctcttatcattaatgacgataccagctgtgagattttttatgtgccctctatcatgtgagaagtttcacttctgtaccaaatctgatgagagttttttaattataaatgggtgtcttattttacaaatacttttcctgcatgtattgtgatcatatgggttgtgtctttcattctactgatagaatatattacattaaggcattcttgcattactaggatgaatccttggtcatggtgtgtctttttaagtgtgcatttactaagaagtcttgcacatttatttatgagtgatattgatctatagttgttttctttttcttctcctttagtatttctttggctatggtttgaaggtaatttgtattggggtaacaattatgattggtargtctttcctctgcctgtgttttctggggaaggattggcattatttattcaaatatttgtaaaattcaccaatgaagcagccaagcatcagtgcagtggctaataagactactgctgctgttaggttgacttttcaaacatacttccatagatcagttgtatgagacgatgagctcaaaagaaaccagatagttaattacttacacagacaacagaagcaaggttagcatggtgtcaactc

SEQ ID NO: 873467 - DNA, 690 bp, Homo sapiens
tacttgagcttaggaactcattctcatgcctttatcccctctcttcgctgttgaaattctacacattttttcccttatttctcataacttcacttattgcattctgaataaacagcaaagataaattttctttgacctgtaccaccaacatcaacacctaaagtgacctctttcccattataggggactcttctactgtgcttaatggagactaggatgtgttcccctcaaaggaattctagtttttataggtaaacttgttaaatgtcttgtatggacactgccttatgaaacctcatttgctttcaaagcttcaactaacatctacagcaggtattggcaaactttatagataaagatyttgagaacaaatatttcaggctttgtgggccgtatggtttttgttacaactactcaactctgccttgaagttcaaaaaaaaggtatacatggagcataagcaaatggatatggctgggattcaatactactttacaaaaacaagtggtgggtgtaattggcccatgggcaggagattattgactcttaatctaggctgattatgacatagctccaaatttcagcccttatctgaggtatatagccaactgctacttggactatcctcatcagaacatttgatgtgaacctcaaagatgttatgtcaacaattccttattttcccatgca

SEQ ID NO: 873468 - DNA, 568 bp, Homo sapiens
ctacacaaatgaaaaggaagcagaaaaacaattctggtaatataacaaaacagggttctttaacactccccaaaagattacactagttcaccagcaacggatccaaaccaagaagaaatccttgaattgccagaaaaaaaattgtaaaggtaaattattaagcttctcaaggagtcaccagagaaaggggaarttcaacttaaagaaatttaaaaaatgatacaggatatggatggaaaaatcttcagagaaacagatagcataaataaaaaacaatcacaacttctggaaataaaggacaaacttagagaaatgcaaaatacactggaaagtctcagtgatagaatcaaacaaatagaagaaagaacttcagagcttgaagacaaggcttttgaattaacccaatccaataaagacaaagaaaaaaagaattaaaaaagtgaacaaagcctcaaagaaatttgggattatgctaaatgaccaaacctaagagtaattggtcttcctgaggaagaagagaaatctaaaagtctggaaaacatatttgagggaataatcaaggaaaact

SEQ ID NO: 873469 - DNA, 541 bp, Homo sapiens
cccctacataccacaggtccagaagttttatcatattttctactttcacaaaattcataaaccatggcaggaaaataattagaaaagtgtggttttaaaagctttcaccttctgatagacattatttataataaatatttgtaatatcataagccttctacagaaaatattttaaaatacagtttcacacataattatggcttctctataggtataattcttaattggatggaactgttgggctttatggagagattgtagatcattgaaatattagagtaaattgtgtatgtaggaattaaatctggaaaatactaccaaaaaggtgagcattttttttgatgtaggtatccttcaaaattatttggtccacttatcattttacagaagtagactacattatsaaaactacatacacttttttccctcactttatttttctcttcagactaatataaacttaacattaagccagatttttcatctaccaaatatccaatattaatgttttcacttaggataaagcacatggttatactta

SEQ ID NO: 873470 - DNA, 614 bp, Homo sapiens
cttacatttttatgaggttttattttataagtctcaatggtatgcaatttggtgaataaaaattcatgacattttaaactggactactcacttcaacaataaaaactggttcctgggactcatttaatgcttaaaatttttattgtgcataaaaggaaaatagttctacagggcttttaatataataagctcaggatcatagttgtctctcccgtcctgttctgcaggagaacgtcttctaacttagtaattttttgataatttgataattatattattacatattagtatatcttatatatattatttgtttggagatttataatttatacttacgtatatttatccattttggtaggcttaataatcaccattcaaatargtctctgcctaaatcccctgaatctgttatgtttacatacatgtcaaaggggacactgcaaatgtgattaagggtaaggagcttgatatagggcgattaccctgagaccttaaaacaataaaatgttgagaagaaagaagaataatatagtgagaccttttatgtacgaaaacattgcttaacctgaatatattttaaagatcactaaatagaaatttgcatttctcaaaaa

SEQ ID NO: 873471 - DNA, 365 bp, Homo sapiens
tttgtagattgttgttggccccactctgtctataatacgcactggttaaactgtattttgggcatcaaatttcacagtgtttgcaggctttccttcagtgttactcccctagaatgagagaaaatttctcttatttctatggcccagagatcatacacactccccgttayacacacatacactccgtttgtaaggatgcatgacccaggtgagcattaagcctccagcttctcctttaatgctttctttgagggggtcatatctcccagcatatccactttcaagggcctcttcctactactgatatgatttctggatgctatagcccttgactggatatagaaagaggtaatgtatgcatcaaa

SEQ ID NO: 873472 - DNA, 631 bp, Homo sapiens
ggaggataacaggtttttgaaataaagtgtattagagcactgaaaggatgggaggttgttgttagattttagatttctgagatgtaacaattcttgataacaaggttaatgtgaccatgggagtggttggtagaattggagtagacatcaaagttattggagttaaaagggctagaaactgtgaggcttgagtatttgatgrgtcagcacccatggttggaattgagggagaggaagactgagccaggtactaaagacttccataaatgaagagaactgctagctaacaataacaagaaatgattgtagttctagccaaataatatgagcctcaaaagagatatgtttttacaaaaagaggaggaacaatgatctcaaagaagtattgagatgatgtaaatgaagtatggtcctcagagaagaactcagctttattaaatcaaggagaggaagaagtgttctgagaagatgttgaatgtgtagagaagtaggtttcacaaggagcagggatttcctgaaggaagtgtggcaaatggttggaaatagagcaataatggggatagaggaagtgccaagaaatatttaaataatagcagaggggtgatttacattttggactccaagcctgttc

SEQ ID NO: 873473 - DNA, 631 bp, Homo sapiens
ggaggataacaggtttttgaaataaagtgtattagagcactgaaaggatgggaggttgttgttagattttagatttctgagatgtaacaattcttgataacaaggttaatgtgaccatgggagtggttggtagaattggagtagacatcaaagttattggagttaaaagggctagaaactgtgaggcttgagtatttgatgggtcagcacccatggttggaattgagggagaggaagactgagccaggtactaaagacttccataaatgaagagaactgctagctaacaataacaakaaatgattgtagttctagccaaataatatgagcctcaaaagagatatgtttttacaaaaagaggaggaacaatgatctcaaagaagtattgagatgatgtaaatgaagtatggtcctcagagaagaactcagctttattaaatcaaggagaggaagaagtgttctgagaagatgttgaatgtgtagagaagtaggtttcacaaggagcagggatttcctgaaggaagtgtggcaaatggttggaaatagagcaataatggggatagaggaagtgccaagaaatatttaaataatagcagaggggtgatttacattttggactccaagcctgttc

SEQ ID NO: 873474 - DNA, 619 bp, Homo sapiens
tttcacttctgattttattaatttaagtcatctatcttttctcagtccaaagttcttataaagatttctcaattttgttgatcttttaatagaaccaatcttgttttcactgattctctgtattgctgttttgatttattctgttttatttttcttcattttattatttattatttaattccttatgcttcttttggttttagtgtgcactcctttttckagttttagaagatgtaaagtaaggttataaatttgagaactttcttttttattttgttgcagttgcagtaaactgtatggaacataaaacatctgatttttacaattttaagtgtaaaacttagtggtactaattacattctgtatattgtacaatctttaacaccaaaatagtcaagatttttcacatattaaacaataattacacattctttttcttcttttcttttttttttaaattatactttaagctctgggatacatgtgcagaatgtacgggtttgttacataggtacacatgtgccatgatggtttgctgcacccatcaacccgtcatctacattaggtatttctcctaatgctatccctctcctagcccaccccgcccttaacctgacag

SEQ ID NO: 873475 - DNA, 619 bp, Homo sapiens
tttcacttctgattttattaatttaagtcatctatcttttctcagtccaaagttcttataaagatttctcaattttgttgatcttttaatagaaccaatcttgttttcactgattctctgtattgctgttttgatttattctgttttatttttcttcattttattatttattatttaattccttatgcttcttttggttttagtgtgcactcctttttctagttttagaagatgtaaagtaaggttataaatttgagaactttcttttttattttgttgcagttgcagtaaactgtatggaacataaaacatctgatttttacaattttaagtgtaaaacttagtggtactaattacattctgtatattgtacaatctttaacaccaaaatagtcaagatttttcacatattaaacaataattacacattctttttcttmttttcttttttttttaaattatactttaagctctgggatacatgtgcagaatgtacgggtttgttacataggtacacatgtgccatgatggtttgctgcacccatcaacccgtcatctacattaggtatttctcctaatgctatccctctcctagcccaccccgcccttaacctgacag

SEQ ID NO: 873476 - DNA, 654 bp, Homo sapiens
taattccagctagtcaggaggctgaggttggagaatcacttgaactcaggaggcgcaggttgcagtgagctgagattgcaccactgcactccagggtaggcaacagagcaagaccccgtctctaaataaataaataaaaaataaatataatttctaatatgattgcactatagtctgagaggctgttatgatttcctttcttttgcatttgctgaggagtgttttacttacaattatgtggtcaattttagaataagtgtgatgtggtgctgagaagaatgtatattctgttgatttgggtgaggggagagttctgcagatgtctattaagtcgcttggttcagagctgagttcaagtcgtgaatatccctgttaattttctgtcttgttgatccatctaatatggacagtggggtgttaaagtctcccactattattgtgggggagtctaagtctctttstaggtctctaagaacttgctttatgaatctgggtgctcctgtattgggtgcacatatatttaagatagttagctcttcttgttgcattaatcactttaccattatgtaatgccctctttgtcttttttgataaatggtaaatattcctccacctttcattttgagcctatgtgtgtctttgcacgtgagatgg

SEQ ID NO: 873477 - DNA, 625 bp, Homo sapiens
ccttccttctttaactcagtgtctgaggggttttatctgtggcttttcctgctacatttcttggttccttgaccaggaagcaaggtgattaacagacagtcgaggcagccccttaggcggcttaggcctgccctgtggagcatcctgcgggggactctggccagcttgagtgacacagatcctgagagtgctcccaagtaggcaattgccccagtggaatgccttgccagagcagcgcatggcaggcccctgtggaggatcaatgcagtggctgaacactgggaaggaaatggcacctggagtccagacatctgaaagttggtaagactagtctttggaacttgcctactccatttgagtggaagcgtggcctgatcacccatggtgtgcctgtaccagcactttrgttcttttttttgacttgacttggattgcttgatactttggttttagttttgacctggcttggatttcttgatactctgattttggttttgattctgctttggtgtaaactgtaaaagtgtttatgtgccctttttacccattctttgttttgtggtgtgtgtgtgatgtaagcgtggtgttttgtcttgaagaagcatgggtcaggcacaaagtaagc

SEQ ID NO: 873478 - DNA, 656 bp, Homo sapiens
gaatgagttaacccatgaaggtaattctttggttactgctgtgcacttttcttaattagagcccatgtcattattattggtttactgaaattatatattatttaaactcattatatttttaaaggatgttcaatcttattagcaatctaacttattagttattaaattatgaaracaaatataattaaccatttctttttctccttgagctaatattcttactctgtattcacttttaagccagattcagtttttaagacatcatcagatcctctaataaagattataagagagatggggaagaaaagtcacatcacagacaacacagaagctttttataatctcttgttcaaagcttcaggttttgccagctacctgtcttgtttttccccgcttcttttcctcctaaaaggatatggacctctttcaattaaccacagcgttttagtttaacttaccctttcttcaaagcaaatgccctgcagttgactaagcatagcatttgaataccaattcgactgttattcaagaatgcctcatacttgcaattttttctcatctagctacccctccactacctccctcatgcaaattacctaggagattaaaatcaaaaatgaattctaatgcaaagtgaataaaacatttcatttttc

SEQ ID NO: 873479 - DNA, 591 bp, Homo sapiens
tttcttctgctaaatactgggggtttctagtttttacaaagattaaataaaactcaccttctgccaccaggaatcttaagatcaaggaggagattgtggttataaatgtctgatggcatctctacatctcaggtgaagcatggaggatttcacagatgaagtgagtgatacctgaatagctattggagaatatgtaaaaggtcagtgtggataaaggaaaaagggcattttaattgaaggatcaacatgtgcagaatcaaagaacagtgaaagatgatggcaggctgagtaactgattggctaagacaaaaagaagaagctaggtggctaatattttttgtctcacttctctggatttaaaatatggaaagttttttaaaagtacattttatcccttttcaaataattattgcagaacagtataactatgtaaaaatactaccaaacaatrttttaagtgggtttgattttgaaacactaatttgagtatctttatagaatatcttcacaccttcccttcttcctttgagcataccacatacagttaatctaacacatacggataatctctgagttatgatggtttcactt

SEQ ID NO: 873480 - DNA, 586 bp, Homo sapiens
ccttggcctccaaaagtgctgagattacaggcatgatccactgtgcctggcctctgcttcatgcttagtgtctcagcaacacaggacagcttgtcatatgctccccaacacacatattgtgccatctcctgccctccccacttyccatctttacgacatctttccctttgcctcaactgctattctattcttttcattctccatattcccttctctggaaaattcattcttaaagttcagctctgatcatctgagtaataattagaaaacatactcatctgcttggatctgcatagactgtctccagaagaatccagaacaactcggtgacattggttatctctggggagggagtattgagtaggcctgagggatacactttaagagagggaaactttactgtaaaccattttgtgcctgttaaattttgtagcatatgaatatatttctctgttcaattaaatattaaatgaagcatttataatgaaggaaaaagttaatttctaaatttacctttgctgggaagccttccctgactttctcttaccgagttgattgtgtgaagtcctgttcatgtatctgtcac

SEQ ID NO: 873481 - DNA, 610 bp, Homo sapiens
aggattaaaactcccaaaaactaattcgtatttctagttttaatcctaaaaaacctaactattgctcccctccatacctctcccttctattcattcctagtggctattgtcctcatctttaagtccatgagtaaccaatgtttagctcccacttataagtgagaacatatggtatttggttttatgttcctctgttaatttacttaggataatggcctcgagctgcatcaatgttgctgcaaaagacaagattttgttccttttcatggccgtgtagtagtccaatgtatgtatataccacattttcttattccaatccaccattgatgggcacctaagttgattccatatctttgctattgtggataatgcagcgatgagcaaacaagcrcatgtgtctttttgttagagtgatgtgttttctttcaggtatatacccagtaatgggattgctgagtcaaatggtagttttattttaccttctttttttttaatcttcctttaagttccaggatacaagtgcagaatgtgtaggtttgttacataggtatacgtgtggcatggtggtttgctgcacctatcaacctgtcatttaggttttaagctccgc

SEQ ID NO: 873482 - DNA, 623 bp, Homo sapiens
tcctttatatgggcatttatttctctctctgtctacatatatacacacacaagttttacccaaaatttatttttgaaataaatttaatatccttagcacattattcctgttgcttttttgtttaatagaacctttaaaaattttagattcacrgagtacatgtgcaggtttggtacatggatatattgcataatggtgagatttgggctctagtgaacccatcaccaaacagtgaatactatacccaataggtaatttttcaaccttaaccctccaaccctctctccttttggactccccagtgtctattatttccatctttatgtccatatgtacccattgtttagctcccacatataagtgagaacatgtggtatttgagttttctgtttctgagttatttcacttaggataatggtgttcagctctatccatgttgctacaaaggacatgatgccattcttttttatgactgcatagtattccatggtgtatatgtaccacattttctttatttagtcatttaggttgattccatgtctttttattgtgaatagtgccacaatgaacatatgtgtgtgcatctctttatggaagaatgattcacatgtttaaccatcctt

SEQ ID NO: 873483 - DNA, 439 bp, Homo sapiens
caatatgttcttttatttttttttttgaggcggagtcttgctctgtcaccaaggttggagtgcagtggcacaatctcggctcactgcatgctctgcctcctgggttcatgtcattctcctgcctcaacctcccaagtagttgggactacaggcgcccgccaccgcacctggctaatttttttttgtatttttagtagagccagsgtttcaccgtgttagccaggatggtcttgatctcctgacatcgtgatcctcctgccttggcctcccaaagtgctgggattacaggcatgagccatcgcacccggcctaatatgttcttataacctgaattgttttacacttaactgtatatcacaaacatgtttcttttcagtcaatgtatttgtatatcatttttaatagttgtttagcttaatgaaagagtattcaatgtgct

SEQ ID NO: 873484 - DNA, 439 bp, Homo sapiens
caatatgttcttttatttttttttttgaggcggagtcttgctctgtcaccaaggttggagtgcagtggcacaatctcggctcactgcatgctctgcctcctgggttcatgtcattctcctgcctcaacctcccaagtagttgggactacaggcgcccgccaccgcacctggctaatttttttttgtatttttagtagagccagggtttcaccgtgttagccaggatggtcttgatctcctgacatcgtgatcckcctgccttggcctcccaaagtgctgggattacaggcatgagccatcgcacccggcctaatatgttcttataacctgaattgttttacacttaactgtatatcacaaacatgtttcttttcagtcaatgtatttgtatatcatttttaatagttgtttagcttaatgaaagagtattcaatgtgct

SEQ ID NO: 873485 - DNA, 439 bp, Homo sapiens
caatatgttcttttatttttttttttgaggcggagtcttgctctgtcaccaaggttggagtgcagtggcacaatctcggctcactgcatgctctgcctcctgggttcatgtcattctcctgcctcaacctcccaagtagttgggactacaggcgcccgccaccgcacctggctaatttttttttgtatttttagtagagccagggtttcaccgtgttagccaggatggtcttgatctcctgacatcgtgatcctcctgcctyggcctcccaaagtgctgggattacaggcatgagccatcgcacccggcctaatatgttcttataacctgaattgttttacacttaactgtatatcacaaacatgtttcttttcagtcaatgtatttgtatatcatttttaatagttgtttagcttaatgaaagagtattcaatgtgct

SEQ ID NO: 873486 - DNA, 439 bp, Homo sapiens
caatatgttcttttatttttttttttgaggcggagtcttgctctgtcaccaaggttggagtgcagtggcacaatctcggctcactgcatgctctgcctcctgggttcatgtcattctcctgcctcaacctcccaagtagttgggactacaggcgcccgccaccgcacctggctaatttttttttgtatttttagtagagccagggtttcaccgtgttagccaggatggtcttgatctcctgacatcgtgatcctcctgccttggcctcccaaagtgctgggattacaggcrtgagccatcgcacccggcctaatatgttcttataacctgaattgttttacacttaactgtatatcacaaacatgtttcttttcagtcaatgtatttgtatatcatttttaatagttgtttagcttaatgaaagagtattcaatgtgct

SEQ ID NO: 873487 - DNA, 671 bp, Homo sapiens
ccaccaacagtgtaaaagcgttcctatttctccatatcctctccagcacctgttgtttcctgactttttaatgaataccattctaactggggtgagatggtatctcattgtggttttgatttgcatttctctgatgaccagtgatggtgagctttttttcttgtgtctgttagctgcatagatgtcttctttggagaagtgtctattcatatctttgcccactttttgatggggttgtttttttcttgtaaatttgtttgaattctttctttgtcaaatgggtagattgcaatttatctcccattctgtatgttgcctggttcactctgatggcagtttcttttgccatgcagaagctctttagtttaattagatcccatttgtcaattttggcttttgttgccattgcttttggtgttttagtcatgaagtccttgctcatgcctatggcctgaatggtattgcctakgttttcttctagggtttttatggttttaggtctaacatttaagtctttaatccatcttgaattaatttttgtataagatgtaaggaagggatccagtttcagctttctacatatagctagccagttttcccagcgtcatttattaaataggtaatcctttccccatttcttgtttttgtcaggtttgtcaaagatcagatgg

SEQ ID NO: 873488 - DNA, 585 bp, Homo sapiens
ctttttggccctgagtggcatctggggaagaagtgagtaaagggactgggaggctgctcactctcgctgcagaccactgggatcctggctgcaggaagctccacacccccatggacatgtgagttggcaaggagctctccctggagagtagatggagatggagctgtagcaggcacagagccaggactttttatcatgggtcagatctggtggagctcaaccataaagtcccacctccgtggctgcctatctctctcagaggctttggccccagctaaactgcagggagaaagcaaggcctgcttacccgcaggattgggacatgtctatcctgtaggcatgcctgtccaccagcctcttacatggcccctgcctggcttcctgggagaagcrtgtatacattgtagtttctgctacccaacctggatgcttggctccacctgaatgcattctggcggcgccagaaatccctcagatccctcaccacacttggaacctggccctaagcatcaggaagagggagtcataagcaagtcgtggcactccagtgctgtggcctgtggttcaggagtgccaagctgggat

SEQ ID NO: 873489 - DNA, 691 bp, Homo sapiens
tctatttgtctttctgtttgtattgctatagctttataatatattttggaatcaggaagtgtgatacctctaactttgttcttctccacagctactttggctactcattgtcccttgagattccatatgaattttaagacttaatatttctgaaaaaaatgtaacattgggattttgatagaaaatactttgaatttgtgcttcactgtgagtagtattgacatcttaataatattaaattttytgacccttgaacaagaagtcaagagtgttctgttttaagtttcacatattttttcatttgccagtttccttcttcttgtgatttgcagctgaggtctttttacgctgcccatgctggtctccaacttttgggcttaagctattctccctcctcagcctcctgatgtgtttcaattacatggatgagccactgcacctggcctctttattgtttttctgatatttttaggatttgaaggtaatttttgaaaagattgataaatatgtatctctttagaaagtttttcactattaatgtagtcaaaaccacataaaatttaccatcttaaatattttaagtacatagttaaataatattaaatatattcacattgttatgcaacatatctctagaatgtttttatgttgcaaaactaaaattcaatagccatgaaacaacaactaccct

SEQ ID NO: 873490 - DNA, 691 bp, Homo sapiens
tctatttgtctttctgtttgtattgctatagctttataatatattttggaatcaggaagtgtgatacctctaactttgttcttctccacagctactttggctactcattgtcccttgagattccatatgaattttaagacttaatatttctgaaaaaaatgtaacattgggattttgatagaaaatactttgaatttgtgcttcactgtgagtagtattgacatcttaataatattaaattttttgacccttgaacaagaagtcaagagtgttctgttttaagtttcacatattttttcatttgccagtttccttctkcttgtgatttgcagctgaggtctttttacgctgcccatgctggtctccaacttttgggcttaagctattctccctcctcagcctcctgatgtgtttcaattacatggatgagccactgcacctggcctctttattgtttttctgatatttttaggatttgaaggtaatttttgaaaagattgataaatatgtatctctttagaaagtttttcactattaatgtagtcaaaaccacataaaatttaccatcttaaatattttaagtacatagttaaataatattaaatatattcacattgttatgcaacatatctctagaatgtttttatgttgcaaaactaaaattcaatagccatgaaacaacaactaccct

SEQ ID NO: 873491 - DNA, 691 bp, Homo sapiens
tctatttgtctttctgtttgtattgctatagctttataatatattttggaatcaggaagtgtgatacctctaactttgttcttctccacagctactttggctactcattgtcccttgagattccatatgaattttaagacttaatatttctgaaaaaaatgtaacattgggattttgatagaaaatactttgaatttgtgcttcactgtgagtagtattgacatcttaataatattaaattttttgacccttgaacaagaagtcaagagtgttctgttttaagtttcacatattttttcatttgccagtttccttcttcttgtgatttgcagctgaggtctttttacgctgcccatgctggtctccaacttttgggcttaagctattctccctcctcagcctcctgatgtgtttcaattacatggatgagccactgcacctggcctcttyattgtttttctgatatttttaggatttgaaggtaatttttgaaaagattgataaatatgtatctctttagaaagtttttcactattaatgtagtcaaaaccacataaaatttaccatcttaaatattttaagtacatagttaaataatattaaatatattcacattgttatgcaacatatctctagaatgtttttatgttgcaaaactaaaattcaatagccatgaaacaacaactaccct

SEQ ID NO: 873492 - DNA, 740 bp, Homo sapiens
tcagagccctcagagatgcacttgcaatgtggcagccactgggcacaggggctactgagcaactgtattgtgcccagcatgaactaagatatgctggggagaaatacaagaaaatatttaaatatttagtaacatatacaaatgtgcataaaaatatataatgctgggttaaagaaacatatgtctatgtgtgtgtacgtatatatgtacacatatatatgtttctttaattatttcattctgattatatgttaaaatatttyggatatattgagctatgttgttaacatcaatttcactcatttttctttttctttatgctgctactagtaaattctaattgtcacatgtggctcacattttacttctattgcacattggtgcaatagaggattgcctaatttcaaagctcagtttgcctcaaaagccaagaggccagaaagattgtaaaatctaaaaattaaaaataattgtaattggttgggcatggtggctcatgcctataatccctgcattttaggaggctgaggcgagcagatcacttgaggccaggagtttgagaccagcttggtcaacatggtgaaaccatgtctctactaaaaatacaaaaattagctgggcaacatggtgggtgcctgtatcccagctacctgggaggctgaggcagaagaatcacttgaacctggcaggcggaggttgcagtgagccaatatctcatcactgtactcgagcctgggtga

SEQ ID NO: 873493 - DNA, 740 bp, Homo sapiens
tcagagccctcagagatgcacttgcaatgtggcagccactgggcacaggggctactgagcaactgtattgtgcccagcatgaactaagatatgctggggagaaatacaagaaaatatttaaatatttagtaacatatacaaatgtgcataaaaatatataatgctgggttaaagaaacatatgtctatgtgtgtgtacgtatatatgtacacatatatatgtttctttaattatttcattctgattatatgttaaaatattttrgatatattgagctatgttgttaacatcaatttcactcatttttctttttctttatgctgctactagtaaattctaattgtcacatgtggctcacattttacttctattgcacattggtgcaatagaggattgcctaatttcaaagctcagtttgcctcaaaagccaagaggccagaaagattgtaaaatctaaaaattaaaaataattgtaattggttgggcatggtggctcatgcctataatccctgcattttaggaggctgaggcgagcagatcacttgaggccaggagtttgagaccagcttggtcaacatggtgaaaccatgtctctactaaaaatacaaaaattagctgggcaacatggtgggtgcctgtatcccagctacctgggaggctgaggcagaagaatcacttgaacctggcaggcggaggttgcagtgagccaatatctcatcactgtactcgagcctgggtga

SEQ ID NO: 873494 - DNA, 740 bp, Homo sapiens
tcagagccctcagagatgcacttgcaatgtggcagccactgggcacaggggctactgagcaactgtattgtgcccagcatgaactaagatatgctggggagaaatacaagaaaatatttaaatatttagtaacatatacaaatgtgcataaaaatatataatgctgggttaaagaaacatatgtctatgtgtgtgtacgtatatatgtacacatatatatgtttctttaattatttcattctgattatatgttaaaatattttggatatattgagctatgttgttaacatcaatttcactcatttttctttttctttatgctgctactagyaaattctaattgtcacatgtggctcacattttacttctattgcacattggtgcaatagaggattgcctaatttcaaagctcagtttgcctcaaaagccaagaggccagaaagattgtaaaatctaaaaattaaaaataattgtaattggttgggcatggtggctcatgcctataatccctgcattttaggaggctgaggcgagcagatcacttgaggccaggagtttgagaccagcttggtcaacatggtgaaaccatgtctctactaaaaatacaaaaattagctgggcaacatggtgggtgcctgtatcccagctacctgggaggctgaggcagaagaatcacttgaacctggcaggcggaggttgcagtgagccaatatctcatcactgtactcgagcctgggtga

SEQ ID NO: 873495 - DNA, 530 bp, Homo sapiens
tggaacccctgcattggacatgaaggaaacgaggccagctgggaaaggtaaccccacattcccacagccagcaggaacccaagcagaggcttcaacccaggcttctgacttgcaaagcagtgctccttcctccttacacagtaacaacaggggaaggtggccttccgggttgccagagccgagtggtaccagcaatagagtggaaactcacacacaggcttgcctgcttcctgggttagggttagggtttatatggctccgggaggttgatgcattgtgtttgatcttcccccytttttttttttttgagacagagtctcattcctgttgcccaggctggagcacagtggtgtaatcttgctcacagcaacttctgcctcccaggttcaagcaattgtcccgcctcagcctcccgagtagctgggatcacaggtgtgcgccaccacacccagctgatttttgtatttttagtagaaacggggtttcaccatctaggccaggctggtcttgaactcctgacctcatatgat

SEQ ID NO: 873496 - DNA, 584 bp, Homo sapiens
agtggatgtacccatgggatttgctttgacccaggagatgtgagtggaagtgaagcgtgtcacctcgaggcaaaagagttgggagccattgagactggccactctctccttcatctcttggagcaactgacagctccyatatggaggctgctcctttattctcgtggcaggatgagggcatgtggggcacagggcacaggagagccatggaggatgtgcagcatgggcaggaaaagagccttcagtggtgtacattttgtacatttccatcgtttggggctgtttcttacctacagtgatacctagcccatcctagcaggcatgcaccatctaccccacactctgtgatgcagactagcctgccgtcagaacatgaactggtggtcagacacacataggtttcagttccagctctgcctcttattgactgtaacctcaggcttaactttcagtctctgagcctcagtttcaactctgtaaaatgaggtggctataccatctcaggttgcagagagaattaaatgaaatataagtgcatgtagagcattgaacccagggcctggcacacacagtgagtacacaat

SEQ ID NO: 873497 - DNA, 658 bp, Homo sapiens
tctttagaattgtactggtaaagccatgtttcctcttctgttacaattcttcaaagaaatgcttcaggatcttgatctcacttatttaaaatttccattgatgctgggaaaactagatagccacatgtagaagaatgaaactgaatccctgtctctcaccatatacagaaattaactcaagatgaattaaatacttaaatagaaaaaaactaaagacttaaatgtaagacttgaaaccagaaaaatctgagaagaaaacctaggaaaaactcttctggacattgacccaggcaaagaatttatgactaagactccaaaagcaaatgcaatataatcaaaaataataaatggagcttaattaaatgaaaaggcttctgcacagcagaagaaataatcaacaaagtaaatagacaacctacagaattggacaaaatattcacaaactatacatctgacaaaggactaagatctagaatctgcaaggaactcarcaaatcagcaaggaaaaaaacaagtaatctcattaaaaagtgggcaaactacatgaatagacatttctcaaaagagaatatacaaatggccaacaatagtatgaaaacaaattcttaacaccactaatcatcaggaaaatgcaaattaaaaccacagtaagatatca

SEQ ID NO: 873498 - DNA, 603 bp, Homo sapiens
gtgtcataagaaatacatgcataaatgctgtaattatattattagttaaaggcttaactagtaagacagatgaatccatttcaagtctaaacaataaaatgacaaaccataaaggtggttctcaaattacttcatgggggagatagaaagctgtgttctgaaagtattgtatttgcaaaatgcctgaagcaaacaaaacatgctgctgagggaattcatttccagaattcaaatttttgaaacagctatgaacagttattgccaacactagcacattatttatatcctgctagcttagaagtttttaaaaactagrtaagtttaatttcaaattgtaacttcttaggactgaaagtctcctgatgtctaaaatgtgacctataatttcatgggagaaaaaaatgatatttatggtaaatgtaaagcccattactggataaatcttctaaatatgtaagttttttatgcaagaaagatgtgaagacaaaaaaatttccaactagtggatcatgagacataaagcagtggttcagtgggttagtataatattttaggaataatgaccaaccactgtgaaggggaaaaatattcatagagtacttt

SEQ ID NO: 873499 - DNA, 649 bp, Homo sapiens
aacatgcataaaatcttgggcaagtcactaatttctctgaacttttcacctatgaaaatgacatagttctcacaggaacgttgcaggcctcatagcgatggtctagctatcaatatctaacagagagcttgttttctggcagggggtgggagggctcagccatcttggtgacacatcactatcccatttttttttctccaggctggtcttgaagttggggcaaaatgaatgccgagcaacaaaattctagggtgtctargtcttcttagtgcagactttaaaactgtaccaaagggatttgccaagaaactcgctgtcatttccagagcaagctattttcatttcccccactggtgctatagcagccggaaactttgctgcagtcctgccctctggacaccatctaaaagcacaagcaagctgtagacatgggcagtgactgggtatccaaggaagacagtcatatatacaataatgactgaaattaatttgtcttatcccttctaggccaagggataaaacaagagaaaagcagggggaaagaaaaaaaaaataacaagggaaaggccctaaatgaacttcaggatcaaaaatagatcctctctaacattagtagaagacggtaatgttatctattgtgtgcaccttt

SEQ ID NO: 873500 - DNA, 677 bp, Homo sapiens
accaatcaaacaggagaaaggatatcagagattgatgactaccttgccgaaataaggcatgcagacaagattagaaaacaaaacaaaacaaagaatgaaaataaacgaacaaaacctccaagaaatatgggactatgtgaaaagaccaaagctatgattgattggtgtacctgaaagtggggggtagaatggaaccaagttggaaaacacacttcaggatattatccaggagaacgtccccaacctagccagacaggctgacattcaaattcaggaaattcagagaacaccactaagacactccataagaagatcagctccaagacacataatcgtcagattctccaaggtggaartgaaggaaaaaattaagagcagccaggaagaaaggtcaggtcacctacaaagggtagcccatcagactaacagcagatctctcagcagaaacactacaagccagaaaagagtggggggcaattctcaacattcttaaagaaaagaattttcaacctagaatttaatatccagccaaactaagctgcataaatgaaggagaaataaagtccttcaaggaaatgccaaggtattttgtcaccatcaggcctgccttgcaagagctcctgaaggaagcactaaatatggaaaggaaaaaccagtaccaaccactgcaaaaacat

SEQ ID NO: 873501 - DNA, 560 bp, Homo sapiens
aagaatctttgagaaatcatcatgattcccattacatatgatatactcatgtttttctagggagaaatatgacagttctatacccagaagaaaatttgagaatcagtttagaagttgagaaattaggccgggtgcagtggctcacgcctgtaatcccagcactttgggaggccgaagcaggtggatcacaaggtcaagagattgataccatcctggctaacacagtgaaacccctaaaaataccaaaaaaaaaaaaaaattagccaggcgtggtggcaggcgcctgtagtcacagctactcgggaggctgaggcaggagaatggcgtgaactggggggyggagcttgcagtgagccacgatcacgccactgcactatagcctgggcaagagcgagactcccgtctcaaaaaaaaaaaaaagaagttgagaaataaaagatgtgttttaactgctaatgaaagttataatttatgctaggaagccaaagtacagaggaaagcagaaagccgaaatgaagacatgcttggctttcaacttaagtgtcacttcatcagagagg

SEQ ID NO: 873502 - DNA, 465 bp, Homo sapiens
tggaggaatttggtatttgaatgtttttgaagccaatatttttgaaattttagctgtttagtcaagggcttttttattctgacattccttaaccattctgtctttccatttaaaagaaatgtctgtgtgacatgtcttcctggtttttttttgtcctttgtattaatgctccagtttgttttatactatatttcttagcccccagatttatcatgggacatcactgaaaccagtggtagggtcgtttgtgacagcctaacaatgtgaatctaactatcttgatatttaatttatgtmtttctgaaggatttaacaagttaattgtgtatattctaggtgtgtcacggggtcccagccctgtcagccttggaaatcaggataccttacctgtggcagttgcccttacagaatctgttaatgcctactttaaaggagcagatcccaccaagttagtttttaaaatat

SEQ ID NO: 873503 - DNA, 620 bp, Homo sapiens
ccgtctcaaaaacaaaaaacaggctgggcgcagtggctcatgcctgtaatccaaacgctttgagaagccgaggcaggcagattacctggggtcaggagtttgagaccagcctggccaacacggtgaaaccttgtctctactaaaatacaaaaattagctggacatggtgccacatgcctgtaatcccatctacttgggaggctgaggcaggagaattgcttgaacccaggagggggaggttgcagtgagccgagattgtaccactgcactccagcctgggcaacagagcaagactccatctcaaaacaaaaccaaaaaacaaaaaaamcccaaaaaaacaaaaaacaaacaaacaaacaaacaaaaagaggcacacagtggaggggttgagaacatggacattctgggttcatagcctggctctgtcacttacaagctgtttgttcatgggtgctatggactgaatggtgcccctcctccaaattcctatatggaagccctaagccccagtgggatgttatttggagatgttatttactgctctatccccagtgcctagaatagtgccacgtatactgtaagtgctcaagaggtatttctttaatgagtgaatgaatgat

SEQ ID NO: 873504 - DNA, 600 bp, Homo sapiens
aaggagcctctcttggatatcgtgttttcccaagaaaattgaacacatttccatgttgtatcccaatggcattaatacatgcatttttttttctatgtgctgtattagttagggtgggttaaattctgttacacagaccccaaaacgtagcgatgcaaacacaatggaagtttacgtgtcctgtatacagcagtctagggtgtgcaaagtggtggggaggtctctgtccaccttgaggctccccatccagcgggrtcttttcacctccagcacccagcaggtgggagggagagagcacagtggaggcccactgctgccttcagagctgattcccagagttctacattccccttcgactcataatccactggtcacaaggacttgagtgccacagccttgcacgtagacagagaagttttgatggacagctgcattgtggcacgtggatgtattaactagatgttctgtcgtcccaggagggtcttgcatgttctccccacctattcaagcctgtctgaaattgatgctctcttttcccttccaggaaatgtggtgtcctctgatcctccttccttcctgagaactggggtccttgcagat

SEQ ID NO: 873505 - DNA, 598 bp, Homo sapiens
tggtttcccattggccatgtggcttccatgagagcatgcattctcaagagtaagcccaacactgtctttccaggaggctctcctcaccctcactccccaccccacttcctgtacctggaatggtgtggggaacagtacctggaatggtgtatggaagaagcctgattagatgcatggaaggatgaaaagatggaaatctttagcaggttcctattgaatggaaggatcagacactgcctcacagctgcttctgtatttatctttcttcttggcaagtcttgctttgaatagactgcaagccccctgtaagctggctgtgtgtccattgcattattgttaatctctcacagcctggtagagggctgagtgctcagaaggatctgagcagggctggtggtgcagctgactccatcagtggctgctgttgacatttctctagcatgggaagacagtggacyctcggtgtgcaagggaaagatgggctgcctcaggcatacaggaagctgctctggttgcaggtatactcctagaagactgtgggggtgtggcagccatctctgcaggcaccaggcaggggtagctaggggtcagcctccca

SEQ ID NO: 873506 - DNA, 633 bp, Homo sapiens
acaggcaggaggaccaaaggggcacaaaatgagaacagaaagttggaggaggggacccactgtgccattcaagctcttgtgagtcattagtttcatcgtaagagtttcttttcaaattgtggagcagttgggcaaatatttctttcccctattatattttagatggcactgtctaggatagttgttggctttggttaggagtgtgtgtgtgtgtgtgtgtatgagtcaacccattgggcaatttgaagaatcaaaacaaaacaaaccgacaaacagcctcaacccctggtactagagacatctgtgcatggatggccttggtgtatctaaccctgtggttccctttccatctccatccctctacttgttgcaaacgtagggaaaaccctgggacactgagaaacaggtggggcatgggtgatttgcggggagaggggcattctttcacargatgtggtagagatagctgagccttgtgcaagagtaagactgattttctgatcacataaaatgcaaagactcagcattagaaagtctgatgcaaccttccctaccaggataaagtctaaacaccttaacctagcactaaaaaccctccaagatttggaccctgcagcttccagcctcaccagt

SEQ ID NO: 873507 - DNA, 620 bp, Homo sapiens
aggcacatcttatatggcagcaggcaaagagagaatgagaaccaagtgaaagggcaaaccccttatagaaccatcagatctcgtgagacttattcactaccatgagaacagtatgggggaaaccgcccccgtgatataattatctcccactgggtccctcccacaacacatgggaactgtgggagctacaattcaagatgagatttgggtggggagagagccaaactatatcaaacctctrctgtgggatgttaggaaatgcctatcaggctgtgtgatttttgtcccacagtgtacacattttctggagaatcacaggacatgaaaacaaatatgatttcattacatgaacctttccagtgtttgaccaaatattaagcttatcaggccaatttaactgacagttatagcatacttcctgaatccaagacacagagccaggcaccaagcaggaagaaggtggtgatatggccaacagaacagaaaatcagaagccctgtagtggtggtgccacggaaacagtggaaggtgaagtttctgcatgggtcaggcatacattggtgaggcacattcgaggccagcctcatggatatgtcacctgtgtagtcccgcaggtctgt

SEQ ID NO: 873508 - DNA, 665 bp, Homo sapiens
gatttcttgaggactcactatcacaagaacagcacaagggaaaccgcccccatgatctaatgaccacctgctaggtccctccctcaacacatggggattacaattcgagataagatttgggtggggacacagagcaaaactstgtcaccgttgcttccatttctgccaggaatgttctttcctacctgttttccctataaaactcaccaaggactttccagacacatttgaatgtcacctatttcaacaggtttatcctaactttcctgggcacatttagaacctcctcatctatccttcttataactctccatgtttaattcttcattgctgctactgtagttgtttttctttaacattatctgccttcctgttatattataagctcctggacagcagaagtcatgcctaattctctcttgtatcaccaggcattgcactgtttgaaaatgtcatttgaattgaaatgcctactatataggcattgaactaaaagataatcctctcagtcagtagtgaaaaagaaagaaatatttctgctttgaaatctaaaatgcttacatagaaccattagtgtgtgaaagtagtgtaagtgcaatgagaaaagcaggaagaaaacaagtaaatggaattaagagttggataaaccatctaagtcctgcaaa

SEQ ID NO: 873509 - DNA, 665 bp, Homo sapiens
gatttcttgaggactcactatcacaagaacagcacaagggaaaccgcccccatgatctaatgaccacctgctaggtccctccctcaacacatggggattacaattcgagataagatttgggtggggacacagagcaaaactgtgtcaccgttgcttccatttctgccaggaatgttctttcctacctgttttccctataaaactcaccaaggactttccagacacatttgaatgtcacctatttcaacaggtttatcctaactttcctgggcacatttagaacctcctcatctatccttcttataactctccatgtttaattcttcattgctgctactgtagttgtttttctttaacattatctgccttcctgttatattataagctcmtggacagcagaagtcatgcctaattctctcttgtatcaccaggcattgcactgtttgaaaatgtcatttgaattgaaatgcctactatataggcattgaactaaaagataatcctctcagtcagtagtgaaaaagaaagaaatatttctgctttgaaatctaaaatgcttacatagaaccattagtgtgtgaaagtagtgtaagtgcaatgagaaaagcaggaagaaaacaagtaaatggaattaagagttggataaaccatctaagtcctgcaaa

SEQ ID NO: 873510 - DNA, 635 bp, Homo sapiens
acagagggtataaataaaagttttgaagtaaaataattcggtgtattaggagtatatacctgatcctttgatagactaaagctttgtttctgtttagtgttttgatgagaggactgttttgggtaaggtttttgttgttttcattccaaaatgaaagttaattttacctcaaaccatgaattgggtagccacgattaatggatcaataaaataaacaataatctcttaatgttttaagtcaatttagcttatattcctgtatcaaaatattcataaaaaattatgggcttatttgctttattcattctttgtcatgcattggagacaaagttaataattaaacttgaaacatgtgtgtgtgtattcttttatatattggtaaaatcattcactatagaagtctttatatcttccttttcagtacaacacatgtcctttcaagggaagtttwatatccatgaatcatagatgctagagaaagttacaatggggcagtaattttagaatcttaattgccttgccagataaatttttttttttatttttctcagacatcatttgattctgtcctcctaagaagtgttttccagtacataggcaaaaagaactgtaatcatttctggttttatttgcac

SEQ ID NO: 873511 - DNA, 597 bp, Homo sapiens
tttggtcctcttttctatttggaacaagcaagtctaaccttcttaggaagccacatgtaaaatgaatgacgatgtcaagtttcatgcaaatattatttgccctggctttagattcactttctaattagaccaagtgatactcatatacagacataacacattgctgttttattaacttatgttgcaaattcagaggcttacatttttttaagagtgtktatgtttttgccacatctctttgttacttgctgtaattctctatccaaactacagtgttttaaatttctagatttacaattctgcaaagatagagttaaacactatttggactctggctacatgatggtagcaggaattgttcaaagctgccgtcttcggctcttaaaggcagctacagtaactttctgaacagattgggttaaatatttttacagacccattctatgatgataaggcggtaataagttgtgcagtgcaacactccaaagggttccaaatctcacaagcctctttgtatgtgatgctctcgcagtgaagaagattctttgggctataaagatgaagagtctacttcttctggtgctgatttcaatctgc

SEQ ID NO: 873512 - DNA, 588 bp, Homo sapiens
aagaggtcattccttgtttagatgctataatggtgagagatattcagggacacagattccattttatgtacttgctcctaaaacattgttgaatgaatgttttgaacatgatgccagcaagtagctatttatattgtttatgcwtatgcctgaacagaaatttatgctcttgctgagaggcttattttgaaaagaccttcctaaactatcactagaaaatgcaaattgtggtcaagaggttcgtaactgaagactactgtattctcctccatgagaggaacggcagatgtttccttaggccattcactatatactgagagaaaatttgccattttttgcagtttttaaaaattgattttgactacaccagcactgaaattaaatgaatcattttcttttcctgatttcctgtggattttgaggagaggtttgctttataaataccacttgctcttccttatatcagttttgttttacatatttcgtaatttttgagtgcatttccttttgttttatattccaaaatacctgtcaccttcacttccaaacagccagttccacctattaacttctgttattgttgtttat

SEQ ID NO: 873513 - DNA, 583 bp, Homo sapiens
agggaattccctagagttcttccgcgtatccaccaatgcagaaagataaaacctgaaggacaaagaccatacctgcaacttcttctatgtgttatggccttaagatttcattatgtctataaagagaattatttttcttactaggacaccgaggataaatacaatttttaaaagtgttattttatttttaattaacacataacaatcatacatctttatggggtacaaggtgatgttttgaatatacattgggtaatgatcaaatcaggttaattactaaatctgtcgcctcaaacattcatcatttcttgtggtgaggacattcaaaatcctgttttctagttattttgaagtatataatacattacygttaactgtagtcaccctactgtgcaatagaacaacagatcttattcctcataactgtctttatacccagtgatcaaactgtccctaatgcaaatatttttacgtggggtataaaagcttcaagtagcttacatattcatttgttttggcgataagataaaataagccataactttactgaaatgttttgagaaatgaaaaaatagttgtatgt

SEQ ID NO: 873514 - DNA, 588 bp, Homo sapiens
ctcaccccacagggcaccggtgaggatgggaacccaggaatgtaaggccagccctgagcctggacctagtcaatgttccataaacggcagcctagggacactgggaccaggcagcccaggagtgggagggaggagttggctcctgctggatcatggtggtggggcagggkgggggtcggggggatgttgcaggaggagacgtttgtttcatcacttgttcatgcaaaccttctgaggcaccctcgccattcagctccccaggcccccatccagcccacagcctctgccatccctgccctaccctgggacttggactctcattgccctgtgagcccggctggctcattcccgcttcccagccagcagcccctcacctgccagggctccaataagctttggctctggagggcacccacactgcccctcctccagccatctttttttgggagtataattggggtataatttacataccacaaagttgacccagtgaaagtgtctggttcaatagatttactattgattaagatctatttaatcaatagattttagtatacttacagttgtgcaactgtcatcacttctatt

SEQ ID NO: 873515 - DNA, 662 bp, Homo sapiens
aaaaaaaaaagcaggagttgcaatcctagtctctgataatacagattttaaaccagcaaagataaaaaaagacaaagaagggcattacataatggtaaagggatcgatgcaacaagaagagctaactatcctaaatatatatgcacccaatacaggagcacccagattcataaagcaagttcttasagacctacaaagagacttagactcccacacaataataatgggagactttaatagcccactgtcaatattagatcaacaagacagaaaattaacaaggatattcaggacttgaactcagctctggaccaggcagacctaatagatatctacagaactctccaccccaaatcaacagcatatacattctactcagcaccacacagcacttactctaaagttgaccacataagtggaagtaaaacactcctcctcaacaaatggaaaagaacagaagtcataacaaacagcctctcaggacacagtacaatcaaattagaactcaggattaagaaactcactcaaaaccacacatctacatggaaactgaacaacctgctcctgaatgactaatgggtacataatgaaattaaggcagaaataacgaagttctttaaaaccaatgagaagaaagatacaactggctgggcacagtggct

SEQ ID NO: 873516 - DNA, 662 bp, Homo sapiens
aaaaaaaaaagcaggagttgcaatcctagtctctgataatacagattttaaaccagcaaagataaaaaaagacaaagaagggcattacataatggtaaagggatcgatgcaacaagaagagctaactatcctaaatatatatgcacccaatacaggagcacccagattcataaagcaagttcttagagacctacaaagagacttagactcccacacaataataatgggagactttaatagcccactgtcaatattagatcaacaagacagaaaattaacaaggatattcaggacttgaactcagctctggaccaggcagacctaatagatatctacagaactctccaccccaaatcaacagcatatacattctactcagcaccacacagcacttactctaaagttgaccacataagtggaagtaaaacactcctcctcaacaaayggaaaagaacagaagtcataacaaacagcctctcaggacacagtacaatcaaattagaactcaggattaagaaactcactcaaaaccacacatctacatggaaactgaacaacctgctcctgaatgactaatgggtacataatgaaattaaggcagaaataacgaagttctttaaaaccaatgagaagaaagatacaactggctgggcacagtggct

SEQ ID NO: 873517 - DNA, 658 bp, Homo sapiens
ttccttctcttggaaaatgtgaatggtgaattatttcaatggcactggcttctctgtgttgtcacttagtcacctgtataaattaacatcccacaggtagaaatgaaacactcagtcctgttactcctaggtattaacatataagaaagactagtacatgaatgttgatagcagctttatttgtaatagccccaaactagaagcaatccaaatgtcctttaacaaatgagcagcaaaattgtggagtatctatataaagctatacacgagtctgtaataaaacaatgaagtgttgacacatgcaacatggaggaatctcaaaataattatgctgagtgagaaaaaagcaaaaaacagcattttgttattccatttatgtaaagttttagaaaaagaaaataagtctacagcaaaagacagtaaatcaatgtttgtggsaatggggtgccagggagggagggaaagagggattttaaagggggctgagatgactttgcaggtgatgaatctgctcattatcatgattatggagatggtttcctgggtgtacacattagataacacttaatacatttacattttaaatatgcacagtttactgcgcaacaatatctcaatagagctttaaaaaatggctccacataaaaaatctgggtct

SEQ ID NO: 873518 - DNA, 618 bp, Homo sapiens
acatcactaccacttgttttcctacacttgctggaaacaatatcctaacctttccaattagtaacctaatcactaccaaatatagaaaacacattcgagtgatgcctgcaaaagatgtattatgcttccaggcatcacatactcaagatctggggactatgtatgcaggctattcgtgcatagtatcataagtaattgctatataatgtcaccagaacaaatccagtagggtccttcttcatgtggttatacaccttaacagcatgctgtaaagggaccacaaagaattttcccactgaactttgttcaggagccatcaggcttacaggtcaaatttaacttacttctgctcaaacaccaccaggwggcgctcttttccaatgcttgaggacctatcttgggtccgcagagaatttgcttaccctttcttcctcttcactggtttagatcttgctctttgatgggtctcactcctgccttttgaatagcttcctctgacagttcccataataccttccataatcagaggccaaaacagtaaacaaaatgatcatcggccttgaaagagactaagataagctagtttctactgaggaaaggttccagtggggttcctga

SEQ ID NO: 873519 - DNA, 632 bp, Homo sapiens
aagtgtccatgaacacgtgaacagatgaaaaaaaatgtggtatacatacacaatgaaataggatttagctatgaaaaagaataaaatgctgtcatttgcagcaacatggatgagcttggagtcattgttttaagcaaaagaagccaggtacagaargatgaatcctatgtgttctcactcacatgtggaagtaaaaaagctgctctcatagaagaagagtgtagaataatggttacttgaggcaggaagtagttgggggaggtgggactatagccaaaagttgatggatggatacaaaagtgcagctagataggaagactaacttctagtgttctataggattgtagggtgagtgtaatatacaatttattgtatattttcaaatacctagaagagcagatactgcatgttcccaatacgaagtaatgatcaatgtttgaggaggtgtatatgctaatcaccctgctttggtcattacacattgtatgcatgtattgaaataccactgtaacccataaatatatacaattattactgcatccatttaaaataataataaaagcaaaagaagaaaagaaaaaaagctacagtctaatatccacaattaaatcttcaataacatagtagaaaac

SEQ ID NO: 873520 - DNA, 632 bp, Homo sapiens
aagtgtccatgaacacgtgaacagatgaaaaaaaatgtggtatacatacacaatgaaataggatttagctatgaaaaagaataaaatgctgtcatttgcagcaacatggatgagcttggagtcattgttttaagcaaaagaagccaggtacagaaggatgaatcctatgtgttctcactcacatgtggaagtaaaaaagctgctctcatagaagaagagtgtagaataatggttacttgaggcaggaagtagttgggggaggtgggmctatagccaaaagttgatggatggatacaaaagtgcagctagataggaagactaacttctagtgttctataggattgtagggtgagtgtaatatacaatttattgtatattttcaaatacctagaagagcagatactgcatgttcccaatacgaagtaatgatcaatgtttgaggaggtgtatatgctaatcaccctgctttggtcattacacattgtatgcatgtattgaaataccactgtaacccataaatatatacaattattactgcatccatttaaaataataataaaagcaaaagaagaaaagaaaaaaagctacagtctaatatccacaattaaatcttcaataacatagtagaaaac

SEQ ID NO: 873521 - DNA, 618 bp, Homo sapiens
gtaaccagaaatacttttaaaatgttgtataactttcttataagcctaaaattatgtgaaatttaacaatttatgtaagataaaatgctatcaagagcaaaagaaagaaacaagcaaaaaagaaattcatcttgagttcagatactaaacaaaaatgcctactttcaccattgctatctaacattgtactagagattctacaagtggaataaagcaagacaagtaaaatatatgaagattgaggaggaaaaagcaaatatgcattagatatatttatataaataatcttagagcatctacagagaatatattaaagagtttttgaatgctgaataygaaacaatatagaataattatacttttctatatggcagcacgaacatttataaactgacactttaagagaatgcaatatttacagtggcattaaaaagaacagataccttggaataaatcaattaatacatgtataagagcaccatagaaatacatatgtattaccaacattaaccttaaatgtaaatgggctaaatgctccaattaaaacatagactggcaaattggataaagagtcaagacccatcagtgtgctgtattcaggagacccatctcatgtga

SEQ ID NO: 873522 - DNA, 550 bp, Homo sapiens
aaaaaaagcaggggttgcaatcctagtctctgataaaacacactttaaaccaacaaagatcaaaagagacaaagaaggccactacataatggtaaagggatcaattcaacaagaagagctaactatcctaaatatatatgcacccaatrcaggagcacccagactcataaagcaagtccttagagacctacaaagagacttagactcccacaccataataatgggagactttaacaccccactgtcagtattagatcaatggagagaagattaacaaggatatccaggacttgaactcagctctgcaccaagcggacctaatagacatctacagaaatctacactccaaatcaacagaatatacattcttctcagcaccacatcgcacttattctaaaattgaccacataattggaagcaaaacactcctcagcaaaggtaaaagaacagaaatcacaacaaactgtctctcagaccaaagtgcaatcaaattagaactcaggattaagaaactcactcaaaactgcacaaatacatggaaactgaacaa

SEQ ID NO: 873523 - DNA, 586 bp, Homo sapiens
gaaaccccatctctactaaaattacaaagattagccgggcatggtggctggtgcctgtaatcccagctactccggaggctgaggctggagaatcgcttgaacctaggcagcagaggttgcagtgagctgagattgcaccactgcactccagcctgggcaataagagcaagactccrtctaaacacacacacacacacacacacacacatacacacacacacacacacacacacaacagggatccatacgcaagcccaagcttctcaagttcaagaacatacggtgggtccagctcctccacccaaaaagttcagtggacaggcacccagcgtgacaccgcataactgctgaatttgagccacattataagaatgggctgtagttattcccattttacagaagaggggttgaggcccagagaggggcaggaagttgcctgaagccacacagcagcccagaggccacgccctatcagaatctccaccccgtgcacctctcaggagatgctccaggggtgatgtggccagccaacaagcagtggggttaggatttgaacccgggtctgcctgctccacgaccccttgtt

SEQ ID NO: 873524 - DNA, 621 bp, Homo sapiens
tggcgctgggtcagtggcacagctgaactggcacagctatcactgataatttttttaaagcaaagaaagcaaagaaaacaatacccataatttcatttcagagattacagctgaaaacaaatttgtagacatttccatacaaaaacacatatgtgctccatgttccattgtgttgataccccctcatttaatttacccgttcctgctcaataattaggaatataatatgtgcactaatataaatatgctggggtgagtgtccttgtcattaaatcattgcccatgtccaccatgatgtcctcgccatgagttgatggatgtgggatttttagtttcagraagatgtacttcttcaggtttttgttatgtcatgacaaagtggtctgatgaagggcacctgtgcctgcctcctttggctggctgagtgccccttagaagcaattaaaacgatggcttccatcaggtcagatggggtcctgggtacttctacaaacattatttcactttcatttcactgggatcctggaaaattgacatggattttaaagagggggaaactgagtgatttgcccatagttattctattagagaacaggaagctgaatcttgagacttgcacaa

SEQ ID NO: 873525 - DNA, 628 bp, Homo sapiens
gaagctttattttgcaatttactagctgaaacagcaagcttgccgttcttttcttttttgtttgttctattattactgtaggtttggttaattttgtaattgtcattacagtttctgatgtttattcttgcaaatggactttataatgatcattttccaaaaaaaattcttggattagattgaatttatacattgaagtttagttgcccgaaattgggaagatttctgaaatcccctgatcttsagcttcattatctattaatcaccaatgccagtacttgccagtaccccacatccaacagcattgtccctgggccacgagagtttcaggcctccccagagagctgccaggaagaaaccacacctcacagagaggttctctctgcccttcagccccactggcaacatgaccttgggcaaggcatggaccttaaggtccctcatttgatgagagagaaatttatcctagaagtaatgttcgcgcaatcactgaggtagcactggttgttggctaagcctggaatgaggtcttagaagttttggaagcttccagatgaatccataattgggaatgcacatttgcataatgtgcctttcagtattctattctttggatgatatcactatt

SEQ ID NO: 873526 - DNA, 661 bp, Homo sapiens
tcttgaggactcactatcacaagaacagcacaagggaaaccgcccccatgatctaatgaccacctgctaggtccctccctcaacacatggggattacaattcgagataagatttgggtggggacacagagcaaaactstgtcaccgttgcttccatttctgccaggaatgttctttcctacctgttttccctataaaactcaccaaggactttccagacacatttgaatgtcacctatttcaacaggtttatcctaactttcctgggcacatttagaacctcctcatctatccttcttataactctccatgtttaattcttcattgctgctactgtagttgtttttctttaacattatctgccttcctgttatattataagctcctggacagcagaagtcatgcctaattctctcttgtatcaccaggcattgcactgtttgaaaatgtcatttgaattgaaatgcctactatataggcattgaactaaaagataatcctctcagtcagtagtgaaaaagaaagaaatatttctgctttgaaatctaaaatgcttacatagaaccattagtgtgtgaaagtagtgtaagtgcaatgagaaaagcaggaagaaaacaagtaaatggaattaagagttggataaaccatctaagtcctgcaaa

SEQ ID NO: 873527 - DNA, 661 bp, Homo sapiens
tcttgaggactcactatcacaagaacagcacaagggaaaccgcccccatgatctaatgaccacctgctaggtccctccctcaacacatggggattacaattcgagataagatttgggtggggacacagagcaaaactgtgtcaccgttgcttccatttctgccaggaatgttctttcctacctgttttccctataaaactcaccaaggactttccagacacatttgaatgtcacctatttcaacaggtttatcctaactttcctgggcacatttagaacctcctcatctatccttcttataactctccatgtttaattcttcattgctgctactgtagttgtttttctttaacattatctgccttcctgttatattataagctcmtggacagcagaagtcatgcctaattctctcttgtatcaccaggcattgcactgtttgaaaatgtcatttgaattgaaatgcctactatataggcattgaactaaaagataatcctctcagtcagtagtgaaaaagaaagaaatatttctgctttgaaatctaaaatgcttacatagaaccattagtgtgtgaaagtagtgtaagtgcaatgagaaaagcaggaagaaaacaagtaaatggaattaagagttggataaaccatctaagtcctgcaaa

SEQ ID NO: 873528 - DNA, 665 bp, Homo sapiens
agacttctgccccataggcagcaataaaatagaggtccctttcccctgccagagtgatgtcaagaaaagtcaactaaaacagaaggttttaatatgttttagaatctaaaaacacaacacccaaatgttgaggctttaatagaaaactacttgtcatatccaaattattcaaactgaatgaaaaaggccattaataggtagacayactgagataatagatatgttagaattatctaacaaagactttaagcattcatcataaaaatgcttcaaagagccattataagcacacttaaaacaaattaaaaatacaagtctcagcatagaaatagaggatgtagagaagaaccaaacgaaaattttagaagtgaaaaagacaatagccaaaaaaataaaaaaagaataagctcaacagcatgagggggacacaggaaaaaatcactgggctagaagatataacacaattaaccaattcgaacaacagaaataccaaattgaaaaataaaagtgaacaaaccttcagggacctgtggaaatgtaagaaaatatctaacattcaagtcattggattaccagatggagaggagaaagagaaaaaggctgaagatatactgaaggaaataatggctaataactcatacaatttagcaaaagacataaactga

SEQ ID NO: 873529 - DNA, 670 bp, Homo sapiens
tagtttatttgaaaggtgatcataaaaggaccatagaggaggtgggcagtgagatagggaagggaaaaagccagtgtaaagtacactgataagcagaataacattgtgagaagtggggttccatcctactgggaatacctaggacatactataggagtgcctcagagttatctcacctggagattgaggagactgggatattcatctaccaatttcctgttactggttaaggcccttttctgcccttactctccaaccacaggaccttgcattaaaaagccattggtgggcataggaatggggggcgrggaagggcatataagcagtacactaatagtgtctgctatatcttaaagcataaatattgaagacaccacctattacctcccctaacaggtagatggggaggtatactgaataccattataattttaatgctaaagaagacatcaatggctttctctggagtagtacacaagagaacagcaatacagtaaatacatctacacactggaaacaaactgaaagaaaaagtgattctgtcctatgaagctctattccttgttctatcttcaaagctgcccttggttttggcttgatttcaccagaaacaagatcatgaggagcctggtgaaagtaagaaggaagaacagaactgggagggtgctgt

SEQ ID NO: 873530 - DNA, 626 bp, Homo sapiens
taatttacaaataaaaattgtgtatatttgtgaggtacaatgtgatgttttaaaatatgtatacattgtggaatagataaataacctaattaacatattcatatttcacatatttgtcattcatttgtaatgagaatatttaaaatctaccctcagcacttttcaagtatacaacacactgtaattaactatagtcaccatgttgtacaatagatytcttgagattattcctcgtttaaccaaaattttgtatcctttgtccaacaatccccaatcccacccaatctcccaggccctggtaatcaccattctattcttctccttccatgactttgacatttttagatgccacatatatgccattccattttctgccagaaagcctatcatattcttatgccaaagagatgattccaatgtcacaaactattggctgtatgttttgctactatgctctgtacccattctctgtctttttttttttttaatgaccgcatggcaattggtttcctcaatatctttattctttcataggccttcattcagccactcacctgaagtttctccactttgttttgcttctgttttatgatacaagaataggcagatgtgagttcaaatcctgg

SEQ ID NO: 873531 - DNA, 609 bp, Homo sapiens
agatggcagtggccacattaggactgtaatagtggcagcagagaaaagtggaaggattgtagatacattttagagaaatattccacagaatttattccttgagtggttttaggatttaagtaaaaaataaaaatgaagaatcactcctagattttgggcttgggaaactaataggtaatgatccaaaatacttagatggggaaagcttgaggaggagcacatttggcaatggatgatgatattaatagcactatttgggtcatgttaagtttaagatttctataggaaattcaaatgcatatgatgggaaggtagtgggatatatgaggatagagtccagcaaagaggtctgggctaatgatttaaacttggcagtcattagcatactgatgttatttcaagtgattggattacatattttcayctaaggtaaaaatgtaacaatagaaaaaaggagtcaaggtctgagcccaaggtaatctaagatttccttagatggcaataaaagaggctacagctcacaaagataaccttacggaagcatgtagtgaaggaagtgaaggaagaaaaacaaggtaagtgtggttaggagtaatgtcagcaagatgg

SEQ ID NO: 873532 - DNA, 581 bp, Homo sapiens
gacacagccaagagacgtgtattaaatatctgccatctgctcagaaccaggagattctaaagaaaagttccacgcgaatctgttttcctaatagatgacagaaataacaaattgtggctcaggccccttctgcatcccsctccccacactttggtataagcacttaacagaaaccccaacacagccaggagaggactaacgatggaaactgagcccaaattgatggctctaaaacaaggaaactggccaaattcagtcaaccatgtagttactaaccaactattttattaaatagaatccttcaaaaaatcaacctttctttttatatataccaacttccctttatcaagtgatatattacactgacttaacctttaactcttgagagcactgggtatgtatctctgtcacccacaaatcaccagtttgacagctggcaactttactcttgggcttactatattatatacttacatcttctatagggtaggagaagggctcaaaaagtctttcacgcagacctcagagtgcccatgttggcaaaatattttcatttgtaagtgtgaaatactttcagaagc

SEQ ID NO: 873533 - DNA, 457 bp, Homo sapiens
aaaactaacttggtgggatctgctcctttaaagtaggcattaacagattctgtaagggcaactgccacaggtaaggtatcctgatttccaaggctgacagggctgggaccccgtgacacacctagaatatacacaattaacttgttaaatccttcagaaakacataaattaaatatcaagatagttagattcacattgttaggctgtcacaaacgaccctaccactggtttcagtgatgtcccatgataaatctgggggctaagaaatatagtataaaacaaactggagcattaatacaaaggacaaaaaaaaaccaggaagacatgtcacacagacatttcttttaaatggaaagacagaatggttaaggaatgtcagaataaaaaagcccttgactaaacagctaaaatttcaaaaatattggcttcaaaaacattcaaataccaaattcctcca

SEQ ID NO: 873534 - DNA, 632 bp, Homo sapiens
tggaaggcaaggagaagcaagtcacatcttacatagctgtcagcagacaaagagagagcttgtgcagggacactcctccttataaaaccatcagaactcatgagacttattcactatcatgagaacagcacaagaaaaacttgcccccatgattcaatgacctcccattgggtccctcccacaacacatgggaattcaaaatgagatttgggtggtgacacagccaaaccatatcatttcacccctggcccctcccaaatcgcawgtcctcacatttcaaaacccaacatgccttcccaatagtccccaaaagttttaactcatgtcaacattaacttaaaagtctacagtccaaagtgtcatgcaagacaaggcaagtcccttccaactatgagcctttaaaatcaaacacaagttaattacttccaagatacgataggggtacaggcattatgtaaatacagccattctaattgggagaaattgggtgaaacaaaggagctacaggccccatgcaagtcagaaatccagcagggcagtcaaatcttaaagctccaaaattatctcctttggctccatgtctcatgtccaggtcacactgatgcaagaggtgggcttccatggtcttgggc

SEQ ID NO: 873535 - DNA, 683 bp, Homo sapiens
actaacaaaaggccacaagattataggagaaccctgaattctcctactatgtagttgtagtttctataattccttatcgcccaggagtcatgtggccagaggtcactagatttgtaacttccccagttgctcctacaatgctattatagaacctaagattggtatcttgacacattttttagacttttgcattctggcaacagactaaccccacctggacttgcgactcatcactcaaccggtcctatggcccctacccagaagcagacacagcacatgaggactgttttccacacccctatgatttcacccccaaccaggcagcagcacccattttctagcccctgcccaataaactatctttgaaaaaccctaacctctgagccttcagagagactgtgtaaagaaatataaataaatcaatggaacagaataaagaatccagaaatagatccacatatgaatgatccaatgatgttcagccaagatgctaaggttattyaatggagaaaagatagtctaatggggaaaagatagtcttaacaacaattggtgccatatccatatagaaaaaaggaatccttaatctttacctcacatcatataaaagataactcaatgcatcatagacattaatttaaaaactaaaactataaacttctggaagaaaatatagggaaaaa

SEQ ID NO: 873536 - DNA, 641 bp, Homo sapiens
tttgtctgcactcttcagggttacaaatgccaggtttttctcaccatccctgctgtggtccagcattcagctcctgtgaggtgtttgtcttccatggttcaggaatccttcaaagccactcacacaaccgagattgtgtcccatgggcagggaggagcatcctctgtttctgtcccaacactcaaggtcttttctggtttgagactcaaagatcaagtctacaggttccaaatacaaaaggacatctaatcactcaggaagccaacaaccatggtgattttttttctggttttcacttgaatcttatttttgagatacggatcctytgaaagatcttgaaagatcttccaagaagacaatccacatatctattaaagtcaatcccttcttctgtcatccaaatagaagatggtataccccttcccaggtgcatggaaattccagtatctccaaggactccaggaggaatttcagttctcatagttactgctggctcttttggcctatatcattttcttttgcatcatgcttttgttagtagtttcatttttccacaccaaattgccttgcttaacatcagcctgattcttttgggtagtggtagctgcccagaacatgactgcctcacagctgtgcatggt

SEQ ID NO: 873537 - DNA, 641 bp, Homo sapiens
tttgtctgcactcttcagggttacaaatgccaggtttttctcaccatccctgctgtggtccagcattcagctcctgtgaggtgtttgtcttccatggttcaggaatccttcaaagccactcacacaaccgagattgtgtcccatgggcagggaggagcatcctctgtttctgtcccaacactcaaggtcttttctggtttgagactcaaagatcaagtctacaggttccaaatacaaaaggacatctaatcactcaggaagccaacaaccatggtgattttttttctggttttcacttgaatcttatttttgagatacggatcctttgaaagatcttgaaagatcttccaagaagacaatccacatatctattaaagtcaatcccttcttctgtcatccaaatagaagatggtataccccttcccagstgcatggaaattccagtatctccaaggactccaggaggaatttcagttctcatagttactgctggctcttttggcctatatcattttcttttgcatcatgcttttgttagtagtttcatttttccacaccaaattgccttgcttaacatcagcctgattcttttgggtagtggtagctgcccagaacatgactgcctcacagctgtgcatggt

SEQ ID NO: 873538 - DNA, 567 bp, Homo sapiens
ccccaggagaaacttcaggtaatttgcacttataagagaaagcagtgtctctctacacgatcttagaatatgagactatgttaaaaataagtaaaacaaagaactaagtccaggatcaagttcatttattcatacaatattttatctaaaaatatatatttaaatgtgatcaaggctgagggctcactcctgtaatcccagtcctttgagacatggagataggaggatagcttgaggccagcagttcaacaacagcctgcgcaacataacaagaccacatatcaacaacagcaaaaaattagctgggcattgtggtatgcatccgtagtcccagctactcaggaggctgagacatgagggacatgaggatcacttgagcccccaggagttaaaggctgtggtaagctatgatgataycactgcactccagggtgggcaacaggacaagaccctgaaacaaaagaaaaatgacacagagtatttagtattttaaaatagtttacatgggaagagtattaagaagccccatataaacatttttttaaataataggtatggctaggtcac

SEQ ID NO: 873539 - DNA, 636 bp, Homo sapiens
cataatattatatattattatatatactatagaatatataattatatatatagtataatatataataatatataatattaataatatattatatattataaacaaatatatatttaaatataaatttatatatgttatatatatataaatatatatatttagtagagatgggggtttycccatgttggccaggctggtctcaaactcttgacctcaggtgatccacctgccttagcctcccaaagtgctgggattacaagtgtgagccacttcgcccagctgatttttaaagaagatctatccaggtcttcttggagcagaattatgtaggcatccaggaatgcgagttgtgctgccaagtgacatttctcttcatgttttccctccctggcagagtcgccacttgatttaggatctgacaccatgggtagatattggaattccagtcttagcctgcaagtcacacaatgtctttgagcttcagcttccaagcctgcaagatggggcgataagagtttacctcctgggagttaagaggattaaataagttaacagttaagtaaaagtactctgaaatgttagcttttattttcatccttccctccttgtgtaagaaaataatgtaaatagccttta

SEQ ID NO: 873540 - DNA, 652 bp, Homo sapiens
cctttctctcaaattcccattctccatatccctttaggtaggtgaggatcttatccctagccagcagctgtaagggaactgggccttcctttctctggacatagcactgtaggtcccagtatatgttaagaatgtagatggtcagaggaacagaggaaaacctgcatctgagtccccttgtcatccctcctgtggattcctggggaagcatggaaaacaagtatttaaaatgacaggacaatccatctgccacccgtgggaatggtagaaaataagggatattcatggaaggctgcttttgtacagtctcacaaasagcagcccttagacctaagaggacattgcctatcagtcttctcagtgtagaggaagaactgtcagggccagggagtttgggatgagagaccacaaaaggcagagaaagaattgtcctctccccaaagtgcagatagctctagaaaggaagtaggagttgctcttaatggaccacatacagatgccctatggagacaaacaaatgacctcaagagccactggaaaacctggtctcaatgtgtagcaggatttaaaaattcatgataggaaataaagaattggtggagacagagtcttcccaatattaagcagagaaagaagttgcatgatatgcaga

SEQ ID NO: 873541 - DNA, 600 bp, Homo sapiens
ccagaggagaagtgtggaggatgtgccaacactataaatgctgccatttttgcttaaggagagtaaaaaaggaaaatggggtcatggtgcactcattgttgtagatggtttgggtagtctggaatgagttcattgcctgcaagtgctagttcattcattacacctatgcttgcagagaaggggcggttgtgtgccttcccgagcccgcactagatgagtccctaagggtcttgtggttaatrctccttcctggcaaatggaccagggttcccggcagactttcctagcagccttgaagcctgggtctcttcgcctggggattataaagcagcatgttctcttgtttcctttctgaagtctttaaaggtttataggattcttttagtgggattcttcttttctgttgcttcagcatttccctttccatgtgtggaaaggacatatgttggttttatattaatcattgaaccccattggatttgtaaaatgtgagacattttgatccttcataatctttttttcttgaaaactaggaatttttgtttttggttgtataaatcatcttttcttacatacaacatcctaatacttggccagttg

SEQ ID NO: 873542 - DNA, 571 bp, Homo sapiens
cttaaggacacaacacaagatagagaaatttcatccagtattggtgtcagggtcccacagcaaagtttgtaactgaccagcctgctaggctggctttaaaagcagccttataggggccctaaaccatcattgtatyctgtgatacctattacagaatgacacagaaagacaaattcttagcacaaagcacaccagatttgctacagcctaagactagtttcacaaatccttttttctatcaatcagactcatgcagagaagacaaatagtgatgtctaccatttacatacacacacagagaaagagagagagagaaagagaccagaaacttggctggtaagaatttcatatgcttttttttttgctggcataccaggtttccaggttccttttctctgcagcttccagaagaatggagcaacttttgatgaccctgcttgatgtgccatagctgtggggttcaagccactttacaaaagccaccttttctgttttatggaaccatagacaaaagattctcaatttttcaagatgttgcctaatgggctgcatggggaactgaattaacatt

SEQ ID NO: 873543 - DNA, 565 bp, Homo sapiens
ctattcacaatagcaaagacttggaaccaacccaaatgtccaacaacaatagactggattaagaaaatgtggcacatatacaccatggaatactatgcagccataaaaaatgatgagttcatgtcctttgtagggacatggatgaagctggaaatcatcattctcagtaaactatcgcaagaacaaaaaaccaaacactgcatattctcactcataggtgggaactgaacaatgagaacacatggacacaggaaggggatcatcacactctggggactgttgtggggtggggggaggggggagggatagctttaggagatatacctaatgmtaaatgacgagttaatgggtgcagcacaccagcatggcacatgtatacatatgtaactaacctgcacattgtgcacatgtaccctaaaccttaaagtataataataataataataatataaaattaaaaaattaaaaataaataaataaacaaagtccccaccacttccaaatgccatcaacatacaaatttggagattaagtttcacacacatgaaatctggggggcacattc

SEQ ID NO: 873544 - DNA, 614 bp, Homo sapiens
gagatggtatctcattgtggttttgatttgcatttctctaatgaccagtgatgatgagctttttatcatgtttgttggctgcaaaaatgtcttcttttgagaagtgtttgttcatatctttgtccactttttaatggacttttgtaaatttaagtgcctcataaattctggatattatccctttgtcagatggatatattgcaaaaattttctcccattctgtaggttgcctgtttactatgatgatgttcrctttcctgttctgtaggttgcctgctcactctgctttcttttgctgtgtggaagctgtttaattacatcccatttttcaattttggcttgcgttgcagttgcttttgatgttttagtcatgaagtcgttgcctatgcctatgtcctgaatggtactgcctaggttttcttctagggtttttatggctttaagtcttacatttaagtcttgaatccatcttgagttaatctttgcataaggtgtaaggaaggggtccagtttcagttttctgcatatggctagccagtttttccagcaccatttattaaatagggaattctttcccccattgcttgtttttgtcaggtttgttaaacatcaga

SEQ ID NO: 873545 - DNA, 633 bp, Homo sapiens
attccagtcctggttttgccactggccagatgaggcaaatcacattacttggtgtcagtttccaattctgccaactaagagggtcatttcaatgccttccaaagacccttttatagctctataatatggtatcttttcctttacacaatgttcaataccaaattggcaacacaagtcacagaagtttaaatctcaggtgttcaggagcctcttcggaggaccaattcttctctctgtcccaggaatctgtagggrgtagattgggcaggctttggggcctagcaatgctttgtaaagcctccctcttgattgcttggccaatctgactgcatccctcataagcattttaggcagtgacatgctgccttgaaattcttcctttcagtagaaaagtcagatctgtcaggaggagaataactccctgcttttgatttcttgttaagaacccaaggcgggaaaaaaatgcaaggagattaaaaaaacaaaaacaaaaactttggggcaaaggaaaatacatactctagcagctggctggccaaggtgcccgagtgaaaagcacccacaattctgcacactctgactataagtttttctctgtattaaggtgtctatagctccacccatgaacagcag

SEQ ID NO: 873546 - DNA, 645 bp, Homo sapiens
ttcgtctccatcggcctctacatgcccgccaccagcttcttgctcctggtccttggtttcaaggctctgcaactgtggatgcagctgcatgaggccggagtgggccttgaggagctcaggggggtccctgaccctagtgtcccccctcccccagcacaggatggtaagcacacaggtcccagacaggggctggatggctctgaagctggtagccctgatctacctagtactgcagctgggctgcatcgccctcaccaacttctgactggacttcctgctggccgccactrtggtgctgccgctgtgctcgccgagcctttgggccctggaccctctgtgctgccctgctggtgttgacaagcccggcagccacgctccttggcagcccattcctgtggcgggagctgcaggaggcaccactgtcactggccaagggctggcagctcttcctggcagcactggcccagggtgcgctggagcaccacacctaaggcgccctgctcttcccactgctgtccctgggcctctgcccttgctgactacttttctggaatgtgctcttctggaagtgagatctgcctgtccggggcaccaggctgggacagagactccccaaggaccccattctgcttccttctggggaaa

SEQ ID NO: 873547 - DNA, 513 bp, Homo sapiens
ttacaggtgcacgccagcatgccctgttaatttttttgtatttttagtacagacggggtttcaccatgttggccagactggactcgatctcctgacctcaggcaatccacctgccttagcctcccaaagtgctgggatttcaggcatgagccaccgcgcccggctgggaagtaacttttattcactcagcgtaattccctggaaattcattaaggttgttgtgtgtatagctagtcccctcctttttagctgagtagtatttctagaaatyattttgatttttactcttccttatccatcatatccaatccaggagcaagtcttgttggttctaccaccaaagtccatcttagatcttatctcttctcgctacttgtatgaatatacttgtctataccaccattagccctcgcccagtctgagaacatcaaactgatcctgctgccttcattcctgccccttcacaattcatttaccacacaatagttagaatacatttcaactaaaaatctt

SEQ ID NO: 873548 - DNA, 677 bp, Homo sapiens
agatgcaaaaactgagccccaaggagatgggttaattctcctagtgtcagacatagtgagactaggagatgtgttaatagatgggttaaacccatgtgtttttgtaagccatggttttcagaaagaagtaacttaaataaaacttaaatggtacttaactaatttccaatgatctggctattttcaaaacactttggaaaactggagcatgagaatattataaatgcaaaatgtttctttgaaattctcttaaatacatttcattttttttcctgtgagagctactttgcttgagccttatagaaataattctgcttttgagtactagtgagaagaaacatctttattctttcaatagatatttttcartgcctactacgtgctagagttatgctaggctaaaaggtagaatgataaaccgatatataaggttcctctcatggtggaacactcattctactggagaactagacttttattatgtttgtagcagacaatctaatgaaattttttcttatttctaatgtccatgatttttggcttcacagtagctatcacaaaattattctgacattatccacatatggtattgctagatagccatggctgtgaaatttggttccttagcaactgcaaatgtaccttggaaaggaaaagaaattgtcatgaaatactct

SEQ ID NO: 873549 - DNA, 677 bp, Homo sapiens
agatgcaaaaactgagccccaaggagatgggttaattctcctagtgtcagacatagtgagactaggagatgtgttaatagatgggttaaacccatgtgtttttgtaagccatggttttcagaaagaagtaacttaaataaaacttaaatggtacttaactaatttccaatgatctggctattttcaaaacactttggaaaactggagcatgagaatattataaatgcaaaatgtttctttgaaattctcttaaatacatttcattttttttcctgtgagagctactttgcttgagccttatagaaataattctgcttttgagtactagtgagaagaaacatctttattctttcaatagatatttttcaatgcctactacgtgctagagttatgctaggctaaaaggtagaatgataaaccgatatataaggttcctstcatggtggaacactcattctactggagaactagacttttattatgtttgtagcagacaatctaatgaaattttttcttatttctaatgtccatgatttttggcttcacagtagctatcacaaaattattctgacattatccacatatggtattgctagatagccatggctgtgaaatttggttccttagcaactgcaaatgtaccttggaaaggaaaagaaattgtcatgaaatactct

SEQ ID NO: 873550 - DNA, 498 bp, Homo sapiens
gctgctgtcagtccacaaatcacacttcgaatatcaagagctgaagcctcttttgcagtccttgcacatacacctacttgctattttctcgtccccttcattttcttcctactagtcatccttcaaagttttattacctgccgtttggcctgcaaagcacataggctgctactgaaccccacatcgcttcctattttaaaagagctttctaaagctttgggacttgaattagtcagcaaargtctgcaattcctctccaaaggcaaggtaatcttattaagagaagatctgaagtatccttaggaacaaaatactcaatgtagcctctttgttctctaagtctccattctccagtgcctctctgtgcatttgtttgtctcagaacagtcatgcacggtggatccatttgtcttcccttatcactctgttactgctgccgagcactcgctcagctgtgtgctccagcttcttggctgacaagataattacattctgggc

SEQ ID NO: 873551 - DNA, 511 bp, Homo sapiens
ttcaggtgcaaatggaacatttaccaatattgctcatattgtagtttagagagaaagcttaaataatattcactcgattctgttgggaggccgaggtgggcagatcacaaggtcaggagatcgagaccatcctggctaacacggtgaaaccccgtctctactaaaaatacaaaaaaattagccaggcatggtggcgggcacctgtagtcccagctacttgagaggctgaggcaggagaatggcrtgaacccaggaggtggagcttgcagtgagccgagatagcgccactgcactccagcttgggcgacagagcgagactccgtctcaaaaaaaaaaaaaaaaaaagaatatattatctgaccattaacaaatgaattaaggtagacatacctaacaaaagtacatttagaaaatctataactacctgaaaattaagcaataaactctattgtgcaagggtcaaaaacaaccactgaatgtagaagacattatgaaatgaatgacaatgaag

SEQ ID NO: 873552 - DNA, 614 bp, Homo sapiens
ctgttgaattttgtcaaaggccttttctgcatctattgagaaaatcatgtggtttttgtctttggttctgtttatgtgatggattatgtttattgatttgtatatgttcaaccaaccttgcatccctgggatgaagccagcttratcatggtggataagctttttgatgtgcttctggatttggtttgccagtattttattgagaattttcacagcaatattcatcagggatattggtctaaaattctctttttttgttgtgtctctggcaggctttggtatcaggataatgctggcctcataaaatgagttagggaggattccctctttttctattgattggaatagtttcagaaggaatggtaccagctcttctttgtacctgtggtaaaattcagctgtgaatccatctggttatggacttttttggttggtaggctattaattactgcctcaatttcagagccagttattggtctattcagagattcaacttcttcctggtttagtcttgggagggtgtatgtgtccaggaatttatccatttcttctatattttctagtttatctgcatagaggtgtttatagtattctctgatggtagcttgtatttc

SEQ ID NO: 873553 - DNA, 614 bp, Homo sapiens
ctgttgaattttgtcaaaggccttttctgcatctattgagaaaatcatgtggtttttgtctttggttctgtttatgtgatggattatgtttattgatttgtatatgttcaaccaaccttgcatccctgggatgaagccagcttaatcatggtggataagctttttgatgtgcttctggatttggtttkccagtattttattgagaattttcacagcaatattcatcagggatattggtctaaaattctctttttttgttgtgtctctggcaggctttggtatcaggataatgctggcctcataaaatgagttagggaggattccctctttttctattgattggaatagtttcagaaggaatggtaccagctcttctttgtacctgtggtaaaattcagctgtgaatccatctggttatggacttttttggttggtaggctattaattactgcctcaatttcagagccagttattggtctattcagagattcaacttcttcctggtttagtcttgggagggtgtatgtgtccaggaatttatccatttcttctatattttctagtttatctgcatagaggtgtttatagtattctctgatggtagcttgtatttc

SEQ ID NO: 873554 - DNA, 616 bp, Homo sapiens
aaaaattctagacaattcagcaaaaaaggcacagaaacttctataaaaatggacagttgaagaccaggaatttcaaagaagaacaaatattaatttgctaacaagtgtagaaagaaagatctacctcctttgtaatcattttatagcaaattgaaatggtaagatactattcaacatataagtcaggcaaaaatggacaaattgcacaatacaaagagtggataaggatgtagggaaacaggaatcacttctggttggaatggataagtgtatccattagtaggwattgatacagtcatttacaagatgcttggggcaggacttactgaacgtaagttaatatataatttaagattcagaaatcccacttctgggtatttgccacggagaaactcacaggtttctatatgtgaatccatataagactgtttatgtaggtgggacaacctaatcatccatcactagcgatatggtttgactctgtgtccctaatgacaccttaaattgtactaatccccatgtgtcaagggagggacctggtgggaggtaattgaatcacgggagtggatttttcccatgctgttcttacggtagtgactaagtctcatgagatctg

SEQ ID NO: 873555 - DNA, 674 bp, Homo sapiens
ctgattgttttaattctcatttgcctaataacatatgatgtggagcatattttcatatgtgctatggtctaaatgcttgtggcccccccaggattcaaatgctgaaacctaatcatcaagttggtaagattaggaggttgggcctttgggaaggtgattaggtcatgagagtggagtcctcatgaatgaaattagtacccttataaaataggccccagggagcttgtttgccccttccaccatgtgaasacataacaagaaggcaccgtctatgaaccagaaagcagccctcaccaggtattgaatctgccagcatcttaatcttggacttcctagcctccagaattgtaagaaaaaatttctgtttataagccatgcagtccaagatattttgttatagcaacacaaatagtctgagacaatatgcttatgtgctatttttatatgttttttggtgaggtgtcttgtattttaaaaatatctcatcctgcctttttttcttattaaatttgaaatctttgttatatacaaggaatacagaatgccacatagaagttcatgattcatagtggcctgcctagagccacgtctttggggacaagcccctctcctaatttggtgaccacctcctccaagtggaaactcaccagcctcccacagcctcaaccctagta

SEQ ID NO: 873556 - DNA, 658 bp, Homo sapiens
actaggtcctccagcatgaattcattttcaagttgggtccaccagcatatgcggttgcagactatggaaacaaaacaaagttcttccttgtgtaaagtgaactgaatcgtatggggtctgaatctgtgaccttggcctcatttgctgtgttctaactaggtgagggaacaggcccagatggtgacaagacgtagagtactttggagaagtccttctgtacttatcatagatcagtgatgacttctgtaaactgaatcttttgatggcatgtgccatttcacccctaggtacttagtgcatggttctgcggaagcaataagagggagacagatggtcaagctggagggaatgaaaaagagaacaaacataaagggaagaaaaaaatgcttaaaggaaaagattgggattctggacaatgcccagaaatatgaaatataagagaaagcttataaatctcaatgcctgagaaacttaagcatagaycttagctgctgcagtacaaagcttagcaatcaaaatgaaatatcccccaattcaacaaagcacattatcatcaaaacaaaatatactacacaattggattggtaaatattaatgaaaggactccaactatgaaatacatgaaggtggaagaaaatgatactgaacctatgaacac

SEQ ID NO: 873557 - DNA, 682 bp, Homo sapiens
tttgtcatcacttgcaagcaattaatcattatttttatgtccttgcttttgccatcttatccaaaatacatgcacttcctcatcatctgtataaatgtttatctctacttcttgcaaacctggtttaaaactcattattgccatacataacttcctattttaacccaccatattctagaattcctgttataatttgcccaaccatttaaaggctctgtttgcactacaaaaactgcttcactgcatttaataaatatttatgagatacgtactatgttcacccactggrcctgagaataaatgtttgaatgaatcccttaaattttatttaggtctcattttaaagatatcgcaagcatctatcatgtgattatgttacctgcatcaactccttgagggtagagaaaaatcatattttacattttgtaaaatatgaacatctagccagcatgcttagcgttaaaagggcacttattaaactgcactggccagagtagcctaagtagctcagttgggagagtgttagactgaagacctaaactgcactggcccatcaaaattattttcagtggtatacttaatacaccaaggttccaaataatgaaaccagaactgggtttattaattctaccgccctaaccaaatgcacattattttgcattatgaaaatgaaattactcta

SEQ ID NO: 873558 - DNA, 682 bp, Homo sapiens
tttgtcatcacttgcaagcaattaatcattatttttatgtccttgcttttgccatcttatccaaaatacatgcacttcctcatcatctgtataaatgtttatctctacttcttgcaaacctggtttaaaactcattattgccatacataacttcctattttaacccaccatattctagaattcctgttataatttgcccaaccatttaaaggctctgtttgcactacaaaaactgcttcactgcatttaataaatatttatgagatacgtactatgttcacccactggacctgagaataaatgtttgaatgaatcccttaaattttatttaggtctcattttaaagatatcgcaagcatctatcatgtgattatgttacctgcatcarctccttgagggtagagaaaaatcatattttacattttgtaaaatatgaacatctagccagcatgcttagcgttaaaagggcacttattaaactgcactggccagagtagcctaagtagctcagttgggagagtgttagactgaagacctaaactgcactggcccatcaaaattattttcagtggtatacttaatacaccaaggttccaaataatgaaaccagaactgggtttattaattctaccgccctaaccaaatgcacattattttgcattatgaaaatgaaattactcta

SEQ ID NO: 873559 - DNA, 658 bp, Homo sapiens
gaaagcttacaagctagaagagaataggggccaatattcgacattcttaaagataagaattttcaacccagaatttcatgtccatccaagctaagcttcataagcgaaggagaaataaaatcctttatagacaaacaaatgttgacggattttgtcaccaccaggcctgccttacaagaactcctgaaggaagcactaaatatggaaaggaaaaactggtacagccactgcaaaaataaaccaagatgtaaaggccgttgacacggtgaagaaactgcatcaactaatggrcaaaataaccagttagcatcataatgacaggatcaaattcacacataacaatgttaaccttaaatataaacaggctaaataccccaattaaaaggcacagactggcaaatttgataaagagtcaagacccattggtgtgctgtattcaggagacccatctcatgtgcagagacacagaaaggctcaaaataaaatgatggaggaatatttaccaagcaaatggagagcaaaaaaaagcagggtttgcaattctagtctctgataaaacagacttcaaacaaacaaagatcaaaaaagacaagagcattacgtaaaggtaaagggatcaattcaacaggaagagctaactaacctaaatatatatgca

SEQ ID NO: 873560 - DNA, 691 bp, Homo sapiens
aataaagaagagagaagaatcaaatacacacaataaaaaatggtaaaggggagatcaccactgatcccacagaaatacaaactaccatcagataatactataaacacctgtaagcaaataaactagaaaatctggaagaaatggataaattcctggacacatactccctctcaagactaaaccaggaagaagtcaaattgctgaatagaccaataacaagttctgaaattgagatagtaattaatagcctattaaccaaaaaaaacccagaaccatatggattcacagccaaattttactggaggtacaaagaggagctggtaccatttcttctgaaactattccaaacaatagaaaacaaaggactgctccctaactcattttataggggcagcatcattctgataccaaaacctagcagagacataacaagacaagaaaatttcaggccaatattcctgatgaacatcgatgcaaaaatcctcaataaaatactggcaaaccgaatccagcagcacattaaaaagcttatccacaaygatcaagttggcttcatctctgggatgcaaggctggtttaacatatgcaaatcagtaaatgtaatccatcacataaacagatccaatgacaaaaccatataattatctcaatagatggagaaaaggccttcaataaaattcaacaccccttc

SEQ ID NO: 873561 - DNA, 621 bp, Homo sapiens
actggggaggtctcacaatcatggaagaaggaaaaaggcacgacttacatgggggcaaacaagagacaacttgtgcagggaatcttgcctttataaaactgtcagatctcacgagacttattcactatcttgagaacagcacatgaaggacctgtgcccatgattcaattacctcccaccaggtccctccaatgacacatgggaattgtgggagcaacaattcaaaagatgagatttggggacacagccaraccatatcattctgtccctgacccctcccaaatctcatgtcctcatatttaaaaaccaattatgccttccaaacagtcccccaaagtcttaactctttttagcattaactcaaaagtccacagtccaatgtctcatctgagacaaggcaagtcccttttgcctgtgagcctgtaaaatgaaaagcaagttagttaattcctagatacagtggggatacagggattggataaatacagccattctaaatgggagaaattggccaaagcaaagggctacaggccccatgcaagtccaaaatccagtggggcagtcaaatcttaaagctccaaaatgatcttttttgactccatgtctcacatccaagtcatg

SEQ ID NO: 873562 - DNA, 621 bp, Homo sapiens
actggggaggtctcacaatcatggaagaaggaaaaaggcacgacttacatgggggcaaacaagagacaacttgtgcagggaatcttgcctttataaaactgtcagatctcacgagacttattcactatcttgagaacagcacatgaaggacctgtgcccatgattcaattacctcccaccaggtccctccaatgacacatgggaattgtgggagcaacaattcaaaagatgagatttggggacacagccagaccatatcattctgtccctgacccctcccaaatctcatgtcctcatatttaaaaaccaattatgccttccaaacagtcccccaaagtcttaactctttttagcattaactcaaaagtccacagtccaatgtctcatctgagacaaggcaagtcccttttgcctgtgagcctgtaaaatgaaaagcaagttagttaattcctagatacagtggggatacagggattggrtaaatacagccattctaaatgggagaaattggccaaagcaaagggctacaggccccatgcaagtccaaaatccagtggggcagtcaaatcttaaagctccaaaatgatcttttttgactccatgtctcacatccaagtcatg

SEQ ID NO: 873563 - DNA, 625 bp, Homo sapiens
accagctcctctttgtacctctggtagaattcagctgtgaatccacctggtcccggactttttttgttggtaggctattaattattgcctcaatttcggagcctgttattggtctattcagagattcagtcttcttcctgrtttagtcttgggagggtgtatgtgttgaggtatttatccatttcttctagattttctagtttatttgcatagaggtgtttatagtattctctgatggtagtttgtatttctgtgggatcggtggtgatatcccctttatcattttttattgcgtctattttattcttctttcttgtcattattagtcttgatagaggtctatcaattttgttaatctttccataaaaccagcttctagattcattgattttttgaagggatctttgtgtttgtatctccttcagttctgctctgatcaagttatttcttgccttctgctagcttttgaacgtgtttgctcttgcttctctagttcttttaattgtgatgttaggatgtcaattttagatcttttctgctttctcttgtgggtatttagtgctataaatttccctctacacactgctttaaatgtgtcccagagattctggtacatcatgtcttt

SEQ ID NO: 873564 - DNA, 625 bp, Homo sapiens
accagctcctctttgtacctctggtagaattcagctgtgaatccacctggtcccggactttttttgttggtaggctattaattattgcctcaatttcggagcctgttattggtctattcagagattcagtcttcttcctgatttagtcttgggagggtgtatgtgttgaggwatttatccatttcttctagattttctagtttatttgcatagaggtgtttatagtattctctgatggtagtttgtatttctgtgggatcggtggtgatatcccctttatcattttttattgcgtctattttattcttctttcttgtcattattagtcttgatagaggtctatcaattttgttaatctttccataaaaccagcttctagattcattgattttttgaagggatctttgtgtttgtatctccttcagttctgctctgatcaagttatttcttgccttctgctagcttttgaacgtgtttgctcttgcttctctagttcttttaattgtgatgttaggatgtcaattttagatcttttctgctttctcttgtgggtatttagtgctataaatttccctctacacactgctttaaatgtgtcccagagattctggtacatcatgtcttt

SEQ ID NO: 873565 - DNA, 625 bp, Homo sapiens
accagctcctctttgtacctctggtagaattcagctgtgaatccacctggtcccggactttttttgttggtaggctattaattattgcctcaatttcggagcctgttattggtctattcagagattcagtcttcttcctgatttagtcttgggagggtgtatgtgttgaggtatttatccatttcttctagattttctagtttatttgcatagaggtgtttatagtattctctgatggtagtttgtatttctgtgggatcggtggtgatatcccctttatcattttttattgcgtctattttattcttctttcttgtcattattagtcttgatagaggtctatcaattttgttaatctttccataaaaccagcttctagattcattgattttttgaagggatstttgtgtttgtatctccttcagttctgctctgatcaagttatttcttgccttctgctagcttttgaacgtgtttgctcttgcttctctagttcttttaattgtgatgttaggatgtcaattttagatcttttctgctttctcttgtgggtatttagtgctataaatttccctctacacactgctttaaatgtgtcccagagattctggtacatcatgtcttt

SEQ ID NO: 873566 - DNA, 492 bp, Homo sapiens
tgttcatttaattttctttaaaaaaatttctaccatcttttttactcttttttaaactaatctctaaattagaatttaaagagagagagactgtagaagagatgctgtttccattgttagaaattatattagggttccctcaatttggctcacttttcactttgaaagtcttgcacaagcaacctggaacatttttcttcacttccatccacaccatgccaatctaaaaaacaaaaacaaaaaaaaccaaatgctctttatttattgcagctgcattatgctrtttgcaacatgacaacctatttaaaagaaatagaactcgcgccctgtgtaggagtattttgtttttacctttaaaaggcttgtagtcaggctgtcagtaaaagaaaatccaatctcattttcatctagtatgcactgcagaaacattactccgatatgaaccagagcttgaaaatggagaagcaattgttgttgctaatcagaaacaaa

SEQ ID NO: 873567 - DNA, 606 bp, Homo sapiens
gttactgtctaggtttattgtgatataaagctatccaggtcttatcaagacaatagttagggctattctaactcaaagactagttgaagtagtgctttaaacacatgaccataataattgtttttctttagtatatataaaaccaagaaagaaaatatttaagggtaaattactcaatttcagtcttgtctttctgttttgttatcttctttaaaaatagattctcttttactactttgattaactacaaataaaataaaataaaaatgagaataaaaatattatgtaacattaatgtctgaattcaaagagatatcaatattttaagtttttaaattctaatttttatgggagggatttggggataaaattgtaaagacattattgaaaaatagcgatatcaaatattaacaaaattcctaatctgytctgcaaatgtgtgcacccttggtaagcaactttactctgtttatagttcaacttcgtctaagtatattacttctggcttccacctactgagcatgccagcatgagtaatgaaagttattggtttaagaatgttcactggaatgtctacactggcaaaactaacagttcctgcagcct

SEQ ID NO: 873568 - DNA, 681 bp, Homo sapiens
ctactaaataggtacctatgcaacttacatttagttctactggacagaagctgacatagaaccattaggattacatattttcaaaatattattacttgacctctctttatattaattccatctataatattgagagagccagaatgaaggctgggcagtagtgtctgaatgtgcacagcacagctggcacaactgttactagctgttctaaagtaaggaatgtttgaaacagaatactaaagtcatcaagccaacctcatggtctggatattgacctctggcatccagaatccatgtggaccatctttaatatttcctttatattgcatgggttgaaaggttagactataaattttccagactccttgaccactagccttatgaatatgattgaggttctctgccaatgagatccaaccatrtaaattttggaaggtagaaggaaggcagaagccattccctttcctgtgtcaatggttcttgaggacattgtactctacattttattctctagtcactggtttttggagtggtggcagccattaaattgatcaccattttccactgattcctgatctctggatgacaattgtagtgctattactctgacacctagtgacagctctctgatctccctgtctctagcccttccaaaaattttacaagcatctaataatctgt

SEQ ID NO: 873569 - DNA, 635 bp, Homo sapiens
aaatgtaaataggctaaatgccccaattaaaagacacagactggcaaactgcatagagtcaagtcccatcagtgtgctgtattcaggagacccatctcacgtgcagagacacacataggctcaaaataaagggatggaggaagatctaccaagcaaatggaaagcaaagaaaagcaggggttgcaatcctagtctctgataaaacagactttaaaccaaccaacatcaaaagagacaaacaaggccattacataacagtaaagggatcaattcaacaagaagagctaactattctaaatatatatgccctcaatacaggagcacccagattcacaaagcaagtccttagagacatacaaagagacttagattcccacacaataatattggatgactttaacacccsactgtcaatattagacagatcaatgagacagaaggttaacaaggatatccaggacttgaactcatctctgcaccaagcagacctaatagacatctacagaactctcaaaccccaaatcaacagaatatacattcttctcagaaccacattgcacttattccaaaattgaccacatagttggaagtaaagcactcctcagcaaatgtaaaagaagagaaatcacaacaaa

SEQ ID NO: 873570 - DNA, 534 bp, Homo sapiens
catactttgaacactcagtagtatacgaaaggttgaagtatggctgctgggattggtcaagagttagctattgttacaggggcatactactaagttggttttcagttttgtgtgcctattaagctaggttacagttcatcaccaaggactcaaatatagaagtacagagtccttctcaggccatatttagtttaacagtatatacttagcagtgagattgctggatcatagggkagttctacttttagttttttgagaaacctccatgctgttctctacagtggctttacaaatttacattcccaccaacagtgtacaagccttccatttttcccacattcctaccaacattcactattgcctgtcctttgcataaaaaccattttaactaacgtagaatgatagctcattgtagttttgatttgcatttctctgacaatcaatgatgttgagcaccttttcatatacccatttgccatttgtatgtctccttttgagaaatgcctgttcatatattttgcccatttttaagtc

SEQ ID NO: 873571 - DNA, 516 bp, Homo sapiens
ttgcctgtcttttggataaagtgtttctaattttttcgtagtcatttcatagtttgaggtcttagacttaagtctttaaattattttgatttgatttttctgtatgtcaagagatagaggtctagtttcattcttctgtatatggaagtccagttttcctasaaccatttattaaagaggttatcttttccccagtgtatgttcttggcacctttctcaaaaatgagttcactgaatatgtgtgaattcatttttgggttttctgttctgttccattggtgtatgtgtctgtttttatgccagtaccatgctgtttttattactgtagttctgtagtgtaatttaaagtcatgtaatgttatttctcctgttttgttccttttgctttagatagttctggctattctgagtcttttgtggttccatatcaattttaggattgttttttctatttctgttaccaatgtcatttgtatgttgatagggattatattaaatccatagatacctttggat

SEQ ID NO: 873572 - DNA, 598 bp, Homo sapiens
actagagtaatgttctagagaggagtgtggctgcctctgctgcacagaagtgtttgcacagggaatggggagtagcaggtggcagtaagcctcacccagctcccacacacttggcaaggcagatctcacaccagcagtgtttcctagcagcaactagctaagctccaggccatctatactcaaaattcaaaactgccccaggccataagccttcctttcagagacagaaaccatggctttcaggcaacacccctcctagtccacccacaaagccagggtgcccagcttctacacttgtggatgcagcacacttcccacatsccctctaattttagtcaagggagctcatccttacttgaggttatattgcaaaattcagttgggagcttctttcaatctccaaccactggctgagttagttggcaggcttctgtgaggtaccctgtgaggtagaataagaaatggcttcccttggtctgtgctggagatggggaatgcatgcaaggctcttcctgctgctgcttctacttttatattcctcactgctccctaaatcagcttaagctctggttggggttaaggtcttatcctgtggcct

SEQ ID NO: 873573 - DNA, 645 bp, Homo sapiens
catttattcacatctacaccataatgtcagtttcataatcagaaaagagtacttcagttatttttcttataaatgtcaaccatccaaagattttaaccatatgaggctaatagcactcaccagaaatgattcctgcaagcatactgagctaaaaacggagaagatgtaattaactatcacaaaattcacttagacccarttgtctggtgggattggcctgtattccataatgcaaagctaattggagagaggaaatcaggcctctttcacaatttttctcacaagtctaaaagtgaacttcaccaggatgttcttactttgagactctgaagcatctgtagtcagatgctacctgaaatgaatgtcatcattccctttttctggaacctgtgctagaaagtctgtaacaacggggcatcttcctctctctccactataacttcatgtaggctttctccagtatcttcttagaagaagttaggcttcttatcgggctactgaaaactctgagagtgcttttcctagataaatcagcagacactaaatggctttttctaagctgtggtcaacagtcacacaacatcacttccaatgcaatctactcattgagacagtcacaaaggcatggagaggaaacagaattca

SEQ ID NO: 873574 - DNA, 654 bp, Homo sapiens
ttgaagtatgtcaatgaatcatgtgtacatcagtgtaatatcttaatatgtcttcattcttgaggtatcagagcatatatttatgtttctcttggctctattatcttttgcagtaaaatggcagtgtacaaaatgcaaaacatgccattcaattcaaccaatatctactgagatctgattcagtggtcagtacaggatttttaatgttccccaggtaatcctgttggaacatatctaagtccagtgaaatttttatttaattaaatcaatcaaatcacgtttgtgacartatattctacttctttctctactaatagtacatagtctttccaggaatagtaatgttcattttacagacttatccagttccctttatgtagcaagggatctcaaaagtatttgtttatggaagtaataataaattgatgctttttatgtgaatatgtaaatgatgagaaggaatctttaaaagagcaacttgaggtgtggttaatgatcccaatttctgtggatatatctctagattcagagagtaaatatgaagagacaataagaaaaattttttgtatgattcttcaagaatactatgggtttggcatgagcatccacatgccttatttgttgagaagactctctagccaggcattggttaat

SEQ ID NO: 873575 - DNA, 625 bp, Homo sapiens
actgtaagaaagcccataaattagtacactgatattctgaattcaaaagtataaaaccaaagctttagttactgacctaaatattattttttaaatgaatagcaatagtattcaaaaatctgttaatatttattatgatttagaaagaatgagtttccgttgaagcaggtttcaaatatatgaattaaacagatattttatttttggtagaatgtatckatcatcagtgcaaacagaaaggaatgatccacatgctctcccgtaccctcattctccctggtaatgtctgaagctgtgaaagaagtacaattattctttcaagccagtggcaaggtacttttacaccaagcaagattcagagattaagaattcatgttttaatttttaaaagtaaagtgaaatgtgtttcttagcacacttaaggatttagagctatcacggcaaaggtgtgaagagtgcgtatgtctcagctctcgaccattctgagagtgagaaatacgttgttttgacctcatatcttcccagggactagagttcctttccttagctaaaatatactaagtatattttatgtatacttagtatccggaattccgataataactttgtataattaattttattc

SEQ ID NO: 873576 - DNA, 625 bp, Homo sapiens
actgtaagaaagcccataaattagtacactgatattctgaattcaaaagtataaaaccaaagctttagttactgacctaaatattattttttaaatgaatagcaatagtattcaaaaatctgttaatatttattatgatttagaaagaatgagtttccgttgaagcaggtttcaaatatatgaattaaacagatattttatttttggtagaatgtatcgatcatcagtgcaaacasaaaggaatgatccacatgctctcccgtaccctcattctccctggtaatgtctgaagctgtgaaagaagtacaattattctttcaagccagtggcaaggtacttttacaccaagcaagattcagagattaagaattcatgttttaatttttaaaagtaaagtgaaatgtgtttcttagcacacttaaggatttagagctatcacggcaaaggtgtgaagagtgcgtatgtctcagctctcgaccattctgagagtgagaaatacgttgttttgacctcatatcttcccagggactagagttcctttccttagctaaaatatactaagtatattttatgtatacttagtatccggaattccgataataactttgtataattaattttattc

SEQ ID NO: 873577 - DNA, 625 bp, Homo sapiens
actgtaagaaagcccataaattagtacactgatattctgaattcaaaagtataaaaccaaagctttagttactgacctaaatattattttttaaatgaatagcaatagtattcaaaaatctgttaatatttattatgatttagaaagaatgagtttccgttgaagcaggtttcaaatatatgaattaaacagatattttatttttggtagaatgtatcgatcatcagtgcaaacagaaaggaatgatccacatgctctcccgtaccctcattctccctggtaatgtctgaagctgtgaaagaagtacaattattytttcaagccagtggcaaggtacttttacaccaagcaagattcagagattaagaattcatgttttaatttttaaaagtaaagtgaaatgtgtttcttagcacacttaaggatttagagctatcacggcaaaggtgtgaagagtgcgtatgtctcagctctcgaccattctgagagtgagaaatacgttgttttgacctcatatcttcccagggactagagttcctttccttagctaaaatatactaagtatattttatgtatacttagtatccggaattccgataataactttgtataattaattttattc

SEQ ID NO: 873578 - DNA, 651 bp, Homo sapiens
tgaatagatcaataacaggctctgaaattgaggcaataattaatagcctaccaatcaaaaaaagtccaggaccagatggattcacagccgaattctactagaggtacaaagaggagctggtaccattccttctgaaactattccagtcaatagaaaaagagggaaacctccctaactcattttatgaggccaggatcatcctgataccaaagcctggcagagacacaacaaaaaaagagaattttagaccaatatccctcatgaacattgatgcgaaaattctcaataaaatactggcaaaccgaatccagcagcacatcaaaaagcttatccaccatgatcaagtcggcttcatccctgggatgcaagtctggttcaacatacacaaatcaataaacataatacatcacataaacagaaccaatgacaaaaccacatgattatctcaatacatgcagaaaaggcctttgamaaaattcaacagcccttcatgctaaaaactctcaataaactaggtattgatgggatgcatctcaaaataataagagctatttatgacaaacccacagccaatatcatactgaatgggcaaaaactggaaacattccctttgaaaactggcacaagacaaggatcccctctctcaccact

SEQ ID NO: 873579 - DNA, 627 bp, Homo sapiens
aagatactatctctgtattctaggattatattattttatgtatgtatttatctgcatatttccaaataacatgctaataccttgtttcattatttttaattttagacattgttatataatgaatactatgtattgaacaatatatgacattcttacaaaaagatatgtacaaaatcagagatgtgatttttttttttaaaaaaagcatatcagctttagtagtaagctatatatattctatttagcattaacaagaaaactaaatttatggcttgtgagctaagaaaacacccatttaaagtcatagaaaaggcattaaataagttacaattatcaaagttaaatttgactcttctcttttctctggaataagtgacagttttctcactttagatatatatatatatatataatatatatgtgtaattttgaaaaaygattgttgtcaaattgttttactttacagcctactattaccttcctgaaacataaacatctaagttcatacggaggccaagttactaaaatatgctttagaaaattgagcaaagtcataaagtgtaagtagagtaggagagattgacagctaactgcacttacagttaatcggctaaaggtaaaataaac

SEQ ID NO: 873580 - DNA, 617 bp, Homo sapiens
atcgataagaaaatcctcaataaaatgctggcaacctgaatccagcagcacatcaaaaaacttatccaccatgatcacatcggcttcatccctgggatgcaaggctgggtcaacatacacaaatcaataagcgtaatccatcacataaacagaaccaatgacagaaaccacatgattatctcaatagatgcagaaaaggccttagacaaaattcaacagmctttcatgctaaaaactctcaataaactaggtattgatggaacataactcaaaataataagagctatttatgataaacccacagctaatatcatactgaatgggcaaaaactggaagcattccctttgaaaaccggcaaaagacaactggccagggcaatcagacaagagaaagaaataaagggtatttgattaggaaaacaggaagtgaaattgtctttgtttgcagaggacatgattgtatatttagaaaaccccattgtctcagccccaaatctccttaagctgataagcaacttcagcaaagtctcaaatataaagttaatgtgcaaaaatcacaagcattcctatacaccaagaacagacacagccaaattatgagtgaactgtcattcaca

SEQ ID NO: 873581 - DNA, 559 bp, Homo sapiens
ccaacctccttctcccttaacatcaaattaccctccagctactgcactatttttctgcccctttaataacaaaactcctccaaagggtgtgtactttgactccactttctcttttgctgttttctcttgaacctactgccatcaggatcttttcccacccacacctgaactgtttgtgtcaaggttacttattaattacctccaaattgccatactaaacagaaacaacttagacttcacctaactcagtcagtcagcagtatgtgaactgcgagcattgctttagcaatcatccctctctcttctgtgtaataagttttgaaacattcttcaaatggcatctttcctcagcttctacatcaccactcccttttggttttccttcttcctcattagctgctcctcstcagtctcttctgcccattacttttcattttcctgatccccaaaaggaggaatgctccagggctcaaaccctgaacctattttaaaaatctatactcaccgtctgctgatctcatccaatctaatggacttaaatactttgtatatgctaatg

SEQ ID NO: 873582 - DNA, 614 bp, Homo sapiens
ggagaactcttttgtgaaaggaagagtcaatcagtatgtcaaacttcatttctgtctttctttgttcaattgccacagtcaccaccaccttgatcaatcagcagccatcaaattctgaggcaagacactccaccaacaaaaagataatgactcgctgaaagctcagatgctcattagcattttttaacaataaagtatttttaattaagatatgtacattatttttagacaatgctattgcacatttaacagactatagtatagtatgaacataacttttatatgcaccagaaagccaacaaatttgtatgagtcactttattgtgatagtccttttaatgtggtggtcaaaaccatgcctgcwatatatctgaggtattcctgtatatgttattggcagactctgcaatatagtcacttactgcatcagtttgcttgagaattaggggctttcgagaatgttggactttcaatgctaaaaccagaaagtccccagcaaactgggagaagttgttcaccctattctgaagctaccttagttatgatttccttctactcttttcctgcttagaaaggcaatcttctcacttttgagcatgtagctagcagtataa

SEQ ID NO: 873583 - DNA, 589 bp, Homo sapiens
gatacataaagccatcatgttattgacttttcaaaaataactatcaaattctcattggtctatctatactttaaaactcaatagtcattggtccaaagactagagtcacattaaataaagctaatatgtgaacacaatttataatgcatgaggtccaattctcccctataactctaagaaggtgctagacatttctctcacaaygcaagatcttaatccacacccacagtttcccctggtgaaaggtaaggaccggaatgattgtcctgaacagcagaggtgagcccagttgtgatttaatgactccaaaacacagggcaacaagaacaagaacatttcactctgaacgtctcagtacggagcttctgcttctgccaaaagatttcctgcaagttttgggaggggaccccttatgccagttacaagtactgctacagggctcactccacggcagctgagctgagcccccaggatgcgcagaggctgtgggtggtgggtcttgtcagtgcagccaggaaccgtgggaagccttgcacagaggaagacatgacctgagagtgcatttagctgcatgtcttcccagctgtgg

SEQ ID NO: 873584 - DNA, 589 bp, Homo sapiens
gatacataaagccatcatgttattgacttttcaaaaataactatcaaattctcattggtctatctatactttaaaactcaatagtcattggtccaaagactagagtcacattaaataaagctaatatgtgaacacaatttataatgcatgaggtccaattctcccctataactctaagaaggtgctagacatttctctcacaatgcaagatcttaatccacacccacagtttcccctggtgaaaggtaaggaccggaatgattgtcctgaacagcagaggtgagcccagttgtgatttaatgactccaaaacacagggcaacaagaacaagaacatttcactctgaacgtctcagtacggagcttctgcttctgccaaaagatttcctgcaagttttgggaggggaccccttatgccagttacaartactgctacagggctcactccacggcagctgagctgagcccccaggatgcgcagaggctgtgggtggtgggtcttgtcagtgcagccaggaaccgtgggaagccttgcacagaggaagacatgacctgagagtgcatttagctgcatgtcttcccagctgtgg

SEQ ID NO: 873585 - DNA, 601 bp, Homo sapiens
ccctgttaaccagcacctccaccaaaaagcattttctaacgccacatttacactaaataggaagaagcatgtgaatgctgtttgaaacttcaaaaacatacatagaaaataagactacatatttgtttattttttgtagagataaagtctcactgtgttactcaggctggtctggaactcctggcctcaagagattctcccacctaggcttccaaagtgctgggattacaagcatgagccaccaccacgcccagcctaaaatgacattttaaaaaagcaaaaaatgagaaagatatccctcagcatgctggagagcttggacagagaggcagggcaatggaatcrgggagatacagggagcatcaccaaattttacctcagagttaattagtgggttattgaggctgtgtcatcaagaaaacatagtgaataacccaattatcaggttaaaagaaacatagatggtaaaaaataatataaatcctaaaattataaaatattgacatttaaaaagtaaaatgtttatagcaatcttttatatttcaaaagaaatataaatggcatagacatttctttcaattttcacaattatacatttaaa

SEQ ID NO: 873586 - DNA, 635 bp, Homo sapiens
aatataccagtttaatgtctaactggcaaagaaatcagaagcatggtgttttttcaccgacaggagattgttgactaccatgagatttagtccatggggtgagggagtgtgtgtgtgtgtatgtgtgtgtgtgtatcctcaatatggattttctctttaacaattatgaaaatccacccaaggcagtttatatagatctgactgtgaatatccacacacacaattatatacatatatatgactacatatgtaattttaaagtaaaatattgataatattttcwtaaactcaagtgcatgtggaagaaagaaatagagaaaaagagagtaatgttatctgataattaatgggaaacaaggaaaaagaacaagttatccctgataaaataatacagggatggtcacaagaaccggcaggaatcaaagtgattcctgtgaggttgtttaacatgaggtgctttataaacttttatttcagggggtcctagcttacaaggaaaccttttatgggacagaaaaacaataaaactaacactaaagcatttgttctgggggaagtaggattgcgtggccttgggaacactctacaacgtagcccaggctcagaagcaactgctaaagttgttttgcaaaaac

SEQ ID NO: 873587 - DNA, 642 bp, Homo sapiens
ctttgttgggagactttttttttttaaacacagattcttgctctgtcttccaggctggagtgcagtggcacaatcttggcccactgcaacctccacctcccaggttcaagcaattctcctgcctcaacctcccaagtagctgggactacaggctcatgccagcacgctttgggagackttttttcttttcttttttttttttttttcactgattcaatctcattactcattattggtttgttcacactttccatttcttcctgattcaatcttggtagattgtatgtgtctaggaatttatccattttatctaggatttccagtttgatactatatagctgttcatagtagtctctgataatcttcttaatttctgtggtatcacttctaatcttttttttccatttttgattttgtttgtttatttagatcttctccctttttttcttggttagtctacctggcagtttatcagttttgtttatcttttcaagagagcaactttttgttttactgatcccttgtatttattcgtagtgtctattttatttctgttctttgcttctattttgggtttggtttgttgttgcttttctagctacctaaggtttatggttagattgtttattgagaacctctcta

SEQ ID NO: 873588 - DNA, 653 bp, Homo sapiens
ggccttcgttgaaaacgggagtattctcacataaaagctagacagaagcattttcagaaaattctttgtgatgtgtgcattcaactcacagagctgaacattactgttgatagagaagtatgaaacactctttttgcagaacctccagttggacatttggaacgctttgaggcctatggtagaaaaggaaatatcttcaaataaaaactagacaggagcattctcagaaacttctttgtgatgtgcacattcaacacacagagttgaaccttctttttgatagcccagttttgaaacactctttttgtacaatctgcaagtagatatttggagggcgttaaggcccatggtggaaaasgaaatatcttcacatagagactagacagaagcattctcagaaactactttgaggtgtgtgcattcaactcacagaggtgaacgttttttttaatagtgcagttttgaaacactctttttggagaatctgcaagtggaaagttggaccgctttgaggcctttgatggatacaggaatattctcacataaaaactagacagaagcattttcagaatattctctgtgatgtgtattcaactcacagtgttgaacattacttttgatagagcagttttcaaaccctctttttgtggaat

SEQ ID NO: 873589 - DNA, 590 bp, Homo sapiens
ttataagtctttgaggcctgtggtggaaaaggaaatatcttcacataaaaactagacagagggattctcaggaacttctttgtgatctgtgcattcaactaacaggctcgaacctttctttgatagagcagttttgagacactcgttgtgaagaatctgcaagtggacatttggagggctttaaggcctgtggtggaaatggaaatatcttcacacagaaactagagagaaactttctcagaaacttgtgtgtgatgtgtgcattcaactcacagagttgaactttccttttgatagagcagttttgaaacactctttttgtagaatctgcaagtggatatwtgtagtgatttgacgcctatggtagaaaagcaaatatctttatataaaaactagacagaagcattctcagaaacttctttgtgatgtgtgcattcaactgacagagttgaactttccttttcatagagcagttttgaaacagtatttttgtagaaactgcaagtgtacatttggagggctttgaggcctgtgctggaaaaggaaatatcttcacttaaacactggacagaaacattctcagaaacttc

SEQ ID NO: 873590 - DNA, 532 bp, Homo sapiens
ggattctcaggaacttctttgtgatctgtgcattcaactaacaggctcgaacctttctttgatagagcagttttgagacactcgttgtgaagaatctgcaagtggacatttggagggctttaaggcctgtggtggaaatggaaatatcttcacacagaaactagagagaaactttctcagaaacttgtgtgtgatgtgtgcattcaactcacagagttgaactttccttttgatagagcagttttgaaacactctttttgtagaatctgcaagtggatatttgtagtgatttgacgcctatggtagaaaagcaaatatctttatataaaaactagacagaagcattctcagaaacttctttgtgatgtgtgcattcaactgacagagttgaaytttccttttcatagagcagttttgaaacagtatttttgtagaaactgcaagtgtacatttggagggctttgaggcctgtgctggaaaaggaaatatcttcacttaaacactggacagaaacattctcagaaacttcttt

SEQ ID NO: 873591 - DNA, 633 bp, Homo sapiens
tttcatacaatctacaagtggatatttggactgctttgtggccttcgttggaaacgggaatatcttcacataaaaaccagagagaaactttctcagaaactgctttgtgatatgtgcattcaatttgcagatttgaacctttcttttgatagagcagtttcraaacactctttttgtagaatctgcaagtggacatttggagagctttgaggcctatggtggaaaaggaaatatctacacataaaaaccacacagaagcattatcagaaacttgtttctgatgtttgcattcaactcacagacttgaagataccttttcagagaacagatttgaaacactcttttcgtacaatctgcaagtggatatttggacagatttgaggccttggttggaaacggcaaaatcttcacataagaactagacagaagcattctcggaaacttctttgtgatgtttctctatgaaaaatatcttttcaaagagcagttccgaaacactctttacgtattatctgcaagtgtatatttggactgctttgaggcctttgatggaaacaggaatatcgtcacataaaaactagacagaagcattcccagaaacatctatgtgatgtttgaattcaactcacagat

SEQ ID NO: 873592 - DNA, 633 bp, Homo sapiens
tttcatacaatctacaagtggatatttggactgctttgtggccttcgttggaaacgggaatatcttcacataaaaaccagagagaaactttctcagaaactgctttgtgatatgtgcattcaatttgcagatttgaacctttcttttgatagagcagtttcgaaacactctttttgtagaatctgcaagtggacatttggagagctttgaggcctatggtggaaaaggaaatatctacacataaaaaccacacagaagcattatcagaaacttgtttctgatgtttgcattcaactcacagacttgaagataccttttcagagaacagatttgaaacactcttttcgtacaatctgcaagtggatatttggacagatttgaggccttggttggaaacggsaaaatcttcacataagaactagacagaagcattctcggaaacttctttgtgatgtttctctatgaaaaatatcttttcaaagagcagttccgaaacactctttacgtattatctgcaagtgtatatttggactgctttgaggcctttgatggaaacaggaatatcgtcacataaaaactagacagaagcattcccagaaacatctatgtgatgtttgaattcaactcacagat

SEQ ID NO: 873593 - DNA, 591 bp, Homo sapiens
gtgcattcatatcacatagttgaacctatcttttgattgagcagttttgaaacactctttttgttgaatctgcaaatggatatttggagcccttagcggaatatggtggaaaacgaaatatcttcacacgaaaactacacagaagctttctgagaaatttcttggtgatgtgtgcattcacctcatagatgtgaatctgtttttttcattgagcagtttggaaacactctttttgtagaatctgaaagtggatatttggaacgctttggtgcytatggtggaaaaggaaatatgttcacataaaaactacacagaagcattctgagaaacttatttgtgatgtttgccttcatctcacagacttgaacatttcttttgattgagcagttatgaaacactcttttaatggaatctgcaagtggatatttggagcactttttggcctaatgtggaaaaggaaatatcttcacataaaaactacacagaacaattctcagaaactcctttatgatgtgtgcattcatctcacatagttgaaactttcttttgattgagcagctttgaaacacagtttttgaggtatctgcaagt

SEQ ID NO: 873594 - DNA, 626 bp, Homo sapiens
acaatctttttgtagaatctgcaagtggatacttggagcactctgatgcctattgtggaaaaggaaatatcctcacataaaaactacacagaagcattctgagaaacttctttgtgatgtgtgcattcatctaacagagttgaactttcttttgattgagtagtttggaaacaatcttcttgtagtatctgcaaatggaaatttggagcgctttgaggtctttcatggaataagaaatatattcacataaaaactacacagaagcattctgagaaactactttgtgaagtgtgcattcatctcacagtgttcaccctttgttttaattgaggagatttgaaacactctttttgttgaatctgmaaagagatatttgtgatcccattgaggcctatggggaaataggaaatatattcacataaagactagacagaaactttgtgagaaacttctttgtgatgtgtgctttcatcacacagagttgaacctttcttttgattgagcagtgtggaagcagtctttttgtacaatctgcaaagggatatttggggtgctttgaagtctgtgttgaaaaagaaacaacttcacataaaaaacagacagaaacattctgagaaacttttttg

SEQ ID NO: 873595 - DNA, 588 bp, Homo sapiens
aagctttgtgagaaacttctttgtgatgtgtgcattcatctcacagagttgaaactttcttttgattgagcagttttgaaacgctctttttggaatatctgcaactggatatttggagagctttgcagcatctagtgcaaaagtaaatatcttcacataaaaactagacagaagcattctgagaaacttctttgtgatgtgtgcattcacctcacagaattgaacatttcctttgattgagcagtttggaaacactctttttgtagaatctgaaagtggatatttggagggcttttcagcctctactgaattcatctcacatagytgaacctttcttttgattgagcagttttgaaaccttctttttgcagaatctgcatatttattttaggagcgatttgaggcctacggtggaaatggaaatatcttcacataaaaactagaaagaagcattctgagaaacttctttgtgatgtgtgcattcatctcacagagttgaaactttcttctgattgagcagtttggaaacagtctttttatagtatctgaaagtggatattggagcggtttgaggcctgtgctggaaaa

SEQ ID NO: 873596 - DNA, 615 bp, Homo sapiens
ataaaaactagatataatgtttctgtgaaacttctttatgatgtgtgcattcatcacacagagttgagcatctcttgattgtgcagtttggaaacagtctttttggagaatctgtaaagagatatttgtgatccctttgtggcctatggtgaaaaaagaaatatcttcacctaaaaactagacagaagctttctcagaaacgtctttttgatgtgtgcattcgtctcaaagtgttgaaactttcttttgattgaactgtttggaaacggtctttttgtagtatctccaaagggtatatgaaggcggttttaggcctatggtgaaaaaggaaacatcttcacataaaaagcagacagaarctttctgagaaacttcctggtgatatctgtcatcatcacacagagttgaacgtctcttttgattgagcagtttggaaacagtctttttggacaatctgcaaggggatgtttgtgcgaggtttgtggcctgccgtgagaaaggaaatatattcatataaaaattagagagaagcattctgaaaaacttctttgtgatgtgttcattcgtgtcacagagttgaactgttcttttgattgagcagtttggagacagtct

SEQ ID NO: 873597 - DNA, 615 bp, Homo sapiens
tccatctcacagacttaaaccattcttttcattgaccagcttggaaagactctttttgtagaatctgcaaagggatacttgggaacacgttgaggcctatggtgaaaaaggaaatatcttcacataaaaactagacagaagcttttggaaaaacttttttgtgatgtgtgcattcatctcacagagatgaaccattcctttgatagatcagttttgaaacacactttttatagaatctgcaagtgratatttggagagctttgaggcttatggtggaaaaggaaatatcttcacataaaaactacacagaagcattctgagaaacttcgttgtgatgtgtgcattcaactcacagagttgaacctttcttttgattgagcaattttgaaacactctttttgtagaatctgcaagtggatatttggagcactttgaggcctgtggtggaaaaggaaatattttcacataagaactacaaagaagctttctgagaaactgctttgtgatgcatgcatttaactcacaaaggtaaaagtttcttttcattgagaagtttggaaactctgttcttctagaatctgcaaagggatatttgtgagtgcattgaggcctata

SEQ ID NO: 873598 - DNA, 651 bp, Homo sapiens
gttttgaagtactctttttgtaaaatctgtcggtggatatttggagtgctttttggcctccagtggagaagtaaatacctacatataaaaacaggacagaagcattctgagaaacttctttgtaaaatgtgcactgaagtcacagagttgaacatttcttttgattgagcagttttgaaacactatatttgtagaatgtgcaactggatatttggagcgctttgcagcctctagtacagaagtaaatatcttcacataaaaaatagacagaagcattctgagaaactactttgtgatgtgtgcattcatctcacagaattgaacctttgttttgatttagcggtcttgaaacactctttttgtagaatttgcaagtggatatttcgagggcgttgaggcctctagtggaaaaggaaatgtcttcacataaaaactagaacgaagcattctcagaaactacttcgtgaygggtgcattcaactaacagagttgaaactctcctttgattgagcaggtttgaaacacactttttgtagattctgcaagtgaatatttggatcactaagcggcctctagtggaagaggaaatatcttcacataaaaactagacaagcattctgagaaacttctttatgatgtgtgcatttacct

SEQ ID NO: 873599 - DNA, 598 bp, Homo sapiens
aattgtctccccttctacctcatgagttggcaaactttttctaaagaggtcttggtaatatttctagctctagaagccatatgttgggactgttcaactctgtcattgtaatgtgaagtcagccacagacaatgtagaaactgatgggccccctatgctccaataagactttatataaacaggtggtggactggatttgatcgtcagcctgtgttcgccaatccttgttcttgttaaaccctctagggtagttggttcttgctttcttacttcacgtgcacaaagacagacacctgaggacataaatgcttccacctctgaccctttgaaatggcctctcccatcctatgctgcygctgccccttctttgggtcaaattcgcttcatgatgcaggagtgtgtctttccttatcatgagtgccaatcagatacatagcttggtgattaagaagctagattctagagctaactgcttggatttgtttcctggctctgccacttagaaattatctggtctcagttgccttatctgagaaataggggttgtgtctgtgagcaggtaggcccctcagcattcctgatggtctggggaggcctc

SEQ ID NO: 873600 - DNA, 672 bp, Homo sapiens
ccttttgcaacctaagcaaactctgaagcaattgggatgttcaggggaatctgcttagaatacaaatctttaggagcagccgagggaacagaaataattgatatggaataaccctttatgtcgaaaataatgccaaaggcttttatctcttcagtgtgatgcgacctgaacatttctggttctacagaggacccctgccgttggcctatctcttaacagatgtttgctsggtgctggccatgtgtcaggcactatgctaggtgctgggaggattccgaaacaagaaagcatgcaagattcctgccctcctgggccttaaaggaaagtagggaagccaaacattaaataaataattataccaataagtatctaattacaagttttataagtgttaataacaaaaattgcagggtttgctacaaagcatgtaactgaggacctaatcttgtattaggggccagccaaagtagttctttgaggagatacatttaatctgacacctgatggatgagtaatagtcactaaaataaaagccaaataaagaattttatacactcccaaaagagatattttacagctttacaaggctcaaatccaactaattcgcccctgtctctgggtagtactggatgttctattttaccacttatgagacaatgctttggaaagcca

SEQ ID NO: 873601 - DNA, 600 bp, Homo sapiens
tttttgcctttttaagaatagccagcatcagtaattttttgcctttttagtaatagtcattctgatgggtatgagatagttatctcatcatggttttgagttgcatttctctaattatcagtgatgttgagttttttgcatgattactggccacatatatgccttcttttgaaaagtatgtgttcatgttctttgcccactttttaatggggtggtttggtttttttcttgcaaatttgtttaagttccttatagatgttggatattagacctttgtgagatgcttagtttgcagaaatgttctccttttctgtaggttgtctgtttactccattgatagtttctttttgctgtgcagaagctctttagtttaattagatsccatttgtcaatttttgcttttgtcgcaattgcttttggtgtcttcatcatgaaatctttgcccgtgcccatgtcctgaatgatattgcctaggttttcttcaaggtttttatagtttaggtttttacagttaagtctttaatccatcttgagttaatttttgtgtaaggaaggagtccagtttcaattttcagcatatggctagccagttatcccagc

SEQ ID NO: 873602 - DNA, 563 bp, Homo sapiens
cctctctgatgaagtgacacttaagttgaaagccaagcatgtcttcatttcggctttctgctttcctctgtactttggcttcctagcataaattataactttcattagcagttaaaacacatcttttatttctcaacttcttttttttttttttgagacgggagtctcgctcttgcccaggctatagtgcagtggcgtgatcgtggctcactgcaagctccgccmcccagttcacgccattctcctgcctcagcctcccgagtagctgtgactacaggcgcctgccaccacgcctggctaatttttttttttttttggtatttttaggggtttcactgtgttagccaggatggtatcaatctcttgaccttgtgatccacctgcttcggcctcccaaagtgctgggattacaggcgtgagccactgcacccggcctaatttctcaacttctaaactgattctcaaattttcttctgggtatagaactgtcatatttctccctagaaaaacatgagtatatcatatgtaatggtaatcatgatgaattctcaaagattcttcaa

SEQ ID NO: 873603 - DNA, 478 bp, Homo sapiens
agaaagctaggcagtatgatggcattatcagcttgactttctccttaaatgaaataggaagtgccctgttttactcagacagtttttttttctaaaaagctaaaagaagttaaatattttgaaaataattaatttctgttctaaattaktcaaatgttatatttgtaaaactagagaagtttgttccattgcttctaccaagcctctcagtttatgtagttggggcagctagaaatctaatgaacagaatgtatattttaggcttatataaagtattctgcaacataagctcaaaaataccccctaccctctttttgataaaaataaagtttactactaataataaaatacagccagaggtgtgctgggagtggagggggactgagtgaaagaaagtaggaatggggtaaaggctggggcaaagagcagactctctccctgcaggggagtatcaggggcctgcagtcaagttaaatga

SEQ ID NO: 873604 - DNA, 478 bp, Homo sapiens
agaaagctaggcagtatgatggcattatcagcttgactttctccttaaatgaaataggaagtgccctgttttactcagacagtttttttttctaaaaagctaaaagaagttaaatattttgaaaataattaatttctgttctaaattagtcaaatgttatatttgtaaaactagagaagtttgttccattgcttctaccaagcmtctcagtttatgtagttggggcagctagaaatctaatgaacagaatgtatattttaggcttatataaagtattctgcaacataagctcaaaaataccccctaccctctttttgataaaaataaagtttactactaataataaaatacagccagaggtgtgctgggagtggagggggactgagtgaaagaaagtaggaatggggtaaaggctggggcaaagagcagactctctccctgcaggggagtatcaggggcctgcagtcaagttaaatga

SEQ ID NO: 873605 - DNA, 478 bp, Homo sapiens
agaaagctaggcagtatgatggcattatcagcttgactttctccttaaatgaaataggaagtgccctgttttactcagacagtttttttttctaaaaagctaaaagaagttaaatattttgaaaataattaatttctgttctaaattagtcaaatgttatatttgtaaaactagagaagtttgttccattgcttctaccaagcctctcagyttatgtagttggggcagctagaaatctaatgaacagaatgtatattttaggcttatataaagtattctgcaacataagctcaaaaataccccctaccctctttttgataaaaataaagtttactactaataataaaatacagccagaggtgtgctgggagtggagggggactgagtgaaagaaagtaggaatggggtaaaggctggggcaaagagcagactctctccctgcaggggagtatcaggggcctgcagtcaagttaaatga

SEQ ID NO: 873606 - DNA, 632 bp, Homo sapiens
gcagtctcaagaaacatggtagtcatttccatattatatacacaaggtaaatgaagcccagagaagtagactaatttgcccaatgatgcataattactgccacagagccaggatgaagtccaaatatatgcagctctgcaatcctaccctgaaacataaatctagagttaataagtaataacaagtgttgggtaaccccaacactttggcagactaagtcaggaggatcrcttgagcccaggagttcaagactagcctgggcaacacagggagatctcgcctttacaaaaaattaaaaattagcggggcacggtggtgcgtgcctgtagttccaattactcaggaggctgaggtgggaggatcacttgagcctgggaggtagaagctctagtgagccatgattgtaccactgcactctagcctgggcaacaagagtgagaccctgtcttaaaaaaatatgtaaatgtgcttctccttaaactcaactgttcctctggaatttagtctaaaaataccagtacaaatgtgcaaacacatataggatctacatgagggagtcacttctgcagactttaaattggaaactagtgtcataaataagggtggagggtaaggtggcagatacatggaaa

SEQ ID NO: 873607 - DNA, 650 bp, Homo sapiens
tggggcatgaactaggcaggcaagatggggtgctgtcaggctcacctgccactgtcccagcagctgtggctgagagcagtggatccaggggctgtgagtcgggcaccacaggcatccctacagaatccctggaaggtgggagccacagttctacttgtcttcgtgttcctggcaagtgctgggaaaatgctgaatgaccaggaaaccagagaacagtgaaccagcaatgtttggggtttccagccgagaacgctatagactcctggatttctctccagttgggcttaggggatttcctccttattactcacccctccaactcacagctccttctcaccttagtcttcagaatctaggttctattgcgtgaagggatgagagactctccagggatcagacacaagagcaggtggactgagactgtkgggagagtgtgctcagctcagaaaccatgagcgcagactccagggtccccagccagcatttctgctccagcacaagatgcgtactgctcacatctccttcccttcctcctttactttatatggtcaactatatctctgactatggaagaaaaagaatcagtctctccttaaaggaatttcagaccctgggaactgatgggggtagcatttcaaggtggagtgggg

SEQ ID NO: 873608 - DNA, 618 bp, Homo sapiens
ggcaaagtgccaccagtctctttgcatagcaaaagtgacctttactccagtttccaacaagttcctcatctccatctgagaccatctctgcctggactttactgtccatatcactatcagcattttagtcaaagccattcaacaagtctttaggaagttccaaactttcccaaatcttcctgtcttctgagmcctccaagtctctaggaaattctaaactttcccacattttcctatcttcttctgagccctccaagtctctaggaaattctaaactttcccacattttcctatcttcttctgagccctccaaactgttccaacctctgcctgttacccagttccaaagtcacttccacattttcgggtatctttacagcagcaccccactcctggtaccaatttactatattagctcattctgatgctgctaataaagacatacctaatactgggcaatttataaagaaaagaagtttaatggactcatagttcagcatggctggggaggcctcaggaaacttacaatcacagcagaaggggaaacaaatatgtcctccttcacatggcgggagcagaaagaaatagagtgaagttggggaaaaagccccttataaa

SEQ ID NO: 873609 - DNA, 669 bp, Homo sapiens
gaaacactgtcaaatggtaaaattttcaggaaaagacctggagctatgtgtttgcgaagacttttgttatttcattttataatagttaaccatatgaaatatgtacataataaatggtagataaagttatggataagttaaagttataaaatcataaattagcattatttaattaaggaaccatcttcaaggacactctgaatcataaaattcagacaggtacaaaaaaatctttaggtacatatataaatgactacacaaatcaccactagtgagaagcatgccaaaacctgcattgtctttgatgagtcagaaaaaaatggggaaaagacttaattaatgtcaactataaaagttacttagcagtaaaattttgaaatgttaaaaaaaccaaggacatttttttcccaactacttgagttaaaaacaaatctcatcccttttagttatacctactgtagagcataatatgaacccaattaggatgcagatagactaagaatgtgagcaagaccacagacacataaatctgyagaaaacctgatgatcatagtaataaaactttatataaagtttacatctctatcttcaaatgtaaaggactttgtatgttttatttgatgactttttgaagaaagagtacaaagcaaactaaatgaatacttgttt

SEQ ID NO: 873610 - DNA, 683 bp, Homo sapiens
aaagctgtagtgtagagactttgttttctatatcattgtacccttcacttggttcactgtagttcctgcctgcctagctcagagctcaatatatgtttttcttaatgggtgaatgaaagaatcaataagtggggaactggagaaattgcccaygtgttagatttgcatgagactttggataaggcttggaatcttattgtttcatgttctccatatgctgaaataacaatatttgtcttctctgaaatataatgccttaaaactcaaaatatcaagctgtcagaacttagttgttattatgtccatggtcaccctgccattaaactttagttgtcctggaaacatatattggatctataaatttagattaaagaatcttaccaacagagtttttgtgcatactgtgttgtcagtttcctctaatagctacttgtttatcacagtaatgtaaccgtaacagaactaagaacaaaatcatggaacctactcattcagcaagaccaggaatgggttttctgagtttgtgctgggtgagaaaatcttgtcaataacccaatgtcatttaagttctaactttgggatgctctttggtctaaaagtttgaggaaaaaatgggttcaaccacataaatgataggccatacaccaattttatgtagcatggtcattaagatagccaaaaat

SEQ ID NO: 873611 - DNA, 674 bp, Homo sapiens
tacgtggatggtggcaggcaaagagagagaacttgtgcaaggaaactcccccttataaagccatcagatcttgtgagacttattcattatcatgagaacagcatgggaaagacctggccctatgattcaattacctcccwctgagtccctcccacaacatatgggaattcaagatgagatttgggtagagacacagccaaaccatatcaagtgggaaatgaacatcaggattgatattttttaaaaatgcctcctaggagattctaatgtgctctctggtttgagaaccactcatctgcttattttgattcttgctgacttctttatattaaagtcctaaatatgtgtctctttttctgggatacttatgtgttctattaatctatctctctgtttttcagtgtgtgtgggtgtgtgtgtttaggctttgtaaaacatttatgcctgatacaggcctctccataccaaactttgctttgttttttttagaatgagagattactgcatgttggggtattaccagttccctttcttatcttgctggagccctaagtttccaaagaaatcaactgtgaaatctctctctgaactcctcttttcagtcctctcattcatataggtcgcaaagatcatagaagagccccctaaacacattttctccacatcctcaccac

SEQ ID NO: 873612 - DNA, 646 bp, Homo sapiens
atttaattctatctggcgagaaacaataatgggctaaaccattattgtatcgtaagtcaaattgccaaaacttcacaggctactaaaagttaacccttattgaatgaattaagaaccttagaagttctgctgttaaaaaaagcacggtgactgtcagggtttttcaggtgtgggggstgtgagggttttaagagttggattcctttgactttgtctctattattataggcttagaggtcccgggtaactaccaatcgctatccaaagggaaagcaccctgttagaaattaagtaagaaaaatagtttatattcccggtctgccatttcgattctaagctttatctttatttagctcacagttaaagggggcatagagccacacccacctcacaaacgccgcaaggattgggagaccagaaaagtaaaagtgacttgcaaacctttagctctaagtccataaaaaagactatcatatgctcacatttctaatctttgctagtataatgtaatctttattttgaaaacaatgtgcctccattcctagtaaagcgaaagtcacggcgctgcgaccctcccttcagcgcctccggactctcacgcgatactcggctttcacgctttagtctagggctgcactgcaggagg

SEQ ID NO: 873613 - DNA, 632 bp, Homo sapiens
ttgtttttaaaatgagtggggttgagatggatacatttctttctagttcttacttatcagataatcttgtcaagttcttccaccaaaactgtaccaatctcctagtctttaaacactaagaacacatctaaatagttaagaaaataagtagaagcaaaacaaatgcaacaaagtcacttagaagctggaacttttatataaaatcaatatatgctgaaataatcaggtttttcaaaacttctcagtaatcgcttgtttttttttttcctcctgcttaataatttcaggtctagaggtgcaacattttctgaactytaaatccagcttcccataggggagagtaaagtcacagccaattccccaccatattctcagttctcttaatgaaaaggaagaaatcctataatacatcttcattatggtaggccaatatatgtgaaagttaaagaagaagcatagtccataaaggcagtggtgacagggaatggatattgtaaattcactttgtttacatgccctagagatcatcagtgacatcattatagagttattcagaattatggcattatggttcatgtaaattctttggatattatatgtcacaaaggaagctcaaaccagcccaacaggta

SEQ ID NO: 873614 - DNA, 641 bp, Homo sapiens
taactaccaagaggcatggattattggggttcattttaggatcagcctatgacagtgttcaagtgttaaatacaaatttaaataatatcagtttgaaggggcagcaagttattaacctgcccaggccatgtgttttggccagtttatattatacatattcacagctggtgtcagtatccattagggcaggtggtggtggggatccagaaaaggtcaaggagcttggaaatgatgcgtagtaaattaaatctttaaatgaaagaggaaaaatactctataataagatatgcctgtacccctaaaaccttagaaatcaaagaagtgtcataaacyttatgaaagttttgctataagaacactggcaagtcaagcactttaaattgtctttatattagtgatctatttgaattccccataagttcttagtcatgcatcagaaaaggcaagataaattggttaagatcacagataggctgggcgcggtggctcatgcctgtaatcccagcactatgggaggccgaggcaggcggatcacaaggtcaggagatcgagaccatcctggctaacatggtgaaaccccatctctactaaaaacacaaaaaattagccgggcgtggtggcgggcgcctagagtcccagct

SEQ ID NO: 873615 - DNA, 593 bp, Homo sapiens
tgtccccacactatcccacatcttaagagtgtaaactaataggggcaaatttagataaattggccaggcatggtggctcacgcctgtaatcccagcactttgggaggctgaggtgggtggatcacttgaggtcagagtttgagaacagcctggccaacatgatgaaaccctgtctctactaaaaatacaaaattagccaggtgtggtggctcrtgcctgtagtcccacttactcaggaggctgagtcaggagaattgctagaacccaggaagcagagattgctgtgagctgagaccatgccactgcactccagcctgggagacagagcgagactccgtctcaaaaaaaggaaaaaaagataaataaatgcttggctgttgtagatatttgtagatttccttgtcctctcttttcagcagcagtccccaaccttgttggcaccaggggctggtttcgtggaagacaatttttccacagactgggggctgcgagtgagggggtggtttcaggatgaaactgttctgcctcagatcatcaagcattagttagattctcataagaagcactgcaagctggatccctgtatgcgcagt

SEQ ID NO: 873616 - DNA, 598 bp, Homo sapiens
tccatacacattctcctctaaaatgccccaggccagtttttactatgtgctagactgtttttgtacagcgccaatgttttgagaattcatcgcctcatgagatagaccagcctaccttcagatagctcgcttttttccttcacagacagggtctcgctctgtcatccaggctggagtgccgtgtgtgatattagctcagtacaaactgtaactcctggcctcaagcgatcttcccactttgcctccacaaagtgctgggattacaggtgacagccaccactcctggcctcagatagcttctaatttttaaggaagtcttttttattgacttggaagtcacctttctgaaacctcctttcactgtctagttagctagtatatttgtcttgggggcctaaaacagcatgtgaacttagtaggtgctcaatatataactgctggataratagatctagatctattttttgaaggcataaacttcataatccctgtgcaaatagcacattgaatatttggacactactctcaacattctctttaggctcagtgctgcagttccatcacatgcttttgccagcgtatggtttccagatttcat

SEQ ID NO: 873617 - DNA, 599 bp, Homo sapiens
aatgaaatctggaaaccatacactgggaaaagcatgtgatggaactgcaacactgaacctaaagaaaatgttgagagtagtgtccaaatattcaatttgctatttggaacagggattatgaagtttatgacttcaaaaaatagaactagatctatytatccagcagttatatattgagcacctactaagttcacatgctgttttaggcccccaagacaaatatactagctaactagacagtgaaaggaggtttcagaaaggtgacttccaagtcaataaaaaagacttccttaaaaattagaagctatctgaggccaggagtggtggctgtcacctgtaatcccagcactttgtggaggcaaagtgggaagatcgcttgaggccaggagttacagtttgtactgagctaatatcacacacggcactccagcctggatgacagagcgagaccctgtctgtgaaggaaaaaaacaagctatctgaaggtagactggtctatctcatgaggcgatgaattctcagccattggggttgtacaaaaacagtctagcacatagaataaactggcctggggcattttagaggagaatgtgtatggg

SEQ ID NO: 873618 - DNA, 618 bp, Homo sapiens
agcaatctgagccctcatcccttctaatcacttttaccctgatttactcttttcctcctttttttttttgtttttttttaatagtatttctcatatcatgtttattatttactctgtctccaccttcattcctatccccttctttactgcctgtgaatgccagctgcacaagggcagaggttctttgtatcattcatgaatatatctcaagtgccaaccatcgagttggccacatagtaggtgctcagtaaatatgtatagcatgaacctgctacagtttctgagagatgctaaacatcaggtcagttttagagagaagggatttgctagggttgcaattctacaacaatccagatacccaactcccctgttatgtacccatgagagaaacattaagttttccttctgaacttarataagacccaccaggaaagcactatgaatcaacgaagacttcctaaaattataaagttatgctctaggattgcatacaagatggaatttgggatatcagtccaggtgtggtgcaactagggagtaccagatgtcttgttcagtggtggtagtggtagctgatgagtggagtatgactaaggaggtagaaggcatcaaagtgga

SEQ ID NO: 873619 - DNA, 606 bp, Homo sapiens
gattaaagacttaaacatgaaacctaaactataaaaaccctatatgaaaacctaggagatacaactccagacatagaccttggcaaagatttcatgtcaaagactccaaaagcaattgcaacaaaaagaaaaagtaacaagtgggacctaattaaacaaaagagcttctgcacagcaaaagaaactatcagcagattaaatagcctacagaatgggagaaaataattgcaaactatgcatccaacaaaggtctaatatccaggttctatayggaactttaaaaaatcaacaatcggccaggtgcagtggcttacgcctgtaatcccagcaccttcggaggctgaggtggctggatcacctgaggtctggagtttgaggccagcctgaccaacatggtgaaaccccgtctttactaaaaatacaaaaattagctgggcatgttggcacgcacctgtagtcccagctaccagggaagctgagccaggaaaactacttgaatacaggaggcggaggttgcagtgagccaagatagtaccactgcaccccagcctggatgacagagtaagcctctgtctcaaaaaaaaaaaaaaaaaagaaaaaaaagaa

SEQ ID NO: 873620 - DNA, 642 bp, Homo sapiens; identical to SEQ ID NO: 868824

SEQ ID NO: 873621 - DNA, 580 bp, Homo sapiens
gtgaagtgtatttgctgcttggggaaccagaacagctgtggctggtgggaccctgaccatgatggcccacccactcactctgccccctcagaacctcagcagcttatcccttctcagagtcacccattcctgtacaagggagatctctctccatgaatacccttccaagcytgagacacttgcatctgcagaaagcaagaaaagaccgggaacagaagcccttccctccatggagtgagacttgagccagcgggggtgtgagagggctgggaggtgggtgggttaagagaggaggctaagagagaatgggagaaagaaaacatcctggaggactagctcctttctaaggctcacaaatgcaagtgcttgcagaggcctagctggaagcataaaaaaggtgaaggctaaatatacatcaggagtacccagttccacaaatacatctgccctctcccatttcctgaaatcaccagcacctcttttatattttcagacttgcatttctctggcgacattgactcagcacttttctcttctacaaggataataacttgcagccaggacagtgaaaaggcaaggg

SEQ ID NO: 873622 - DNA, 649 bp, Homo sapiens
acaggcttgagccatcatgcctagcctaaagcttttaacttatcagatattaaaattgactataaaacttccctaagtgaaacaaagtaacactagtacaagaagagaagacagatcagttaaagaaaatagagggctgatatggtttagctgtgtccccacccaaatctcaacttgaattgtatctcccagaaatcccacatgttgtgggagggacccagggggaggtaattgaatcatgggggccaatcttccctgtgctattctcatgatagtgaataagtctcatgagatctgatgggtttatcaggagtttccacttttgcctcctcctcattctctcttgccgytgctatgtaagaagtgcctttcaccacctgccatgattctgaggcctctccagccatgtggaagggtaagtccaatgaaatctctttttcttcccagtcttgggtatgtctttatcagcagcatgaatatggactaatacagtaaattggtaccagtagagtggggctttgctgaaaagatacccgaaaatgtgggattgcctttggaactgggtaacaggcagacgttggaacagtttggagggctcagaagaagagaggaaaatgtgggaaagtttggaacctcctagagacatgtt

SEQ ID NO: 873623 - DNA, 667 bp, Homo sapiens
gggcctggtggcatgcctgttggtctagctactcaggaggctcaggtgggaagatctcttgagcccaggatttcaaagttacgatgatctatgatcgtgccgttgtactctagcctgggtgacagagtgagactctgtctcttaaaaacaaacaaacaaacaaaaaacaaaacgacgttaatgaaggatgtaagtaggaatgcttataaagtttattaaaataaatatatatgatatatgattaaacataaaatactttttaaaggaaaaaaccaaaatgacaaataagaacaataacaacartactttataagaaaaaggaaaactgtatcgaacctgaaaaccaagcaggcttctataaacttattgttgaatatcacatgctggcttccaaaaacgtcatctagtattaaagcttcaagtcaccagtgcatgtaacctctctccagtcctcaacatccaactcttcattctgcaaccacttcccagaaaagaagtcttctcagtttaccaagcaaactcttaacccaatatttctaccaccaagaatatagaaaaaacaatatgccaagcttaagaaagagaattttggccaataattgttattttcacagtaaacctaattctcaaatgtaaaaatggtaaaacagaatgcaaattattttaa

SEQ ID NO: 873624 - DNA, 630 bp, Homo sapiens
aaatatattgagttttcccccacctggaagaaacagttgccattttaaaatactagcacttttttcccacaatttatatggtagtgattactctctatatcttgtacttaatttcaaacaaactgagagacagaaagatagactaattcatacatatatacataaatttagaatatggataattttaccatcatggcacttactgaatggaacctggctcagttgttcagctctgttgaccagagctgtacaccctaagccatacatactatacggtataaaattagttcaataatatgaagataactgtgtctatatgccatttaaacataaactccactgcatttaaatttatttatcaactctactagacaataaactctttgtcaagaaaagccatgttagagtttttttttccttacagcatctggcactatcttccttgtatgtartagatgcttagtaaatttaataatataataataataataataataataataaaaggaagatctcattgtggttcaaaaatgtcactaataataggcaaattcttgttccaaaagctgatgtcttattttagtatttctggcacacaaatttcagaatgcttaggcaattaaactggaa

SEQ ID NO: 873625 - DNA, 575 bp, Homo sapiens
cagtgaagccatatcagttatattccagtagaagacttttagttaattaaggaagggtgtataatttacaagaaaaaaccaaacaacctcataaaaaaagtgggtgaaggatatgaacagacacttctcaaaagaagacwtttatgcagccaacagacacatgaaaaaatgctcattatcactggccatcagagaaatgcaaatcaaaaccacagtgagataccatctcacaccagttagaatggcaattattaaaaagtcaggaaacaacaggtgctggagaggatgtggagaaataggaactcttttacactgttggtgagactgtaaactagttcaaccattgtggcagacagtgtggtgattcctcaaggatctagaaatagaaataccatttgacccagtgatcccattactgggtatatacccaaaggattataaatcatgctgctatgaagacacatgcacacatatctttattgcggcactattcataatagcaaagacttggaaccaacccaaatgtccatcgatgatagactggattaagaaaatatggcacatatacaccatgg

SEQ ID NO: 873626 - DNA, 612 bp, Homo sapiens
tgaggtaaacaacctaaaatcacaactgaaatgactagagacccacgagcaaacaaatcttgaagctagcagaagacaagaaataaccaaaatcagagctgaactgaatgaaattgagacatgaaaaactattcaagagatcagtgaatccagaagctggttttttgraaaaaaaaaaaaaaaaaaaaaacatgaaaaagacggccctctagctagactaatactaataaagaaaaaaaaatgagagaagattcaaataaacacaatcagaattgacaagggggatattaccattaaccccacagaaatacaaacaaccatcagagaatactatgaagaactctaggcaagtaaactggaaaatctaggagaaatggataatttcctggaaacatacaacttcccaaaactgaatcaagaagaaattgaatccgtgaatagatcaataatgagctctgaaattgaggcagtaataaatagcctaccaaccaaaaaagaccaggaccagatagacgcaaagctgaattctaccagatgcacaaagaagaaccggtaccatttctgctgaaactattccaaaaaaattgagggagagggactccttcctaactc

SEQ ID NO: 873627 - DNA, 612 bp, Homo sapiens
tgaggtaaacaacctaaaatcacaactgaaatgactagagacccacgagcaaacaaatcttgaagctagcagaagacaagaaataaccaaaatcagagctgaactgaatgaaattgagacatgaaaaactattcaagagatcagtgaatccagaagctggttttttgaaaaaaaaaaaaaaaaaaaaaaacatgaaaaagacggccctctagctagactaatactaataaagaaaaaaaaatgagagaagattcaaataaacacaatcagaattgacaagggggatattaccattaaccccacagaaatacaaacaaccatcagagaatactatgaagaactctaggcaagtaaactggaaaatctaggagaaatggataatttcctrgaaacatacaacttcccaaaactgaatcaagaagaaattgaatccgtgaatagatcaataatgagctctgaaattgaggcagtaataaatagcctaccaaccaaaaaagaccaggaccagatagacgcaaagctgaattctaccagatgcacaaagaagaaccggtaccatttctgctgaaactattccaaaaaaattgagggagagggactccttcctaactc

SEQ ID NO: 873628 - DNA, 640 bp, Homo sapiens
gcttttgttgccattgcttttggtgttttagtcatgaggtctttgcccatgcctatgtcctcaatggcattgcctaggttttcttctagggtttttatggttttaggtcttacatttaagcctttaatccatcttgagttaatttttgtataagtaaggggtccagtttcagtattctgcatatggctagccagttttcccaacrccatttattaaatagggaatcatttccccattgcttgtttctctcaggtttgtaggtgtctggtgttatttctgaggcctctgttctgttacactggactatatatctgttttggtatcagtaccatgctgttttggtcactctagcattgtagtatagtttgaagtcaggtagggtgatgcctccagctttgttctttttgcttaggattgtcttggctatatgggctgtttttggttccatatgaaatttaaagtagtttttctaattctgtgaagaaagtcaatggtagcttgatggagatagtattgaacctttaaattactttgggtagtatggccattttcaagatattgattcttcctatccataagcatggaatgtttttccatttgtttgtgtcctctcttatttccttgggcagtggttagtagt

SEQ ID NO: 873629 - DNA, 609 bp, Homo sapiens
attgacagtaggatgttaaagtctcccactattattgtgtgggagtctaagtctccttgtagaactctaagaacttgctttatgaatccgagtgttcctgtgttgggtgcatatatatttaggatagttagctcttcttgttgcatttatccctttaccattatgtaatgcccttctttgtctcttttgatctttgttggtttaaagtctgttttatcagaggctaggattacaacccctgctctttttttcactttccatttgcttggtaaatattcctccatccctttattttgagcctatgtgtgtctttgcacatgagatgggtctcctgaatacaacacactgatggagcttgactctttatccaattcgccagtctgtgtcttttaattgggccatttagcccatttacatttaargctaatattgttatgtgtgaatttgatcctgtcattttgatgctagcaggttatcttgcctgttagttgatgcagtttcttcatggtgtcaatggtctttacaatttggtatgtttttgcagtggctggtaccagtttttcctttctgtatttagtgcttccttcaggagctcttgtgaggcaagcc

SEQ ID NO: 873630 - DNA, 670 bp, Homo sapiens
attgttatgtgtgaatttgatcctgtcattttgatgctagcaggttatcttgcctgttagttgatgcagtttcttcatggtgtcaatggtctttacaatttggtatgtttttgcagtggctggtaccagtttttcctttctgtatttagtgcttccttcaggagctcttgtgaggcaagcctggtagtgacaaaatctctcagcatttgcttctctttaaaggattttatttctccttcatttatgaagcttagtttggctgtatatgaaattctgggttgaaaattcttttctttaagmatgtcgaatattggcccccactctcttctggcttgttgggtttctgccaagagatctgctgttagtctaatgggcttccctttgtgggtaagctgacctttctctctggctgcccttaaaattttttccttcatttcaaccttggtgaatctgacaattacatgtcttggggttgctcttcttgaggagtatctttttggtgtgctctgtatttcctgaatttgaatgttggcctgtctttctaggttggggaagttcttctgcataatatctcaaagagtgttttccaacttggttccgttctcccagtcacttcaaggtacaccaatcaaatataggttttgtcttttcacatagtcccatgattttt

SEQ ID NO: 873631 - DNA, 554 bp, Homo sapiens
aaaaacattccccaaagcaaaaccagaagccctccctgagaatcgtctctgggcgtcggggcccgggccgctggggtgccactccgcaaggggttcctcttctccccggggtccctgagggctggacgagagaggacccgtcggtcccggggtgccgggaggagacgttcgcccgccccacgagarggggcggctctggcctcggagccgcccctcctgccgccggagaacaaacgggatattcagcagtggcctgtggctgccagagcagctcctcaggggaaactaagcgtcgagtcagacggcaccataatcgcctttaaaagtgcctccgccctgccggccgcgtatcccccggctacctgggccgccccgcggcggtgcgcgcgtgagagggagcgcgcgggcagccgagcgccggtgtgagccagcgctgctgccagtgtgagcggcggtgtgagcgcggtgggtgcggaggggcgtgtgtgccggcgcgcgcgccgtggggtgcaaaccccgagcgtctacgctgccatgaggggcgcgaacgcctg

SEQ ID NO: 873632 - DNA, 552 bp, Homo sapiens
acaaacaaccccatcaaaattgggtgaaggacatgaacagacacttctcaaaagaagacatttatgcagccaacaaacacatgaagaaatcctcaccatcactggccatcagagaaatgcaaatcaaaaacagaatgagataccatctcacaccagttagaatggcaatcattaaaatgtcaggaaacaagaggtgctggagcggatgtggacaaataggaacacttttacactgttggtgggtctgtaaactagttcaacctttgtggaagtcagtgtgggattcttcagggatctagaaccagaaataccatttgacmcagccatcccattactgggtatatacccaaaggactataaaccatgctgctatgaagacacatgcacaagtatgtttattgcaggactattcacaatagcaaagacttggaaccaacacaaatgtccaaaaatgatagactggattaagaaaatgtggcaaatatacacaatggaatactatgcagccataaaaaatgatgagttcatgtcctttgtagggacatggatgaa

SEQ ID NO: 873633 - DNA, 638 bp, Homo sapiens
aaagccctccaaatatccatttgcagatacttcaaaaacattctttccaaactgcttaatgaaaagtaaggttcaaatctgtgagatgaatgcacatatcacaaagaagtttctcagaatgcttctgtcttgtttttatgtgaagattattccttttccaccataggcctcaatgcgctccaaagatccatttgtagataatacaaaaagagtgtttccaaaaggcagaatcaaaagaaatgttcaactctgtgagatgaatgcactcatatgaaagaggtttctcagaattcttctgttaagttttttgtgaagataattcctattaccgcagagccatcaaatggctccyatatatccctttacagatcctacaaaacgactgtttccaagatgatcaattaaaagaaagtttcaaatccatgagatgaatgcacacataacaaatagtattctcagcatgcttttgtctgctttttatgtaaagatatttccttttccaccataggcctcacagtgatccaaatatccacttgcagatactacaaatgagtgtttcaaaactgctcaatcaaacgaaaggaaccacactgtgagatgaatacacacatcacaatgtagtttctgagaatgtttct

SEQ ID NO: 873634 - DNA, 626 bp, Homo sapiens
tatgttaagtgaaataagccaggcacagaaatatcataccacatgttctcattcatatgtgggaggtaaaaaagttgacttcatacaagcgttgagtagaagagtggttcttagaagctgggaagggtaatgggtaaagggaatagagaaaggttggttaatggataaaaaaattacagttaggctgggtgtggtggctcacgcctataattccagtactttgtgaggccgaggtgggtggatcacttgaggtcaggagttcaagaccaacctgaccaaaatggtgaaactccttctctactaaaaatacaaaaattagctgggcactgtgatggrcgcctgtaatcccacctactcaggaggctgaggcaggagaattgcttgaacctggcaggtggaggttgcagcgagttgagattatgccactgcactccaacctgggtgacagagtgagactctgtctcaaaaaaaaaaaaaaaaaaaaattacagctagatgggaggaacaagtcctagtgttctgtagcactgtagggtgagaacagttaacaattacttattatatattttcaaatagccagaagagacaattttggatgttcccaatacaaagaaatgataaatgtt

SEQ ID NO: 873635 - DNA, 610 bp, Homo sapiens
ggagacgttatttacatagtaatgtaaggactctcaagaacagtctataggtcccagttagaaaacaaagtaaaattaaaaaaaaaaatatttaataaaggaaactttacttttcggaaaagattttccaaaaaagttattactaaaaataataaatttcagctttcgcttgtatttttacaccatgatctaaaggaaaattaaataaaactcttgtgatcccccattttgagaggcactgatccagtccaacacagtcatgtgggatagcgctaaaattcaggacagttcattgaccttagagcagaaaatatgtgcttttaaagtattttctgaagttgatgagaattacatgaagtaccctcttaagggaaatgatatttgtaatcaacatttattctttaaaaatatgtggatacactcctgtcagagctttgytaaaggagcagctcatcagagaaaatattctacaatataatccattacaacaaaagcaaataactgagaacaactccatttctcttttccttttcttcttcttatcaaacttctacttattctttaagaattatctggtctcactacatttatgaatcatatctgatcttcc

SEQ ID NO: 873636 - DNA, 590 bp, Homo sapiens
gggaggtctcaggaaacatacaatcatggcagcaggggaagcaaacacacccttctttaaaaggtggcaggagagagaagaatgagagccaattaaagagggaagccccttataaaacaatcagatctcgtgctaaattactatcatgaaaaccagatggaggaaaccacccccattattcaattatctccacctggtccctcacacaacacktggggattatgggaactacaattcaagatgagatttggatggcaatacagccaaactatattattgcaccctggcccctcccaaatcttatgtgctcttatttcaaaacacaatcatgcctttccaacagtaccctaaagacttaattcattccagcattaaccagaaagtccaagcccaacatctcatctgagacaaagcaagtcccttctacctacgagcctgaaaaatcaaaagcaagttagttaccttctagatgtaatgagagtacaggtattgggcaatacactagctccaaatgggagaaattggccaaaacaaaggggctacaggccacattcaagtctggagtccattgaggcagtaattaaatctta

SEQ ID NO: 873637 - DNA, 713 bp, Homo sapiens
ataataatactaaacatatatgtacctaacaccaaagcaaccagatatataaagcaaatattaatctaaaaagagtgatagactccaatacaatagcatttgtacactttgacaacccaatctcagcactatacagatcatcaagatagaaaattaacaatgaaatattggatttaaactacayattaggtcaaatagatcaaacagacatttatagaccatttcatccaccagttacagaatgtgtattattttcatcagtccatggaacattcttcagaattgatcatatgttagcacacaaaacaagtttcaacaaatcaaaaaaattaaaatcttatcaagtctcttctcagatcacaaatgagtaaaataagaaatcaataacaagaggaacttgagaaactctacaaatacatggaaattaaacaaaaagtttcttgataaccattgggtcaaggaaaaattaaggaggaactaaaaaatttattaaaacaaatataaattgaaacaagatgtaccaaaaccatgtaatatagcaaatgcaatgctaagaggaaatgttatagcaataaaagcgtacatcaaaaaagtagagtccaaataaacaatctcgtggtgcacttcaaggaactaaaaaaagagagaagacccaaataaacaaaatcagaaataaaaataagattttataactgatgccacagaaatacaaa

SEQ ID NO: 873638 - DNA, 584 bp, Homo sapiens
tgtactggatcccagcccaaagccagcccaggcagcctccagcatagctacatcattggtctatgctcatgtcctgtccatggggccatgtctccaactatagcaacacagcagaacctggctctcctgggcctttgagagacccattaataataactcggccaaggtcacacagtgagttattgccagakcaaacctggaatgatgaagtgctctttttctcactgctataacaggagtcctatggtcaaatgtgcctaaggacgagtcatgcagtatacaaaggtcaattaggcacgccattagagactattcagaattggagtgctggctgggcacagtggctcttgcctgtaatcccagcactttgggaggctgaggcaggtggatcagctgaggtcgggagtttgagaccagcctgaccaatgtggagaaaccccgtctctactaaaaatacaaaattagccaggcatggtggcgcatgcctgtaatcccagctacttgggaggctgaggaagaagaatcgcttgaatccaggaggcagaagttgcggtgagccgagattgcaccattgcactccagcc

SEQ ID NO: 873639 - DNA, 611 bp, Homo sapiens
aagggatattgagttttagttttacaagatgtaaaatttctagaagtcttttgcataacgatgtgaatatagttaacatgcctgaaatatacacttttttttttttgaaacagggtctcaatctgtcacccaagcttgcacgcaatggcacaattatggctcactgcagcctcacaatcccaggctcaactaatcctgcccctcagtctctcaagtagctgggaccacaggtgtacaccaccatgcctggctatttcttaraaaaaaaatgtttgtagagagggtgtctccatattttgcccaggcttgtatcaaacttttgggctcaagcaatcctcctgtcctggcctctcaaaatcctggttttaaagatatgagccaccaccatgcctggccctgacatgtacatttaaatagatttaagaaggtaaattatatgctaagtgtttttacaacaataatttttaaaaactggaaaaaatacagaattatacatctttttaaaaattaccttcaaatcacaaaagtgtttttctcacacaaagaaaatacatatttatcattaaacacatggtgaaaataagactatttccaaggctactcacttagac

SEQ ID NO: 873640 - DNA, 628 bp, Homo sapiens
aaaaaacttatgtacaatatcaatgaaatactcaattttagaacaaatttaaacaaggagctcataaatctttcaagtgaaagatatatcaatgaaaaaaattagagaggacactaataaattttaaaatgttttatttctattgaaagaataagtaytatgaaactgccatattatccaaagtgacctgtagatttaaagaactccttatcaaaattccagtgtttttcttcacagtaatgaaaaatccaatcctaaaatggacatgaaactacaataaactttgaatagtcaaagcaatcttgaggaaaaagaacaaagcagaaggacatcctactttgtactttcaaactatatttcaagactacagtaatgaaaacaggatgaaatgtgcagaaaaataaaccaaaaagaaaaaacccaatataacagaaactactactctcacacatttcagacatgatgcaaaaagagaacttaaaaaacagtttaacatacagtatctcaaaattatggagacagatctgtctgtccacaaaacaagaaaaaagaagtcagattgtacactcttttgtatgccatgaacagtacttcggctgtcactgtaaacttggaggaagatcattga

SEQ ID NO: 873641 - DNA, 644 bp, Homo sapiens
aatgtctatgaaagacttcctatttgcaagtactttatcaggcacattacatggattgtctcatttttaatccttgtgacaaatttctgtagtcgaaatgattagctctatttttttttcagatgaggaagaaatcaaagatttggaaagagcaaatgatgtaacaacaaaatggaggggcaggaatgtgactcatgttgttcagttgagggtctaagtttcttctccacaatcacagcccttaggactcccctcatcatttacaatagctccaagcaccctattttctgtacataacatgcacagctaccctcccactgatgcccacatcccacaaggtgaggtctttttccctcttcccttcccaaacccttaccagttggccctacgtgtttggcatcttctaattatcctgattcctaaatatgcaaaataataatattccccaattgccttctgctgtaatttcatgtaacaggtccyctcaaatagaacgtccttaattttaattgcatattatgttccctttctcagggcagacagctatttattcatctagctaattgttcaggagacaaagacatggaatatatctcaccaaattaagtatttgctagttgctattactactggggctataatat

SEQ ID NO: 873642 - DNA, 603 bp, Homo sapiens
ggatgttcagctgccatctgagatttaatgcactgtaccaagaagtctttagggccctctgattcttttatcttccattgtacatgacctctttacttctgtttgtgtgcttgtaggagcctgtctccgtcctggaatttgaaaaattgccatcacattacttcaagatgtttacttccttcctatctgctcttcttgtgaagaaatcgctcattcatcctttcgtttattcatcttttgaaatatgttggtgctcagtccctaccagacacagtactaggagatgtggacacaaaaataagagmtatagcagctcaccgggacaagggaacagataagaacacaaaatgcagtgttgtggggtgagcatggctggggaaacagacctagcaaagactcactgagtcagagggcaggtcttagggcagagaagccttcttgtagaaggtgaactctgatttggggtttgaaggatgcataggaatttgtcaggaaacaaactggtgttctaacactgactcccattctccttagttaggcctgacaaagtgcattacagcaaattgtagctaagacttaactcagaaactctggatgcttttc

SEQ ID NO: 873643 - DNA, 657 bp, Homo sapiens
  misc_feature 496: n = A,T,C or G
tcctggaggctagaagtccctaatcaaggtgccaactgatttggttcttgatgagatctctctttctgtcttgtaaacagtagtgtcctcatatagaagacagagaaaaagatttctctctcttttcctcttcttacaaggtgatcagtcctatcagattaggkcatcacttacccctaattatctcctaaaggtcctgtctccaaatacagtcacactgggggttaaggtgtcaacataatgagttttgtggtgccataaaccttcagttcataagagtactaaatgagttcagagcagctggggtgggagaaaggaagtagatgctataagagtaaactgggggtgaggtagtgaaagatttagattccacttttatttagctaggtttatcagttagatagatttgacatggctgaaaaggtttagggagaggaaggtccccttagaggcatacatatagggtgggaatatggatattaaggagctattaagnaagtagagtcagtgggactagatcaattgcacacagtttgtaagaaagagagagacactgaggctggttctcaggtttcaagtttgggaaatggagggatcaggggtgatgcttttaagtgaagtagcaaatgccaggaaggagcagatcagagagagaga

SEQ ID NO: 873644 - DNA, 657 bp, Homo sapiens
  misc_feature 496: n = A,T,C or G
tcctggaggctagaagtccctaatcaaggtgccaactgatttggttcttgatgagatctctctttctgtcttgtaaacagtagtgtcctcatatagaagacagagaaaaagatttctctctcttttcctcttcttacaaggtgatcagtcctatcagattagggcatcacttacccctaattatctcctaaaggtcctgtctccaaatacagtcacactgggggttaaggtgtcaacataatgagttttgtggtgccataaaccttcagttcataagagtactaaatgagttcagagcagctggggtgggagaaaggaagtagatgctmtaagagtaaactgggggtgaggtagtgaaagatttagattccacttttatttagctaggtttatcagttagatagatttgacatggctgaaaaggtttagggagaggaaggtccccttagaggcatacatatagggtgggaatatggatattaaggagctattaagnaagtagagtcagtgggactagatcaattgcacacagtttgtaagaaagagagagacactgaggctggttctcaggtttcaagtttgggaaatggagggatcaggggtgatgcttttaagtgaagtagcaaatgccaggaaggagcagatcagagagagaga

SEQ ID NO: 873645 - DNA, 523 bp, Homo sapiens
tacagaaaatacaaaaattagccgggcatggtggtgcacccctgtagtcccagctactcaggaggctgaggtggtaggatcacctgaacccgaaaggtggaagctgcagtgagccaagattgcaccactgcactccagccttggtgacagagccagacccttscccccaacccccaaccaaaaaaaaaaaaatgtcaggaaggagaatgaggtaacccaatatgagaccctcccaggattccagagcctgcagcgcagaagctggtttccaccctggaccagaagatggtgctactcgctcacaggtcaatgcaggtgtcagctgctgcctcactggagtttttttttggttttgtttttgtctgttctcgggggcgggagaaagagatgggttaggaagttgtaggaacccacctcttggaaggccttgggtttccccacttctttcctaacctcaccccaggcctgaagttggcctctttccaccatggtcctccaacctcttcccaggccagtgcctagg

SEQ ID NO: 873646 - DNA, 592 bp, Homo sapiens
gccgctgaaccctcccctgcatgtaagcccccagcaaagccccatgtctcatctgctggctctgggtctcttctttggtctcctgaacctggtgccatccccattggaattaatagggattcagcacaacagctactccctggatgtctcattctcctcgtttccctcagccctgctgtcgaatgggttttactacttaggtgctgcaaggtcaaccgatcagcagacaactgccattgaaaaggctgtctatggtactcacaggggccacacggaaaggcaacaggcttggttttgagacagaggaaggcgacaaccatgggcaagagccttcactgtgrttccttgggatgaaatgagcaaggcacagtgggcaggtgtagcattggtgagtgtgagtaatttcagcggactctgaggcatcggagccatccctagatgtctggcacccagccctggggtgtttagtgcaggcagatgtggtcagagtgtgagagcccagcaagggatggaattgagggcgtagactctggatcagttggtttgtatttgaaaggttcatatactgcctcccaagaagattcctcccgag

SEQ ID NO: 873647 - DNA, 592 bp, Homo sapiens
gccgctgaaccctcccctgcatgtaagcccccagcaaagccccatgtctcatctgctggctctgggtctcttctttggtctcctgaacctggtgccatccccattggaattaatagggattcagcacaacagctactccctggatgtctcattctcctcgtttccctcagccctgctgtcgaatgggttttactacttaggtgctgcaaggtcaaccgatcagcagacaactgccattgaaaaggctgtctatggtactcacaggggccacacggaaaggcaacaggcttggttttgagacagaggaaggcgacaaccatgggcaagagccttcactgtggttccttgggatgaaatgagcaaggcacagtgggcaggtgtagcattggtgagtgtgagtaatttcagyggactctgaggcatcggagccatccctagatgtctggcacccagccctggggtgtttagtgcaggcagatgtggtcagagtgtgagagcccagcaagggatggaattgagggcgtagactctggatcagttggtttgtatttgaaaggttcatatactgcctcccaagaagattcctcccgag

SEQ ID NO: 873648 - DNA, 564 bp, Homo sapiens
aagtgattccatgtgcggtgacatctgagaaccactgttcaggctggaggaatcaaatcagaaacatacctcacccaaccctgaccttgaacggagaagggcagagttcttccatggccactcatccatacccgcttttttggcccagagagagttcagccttgcttgaccccagtggttgcccatctttccagtgtgccttgcatgggttttgggarcccagtggctgcagcagagcatccttctctctgatttcagtttagccaactgcggcaggtggggagtgggagaaacagccaggattggccaagccagcctttgctcacctcattggcctaattagagcagggctcatgtacagttctggaatttcactacataagtccttttgaattaaatctggaatgtcaaataccgagtgaacctactaggactctccccatcctgtgtccatggcagacatcaccaattgatcagcgtactctttctcattgagcccagaggtggcttcagaagactttcctagtcttcccggggtgctctaggcagccggggccagctaga

SEQ ID NO: 873649 - DNA, 632 bp, Homo sapiens
aagatttgtactatgtactaaagaacctacataaagagtgatttggaaccaacccaaatgtccaacaatgatacactggattaagaaaatgtggcatgtatataccatggaatactatgcagccataaaaaatgatgagttcmtctcctttgtagggacatggatgaagctggaaaccatcattctcaacaaactattgcaaggacaaaaaaccaaacaccgcatgttctcactcatagatgggaattgaacaatgagaacacatggacacaggaaggggaacatcacacactggggcctgttgtgaggtggggggaagggggagggatagcattaggagatatacctaatgttaaatgaccagttaatgggtgcagcacaccaacatggcacatgtatatatatatgtaacaaaccacgttgtgcacatgtaccctagaacttaaagtataataataataataataataataataataataatagagtgattaataaacttaacaagaacctggtgtattctggatgaatcatacttgataatgcccaaattatgccacatatctctaaaatattttaatccaaaacaaagactaatttaattttaaggcacttacattttagattaactg

SEQ ID NO: 873650 - DNA, 632 bp, Homo sapiens
aagatttgtactatgtactaaagaacctacataaagagtgatttggaaccaacccaaatgtccaacaatgatacactggattaagaaaatgtggcatgtatataccatggaatactatgcagccataaaaaatgatgagttcctctcctttgtagggacatggatgaagctggaaaccatcattctcaacaaactattgcaaggacaaaaaaccaaacaccgcatgttctcactcatagatgggaattgaacaatgagaacacatggacacaggaaggggaacatcacacactggggcctgttgtgaggtggggggaagggggagggatagcattaggagatatacctaatgttaaatgaccagttaatgggtgcagcacaccracatggcacatgtatatatatatgtaacaaaccacgttgtgcacatgtaccctagaacttaaagtataataataataataataataataataataataatagagtgattaataaacttaacaagaacctggtgtattctggatgaatcatacttgataatgcccaaattatgccacatatctctaaaatattttaatccaaaacaaagactaatttaattttaaggcacttacattttagattaactg

SEQ ID NO: 873651 - DNA, 643 bp, Homo sapiens
caaatgcctgttaaactatcttcactctctttatttttttcttttttcttttcaaattgaaagactttcagtaacctgtcttccagttcactgacactttcttctgcttaatctagtctgctattgaacccttctattgaatttttcagttcagctatactcctctttacctctatgatatctgtttgctaatttttatgctgcytatctctttgaggaaattctcagtttgtttttgcattgctcttctaacgctggtgagcagcactatggtcattattttgaattacctgttttgtaaattacatattcccactttatttggttcagcttctggagatttctctttttcttttatatagaatatattccttttataaaaaaattttcattgactctctgtgttggtttctgcacattacataagactctaccagtcttgttgcactggcactgtatagaagaatctcaccaatccctctgatcagatattttaatgtgcctctcatttttttttttttttggtccaaactgttgtctgtttggtggtctcttggagcttaggatgcgccacatcctgtcaatattctaagaccagtaagataggagccagactctctagatataggtggaaagattgaag

SEQ ID NO: 873652 - DNA, 586 bp, Homo sapiens
gtcacacaccactgctaagacaaataagcactgccttcccacctccagtgggagaagacaattgaaaactccagcgtaatcccatcactttgggaggccaaggtgggcagatcacctgagacaagcagttcaaggtcagcctggtcaaatggcgaaaccccacctctactaaaaatacaaaaattagccaggcatagtggtgggcacctgtaatcccagctactcgggaggctgaggcggagaatctcgtgaacctggraggcggaggttgcagtgagccaagatcatgccactacactcaaaaaaaaaaaaaaaaaaaaaaaggaaaagaaaaagaaaacttcagttgaaaactccatctccagtgagagaagacatcaaaaacatatcccttgcaccctgctctatacaccttttcctgttgctgattttaatctgtaacttttctctgcaataaataacaactgtaagttgcttgaagacataaaatgatcttttttgagttctaaattctgtgcatccttgtagtgagttattgacttgagggtgatttggagacctcctaaacttctcatcctgctgaaaa

SEQ ID NO: 873653 - DNA, 586 bp, Homo sapiens
gtcacacaccactgctaagacaaataagcactgccttcccacctccagtgggagaagacaattgaaaactccagcgtaatcccatcactttgggaggccaaggtgggcagatcacctgagacaagcagttcaaggtcagcctggtcaaatggcgaaaccccacctctactaaaaatacaaaaattagccaggcatagtggtgggcacctgtaatcccagctactcgggaggctgaggcggagaatctcgtgaacctgggaggcgraggttgcagtgagccaagatcatgccactacactcaaaaaaaaaaaaaaaaaaaaaaaggaaaagaaaaagaaaacttcagttgaaaactccatctccagtgagagaagacatcaaaaacatatcccttgcaccctgctctatacaccttttcctgttgctgattttaatctgtaacttttctctgcaataaataacaactgtaagttgcttgaagacataaaatgatcttttttgagttctaaattctgtgcatccttgtagtgagttattgacttgagggtgatttggagacctcctaaacttctcatcctgctgaaaa

SEQ ID NO: 873654 - DNA, 613 bp, Homo sapiens
gattcatttaccactatgaaatttctctatctccaataatactctttgtcttgaagtcttttttttctgctattgatatattaatagctaaattatgtttcttgaaactattgatggaagagagtatcttttatttgcacttttrgttcccaccagcctgtatttatatatttcaagtatgtttcttgtaagcagaaagtaggtgatcttgctttaaaaaaataaattcagtctgacaatctttgccctttaagtggaataatttgtccatttgcatttaatatagtaactaatacagttttttatctcacccttctttgtcttctttcattccatttggtattcgttcttcggtttgtcccttcctgccttctttgtgtaggttctataatttttaatattctattttagctcctatgtttactttttagctatttttccctttttaatattttttctagcaatcataataattagctgtaagttatggtctacatttgaagcacattatgctacttcatatacagtgtcaatatgttactacagtaccatttggtctggctttagttttaaacatatttttctaggatgttatatacaaattcaatagcgc

SEQ ID NO: 873655 - DNA, 622 bp, Homo sapiens
cacattcttcttagctacacataaaagattctccaggatagatcatatgctatgcccctaacaagtcataccaaatttattaaggaggagattataacaagtatatatttttcttatacacagtagtataaaattagaatttaagaaaagcttcagaagttttacaaatacatataaattaaacaacatgctcctcaacaaccaataggtcaatgaagaaattaaaaggtaaattaaaaaaataaatttgagacaaaaataaaaacacattataccaaaacacagcaaaagcagttctaggagggaatcttacggcaatgaacacctacattaaagaagaagtaaaattttgaataaagaacctattaatacacctcaagtaactacaaaaacaagaacaaaccaaatccaaaattgatagaaggaargaaataacaaaagtcagaggagaaataaacaaaatagagacccaccaaaaaaaatcaaaaaaattaatggagcaaataattgattttttttcttcccaacttttattttaggttcgagtatacatgtacaggtttgttacatgggtaaattgttcaccatgggggtttggtgtgcatattattttatcatctag

SEQ ID NO: 873656 - DNA, 614 bp, Homo sapiens
gtgtcaatggtctatgtgtttaagtatgtttttgttgtggctgctaatagtctttagtttccatgtttagccctcccttaaagatctcttgtgagacaagcctagtggtaacaaattcccttcatgtttgattgtccgaaaaggattttatttctccttcacttatgacgtttagtttggctagatatgaaattcttcrttggaatattttttctttaagaatgctgaggctgggcatggtggcttacaactgtaatcccagcactttgggagcctgaggcgggcagatcaccaggtcaggagatcgagaccatcctggccaatgtggtgaaaccccatctctacaaaaaatacaaaaattagctggccgtggtggagggcacctgtagtcccagctactggggaggctgaggcaggagaatcatttgaactcaggaggtggaggttgccataagccgagatcgcaccattgcactccagcctgggtgacagggtgagactctgtcaaaaaaaacaaaaaaagaaagaatggtgaatataggcccgcaatctcttctggcttgtagagtttttgctgaaaactctacttttagcctaatggagtttcctttgta

SEQ ID NO: 873657 - DNA, 616 bp, Homo sapiens
ctcctagatatatagaattatggcatctgcagacaaataaatttacttattcctttctgatttgtatgctatttatttatttatttattttctgactactctggctagaacttctagaactatgttgaataaaagtgttgacaataggcatccttgccttgtaccttgtacttgttcagattttagagaaagcactttcagtgttcttctacagattatgatgtaggtgcacaacattactaaccatcagaaaaatgcaaatcaaaacyacaatgagatgtcacctcatatcttttagaatggcttttatcaaaaagataagtgttggtgaaggtgaagagaaaaagaacgcttgtacactgtggatgagaatatgaactggtaaaacattatagaaaatagtatgtagtctctcaaaaaattaaagctagaactaccatatagaatcggcatttaatccagcaagtctactattgggtatatatccaaagaatatgaagtaagtatgttgaagagacagctgcacttctatattcattgtagcatattcacaataaccaagatatagaaacaatgtaagtaaacctcaacagattaatgtataaagaaatattat

SEQ ID NO: 873658 - DNA, 666 bp, Homo sapiens
gtgtttacaaaacattctcattcttttctgtctctggaactgaaacaaatcatccaaggttattagaacagttattcagatcttcactttagagaaatagctaagtctccgaaggatgattgatttaagctcttagagccagaatcctctaggttcactgattcatttactctttctagaagaaggtatttcccctgctacacatgttatatttttgcaagrgaagtaaaataggaatggaaacacatcccaaacaccattcccaactatttctcttagctttttaggagctaaaatttggttaaggaaattactcagatgacagcacttttatgttgaaaaatgcaaccatagctgaaaagaactgttgtgagtccaagagaacaaatacattcaatgggaaatgtggtaaccatacttgggttattctcaccacataccctacgtgaggagacaagtttgtaaaatcaaggagtttgacagtatagcaaatcaggactaacaacagcataagcaagaagcaggatgatgtgtgcagaatatattaaatacctaccaacctaggctagttactcaaagccatataattccaaatgttttgtcagaagataaatcagtaggcttgaactactccacacagggtgtgctgtgtaacaaaatcaaaat

SEQ ID NO: 873659 - DNA, 603 bp, Homo sapiens
tcctcatgataacttgggaaggagaaattagcatcatccggattttgagactatgagtctcacagaagttcaataagttatacatggtatgtagcaaatagtctgtgaagttttcattggaatgtagatgtatgtattgccataactccctctcaatacatagtgactcaggaaaaagactcaggaactttttgttctccaaatggaggtttcagctaaatcaatgattactatggaagagaccagcagatgaaaagcactatagaatgtcagaaaagacagagattactytaggctgatgtagtcatgaaagaaaggaaaaaaaaaaaaaaaccaaaacctcagatcctcaaaaaatggatagaatctaattagacagaaaataaagtgggtatttcctatggaggtaatgggtctatcaaagaagagttgtgagcagaggcactacaatgttcacagtgaatatctgcaacagagaggccattctggcttgagcaaagagcttctgtacagattgaagggaagaaggagctaggagcctggatcaaagtcagaatgctaggagtagtcagaatgcctaaagagactggatgttacagcatt

SEQ ID NO: 873660 - DNA, 607 bp, Homo sapiens
ctcctgcctcagcctcctgagtagctgggattacatgcacctaccaccatgcctggctaattttttttgttgttgttttttgtatttgtagtagagacagggtttcaccatgttggccaggctggtcttaatcttctcacctcaagtgatctgcctgcctcagcctcccaaagtgctgggattacaggtgtgagccactgcgcccagccaggggatggatattctcaaagtccagacatcaccaccacacaattcatacatgtaaccaaaaaacatttgtatacctgatggtattataataaaaagactaataakaaaatgttggtaaagatttatttgacttttagatagagatctttatttaaaacacaaagtctgaaaagatataattaatcaagactgaaaaaagacagaaggatgattgtataaaaaatcctacttcataaaaatatggttgaataatcacaaagaggtacagatacatacttactagacagttaaagatatagagccaccgttttcttatacattgccaatgaagtataattggttcaactttggaacatattttgacattatctactaaggaaaaagatatacagttctt

SEQ ID NO: 873661 - DNA, 607 bp, Homo sapiens
ctcctgcctcagcctcctgagtagctgggattacatgcacctaccaccatgcctggctaattttttttgttgttgttttttgtatttgtagtagagacagggtttcaccatgttggccaggctggtcttaatcttctcacctcaagtgatctgcctgcctcagcctcccaaagtgctgggattacaggtgtgagccactgcgcccagccaggggatggatattctcaaagtccagacatcaccaccacacaattcatacatgtaaccaaaaaacatttgtatacctgatggtattataataaaaagactaataagaaaatgttggtaaagatttatttgacttttakatagagatctttatttaaaacacaaagtctgaaaagatataattaatcaagactgaaaaaagacagaaggatgattgtataaaaaatcctacttcataaaaatatggttgaataatcacaaagaggtacagatacatacttactagacagttaaagatatagagccaccgttttcttatacattgccaatgaagtataattggttcaactttggaacatattttgacattatctactaaggaaaaagatatacagttctt

SEQ ID NO: 873662 - DNA, 601 bp, Homo sapiens
ctgaatttactatacatctacttaaatctttttgattcctttttttatgtgtcaatataaagtttatttaccaactcaagttttgaaatcactaagctatttatcatgtttgaacactgtgtgtatgtgtgtttgtgcacacacacacacctatgaacaatcaatagcactgcatttctcgctatttatatgtttataattttataaatttgattgggcagtttgcttttttcaatcaacattgatctatccttctacttattagtaatgtaacatacatacatgcatatggttcacgcattttaactatagtagcttattatcttatacattgggtcttattttcaagctgtgtgctggtaaatatttatggaaattttcctatggtgcacatcaagaatcagaattctgagcatttgcaggtgggtgcaggtagcctcagctactctggakgctgaggcaggaggatcacttgagccccgaagttcaaggctgtagtgtgccatgatcacacccgtgaatggcctttccattccagcctggtcaacacggcaagaccgcttctcaattcaaaaaagagagtcatttgaactaaacattg

SEQ ID NO: 873663 - DNA, 657 bp, Homo sapiens
ggaacatcttgcctagatttgagaagtccattgtacaccacattaaaaaataaagctatggcttgaagattaacacaggaagaaaacttatgtttgaagaaatattctagttgtttcaccacaattttaatatcaaatttttaaaaatatwctagttgttttaccttctgaccaagaaggattctcttcaaacttacgtggttccttgaaagttctctaataaacatcaagcccaacctcttttaactacttgctatacgctacctacaatttgtattttactatatgtaggttggtttattgtcttcataggttttatagtgaaaaaagagttaactagctgacacacaaaaggatatagagcaattttaacaaaacaaatatttggtaaaatagaaatgtatgtttattgcagcactattcacaatagcaaagacttggaaccaacccaaatgtccatcaatgatagactggattaagaaaatgtggcacatatacaccatggaatactatgcagccataaaaaaggataagttcatgtcctttgtagggacatggatgaagctggaaaccatcattctcagcaaactatcacaaggacaaaacaccaaacaccacatgttctcactcacagatgggaattaaacaataagaaca

SEQ ID NO: 873664 - DNA, 657 bp, Homo sapiens
ggaacatcttgcctagatttgagaagtccattgtacaccacattaaaaaataaagctatggcttgaagattaacacaggaagaaaacttatgtttgaagaaatattctagttgtttcaccacaattttaatatcaaatttttaaaaatatactagttgttttaccttctgaccaagaagsattctcttcaaacttacgtggttccttgaaagttctctaataaacatcaagcccaacctcttttaactacttgctatacgctacctacaatttgtattttactatatgtaggttggtttattgtcttcataggttttatagtgaaaaaagagttaactagctgacacacaaaaggatatagagcaattttaacaaaacaaatatttggtaaaatagaaatgtatgtttattgcagcactattcacaatagcaaagacttggaaccaacccaaatgtccatcaatgatagactggattaagaaaatgtggcacatatacaccatggaatactatgcagccataaaaaaggataagttcatgtcctttgtagggacatggatgaagctggaaaccatcattctcagcaaactatcacaaggacaaaacaccaaacaccacatgttctcactcacagatgggaattaaacaataagaaca

SEQ ID NO: 873665 - DNA, 591 bp, Homo sapiens
aaacaaaaatgtttgaaaaaaaacaataagacacagcaatacaataataaaaaatatcacaagtaaaaagaacaatacagtataagaactggttacttaaagtatactggaggatgtatgtaggttacatgcaaatacaatatcatgttttataaggcacttgagcatctgtggatttggtattcgtgggggatactggagcyaatccccctgcagatactgagggatgactgtatacagtgactgtacgagtcttttgttcttgctcttattctgctcagatgccaatgcatgactggaaatgcagcagccagcttgcaaatttaaggtcaaaagtccctgctaagttcggcaaaacaggaaaaagagttgaatgagtcctggagatgtcattgagcctccttactagccttggattgctgacaagtgattaaaaatcagataaacaaacaataaaaaattgtgtcattattgaagttattttttaagtattttaggaagtagaacaaagttcccaattgacacgttagtggttgagtctgtctgtttacttgttaagttttgttgagctagttgtgttttcctgaaatc

SEQ ID NO: 873666 - DNA, 581 bp, Homo sapiens
aaaaagatagcactcctgtattctattttcaggaggatacaagcctaactttagctgatgcctggctccaagttataaaactacctaatttcataaagatatgagaaaattatttttcttttgtataagccaattaactaacacagatggtaacttcaattattaggtgaatttaagataaattatrtgaaataaatggtgctgtcagggcctcttactggagaactaacattgtttcccttaaggatatgtatatgatagattgtatttgctcggctatatgaagggtgagatctctttctatcttttctgtctcttggcagattacctgtgatgtgcattacatggaaatttaatgcttattcaatcatcaaagtattttattctctgctacttttgtggagaagatttctaggttgagagaagggtttgtttttaattctatttccccaacatcatcaataatactaaacttattttcaggacatgttttatttcatttgggtataatatacttgtacacaaaggtgaaagctggcagcctgattataatatgtcattgtgtttactcaccatcaggt

SEQ ID NO: 873667 - DNA, 529 bp, Homo sapiens
atcttatttaatcattattaatttattttacctgtgactcaaagaaattatatagttagtaaatagtatacttagaatccaaagatggagctatttaattccagggtaagagatttcatcatttcttcatgctgccttccaaacagaacaacctatggcackcttcccagtatccaaaaccaacgctaattttttatcttaaactttgaacataaagtttcaagactattttgtaaataaagggttgaaacaatttttctgatccagaattttatgagatatgctttgtgatagtaaagctagaactttggctaggaagaaaaacttcccaattttttttaaggcaatttctcaggcagatacaattcttgcaccaaatctttagaagggagcttataaaatataactgcaaactaaatatatttacaaataaatattcaaaattccaaaatttaaagataacaactaggaatcaaattatttttattttattattatttttaaaacacaaaactttttattatggaaa

SEQ ID NO: 873668 - DNA, 435 bp, Homo sapiens
agccaatatcatactgaatgggcaaaaactggaagcattcccttttacaactggcacaagacagggatgccctctctcaccactcctattcaatatagtgttggaagttctggcaaggacaatcaggcaggagaaagaaataaagggtactcaattaggaaaagaggaagtcaaattgtccctgtttgcagatgaaatgattgtatatttacaaaamcccattgtctcagcccaaaatccccttaagctgataagcaacttcagtaaagtctcagcatacaaaatcaacatgcaaaaatcacaagcattcttatacaccaataacagacaaacagagagccaaatcatgagtgaactcccattcacaattgcttcaaagagaataaaatacctaggaagccaatttacaagggatgtgaaggacttcttcaagga

SEQ ID NO: 873669 - DNA, 608 bp, Homo sapiens
tagtattccctgatggtagtttgtatttctgagggatcagtggtgataccccctttatcatttttattgtgtttatttgattgatctctcttttcttctttattagtctggctagcgatctatctattttgttaatcttttcaaaaaaccaactcctggattcattgagtttttgaagggtttttcgtgtctctatctccttcagttgtgctctgatcttagttatttcttgtcttctgctrgcttttgagtttgtttgctcttgcttctctagttcttttaattgagatattagggtgtcagttttagatctttcctgctttctcttgtgggcatttagttctataaattttcctctaaacactgctttagctatgtcacagagattccggtatgttgtgtctttgttctcattggtttcaaagaacttatttatttctgccttaattttgttatttacccagtagtcactcaggagcaggttgttcagtttccatgtagttgagccatgttgagtgagtttcttaatcctgagttttaatttgattgcactgtggtctgagggaccacagttgttatgatttccattcttttgcatttgctgagga

SEQ ID NO: 873670 - DNA, 608 bp, Homo sapiens
tagtattccctgatggtagtttgtatttctgagggatcagtggtgataccccctttatcatttttattgtgtttatttgattgatctctcttttcttctttattagtctggctagcgatctatctattttgttaatcttttcaaaaaaccaactcctggattcattgagtttttgaagggtttttcgtgtctctatctccttcagttgtgctctgatcttagttatttcttgtcttctgctagcttttgagtttgtttgctcttgcttctctagttcttttaattgagatattagggtgtcagttttagatctttcctgctttctcttgtgggcatttagttctataaattttcctctaaacackgctttagctatgtcacagagattccggtatgttgtgtctttgttctcattggtttcaaagaacttatttatttctgccttaattttgttatttacccagtagtcactcaggagcaggttgttcagtttccatgtagttgagccatgttgagtgagtttcttaatcctgagttttaatttgattgcactgtggtctgagggaccacagttgttatgatttccattcttttgcatttgctgagga

SEQ ID NO: 873671 - DNA, 601 bp, Homo sapiens
ttaatttgccttatacagacatacctgagactgagaagaaaaagaggtttaatttgacttatgcatggctggggaagtctcacaatcatggcagagtgtgaaaggcagttcttatatggtggcggtgagagaaaatgagaaagaagcagaagtggaaaccccgataaacccatcagatctcgtgagacttattcacaagaataccaagggtaagactggcccctatgattcaattacctcccactggatctctctcacaacacgtggggattatgggagatacaattcaagttgagatttyggtgggggcacaggcaaaccacataagttagtagatataaggtctcatatttgatactgtatatttgtgtccttatttaattcttctacacagcaccttgggaaaattataagaaagtttagtaagctaaaataatttttgtgaccaaatatgctaagatgcagatacaatagttgaatcaatgtctatctaaatccaaaatatatactcttgccccactatcttgctacctatagggtatactactgaactctaggactgccttgaatttatgacaaaaaataagctgaagttttattt

SEQ ID NO: 873672 - DNA, 663 bp, Homo sapiens
cacacacagttccagttggctgaggagtcctcacaatcatggtgaaaggcaaatgaggagcaaagtcatgtcttacatgtggcaggcaagaaagcttgtgcaggagaactcccctttataaaaccattcaatcttgtgagatttattcactattactagaacaacatgggaaaaactcacccccatgattcaattacctcccacttggtccctcccatgacacatggggattataaaaactcaaggtgagatttggatggggacacagaagmaaaccatatcattccacttctggcccctcccaaatctcatgtcttcacatttcaaaaccaatcatgccttccaatagttccccaaagttttaactcattccagaattaacccaaaagtccacgtccaaagtctcatctgagacaaggcaagtttcttctgattttgaacctgaaaaatcaaaaacaagttagttacttcctagatacaatgggggtataggcattgagtaaatacagctgttccaaatgggagaaattagtgaaaatgaaggggctgcaggctatgtaagtctgaaatccagcaggacagtcaaatcttaaagctccaaagtgatctcctttgactccatgtctcatatctaggtcacactgatgtgagaggtgggctccc

SEQ ID NO: 873673 - DNA, 663 bp, Homo sapiens
cacacacagttccagttggctgaggagtcctcacaatcatggtgaaaggcaaatgaggagcaaagtcatgtcttacatgtggcaggcaagaaagcttgtgcaggagaactcccctttataaaaccattcaatcttgtgagatttattcactattactagaacaacatgggaaaaactcacccccatgattcaattacctcccacttggtccctcccatgacacatggggattataaaaactcaaggtgagatttggatggggacacagaagcaaaccatatcattccacttctggcccctcccaaatctcatgtcttcacatttcaaaaccaatcatgccttccaatagttccccaaagttttaactcattccagaattaacccaaaagtccaygtccaaagtctcatctgagacaaggcaagtttcttctgattttgaacctgaaaaatcaaaaacaagttagttacttcctagatacaatgggggtataggcattgagtaaatacagctgttccaaatgggagaaattagtgaaaatgaaggggctgcaggctatgtaagtctgaaatccagcaggacagtcaaatcttaaagctccaaagtgatctcctttgactccatgtctcatatctaggtcacactgatgtgagaggtgggctccc

SEQ ID NO: 873674 - DNA, 617 bp, Homo sapiens
catctgatcttcgagaaacctgacaaaagcaatggggaaagatctcctattcaataaatggtgctgggaaaattgctagccatatgtagaaagctgaaactggaggccttccttacaccttatacaaaagttaactcaagatggattaacaacttaaatgtaaaatccaaaaccattaaacccctagaagaaaacctaggcaatatcgttcaggacatagacatgggcaaagacgtcatgacaaaaacaccaaaagcaattgcaacaaaagccaaaattgacaaatgggatctaattaaactaaagarcttctgcacagcaaaagaaactatcatcagagtaaacaggcaacctacagaatgggagaaaatttttgctatctacccattgacaaaggtctaatatccagaatttacaagcaacttaaacatatttacaagaaaaaaacaaacaaccccatcaaaaagtgggcaaaggatatgaatagacacttctcaaaagaagacattgatgtggccaacaaacgtgtgaaaaaaagctcaacatcactgatcatcagagaaatgtaaatcataaccacaatgagataccatctcacaccagtcagaacgatgatt

SEQ ID NO: 873675 - DNA, 640 bp, Homo sapiens
atacaaccctgatagattttaatattttactaattagtagaacaaaataattctctgtggaaataattctatctcagtattgcttgatgacaaaactcaacctcaggtctacaaagatatttagaatatatgattcagaagctacaataagtcaacggttattggcttggaaatgaactataatgcagacaacaataaaagcgttcaaatatkgtttgacttggtgaatttagttactatgtgatattggtatttagtgaggaactggtttaccataggaaattatttttaagccaaaacacaaagcaaatcaatatttttgcttctatggtattttacaaagggcatttctacttcaccacaatcaattttgccaacctgctaatgcctttgaccctgatccgagaaccttttgcttgaacttggtgtcccaagtaagataaatatggtcgtaaatgtggtttgtggagggcaaagggacagccagcctgagcttaaccaaccagtgctaagtgtaatattatggtgtagaagaggaaagaggaaacatgccaactcagagatgaaagaatttcctgtgcttcactcctcaaagcattcgaaattattgagttggctcctgatatacaggaaaatattc

SEQ ID NO: 873676 - DNA, 640 bp, Homo sapiens
atacaaccctgatagattttaatattttactaattagtagaacaaaataattctctgtggaaataattctatctcagtattgcttgatgacaaaactcaacctcaggtctacaaagatatttagaatatatgattcagaagctacaataagtcaacggttattggcttggaaatgaactataatgcagacaacaataaaagcgttcaaatatggtttgacttggtgaatttagttactatgtgatattggtatttagtgaggarctggtttaccataggaaattatttttaagccaaaacacaaagcaaatcaatatttttgcttctatggtattttacaaagggcatttctacttcaccacaatcaattttgccaacctgctaatgcctttgaccctgatccgagaaccttttgcttgaacttggtgtcccaagtaagataaatatggtcgtaaatgtggtttgtggagggcaaagggacagccagcctgagcttaaccaaccagtgctaagtgtaatattatggtgtagaagaggaaagaggaaacatgccaactcagagatgaaagaatttcctgtgcttcactcctcaaagcattcgaaattattgagttggctcctgatatacaggaaaatattc

SEQ ID NO: 873677 - DNA, 640 bp, Homo sapiens
atacaaccctgatagattttaatattttactaattagtagaacaaaataattctctgtggaaataattctatctcagtattgcttgatgacaaaactcaacctcaggtctacaaagatatttagaatatatgattcagaagctacaataagtcaacggttattggcttggaaatgaactataatgcagacaacaataaaagcgttcaaatatggtttgacttggtgaatttagttactatgtgatattggtatttagtgaggaactggtttaccataggaaattatttttaagccaaaacacaaagcaaatcaatatttttgcttctatggtattttacaaagggcatttctacttcaccacaatcaattttgccaacctgctaatgcctttgaccctgatccgagaaccttttgcttgaacttggtgtcccaagtaagataaatatggtcgtaaatgtggtttrtggagggcaaagggacagccagcctgagcttaaccaaccagtgctaagtgtaatattatggtgtagaagaggaaagaggaaacatgccaactcagagatgaaagaatttcctgtgcttcactcctcaaagcattcgaaattattgagttggctcctgatatacaggaaaatattc

SEQ ID NO: 873678 - DNA, 619 bp, Homo sapiens
ctttccccactttcaagcctggggcagcaggagagccgctacagctgcagtttctcctgggctgcaaaacttgcagtcacgttcagcttggcaacctggaacagattcgcatgtgccattgccgggtaacccactctgttctcctgagattgtggtgcagtagggcccttgctgctccatctccaagcacatctctggcatccagagtaaccatttgcctagttgagtagcctgagccaccgcactcctcctggacataacgttatggtgaagcagagtctctctgctccatacccaggaagatccctargcattcagagcacctccttgcctgcttctggagtttgagtcaccccacccctcctatgcagagatcttagtgcagggggtctctgctccatgctctaggcatcttgagcacctactctcctggactagaagtttagaccatcccctatccctgtgcagagaacttggggctgaggaggtttcccagctacactactaggcacatctctgggcccttggtggccacccactgcattctccctcggcactagtgcctgtgtctgtcatcaggggacctgtaggtggacctgtcaggtctggccctgccatt

SEQ ID NO: 873679 - DNA, 619 bp, Homo sapiens
ctttccccactttcaagcctggggcagcaggagagccgctacagctgcagtttctcctgggctgcaaaacttgcagtcacgttcagcttggcaacctggaacagattcgcatgtgccattgccgggtaacccactctgttctcctgagattgtggtgcagtagggcccttgctgctccatctccaagcacatctctggcatccagagtaaccatttgcctagttgagtagcctgagccaccgcactcctcctggacataacgttatggtgaagcagagtctctctgctccatacccaggaagatccctaggcattcagagcacctccttgcctgcttctggagtttgagtcaccccacccctcctatgcagagatcttagtgcagggggtctctgctccatgctctargcatcttgagcacctactctcctggactagaagtttagaccatcccctatccctgtgcagagaacttggggctgaggaggtttcccagctacactactaggcacatctctgggcccttggtggccacccactgcattctccctcggcactagtgcctgtgtctgtcatcaggggacctgtaggtggacctgtcaggtctggccctgccatt

SEQ ID NO: 873680 - DNA, 581 bp, Homo sapiens
tttccaggcacatgatgcaagctgtcagtgggactaccattctggggtctggaggacagtggccgtcttctcacagctccactatgcagtgccccagtgtggactctgtgtagggacttcaaccccacatctcccttccatgctgccctagcagaggttctccatgagggctccacccttgcagcacrcctctgcctggacatccaggttttccatacatcctctgaaatctaggtgaaggttcccaaacctcaattcttgacttctgtgcacctgtaggttcaacaccatgtggaagctgccagggcttggggcttgcaccccttggagccacaacactagctgtaccttggccccttttagccacagctagagtatctgggacacaggacatcaagtccctgggctgcacagagcagggtgggggatcccttagccctgaccataaagccattttttcctcctaggactctgggcctgtgataggaggggcttccacaaaggtctctgacatgccctggagacattttcccctttgttttggtgattaacatttggccccttgttgcttatgcaaattt

SEQ ID NO: 873681 - DNA, 581 bp, Homo sapiens
tttccaggcacatgatgcaagctgtcagtgggactaccattctggggtctggaggacagtggccgtcttctcacagctccactatgcagtgccccagtgtggactctgtgtagggacttcaaccccacatctcccttccatgctgccctagcagaggttctccatgagggctccacccttgcagcacgcctctgcctggacatccaggttttccatacatcctctgaaatctaggtgaaggttcccaaacctcaattcttgacttctgtgcacctgtaggttcaacaccatgtggaagctgccagggcttggggcttgcaccccttggagscacaacactagctgtaccttggccccttttagccacagctagagtatctgggacacaggacatcaagtccctgggctgcacagagcagggtgggggatcccttagccctgaccataaagccattttttcctcctaggactctgggcctgtgataggaggggcttccacaaaggtctctgacatgccctggagacattttcccctttgttttggtgattaacatttggccccttgttgcttatgcaaattt

SEQ ID NO: 873682 - DNA, 603 bp, Homo sapiens
gggtgcagcacaccagcatgggacatgtatacatatgtaactaacctgcacattgtgcacatgtaccctaaaacttaaagtataataataataaaatttaaaaaaagaatttgttatgtggcttgggtaccagctcagccgcagtagactagtgcgccaggtagatcctaaggtttccaactttaggccctggctcctggatgrcatctctgaacctacccaggggcagggggaactcagcatcctgaagagaagaacacaagcctggctggcttttccacctgttaattgtagagcctcagggccttgagtgaacctaactggtagcaaggcagtggttactacagaccttgggcaatacccactgctatgctcgcttcagatctgacccagcacagtcccagtggtggtggccacaacagagatacttatgtcagcattccctggcttcaggcagctcagcacagagagagagactccgtttgtttggcagaaaataaatggaagagaagaagagtctctgcctggtaatccagagtactctttcgtgtctcatccaagaccaccaaggcagtacctatataagtctgcaaaagccacagc

SEQ ID NO: 873683 - DNA, 613 bp, Homo sapiens
gaactttctgtgtagctaaagcattataaatgcaccaatgagcactctgtgtctagctaaaggtttgtaaacacaccaatcagcgctctgtgtctagctaatcgggtggggacttcaagaacttttgtgtctagctaaaggattgtaaatgcaccaatcagcactctgtcaaaatggaccaatcagctctctgtaaaatggaccaatcagcaggatgtgggtgggaccagataagggaataaaagcaggccacctgagccagcagcagcaacccgctggggttcccttccacactgtggaagctttgttctttcactcttcacaataaatcttgctgctgctcactctttgggcccatgctgcctttatgagctgtaacactcaccgggaaggtctgcagcttcactcctgaagtcagcaagaccatgaactcaccagaaggaagaaactctggacacatctgaacatctgaaggaayaaactccagacacaccatctttaagaactgtaacactcactgcaagggtctacggcttcattcttgaagtcagagagaccaagaacccaccaattctggacacaggaccactaaaatatcgcatgattgctaaaa

SEQ ID NO: 873684 - DNA, 622 bp, Homo sapiens
  misc_feature 617: n = A,T,C or G
ttcaccccacatacatttccataaagttatgatacagtgaatcatctggttgcctcactccagtatgaaaaatagccatactgaaaagcttcacctctgcctacaaacatgagtaataaacacagacatgtcagctacttattttttcattgaaagaggccttaacctraactgagacagaattaaacaatgaaataaaatactataagactggatggtatgcattttttgggttctatgtattacatatttttatatatggagagatagataatctctctatatatgcatatctaaagttgggagtcatgagaaaagtgtatttcatgtgaaagaatattctagaataaaggttccactaattactagcaatgttgccttaagcagaccatttaatgttgctgagttccagtttacctacctggaaagtgaaattgttatcagccattctccttacatttaaattgttctttcagtttgatacttcaaataaggtaatgcgtaagaaagccctgtgtatgcggaaacacagcatgtgtatggaagggcttattaactgtaaagtcatatgacaaacagcaaagttaaactttctagattttgttgcaccgacgtgncagtc

SEQ ID NO: 873685 - DNA, 530 bp, Homo sapiens
ctcaaaaacatgatagattactcaaattataatttcatctctcttttaaaaatatttagaaaatactattaccataatgcttagtatgtattgagtatttactgtgtcaggcatctgggtaatcactttgcaaagtactcttaggtatttagaatgtcaaaatgttaagggcatgaggacccagacacaaatcatgtctggttttacattaagcacacaggcactggaaccagactgcttggatttgtatcccagatctgccccttaaaagcytagagcctttgaacaagttatgtaacctctgtgatacgaattcctcacatatcaattgaaaattataaattgcctctctcatagtattgctgaaagcatttaataaattaatgcataaaaagtgttaagaacatgtaccctaaatcttaaagtatcataaaaaataaaataaaataaaatttaaaaaaagaatattgcctaacacatatgcagtattcaacagttctggctattagagtcattagctattgttattt

SEQ ID NO: 873686 - DNA, 625 bp, Homo sapiens
cctaaacctatgagctacttgatagcaaggtagccatttctctcaagtaaagaagaaatttccacagtacctggaggccctaagctattccaggatgatccatgacattattctcagttaccttgctctcttgctttgatttgggtcttgctagaggactggagtgtaaatcacctaagtgacttaggttgatacaaatatctgttataagatttaagggaaaaataaaattatcccaaggatgtagctgactgggagttgtcagaggtacatcgggacttcaaggttttgttcaactgtcatcctcttggggcagaaacgaaaatgtcagtagtttgagacttcctttttgctttaggataaccacaaattgcaatcttgtggtgacatcaattgtagaagtaggacrgagaaatgctggtagctcaagaagaggtgagatacctgcaaaccctgtttgaactctgcacttatctgttttaaagcaggaaaatgatcacatcattctctggctcaaaaatttcaaatggctctccattgtcagtagggtcaagctagactttttagcctagtctataaggtctgccacaaatcagcctcaatttacttttctggctttatgact

SEQ ID NO: 873687 - DNA, 597 bp, Homo sapiens
tttatgagggctctactgggatttaaatccagctttataaaactgcagaactctagctccaaactactaacttcactgctctttcaaaagcatacttttatgtaataaatgtatcattactctaaatctcaaaaagtaggacagaaaaaaaaaaagaaataaaatgcttccacttggaaagctaaaaagttagtccctggaaagaatagattattctaaataagctgtcttctgtactgagtatttattcgtttattcatttgattaatatttactaaacatacactatatgccagatcctctgcataaatttgatmatttttttttcaaggcttaaaaatcactagttgctctttttatcataaagattaagatctaaaattcttggttttcattgcaggtttatctttctctaactcttttctgttttttaccttttaaaacaaccagttcccggatattacggttcccataacatttagtgctcttccattcctccacacattggcagattcagcttcctctgcccagttccttttctcaaagagattgtagtctaatagacataaaaacaaataagtatgattgaatgtcata

SEQ ID NO: 873688 - DNA, 591 bp, Homo sapiens
ggaacctacctcttgaatcagcatgacctggatgtgagacatggactcaaaggagatcattttggagctttaagatttgactgacccactggatttcagacttgcatggggcctgtagcccctttgttttggccaatttctcccatttggaagggctgtatttatccaatgcctgcacccccattgtatctaggaagtaactaatttgcttttgattttataggcttatatgtggaagggacttgccttgtctcagatgamactttggactgtggacttatgagttaatgctgaaatgagttgagactttgggggactgttgggaaggcatgattcattttgaaatgtgaagatatgagatttgggaggggccaggggtggaatgatatggtttggctctgtgtccccaccaaaatctcatcttgtagctcccataattcccacatgttgtgggagagacttggtgggagatgattgaattatgggggtgggtctttcccatgctgatctggtgatagtgaatgagtctcatgagctctgatggttttaaaaatgggagttgccttgcacaacctctctctttgcctgctg

SEQ ID NO: 873689 - DNA, 591 bp, Homo sapiens
ggaacctacctcttgaatcagcatgacctggatgtgagacatggactcaaaggagatcattttggagctttaagatttgactgacccactggatttcagacttgcatggggcctgtagcccctttgttttggccaatttctcccatttggaagggctgtatttatccaatgcctgcacccccattgtatctaggaagtaactaatttgcttttgattttataggcttatatgtggaagggacttgccttgtctcagatgacactttggactgtggacttatgagttaatgctgaaatgagttgagactttgggggactgttgggaaggcatgawtcattttgaaatgtgaagatatgagatttgggaggggccaggggtggaatgatatggtttggctctgtgtccccaccaaaatctcatcttgtagctcccataattcccacatgttgtgggagagacttggtgggagatgattgaattatgggggtgggtctttcccatgctgatctggtgatagtgaatgagtctcatgagctctgatggttttaaaaatgggagttgccttgcacaacctctctctttgcctgctg

SEQ ID NO: 873690 - DNA, 549 bp, Homo sapiens
cccaaagcatccctttaagaagaaagtaaatagattaagaaagcaaccagatgggttaacacacaactagtgacttttctttcttttttttttttttttgagatggagtttccctcttgttgcccaggctggagtgcaatggtgtgatctcagctcactgtaaccactgcctcccgggttcaagtgattctcctgcctcagcctccccagtagctgggattataggcatgcgccatcaagcctggctaatktttttgtatttttggtaaagactgggtctctccatgttggccaggctagtctcgaactcccgacctcaggtgatccacccgcctcggcctcccaaagtgctgggattacaggagtgggccaccatggttgggtctcctttttctttacatggcataagagacaggtcagacatgcatcacaagcacggagatctaccttgtcttgctgcccttgaaactgacattcaagcggctggtatgtcagtttcccctgaaataagtgtttgactacctaccaaacctgttttctttcttttgt

SEQ ID NO: 873691 - DNA, 549 bp, Homo sapiens
cccaaagcatccctttaagaagaaagtaaatagattaagaaagcaaccagatgggttaacacacaactagtgacttttctttcttttttttttttttttgagatggagtttccctcttgttgcccaggctggagtgcaatggtgtgatctcagctcactgtaaccactgcctcccgggttcaagtgattctcctgcctcagcctccccagtagctgggattataggcatgcgccatcaagcctggctaatgtttttgtatttttggtaaagactgggtctctccatgttggccaggctagtctcgaactcccgacctcaggtgatscacccgcctcggcctcccaaagtgctgggattacaggagtgggccaccatggttgggtctcctttttctttacatggcataagagacaggtcagacatgcatcacaagcacggagatctaccttgtcttgctgcccttgaaactgacattcaagcggctggtatgtcagtttcccctgaaataagtgtttgactacctaccaaacctgttttctttcttttgt

SEQ ID NO: 873692 - DNA, 655 bp, Homo sapiens
  misc_feature 1, 2, 3, 4, 5, 6, 7, 8, 9, 10: n = A,T,C or G
nnnnnnnnnntataaacaatatggtatttattttctttttttattatactttaagttatgagatacatgggcagaatgtgcaggtttgttacatagatatacacgtgccatggtagtttgctgcacccatcaacccgtcacctacattaggtatttgtcytaatgctatctatccctcccctaatcccccaccccgcaacaggccctggtgtgtgatgttccccttcatgtgtccatgtgttttcattgttcaactcccacttgtgagtgagaagatgtggtgtttggttttctgttcctgtgttagtttgctgagaatgatggtttccagattcatccatgtccctgcaaaggacatgaactcatcttctttatggctgcataatattccatggtgtatatgtgccacattttctttacccagtttatcattgataggcatttggtttggtttcaagtctttgctattgggaatagtgctgcaataaacatatgtgtacttgtgttttttgagtagaatgatttataatcctttgggtatacacccagtaatgggattgctgggtcaaatggtatttctggttctagatctttgaggaattgccacactgtcttccacaatggtagaactaacttacactcccaccaacaatgt

SEQ ID NO: 873693 - DNA, 623 bp, Homo sapiens
  misc_feature 607: n = A,T,C or G
atttccttagcatggagaaaggtaccgatagagaatgcgtctttgagaaagtggaactttgttggttaatgattgaagtttacataacatgagtatagggaggatttagcttgcttgaaacacaataataagcaagacacagagtccattatgaggaatatgttcagggggctttaagaaaaccactgacgatatcaaagtcattgtgtaatatattattcaggtagaaagttggataagcgatatgagctcattctgtgattgtttagataataaagagcatttataggatcctgatcaatttcatgacaagatgatagtggtcttccaacagcaattggttgttcactagtactagtgaaattgaaataggctgagactagagaaaatrtgagcacaaatgaaattacttcaataactcaataattagttgatggactgcctagaccaagatagtgacagtaagaatggaagaaaatgtaaaatcaatgaggaaatttgaaataaaattttatacagctagatgtagaaagtagaagagtaaatgaaaaaaaaaagactgttagttttcacataagcaaccagaaaaagaactgatattactgancataaagaggtaaaaa

SEQ ID NO: 873694 - DNA, 632 bp, Homo sapiens
tatgtggtgtgtgtatgtgaagggcccaaactcattatgattataaaacatcttaggattttctttctaaatatcattattaggtcatgttgtcatcacagttgtatttgttcctccatataaaaggacttttataaaactgtagagaatgggaggaaaagtttgtgtcttgtcagattttagtttgtgtcttggcttcatttaaattgacaacaggtgaaaatgtttttgaacattttacatattataataggaatagtctctgctcttttatttttttgtaacaaatgaaaaccagcttctcaaataccagcataactcaaactaatgtatatatgtaagtatatttaattttacaggctgggtgcagtggctcatgcttgtaatyccagcactttgggaggctgagacaggcggatcacctgaggtcaggagctggagatcagcctggccaacatgctgaaacctcgtctttactaaaaatacaaaaattagctagatatggtggtgcatgcctgtaatcccagctactcgggaggctgaggcacgagaatcgcttgaacctgggaggcggaggttgcagtgagccgagattgcaccactgcactccagcctgggtgacagagtgagtc

SEQ ID NO: 873695 - DNA, 541 bp, Homo sapiens
ttgtagtgttactgtctttggtgattgcacactaaatatcaagcatagcatgggagaaacactgtgcatagaagaaagaatagagacttttgaatcaagcagtcttctctctgactgtgagttacttaacttcattgagcctctgtttaattgataagtctgaacctgtaagtgtttttttgaggattaaatgacacaatacgtttaaagggtataacacattacaggcattacataaatggtaatttttatagttagggtatcatttcagtctaacaatgaccctatgagatatgtaatactgtccccattttacagatgagaaaactgaagcacaaagtagtcaagtaacaaattcatattgtcagcatgcaggacacctggagttcaaaccagggtctgcytaatgttagagtacatgttcattttattgtaaataccaaatgtcccatttcatatttatccactgaacttacccataaattttgaatatctgacatatagtaggcactcaataagtatctcataaagaaaaaaatgg

SEQ ID NO: 873696 - DNA, 607 bp, Homo sapiens
aagcaaaaagaacaaagctggaggcatcacagtacccaacttgaaactataccacagggatacagtaaccaaaacagggtggtactggaacaaaaagtgacacatagaccaatggaacaaaatagaaaacccagaagtaagactgcacacctacaactatctgatcttcatcaaacctaacaaaaacaagcaatggggaaaggattccctattcaataaatgatgctgggataactggttagccatatgcagaagattgaaactggaccccttctgtacamcacttacaaaaattaactcaagacagattaaacacttaaatttaaaatcccaagctaaatcctggaagaccacctaggcaatatcattcagacataggcacgagcaatgattttatgatgaagacaccaaaaacaatggcaataaaatcaaaaattcacaaataggatctaattaaactaaagagcttctgcacagcaaaatgaactatcaacagagtacataacctaaagaatgggagaatattttttcaaactattcctctaacaaaggcttactgtccagcatctataaggaacttaaacaaatttacaagaaacaaacaacc

SEQ ID NO: 873697 - DNA, 645 bp, Homo sapiens
tatcaatgactaactgattggcttgtcagtgacactgatgaaacttgtcataaagttggctgtgatggctgagataatttcacatgtcataggcagagatggttatggttggatagttaaatgtctctgcaggtacttaagattatatgaaaaagtaggagaaaataaatgttagttcaaactaagaattttgactccttttaaaatgcttakatctaaaatggagtgtactcgaaaggcccatgataagatataaaaaatactgtaaatgagaatattaatatgttcctaagtgaagcaacatctaattatagttagtaaatttaaattaatatttaaaatgctaaaaacacatcctgttttatcaccaaaatcctttaaaggcattctctaggcttttaaatgaagcccaaatttgtaacaaaagatgatctgcaaatgtaagcaagtagagcatgccattccagaatttataaatgaaagggaatttagaaagtagctagttaatggctaagggagatttaaatccatatttacttgttcctggaccagtcatctactataccatgtttatcttgactttagtctgtcttaattttcatgagatttagagattatctagtgcaatctactctgcaatctgtc

SEQ ID NO: 873698 - DNA, 615 bp, Homo sapiens
tttctttttaaaaaaaattttgcagttattttggccaaatgaatgacttatggtgacctgggattctattttgtgatatccaatgttttaaacctttgatatttgacaaactttccaaaatcaaatcagaaattatgtctctttcttacctaatattttagatattaggtcctctgaagtccaaaaatgacatttggcttatttggtgcaaaaatcatacaggaagcattgtcaaatatgaaatggtgttttgctttcttttgcctatatttgtgtaaatgtgttattggtgtatgttccaaaattatgtaaaactcctataattctaatatcacttagtgtatgttatcagtaataattacaattattattaaacagactgtgccacagaggtaacaaatttcctttacaatcttgcctttacctgtggctgccctaaaatgtygttgtccatagacacctgttatctcattttggtcctctttaaaagatggttttataatcacctataaaatgtaacaggtgctcttaaatgcaggattctgattaataacactggagattgtgacattagaatagagaaaaaatttttgaatagaaaagctgaatggtctt

SEQ ID NO: 873699 - DNA, 598 bp, Homo sapiens
cttcagcaacacctacagttccccgccaagaatggcacaccatattaatgtaacgaaaatgaggcttccctggtggtttcttttggaaggaagaaaaacatacttatgtaaaaaataatcaaaaataaaaataaaccagtgcttcactattgttccaagttaatgggaaaataatttatccttatattagtgaaattaggcaacacttgcccaggagctacttgtgcagataactggtgagctgaacaaacttcttaggaaattgtttargttggttcttcattattaaactcaagctgaatttgacataattacaggaaccactctcctcttctttctctcagtcgtactcttgaacaaaaagtttttgtgttaatcgatttgccttttgattttattgtttaaatgttccatcaaagacaattatggaaacctaggtatgatctcacgtttatattgctcaacagttcatcagtgttctgacactaagtcagcatttgaaagcagtgatcacaaaagctaacaatcaggggttcatgtcccagcacacgccacggagcgaccaaagtagctttctttggcttgaactaacactccc

SEQ ID NO: 873700 - DNA, 622 bp, Homo sapiens
gcccagcatgccttagccatttttcctgatgctctcccttttcccggcccctcctgagaggccccagtgtgtgttgttcccctctctttgtctatgtgttcacattgttcaactcccactgataagcgagaacatgtggtgtttggttttctgttcctgtgttagtttgctgaggttaatggcttccagctccatccatgtccataaaaagggacacaatcacatccctttttatggctgcatagtatcccttggyatatacgcaccacatgttctttgtccagtctatcattgatgggcatttgggttgactccatgtctttgctattgtgaatagtgctccagtgaacataatgtgtacatgtatctttataacagaatgatttatattcctttgggtatatacccagtaatgggatttctgggtcaaatggtatttctgggtctagagctttgaggaatcaccatactatcttccacaatggttgaactaatttatgttcccaccaacagtgaaaagcgttcctatttctctgcagtctcaccagcatctgatgtttcttgactttttaacaatcaccattctgactggcatgagatagtatctcattatggttttaat

SEQ ID NO: 873701 - DNA, 622 bp, Homo sapiens
gcccagcatgccttagccatttttcctgatgctctcccttttcccggcccctcctgagaggccccagtgtgtgttgttcccctctctttgtctatgtgttcacattgttcaactcccactgataagcgagaacatgtggtgtttggttttctgttcctgtgttagtttgctgaggttaatggcttccagctccatccatgtccataaaaagggacacaatcacatccctttttatggctgcatagtatcccttggcatatacgcaccacatgttctttgtccagtctatcattgatgggcatttgggttgactccatgtctttgctattgtgaatagtgctccagtraacataatgtgtacatgtatctttataacagaatgatttatattcctttgggtatatacccagtaatgggatttctgggtcaaatggtatttctgggtctagagctttgaggaatcaccatactatcttccacaatggttgaactaatttatgttcccaccaacagtgaaaagcgttcctatttctctgcagtctcaccagcatctgatgtttcttgactttttaacaatcaccattctgactggcatgagatagtatctcattatggttttaat

SEQ ID NO: 873702 - DNA, 641 bp, Homo sapiens
tgtcatctccaaacagagacaatttaacttctttctcttcctatttgaataccctttatttctttctcttgcctgatttacctggccaaaatttctaatactatgttgaataggaatgatgagagagggcatccttgtcttctgctggttttcaaggggaatgcttccagcttttgcccattcagtatgatattggctgtgcattagtcataaatggctcattattttgaggaatgttccttcaatgtgcctaatttcttgagagtttttaagataaagcaatgttgaattttatggaaggccttttctgcatctattgagataattttgtggattttgtcattggtcctgtttgtgtgrtgaaatccattaattgatttgcatatgttgaaccagtcttgcatccttgggatgaacccaacttgatcatgctgaataagtttcttgatgtgctgctggatttggtttcccagtattttattgaagacttttgcattgatgttcatcagggatagtggcctgaagttttcttatgttgttgtatctccgctatgtttggtatcaggaacatgctggccttataaaatcagtcagggagaagtccttcatttccttttattattatactttaagttttaggg

SEQ ID NO: 873703 - DNA, 421 bp, Homo sapiens
ggccggggcaaaagtccactgagagaaacaagaactaggttcggggaaagcccatcctttctttcttttttttttttttaagagacagagtgtcagtctgttgcccaggccggagtgcagtggcaagatctcggctcactgcaacctccgcctcccaggttcaagtgatcctcctgcctcagccccctagtagctgggattacaggcacgtgccaccatgccyggctaatttttgtatttttaatagagacagagttttgccatgttggccaggctggtctcgaactcctgacctcaggtgatctacctgccttggcctcccaaagtgctgggattacaggcatgagccactgggcccggccagcccatcctttcatatgtaaaaggacaagggcagcacaggggacaaaacctaagcaaa

SEQ ID NO: 873704 - DNA, 622 bp, Homo sapiens
taaataaataataccctttaactaagcaaatgaaacaccagcaacattctgtattcgttaaaggtagttgattcttactgaattaaaattggacccctccaccttcagtaactattaatacatctgctcaatcagatgaaatcaaatttgaattacagaaaatttaattttaaaataagtattacatgaacatttaccagcacagacccattttctgtgaaatatctttaagaactcatcacagatgcaggtaaataaaatatctatctaaaaacagagtattttgcaatcataaaaatacttgaaacagcaaagaaacacatcacaaatgagcttttgcaatacygtcttggcatataattaagtgtatcttttaaatatgagtactccatttgctgaggtgcctgcaatgctaagaagcaaaagagagttgcaaggagatcctgaaatgaaaagccttactcacaaggaggagctcccaagaaggagctgttaagctcaggagcctcagatagaaagtccaaagctaacaaagagttaaacacccaggatagctcagtaatgaatgcttagtaagtttggccaacgaatatcaagtagataccagggctagagcaactgc

SEQ ID NO: 873705 - DNA, 530 bp, Homo sapiens
agtcctagcaaacatcgacctgaaatgatttgaatttatccccatttctcttctatcctgaaggaattgctcattaaaaatttactctgggccgggcacggtgctcatgcctgtaatcccagcactttgggaggccgaggcgggtggatcactttgaggtcaggagtttgagaccagcctggccaacatgataaaaccccgtgcctactaaaaatatgaaaattagctgggcatggtggcgcaggcctgtagtcccagctattcgcgaagctgaggcaggagaatcgcttgaacccaggaggcagaggtggttgcagtgagccaaggttgtgctgctgcactccagcctgggcgacagagtgtgaccctgtttcaaawaaaaaaaaaaaaagaaagaaaaacaaatttactctgaacaagattgtgacacaatttctttcttttcttttatctcttttttcttctctttctttctttctctctctctttctatcttctttagagacagggtcttgccatgttgcctaggc

SEQ ID NO: 873706 - DNA, 635 bp, Homo sapiens
aatggctaaagttaaaaacgccaaccaaactaaattttggtgaggatatgtagcaactggaactcacttactgctttgagaatataaagtggtttgaacacttttgagaacagtttggaaacccttccctgggtgaatgaatgaacatctgaggtacatccatgcaacagaacattattcagtgactaacagaaatgagccctggagccgtgaagagacatgaagggattgtagcgcaactcactaagaaaggaagtgggtctgaaaagtctccacactgtgtgatttccatgataccacattttagaaaaagccacggtgtgaagacagtcaaatatcagcggtgcaggagttcgggggggagagaaaggtaaacaggtggagcasatggaaatcttttttttttgtgatggagtcttgctctgtcacccaggctggagtgcaatggcatgatctcggctcactgcaacctctgcctctcaggttcaagcgattttcctgcctcagcctcctgaggagctgggatcacaggtgcccaccaccacgcctggctaatttttgtatttttaatagagatgggttttcaccatgttagccaggctggtcttgaactcctgacctcaggtgatccacct

SEQ ID NO: 873707 - DNA, 611 bp, Homo sapiens
ctgggtggaccaggtcttccttgccctcattccagtaaactgataaccttccagtgtgggtgtcatggccatcacaagcatgtcacagtgctgcagagactttgtttatggccagttttggggtcagtttataaaaaaattggggggcctgwtcccaacatctgcctttgtctgtatctctgtactatttatatattacctgcgtcatgtggaagtgatatctcaatatcaaaatatatgaaagagctctaatcaattgacttaaagaaaagttaagcgcttatcacactaacaaaagctagcttggatacctttgagttcacatgactatagtagtatttggtaacattaatttggaaaatttaatctcaaaattctctctaatagtataaaatctgagtcatgttatgttaaattaagtaaccctcagtatggtcactgagaatttatgttactgagagttaaaatagttgtagaatacaaaggtttttttgggtgaggtttataaaaacagaaggatgggtcaggtgtggtggctcatgcctgaaatcccagcaccttgggaggccaagtcaggtggatcatgacatcagaagattgagaccatcatg

SEQ ID NO: 873708 - DNA, 611 bp, Homo sapiens
ctgggtggaccaggtcttccttgccctcattccagtaaactgataaccttccagtgtgggtgtcatggccatcacaagcatgtcacagtgctgcagagactttgtttatggccagttttggggtcagtttataaaaaaattggggggcctgttcccaacatctgcctttgtctgtatctctgtactatttatatattacctgcgtcatgtggaagtgatatctcaatatcaaaatatatgaaagagctctaatcaattgacttaaagaaaagttaagygcttatcacactaacaaaagctagcttggatacctttgagttcacatgactatagtagtatttggtaacattaatttggaaaatttaatctcaaaattctctctaatagtataaaatctgagtcatgttatgttaaattaagtaaccctcagtatggtcactgagaatttatgttactgagagttaaaatagttgtagaatacaaaggtttttttgggtgaggtttataaaaacagaaggatgggtcaggtgtggtggctcatgcctgaaatcccagcaccttgggaggccaagtcaggtggatcatgacatcagaagattgagaccatcatg

SEQ ID NO: 873709 - DNA, 622 bp, Homo sapiens
tgttgagtgaaacacatggtgcaagctgtcagtggatctaccattctggggtctggaggatggtggccctcttttcacagctccactaggtggtacctcattagggactctgtatgggggctccaaccccacatttcccttttgcactgccctaggaaaggttctccatgagggctctgtccctgcagcamacttctgcctgggcatccagacattttcataaaccttctgaaatcgaagcagagattcccagacctcaattcttgacttctgtgcacctgcaagttcaacactaaatggaagctgctaaggcttggggcttccaccctttgaaacaacagcttgagcctctgacttggtcccttttagtcacagctggagcgactgggatgcagggcaccaagtccttagacggcacaaaacagagggaccctgggcctggcccacaaaaccaatttttccttctaaacctctggccctctgtggaagggactgctacaagggtctctgacatgccctggaaacattttccccattgtcttggtgattaatattaggttcctcattacttatgcaaatttctgcagctggcttgaatttctcctcggaaaatgggattttt

SEQ ID NO: 873710 - DNA, 622 bp, Homo sapiens
tgttgagtgaaacacatggtgcaagctgtcagtggatctaccattctggggtctggaggatggtggccctcttttcacagctccactaggtggtacctcattagggactctgtatgggggctccaaccccacatttcccttttgcactgccctaggaaaggttctccatgagggctctgtccctgcagcacacttctgcctgggcatccagacattttcataaaccttctgaaatcgaagcagagattcccagacctcaattcttgacttctgtgcacctgcaagttcaacactaaatggaagctgytaaggcttggggcttccaccctttgaaacaacagcttgagcctctgacttggtcccttttagtcacagctggagcgactgggatgcagggcaccaagtccttagacggcacaaaacagagggaccctgggcctggcccacaaaaccaatttttccttctaaacctctggccctctgtggaagggactgctacaagggtctctgacatgccctggaaacattttccccattgtcttggtgattaatattaggttcctcattacttatgcaaatttctgcagctggcttgaatttctcctcggaaaatgggattttt

SEQ ID NO: 873711 - DNA, 589 bp, Homo sapiens
aacttaaatttacaagaaaaaaaacctcattaaaaagtgggcaaaggacatgaacagacactttttcaaaagacatacatgcagccaacatcactgatgattatagaaatgcaaatcaaaaatacaatgagataccatttcacaccagtcagaatggctactattaaaaagtcaaaatataacaaatgctgatgaggttgcagagaaagggaatatttatacaytgttggtgggagtgtaaattagttcaaccattgtggaaagcagtatagcaattcctcaaagagctaaaagcagaactaccatttgacccaacaatctcattactggtgatatagatatacccagcggaatgtaaatcattctaccgtaaagacacatgcatgtgaatgttcattgcagcactattcgcaatagcacagacatggaatcaacccaaatgcctgtcaatgatagactgggaaaaaaaatgtggtccatatacaccagggaataccatgcagtcataaaaaggaatgagataatgtcctttgcacagacatggatggagatggaagccgttatccttagcaaactaatgcagggacag

SEQ ID NO: 873712 - DNA, 570 bp, Homo sapiens
aggtatatgggactggtggtgccatacttccttaagtctgtcaatattgctttgtcctatattccatgcatcactgaaatccttttctcatgaccatcaagacgacagcatacaaactctccattatcgttaaaaacacacctttggaatatcagatgactttacttctacctctctggcttttatctaggtcaacatccatatttcatcacctttctgctggctaggctgatgagaagcagagagtcatgttgccttcttaaaaattttaacttctttgtttgcacccgcagatttacattgacaacatgcacaacaggctcatgtaaaaggattatctgatgkgtcatcatgacttaatgaagaacgcaaatgcttctcgatgaaattgaagtaaaaagaggaaacagaagggaaaatgagagtctaaaaagaaacaaagagaagttaacttttaagagatgacaaattctacctgccacgatgttttattttaatctgaaagaaattataaagctgatactttctgaaaatatatccttttacagtaaatattcttgtgaaatctgc

SEQ ID NO: 873713 - DNA, 639 bp, Homo sapiens
atataataattaggcaaaatgaaatttagtagtggagctgagcagaaggtcagtctttcctgattcaagtgttaaaaaaaaaatccaggctctgctcattaaaggaagggtaattaatgtttatgatacagccccttctaccatggggtaagaatacaaacctsgaaaaagtgtgtgaaaatagggaggcaacactgatttgtcaaaataaagagatgggccaagattctctgtgtgtatgtgtgtttagaggggcaaaaatgagaagatgagaagacagcataagatgaaagattaaataaatgttttagagaatatttaatgagaatcaagcataactgtattctatttatcttcctcctccattgagtattcattttaaagtattatggcattactattttctaggattatggcttttaaaatcatttgattttcctcttttgttactttcttcattatttgcctaaaacagaaggaaaacagcatttctggtttttattctaaacagcataaagaggtttctaagagtgaagcgggtccaagggaaacataaccctcttagatatagatgttattgccattaaattactcctttaagtagatgtacatataggagatacagttaatttcacatga

SEQ ID NO: 873714 - DNA, 652 bp, Homo sapiens
taagccttttcttaggtctagaagtaattgttttatagctctggtgctccagttgagtacatatatatttaggatagttaaatcttcttgttgagttgaatactttatcactacacaatgcccttctttgtccttttttactgttgttggcttaaagtctgttttatctgacataagaatagtgactcctatcattggttctgtttatgtgatggattgygtttattgatttgtgtatgtcgtaccagccttgcatcccagggatgaagccaacttgatcatggtggataagctttttgattggctactggattcagtttgccagtattttattgaggatttttgcatcaatgttcatcagggatattggcctgaaatttttttttgttttgttatctgccaggttttggtatcaggatgatgctggccgcataaaatgagttagagaggagtctctctttttctattgtttggaatagtttcagaaggaatggtaccagctcctctttgtacctcttgtagaatttggctgtgaatccacctggttctgggctttttttttggttggtaggctattagtgcctcgattacagaacttattggtctattcaggaattcaacttcttcctggtttagtcttgggagggtgtat

SEQ ID NO: 873715 - DNA, 622 bp, Homo sapiens
tttctagaatccacacggagccccgctaggtgcttgtccccactctgccccttctctggctcctcagaagccagtgctgactccggaccacagggccagacattccgtgccaccctcccgggctcacaggtgctcttgggggcccratatggcacccctcaatttctttctgtgtgttttttgttttttgtgtttttttttttgagatggagtctcactctgtcacccaggctggaggctggagtgcagtggcatgatctctgctcactgcgacctccatctcccgggttcaagcgattctcctgcctcagcctcctgagtagctgggattacaggcgcccgccaccacacccagctaaattttgtgggggggttttttggttttgttttgttttttgttttaatttttgagacagtgtctctctctgtcacctaggctggagtgcagtgatgcgatctcagcttattgcagcctccagctcttggattcaagtgattctcatgcctcagccttccaagtagctggggccacaggcgagcaccaccatgcctggctaatttttgtattttttgtagagaaggggtttcaccatgttggccagtctggtctcaaactcctggc

SEQ ID NO: 873716 - DNA, 573 bp, Homo sapiens
ttttttgttttcgtatgtgatttgtagataaagagaaactggaacatgtggtcagccagttctactagccagatgatcttacagtcagaagcctgcctatttcatttttaatacttccacatataggtcaatttaccttttaaaagtaattctgtactttagttttaacaaaattgtatgtttgcagggaaaattggaattatatttatcatgagataactctctactattagggtgaattattaaaatttagtgtttcttcctttaatttaattgaagtataacttacatatgataaactgtatatattatttttatttgtgaaaatttatggaatataagtataattttgttwaatgcatagattgcatagtggtgtagtaagggcttttatggtacaactgcatatgttggacaatttgatgatctttcataaaggttttcatctgtgaaatcatcttgtactcaagatactggatatttgtattcctgcaaaatattaggcttgtcccatttgtaatccattcctcctccaccactgtccccatacatgctttctttcactataggtta

SEQ ID NO: 873717 - DNA, 642 bp, Homo sapiens
tttatctccatttatcctaaagataagattactcagatattaaagtgggggaaaaactcgattataaaagtgcttttcagaattgtaatctgatttatcaaagtgttaatatgaaacttttccgtaggacatcctcattttgtaccacaatgaagaaaagtgcttgacagacccagacctattttaaactaagattatttaattagtaatttttatttccagtgagtytggcaataaactgtggggaatcatttcattttcattcattacaagaagccatagtttatatttcccccaggcagagatttttatctgacaatttgaatgctttggtgacagaaatatctgatgataaatatggtattaaggagatgccaagtggcatgatagtttgaatcatttttggtaacagctcatgattaataatcgtgcttatgtatgtattcacgttttttattattgaataacattttgcatgggaaatgggagtagatgttctactccattttcatttctgtggaaaaaaaaaaaaaaaaaaaaaaaaaaccaaatgcatgtaaaacatggctgaactggtagcatatgtttaaaccatgtgtctccaggtagtaaaagaggtcagtctcctccaactacgacttt

SEQ ID NO: 873718 - DNA, 637 bp, Homo sapiens
ggccaaattgtgggtggaccaaaaagcatctgagaaattatgtgaaaggaagaggtcaggctctcaaaaatacagtttctcataataaaagcaaactcagattttagttaattatcactacctctgtcaaaccctaaaaatagctgaccaaatgtaaagaggctagagaaacaagtacttaaaaactaatgtttattgattcatagaaaaatcctctactttgtaatctagttgagtcaggtacaagtgtttcagtaagcaagggtttattgcctattcrttatatgctgggcatagtttgctgatgctgaggaacagaaaagaaggagatatgtgtagcaggcatttgttatttttgcctacattttttacttttcctcattttttgtaaacaactctctgtctcagtatttgtggtcagatgagctgagattttaacacaaagcctaaactgtactaagtcgattacaagaaaaaatggattagaaatggatgagccaacacagacccattttcaccactggacagacaattcaaacacaagcctgatcagtctgacctctgtgtgtgttctcagtcaaataaaaaatagggcaaactaatggcctggagggtttatgatggggtctcaaaaatg

SEQ ID NO: 873719 - DNA, 557 bp, Homo sapiens
agaataaataagacacatagtggatacatgactttgtgcatttgtcaaaacccaaaacactgtataacacgaagaatgaactctaatgtaaaccatggactttagttaaaaataatatatcaatattggttcatagttgtgacacatgttaataaaacgagaaacgatgaggtgggrgtggtggatggagtatataggaactctgtaacttatgctcagtttttctgtaaacctagaagtgttctcaaaaatgagggatggtattaggggaatgaaaaaaaggcacagtctcattaggtttgcaaacatgtaacagttttaaacttatctaatcactaactcttttgtaaacaaagatgttgcccaacaatgtataggaaatctcctaattgtctttttttttttttttttttttttgagatagagtctcgctctgtcacccaggctggaatgccatggcacaatcttggcttactgcaacctccacctcccaggttcaagcaattctcctgcctcagcctcctgagtagctaggattacaagcgcgtgccaccaca

SEQ ID NO: 873720 - DNA, 664 bp, Homo sapiens
tccagagcctgttattggtgtattcagagattcaacttcttcctggtttagtcttgggagggggtatgtatccagaaatttatccatttcttctagattttctagtttatttgcatagacgtgtttctactattctctgatggtggttttatttctgtggggttggtggtgacatctcttttatcatttttcattgtgtctatttgattcttctatattttcttctttattaattggctagtggtctattttgttcatcttaaaaaaaaaaamcagctcctggatgcattgatgtttttgaagggttttttgtgtctctaaatccttcagttctgctctgatcttagttatttcttgtattctgcgagcgtttggatttgtttgcttttgcatctctagttcctttaattgtgatgttagggtgtcgattttagatctttcccgctttctcctgtgggcacttagtgctataaatttccctcttaacactgctttagctgtgtgccagagattctggtaccttgtgtctttgttctcattgttttcaaagaacttctttatttctgacttaatttcgttatttacccagtagtcatttaggagcaggttgttcagtttccatgtagttgtgcggttttgagtgagtttcttaatcctgagttct

SEQ ID NO: 873721 - DNA, 519 bp, Homo sapiens
cctggccaattttttttttttttgagacggagtttcactctatcgcccaggctggagtgcagtggcgctatctcagctcactgcaagctccgcctcccgggttcacgccattctcctgcctcagcctcccgagtagctgggactacaggcgccccccacagtgcccggctaattttttgtatttttagtagagacrgggtttcaccatgttagccaggatggtctcgatctcctgacctcgtgatccgcctgcctcggcctcccaaagtgctgggattacaggcgtacagccgcgcctggccccaattttttttttatttttgttttttgtagcgatgaggtctcaccatgttggccatactgatctcaaactcctgggcttgagtgatcctcccacctcagcctcccaaagtgctgggattacaggtgtgagccatcatgcccagcctcaatatttttttaaagagatgtttgtttcccaaacttccacgcaagactctggagctacaggccactctg

SEQ ID NO: 873722 - DNA, 665 bp, Homo sapiens
gaccaccataataaagtgagtcacatgaactttttggtttcctggtacatatagaagtcaggtgtacactacactgtaatctattaagtatacaatagtgtatgcctaaaaactaatgtacatgccttaatttaaaaatatgttattgcagtgttcaagctgagagccaaatcaagaatgcaaactatttacaataaccacaaaaaataaaatatctaggaatacatctaaccaaagaagtgaaagatctctacagggctaactacaaaacactgctgaaagaaaccatagataacacaaacaaatggagaaacattccatgttaatggaaaggaagaatcaatatcattaaaatggacatactgcttaaagcaatctacagattcaatgctattcctatcaaactagcaatgtcatttttcacagaattataaaaaactatcctaaaattcatatgaatctaaaaaacagtctgaagagtaaaarcaatgctaagtgaaaagaataaagcatgatattaaccaacttcaaactatactataaggctacagttacccaaagagaatgggacttctacaaaaacagaaacttggaccagtagaacagaatagagaactcagaaataaagccgcatacctacagccatctgatctttaacaaagtaa

SEQ ID NO: 873723 - DNA, 605 bp, Homo sapiens
aaatggattaatacagacaccttattcaataaatggtgctgggaaaactgacaagccacatgtagaagaatgaaactgggtccccatctatcactatacaaaaaacaactcaagatggataaaacacttaaatccaagacttgaaaccataaaaattctgcaagataacatggaaaaaaactctcctgaacattggcttaagcaaagaatccctgagtaagacccaaaggcaaatgcaacaaaaacaaaaacaaatgaatggaacctaattaaactaaaaagcttctgcacagcaaaagaaataatcaacagagtaaacagacaacccacaaagaaaatatctgcaaactatgcagctgacaaaaaactagtatccagaatctacaaggaactcaaatcagcaagaaaaaaaaaatcacataaraaactggaaaaaggacatgaataggcaattctcaaaagaagatacacaaacagccaacaaacacatgaaaaaaaatgctcaatatcattaatcctctgggaaatgcaaattaaaaccacaataagacaccaccttctgcaagaatggtcataatttaaaaatcaaaaaacaatagatgttg

SEQ ID NO: 873724 - DNA, 735 bp, Homo sapiens
tatatacacaatagaatactattcagtcttttctgcatctattgagataatcatgtggtttttgtctttggctctgtttatatgctggattacgtttattgatttgcatatgttgaaccagccttgcaccccagggatgaagcccacttgatcatggtggataagctttttgatgtgctgctggattcggtttgccagtattttattgaggatttttgcatcgatgttcatcagggatattggtctaaaattctctttttttgttgtgtctctgccaggctttggcaaaattcaatagcccttcatgctaaaaactctcaatagattaggtattgatgggacatatctcaaaatartaagagctatttatgacaaacccacagccaatatcatactgaataggcattcagtatggaagcattccctttgaaaactggcataggacagggatgccctctctcaccactcctattcaacacagtgttggaagttctggccagggcaatcaggcaggagaaagaaataaagggtattcaattaggaaaagaggaagtcaaattgtccctgtttgcagacggcatgattgtatatttagaaaaccccatcatctcagcccaaaatttcctccagctgattagcaacttcagcaaagtctcaggatataaaatcaatgtgcaaaaatcacaagcattcctatacaccaataacggacaaacagagagccaaatcatgagt

SEQ ID NO: 873725 - DNA, 573 bp, Homo sapiens
aatcctaacactatggcctggtgcagtggctcacacctgtaatcctagcactttgggaggccgaggcaagcagatcacttgaggccaggagttcgagacctgcctgacgagtgtggtgaaaccccatttctactaaaaatacaaaaattggctgggcatggtggtgtgcacctgtaatcccagctacctgggaggctgaggcatgagaatcgcttgaatctgggcagcagaggctgcagtaagctgagattgcaacactgcactccagcctgggtgacagagtgagactctgtctcaaaaataaaataagacagagattcaacagacttaaacattcctgcctgctgactctgaagagagcagcagatctcctagcacagtgctcaagctctgctaagggacagactgcctcctaagtgggtcmctgacccccatacctcctgactgggagacatctcccagcagaggtcaacaggcacctcatacaggagagctccagctggcatctggtgggtgcccctctgggacgaagcttccagaggaaggaacaggcagcaatctctgctgttttgc

SEQ ID NO: 873726 - DNA, 693 bp, Homo sapiens
ccaaactaagcttcataagtgaagaagaaataaaatcgtttacagacaagcaaatactgagagattttgtcaccaccaggcctgccttactagagctcctgtaggaagcactatacatggaaaggaacaaccggtaccaaccactgcaaaaacataccaaattgtaaagaccattgacactataaagaaactgtatcaactaatgagcaaaataaccagctagcatcataatggcaggatcaaattcacacataacaatattcaccttaaatgtaaacaggataaatgccccaattaaaagacagactggcaaattggataaagagtcaagaccaatcagtgtgctgtattcaggagacccatctcatgtgcaaagacacacataggctcaaaataaaaggatggaggaatatttaccaagcaaatggaaagcaaaaaaaaagcaggggttgcaatcctagtctctcataaaacagactttaaaccaacaaaaatcaaaaaagacaaaaaagggcattacayaatggtaaagggatcaatgcaacaagaagagctaactaccctaaatatatatgcacccaatacaggagcacccagattcataaagcaagttcttagagacctacaaagagaattaaacccccacacaataatagtgagagactttaacaccccactgtccatattagacag

SEQ ID NO: 873727 - DNA, 598 bp, Homo sapiens
atactaggaaaatagccttggagtgagaataggttctgaagggaacttaattagttaaccaaaaggtcacatctgtctctcttcactcaataagacatcctttcttcactatttccactgagtctactctctccaaactatgcccttctacagtataaccttaaactttcaccaaaataattattgagtaaagaaaatacagtaggaaaggtaaaatctaattcrcatacagttttaggtcagagggtaagctataagggagaaaaccagattttatcttatgtgagacctactctaaatacttgccaagaaagcaagaaactgaaggacactggctaaacactccttaaatcactgagatgaatgtaataaggcaacacgtgagtgcaggaggaagtcctcatgtatcatgatggtgaaatatgcatttatcaaatcccagtgtggggtgaagcagagctggcaatgctagaacagtaagaaattacaagacttttgagataattagtttaatagtttcagtaaagtttggacaaggtctaacatgtaatttttggattagatccgtctgacaaatttcctaattattgttatagtt

SEQ ID NO: 873728 - DNA, 634 bp, Homo sapiens
tttgatggggttgttcgtttttttcttgtaaatgtgtttaagttctttgtagattctggatattagccctttgtcagatggatagattgcaaaaattttctccctttctgtaggttgcctgttcactctgatgatagtttcttctgctgtgcagaagttctttagtttaattagatcccatgtgtcaattttggcttttgttgccattgcttttggtgttttagacatgaagtctttgcccatgcctatgtccttaatggtattgcccaggttttcttctagggtttttgtgatcctaggtcttgtttaagtctttgatccatcttgagttaatttttgtataaggtgtaaggaagggatccagtttcagttttctgcatatggctagccagttttcccaacaccacttattaaataggaaatcttttccccagttcttgtttgtgycaggtttgtcgaagatcagatggttgtagatgtgtggtggtatttctgagccctctgttctgttccattggtcgaattttaaagcagaaattcctgccttgttctcttgaaacaagactcacatttcaaggtatgccatggaagaaactccaggtaatgagagcatgaacaatttctgtattctctg

SEQ ID NO: 873729 - DNA, 626 bp, Homo sapiens
gtaactcaaagtagttttatccaataaaaaagtagccttgcaggccagcttaatatcttgagaaagaatgttccaaattatacaattcttccatatcccaattttccatctccaagtatttggtacatgaagggagatgggggaggatatatactgtgtaaggaggaggagaatgaaggcaattccagatattacatgccaaaggaacagcatcacaacagtggcaacctttcaccctaacagctccaagacacttaagccacataattgtcatgtccctccagttaaccctatgctatctattctggttatctctcactgcaaaataaaccacatcaattaaaccataacaattatttgctttcctcaagaatmtggactgagggagttctcacttggagtatttcatgcagttataataaggagtggccgaagtcatcttgaagtcttcttcttcatgtggtctctttccatgatggcctcagggtaactgcatttgttacacggcagctaaaagtaaatgtgcttaggtaaacagacaagttgcctgaccttttaaaacccagccccaaaagtcacagagcattgctttgacctgaattgtatttgtctatttatttagccac

SEQ ID NO: 873730 - DNA, 691 bp, Homo sapiens
tttaggactggcataaatccaggatgccaaaaaacattttaaggtggttatggttcaaaaatagttcataatatcattaaatgtataataggctgagtaatatatagaaatagtatgttatcaatcaacatttattgggcacctgatttgaattagtcattaagatagaacacttcttttataattaaattagtgaaagagaagataaaccacttttatgaggtttatcttctctttcacaaaatgataccaggcatcatataaatgggaatctggaagacgggaaaactcgctgtgggtttgaatgagtcaatatacagaatttaggaactgtgttgaggcttatgtgaagtgttcatataagggaacacttggaaaacaaaagttgaaaagttaggttaggggccagaatgttggagatcttgcctttcttcctctactgtccttcccccaactccaccccctcaataaactaaggataaaatgataggctaaactgaggtagtagtagtagaaatggaaagyaaattagactcactgagaagtttgtgaacaggtggtgagataacctagtataaagttgttattaaatattagagtgtaatgtataataaaagtttgggtctttaaatgcaaattaaaataatgaaacacttgattcttgacagtgctttcatctccttgaaaccca

SEQ ID NO: 873731 - DNA, 570 bp, Homo sapiens
aacttaaatatcattttccaccttgtcctaaatatgcacacctcagcatgttctgatcttttatttatttatttggtagcttttactcttcttcttccacctcttgccacataggtgttatcaaaaatgtaaccccaggcaaatatatactgtttataraaatggatactaattgttattttccatagtctacaaagtctttttgcaattatttattttctaaaaattgtctaatttttttttacattctgaaaacctctatgcctacaattatacttactgtgtgttcacattaagtaatagttcagctgggtgtaaaatcctagtttaatattattttccttcaaaatgctaaacatattatgcaatattctttctcttgtgtgtttctaaaaagtatgatgtaaacatgattttttaattatgtgtatgtttctctttccttctatagtaagcagaataatggtccctcaaatatgtcttcaccctaattcttggaacccatacatttatattacatggtcaaagataagtaaggttgtagatgtaataaaggttgttaatcaggtc

SEQ ID NO: 873732 - DNA, 622 bp, Homo sapiens
gaatctaatcaagaactcaaccccttttacaatagctgcaaaaaaaaaaaaaatacttaggaatatacctaacaatggagtcaaaagacctctacaaggaaaactacaaaacactgctgaaacaaatcataaacaacacaaacaaatggaaacacatcccatgatcatgggtgggtggaatcaatattgtgaaaatgaccatactgccaaaaggaatctacaaattcaatgcaatccccatcaaaataccaccatcattcttcacagaattagaaaaaaaacaattctaaaattcacatggaaccaaaaaaagagcccgcatacccaaagcaagactaagtgaaaagaacaaatctggaggcatcacactacctgatttcaaactatactctaagtctatagtaaccaaaacagcatggtactggtataaatataggcacatatactgatggaacagaatagagaacccgtaagtaarcccaaatacttccagccaactgatcttcagcaaatccaagttggctattggggattgtagagacacaaaagtgttgaaaacaaatgaattaaaaaatatattatcttagtcagctcaggctgccataacaaaatattacagact

SEQ ID NO: 873733 - DNA, 622 bp, Homo sapiens
ttgatatactgactttctttcagatttatatatgcagcagtggaattgctggatcatatggtagttctatttttagttttttgagaaagcttcacattctttgtcttaatggctgtactaatttacattcccaccaaaaacatttaagagtttattcttctttgcatcctcaccagcatgttatttttttgtttatttatttttatartagccattataactagggtgagatgacatctgatttagattttgatttgcatttacttcatgattggtgatgttcagcaattttaaatatctgttgaacatttatgtgacttctttcaagaaatgtatattaagctctttgactcattttaaattgaattatttgaattttattttgctatttatttgaatttcatatgtattttgtttgtttttcctgtttagttgtttcagttctttatatattctgttattaatccctagtcagatggatagattgtcaatatttttccattgtgtatgttgtcgcttcacgttgttgatggcttcttttgctgtgcagctttttagcttgatgtaacccatttatcaatttttgcttttgtttcatatattacatttaagtctttaatcc

SEQ ID NO: 873734 - DNA, 628 bp, Homo sapiens
tctctgtttagaatgaatatattatcaatgatagtgcaatggcatttgtattactcacttgcatatgctgagcacccactgagtgctgtaccctggggatacggagaatattttacccattactaaggatctcatcatcagtgaggcagtacaaacacagtggttataaaaatgactttgggccaggcatggtggctcacgcctgtaataccagcactttgggaggccgaggcgggtggatcacgaggtcaggagattgagagcatcctggctaacacggtgaaaccctgtctctactaaaaawacaaaaaaattagccggatgtggtagccggcgcctgtagtcccagctactcaggaggctgaggcaggagaatggcgtgaacccaagaggcggagcttgcagtgagccgagatcgcgccactgcactccagcctgggcgacagagtgagactccatctcaaaaaaaaaaaaaaacaaaaaaaaaaacctgagtgtatggaggaagagggaagactatcattttttttttatagagggaaatagataagccttcacaaaaatgaaaatatttgggtagaattttgaaggttgaaaagaacacatctaattttcaacagaagggcct

SEQ ID NO: 873735 - DNA, 628 bp, Homo sapiens
tctctgtttagaatgaatatattatcaatgatagtgcaatggcatttgtattactcacttgcatatgctgagcacccactgagtgctgtaccctggggatacggagaatattttacccattactaaggatctcatcatcagtgaggcagtacaaacacagtggttataaaaatgactttgggccaggcatggtggctcacgcctgtaataccagcactttgggaggccgaggcgggtggatcacgaggtcaggagattgagagcatcctggctaacacggtgaaaccctgtctctactaaaaatacaaaaaaattagccggatgtggtagccggcgcctgtagtcccagctactcaggaggctgaggcaggagaatggcgtgaacccaagaggcggagcttgcagtgagccgagatcgcgccactgcactccagcctgggcgacagagtgagactccatctcaaaaaaaaaaaaaaamaaaaaaaaaaacctgagtgtatggaggaagagggaagactatcattttttttttatagagggaaatagataagccttcacaaaaatgaaaatatttgggtagaattttgaaggttgaaaagaacacatctaattttcaacagaagggcct

SEQ ID NO: 873736 - DNA, 527 bp, Homo sapiens
ctgtaaaagttcacaatcagactcatatgtgtaacatatgtttaatgaacacatattgtgtgacaagctcatgtgttaggtctcagataaatagcattaatagtggctactattatttgttatttattgattgctaattgccacggcatatgcatagcactctaaatttcaactcattaaatatttatgaaaacattacatattaagggctagtagccctattttacagataatgaaaagtaggctyaaagaggttaaggcaatttgctacgattactaccatttactaagattactgccattactaagattactgagtcctggttttacaataatggaaaagcaagaacactgaggatagaggaaaggcatacgccagcaaacataacacataatattcctgacaataaccagaagtgcagtcaaggacactttcagagcacaatgcttcttccttgccttggtccctgaaattcacttccacttgttcagaaaaagaaaaaagtaggatttctgatttgttttac

SEQ ID NO: 873737 - DNA, 527 bp, Homo sapiens
ctgtaaaagttcacaatcagactcatatgtgtaacatatgtttaatgaacacatattgtgtgacaagctcatgtgttaggtctcagataaatagcattaatagtggctactattatttgttatttattgattgctaattgccacggcatatgcatagcactctaaatttcaactcattaaatatttatgaaaacattacatattaagggctagtagccctattttacagataatgaaaagtaggctcraagaggttaaggcaatttgctacgattactaccatttactaagattactgccattactaagattactgagtcctggttttacaataatggaaaagcaagaacactgaggatagaggaaaggcatacgccagcaaacataacacataatattcctgacaataaccagaagtgcagtcaaggacactttcagagcacaatgcttcttccttgccttggtccctgaaattcacttccacttgttcagaaaaagaaaaaagtaggatttctgatttgttttac

SEQ ID NO: 873738 - DNA, 560 bp, Homo sapiens
gggatgcctcaggaaacttaacaattatggcagaagaggaagcaagcaccttcatcacaaggtggcaagagagagaagaatgaagaaggaaggcctaaacacttgcagaaccagtagacctcgtgagaactcactgactatcatgagaacaacatggagaaaaccatccccatgatccaatcacttcctttcctcgacacgtggggattacaattcgagatgacatttgggtggggatgcagagccaaaccatataattccacccttggcccctgtcaaatctcatgtcttttcacatttcaaaaccaatcattccttcccaacagtagcstaaagacttaactcatttcatcattaactcaaaaatccacagtccaaagtctcatctgaggcaaaggcaagtcctttctgactatgatcctgtaaaatcaaaagctagttaattactttctagatataatgggagtataggaattgcataaatgctcccattccaaatgagataaattggacaaaataaggggctacagcccatgcaggtctgatatcagcaggcagtc

SEQ ID NO: 873739 - DNA, 571 bp, Homo sapiens
ttagaggtaatattgtaatgctctgtggtcaaatagacttggaaaatgcatattaaagaattaaacaagtttcttttctttctttctttttttttttttgaaacagagtctctctctgtcgcccaggctggagtgcaatggtgtgatcttggctcactgcatcctctgcctcccaggatcaagcaattctcctgcctcagcctcagcctcctgagtggctgggactgcaggcacctgccaccacgcccagctaatttttgtatttttagtagagatggggttttatcatgttggccaggctggtctcaaactcctgacctcaaatgatccacccgcyttgatctcccaaagtgctgggattacaggcgtgagccaccataaacaagtttccttactgtaagacttctcagagagttaaatggtgaatgcatcctctaagtatataatggtgtataatatgtggtgcttccaaaattctttatttcatattcccctgacaactgcttaagaactctcataattagagttctgtggaacaacttttgggaagttctgatatggtggaaagagc

SEQ ID NO: 873740 - DNA, 523 bp, Homo sapiens
acatagtctacccaaatgagaaggaaacagaaaaacaattctggtaatataacaacacgaggttctttaacacccccaagagatcatgctagctcaccaggaattgatccaaaacaagaagaaatctctgaattgccagaaaaagaattcagaaggttgattaataagctaatcaaggaggcactacagaaaggtgaagtctaacttaatgaaacaaaaaaaatgatataacatatgaagggaaaaatcttcagtgaaatagatagcataaataaaaaacaatcacaacttctggaaatgaaggacacacttasagaaatgtaaaatatactggaacgtgtcagcgatagaatcaaacaggtagaagaaggaatttcagaggtcaaagtaaaggctttcaaattaactcaatccaacagagacaaagaaaaaagaatttaaaaaaaatgaaaaaagacttcaataattttgggattatgttaaatgaccaaacctaaccataattgttgttcccgaggaagat

SEQ ID NO: 873741 - DNA, 571 bp, Homo sapiens
gcagaggtgtgcctgggagaaggtagatgctattctctgggatgctttgtgctagggaggcaaataatatctcatatatgaatgccatatatgggggaggcatggtgggtggtggactgactgttggtggcaacgttgctatttctgaaatgtcttgataaactgaagtggagggatctccacatagtgtgcctatgggtgtcagtcttatcatgtgtgccaataatttactgcattggaattcagtcacagttatggcacaaaargaaatgtccaaccgaacatcctgctaatgaaggcagagttggtttcagaaaatagtggatgcagagataagaaatctgggagcagctgtttttaccactggctgatgatgctagaccccaggaacacatggtggagacctgggtggtggagttgcagtgtttggaaaccaaatgattgagaacagctcattcttagaagcagacagcaacatacaagagcttctctaggttgttgcggaggaggtaccaattcaataatttcataagtcctacttttatcttgccatataagttgatattaagtc

SEQ ID NO: 873742 - DNA, 552 bp, Homo sapiens
cctggagaactttgctgtctagcgaaaggattgtaaatgcaccaatcagcactctgtgtctagctaaaggtttgtaaatgcaccaatcagtgctctgtgtctagcttatcaggtggggacttggagaacttttctgtctaggtaaaggattgtaaacacgccaattagcactgtgtctagctaaaggtttgtaaacggaccaatcaactctctgtaaaatggaccaatcagctcactgtaaaatggaccaatcatcargatgtgggtggggacaaataagggaataaaagcaggccacccgagccagcagtggcaacccgctcaggtccccttccactctatggaaactttgttctttagctcttcggaataaatcttgctgctgctcactctttgggtccacagcacctctaagagcagtaacactgtgaaggtctgcagcttcactcctgaagtcaacaagactacaaacccactgggagaaatgaacaactccagatgtgctgccattataaactgtaacactcaccgtgaaggtctgcagcttcactc

SEQ ID NO: 873743 - DNA, 552 bp, Homo sapiens
cctggagaactttgctgtctagcgaaaggattgtaaatgcaccaatcagcactctgtgtctagctaaaggtttgtaaatgcaccaatcagtgctctgtgtctagcttatcaggtggggacttggagaacttttctgtctaggtaaaggattgtaaacacgccaattagcactgtgtctagctaaaggtttgtaaacggaccaatcaactctctgtaaaatggaccaatcagctcactgtaaaatggaccaatcatcaggatgtgggtggggacaaataagggaataaaagcaggccacccgagccagcagtggcaacccgctcargtccccttccactctatggaaactttgttctttagctcttcggaataaatcttgctgctgctcactctttgggtccacagcacctctaagagcagtaacactgtgaaggtctgcagcttcactcctgaagtcaacaagactacaaacccactgggagaaatgaacaactccagatgtgctgccattataaactgtaacactcaccgtgaaggtctgcagcttcactc

SEQ ID NO: 873744 - DNA, 590 bp, Homo sapiens
taaataattattattatatttaaggaactaagaaatacaaagttgggatctcaattgtgatctaagggggaaagtacagtgtaaacaacttttgatgaaaaatgcctttctactggaggaatggtagttcctgccaatttaatatctaaaattggtgtgtgtgtgtgtgtgtgtgtgtgtgtgtgtgtgtgtgtgtgtgtgtatttccatctaaaacacatacagcctcctggtttgatatagtaagcacacaaacacatggaargcaagagttcctgtttctactctgagccttgggattcctccaaatataaaacaatacaaattcatttgcagggtgaagttctttgagattgcatagaacttgtgatatctgtgatttgaaaacgcatgtttgctcaaatgggtgctatcaatgaatatcctgctatctaattggatactttctattcttatttgaatcctcatctctacaatatgactttgtagtgggagaatacatcagagattgcaccaaattaacacaaaaccagggaggaacttgccagagggagtggttgtgtgcctctgctgagacacagatctggaag

SEQ ID NO: 873745 - DNA, 562 bp, Homo sapiens
gccccagtgctgtgctggtctgggaggctgtgtgctcagggcacaccccattgtgacaaaaactgttgcagcccacatcacccctccctcaattacaggcattgtagtgtggagaaagacttcttttacttgggaaaagaagagggaacagtacagggatattgccttgcaacatagtaccagccctgctgcagtaaaacatagcactgagcaccagtgtcccagattccaggcagtcgcttcagaacggcrtttctagatcccagtctaggatgaggaaggaataccctgccacagtgagatggactcatgtcctagtccactttaccacaggctgatgaatgtggcctcaggccttgaggaaacatcagcagtagtcagtaagtaacagccatgggccttaggtgaggtctgatacttcattgatatgggagggggtgggactcaggtgcatcccaatacaatgccagctgtagtggccatgggtgtgcctgtgtctctgttatcttcctcaagttcataagggctgggtatctgtgagtctacaagagtcacgacattt

SEQ ID NO: 873746 - DNA, 562 bp, Homo sapiens
tgtcgatctatttgattcttccctcttttcttctttattagtctatctagtgacctattttatttatttttttcactcctggatttgttgatatttttgaagagttttttcatatctctatctcctttagttccattctgatctttgttatttcgtgtcttctgctagctttggggtttgcttgtgcttggatctctagttcttttagttgtgatgttaggtttttaatttgaggtctttctagctttttgatgtgggcatttagtgcaataaatttccttctcaacactcctttagttgtatgtcagagattctggtacgttgtctctttgttctcattagtctcraagaacttcttaatttctgccttaatttcagtatgtgctaaggagtcattcaggaggaagttgttcaattttcatgtagttttgtgattttgagtgagtttctcattgttgggttttaatttgattgtgctgtggtctgggatagtgttcgttatgatttcagttcttctgattaagtgacaaatttgagagtaagtcccttgtgatgatgagaa

SEQ ID NO: 873747 - DNA, 588 bp, Homo sapiens
gctagaggtctatccatgttattattattttaaaaaaaacaacttctggattcatttattttttcaagggttttttgtgtctctatctccttcagttcagctttgatcttgattatttcttgtcttctgctagctttggaatttgtttgctcttggttctctagttcctctagttggtatgttaggttgttgatttgagatatttccagctttytgatgttggcattttagtgctataaatttccctcttgacactgctttagctgcattccagagattctggtatgttgtctctgtgtttacattagtttcaaggaacttagtttctgccttaatttcagcatttactccagagtcattcaggagcaggttgttgaatttccatgtcactgcgtggttttgagtgaatttttaaatcttgagttttaatttcattgtgctgtgttttgagagactgttttatatgatttcagttcttttgcatttgctgaagcatgttttacttctgaatatgtaatcaatttttaagtaagtgccagggggtgatgagaagaatgtatattctgttgtttttgagtggagagttct

SEQ ID NO: 873748 - DNA, 631 bp, Homo sapiens
tatcaaaacatcaaattgtaacccataaatatgtacaataacaatgtgtcaatttaaaaatacataaataacaaataaataattattgctttagggacacaataaataaaggagagagagataaactgattgaagaaattgatagagcctcagaaaactataggacaatatacaatgtctaaattacttgtaattggtatctcagaatgagaagaaaaggaaataagcaaaataattacttgaaaaaatggcttacattttccaaattttaatttaaaaataaacttagagattaaagaakatcagacaagtcaagcaggataaacacaatgaaaaatatctctagtcatatcatagtcaaattactttgaaatgataagaaaatcatgaatgcaaacaaagaataaataacacattacattcaaaaacattgaatctaatgaccactgccatctcatatgaaacaatgtgggccagatgtaatgtaaacttatgtctatgttgaaatctaaacacaggtgtttatagcaactttattcataattgccaaaacttggaagcaatcaagatgtctttcagtaagtgaatagataaataaactatggtacatacagacaatggaacattattc

SEQ ID NO: 873749 - DNA, 573 bp, Homo sapiens
gagggcagccagaatgatccttttaaaatttaaatttggcttatcagttccctacttgagcccttcaatggttccccactgcattttgaataaaacacacagtctgatgatgagcattttttcatgtgtcttttggctgcataaatgtcttcttttgagaagtgtctgttttttacactgttggtgggactgtaaactagttcaaccattgtggaagtcagtgtggcgattcctcagggatctagaactaraaataccatttgacccagccatcccattactgggtatatacccaaaggactataaatcatgctgctataaagacacatgcatatgtatgtttattgtggcactattcacaatagcaaagacttggaaccaacccaaatgtccaacaatgatagactggattaagaaaatgtggcacatatacaccatggaatactatgcagccataaaaaaggatgagttcatgtcttttgtagggacatggatgaaattggaaatcatcattctcagtaaactatcgcaaggacaaaaaaccaaacaccacatgttctcactcataggtgg

SEQ ID NO: 873750 - DNA, 656 bp, Homo sapiens
ggtgttataactgtataattgtaacatgaattcacatcatgttgatatattagatgatatacaaaaacacttgtttttgtaggtcaaaaagtaatcaaatatcagcaatttcatgctatccaacctaatctcctcctatttttgtgcctgccctctaagttaggtatttaatcccgtacaatggatgaatgagccttggaggagttaacgctttataactgtgctttctcaggggaatgtaaaataatcaactggccctaatcaatgaaaagagttttgcatattcaaagttgacccagaagcagtcagcccttctcctagtctctggtactggggtctctagttagactcagagccaggacagtcctctgtactgaawgagctgtgggcacctgtgggcatattcttcttctctggtgatctctaatgatgccataaatccccagcaaacaggttcattgttcctctagatccaaactaacagtgagcagcacagacagcactgtggaaggctaatccataggatgaagccaagtggtggccgtaggtaggagtggaagggtcaccgtttctgtgggaaactgggtttggttatactaattaagtataataatttatgtgaaagataatattgggaatagtgtattctgtctgag

SEQ ID NO: 873751 - DNA, 656 bp, Homo sapiens
ggtgttataactgtataattgtaacatgaattcacatcatgttgatatattagatgatatacaaaaacacttgtttttgtaggtcaaaaagtaatcaaatatcagcaatttcatgctatccaacctaatctcctcctatttttgtgcctgccctctaagttaggtatttaatcccgtacaatggatgaatgagccttggaggagttaacgctttataactgtgctttctcaggggaatgtaaaataatcaactggccctaatcaatgaaaagagttttgcatattcaaagttgacccagaagcagtcagcccttctcctagtctctggtactggggtctctagttagactcagagccaggacagtcctctgtactgaaagagctgtgrgcacctgtgggcatattcttcttctctggtgatctctaatgatgccataaatccccagcaaacaggttcattgttcctctagatccaaactaacagtgagcagcacagacagcactgtggaaggctaatccataggatgaagccaagtggtggccgtaggtaggagtggaagggtcaccgtttctgtgggaaactgggtttggttatactaattaagtataataatttatgtgaaagataatattgggaatagtgtattctgtctgag

SEQ ID NO: 873752 - DNA, 577 bp, Homo sapiens
tgtacctgattttgaagctgaaacttaaagtggcatcttaaatttatgtaatgaaattagagaaaaatcatcttttaaaggcctatattccaatctttatttcattttatttatttatttttaaataaaatttgtacttactttttaaaggaatatatttaatttagcgtaattatttgatctggttagatacagattttatttcacttagaattagctaaaaactcaatttaaacaatataaaagtggataaaatagccttgtaaattatcaaggcagattggcataagacytgaattaaataaaatagtctcttgtgaaaataaaactaagttacaaagaatatgttgttttggtaaaattataacctttaccactttctgatatcttttccgctttccgatttttactagtatctgatgtttcaatatacagccttagcaaatactagatgataatgaatatttcatagatgaacaaaaacatgtttgtacttgctggtttgctttgatgtcttttaattgtaatagtctttatttgccctaacagaccaactacgaaaattctataatagatt

SEQ ID NO: 873753 - DNA, 555 bp, Homo sapiens
accagggtgccaacttgaaatccttgtcagctagtaatagttgctctatcacttggttatacatttcatccctaactcctctcaagctactgtcttataaagacgggttatggtatcaagggcaaaggaacagtggcagatcagcgcaaacaaactaaccaccagatgaactagtcctcaagtacattgcacagccagggagccggggtgccatgacgctaayaggctgcagaagagttgccccctcaaccaactctaccatgattgccagttagcctggtaataaattaacaaacatccagtgatttatattttatggataaaatggcttttattgagctcgtaacttccctaccattcagtgtaccaagtgctaagtattaagtacacattgtgctttcattggtgcttaaatcttatcttgttcgttctaacttccttaaaggtagggctgtgtgtctagctttgtaaacacacagggctgtgtgtgtattcttttggttcctttgtcagtgcataccacaatacttggcatacaagaagtatttcatatac

SEQ ID NO: 873754 - DNA, 599 bp, Homo sapiens
tttcttaaataggttccatttttaaatattcctattcagagtaaatagataacgtcaaaaattgtaagacaataatccacatgcttcttcattttcacatttattttgaattcatattagtcgtgtgaaaggcagtttcctattagataaaatccaaaatggaattaaaatctcccaaaaaacatttctattcttttcaatacatttccattttgctccatgtaatttttcgtgaagagtgataaaaattctttttcttattgtgatgtgattcttgtgtgttgtatatcgagtgactggactaccggcattctgtgtaaactctttgtactgtctcatttcctcattcatcactgtctgtcaatgggcatggtgctgtgaccagtgttatcaggtgacgacagtacaggaagtgagccgccaytatcacccccagaaaggctccccatcagacgctctagtaccagagacaaaaacagaagaggggaaacatgtttcctactgacgacaggtgattacacgtgtgcttctgatggagggatcaggaaaggtaggcatgcatttaatcagatcataacaggtgacttagcaataaactg

SEQ ID NO: 873755 - DNA, 669 bp, Homo sapiens
ctgaaactgtactccttccttacaccttataccaaaattaactcaagatggattaaagacttaaatgtaaaacccaaaaccataaaaaccctagaagaaaacctaggcaataccattcagaacatagacattggcaaagatttcatgacgataatgccaaaagcaattgcagcaaaaggcaaaattaacaaaagggatctaattaaactaaagggcttctgcacaactaaaggaactagcatcagagtgaacaggcaacctacagaatgggagaaaatttttgcaatctacccatctgacaaaggtgtaatatccagaatctataagaracttaaatttacaagaaaaaaacaaccccatcaaaaagtgagtgaaggatataaagagacacttctcaaaagaagacatttacatgaccaacaaacatatgaaaaaaagctcaccatcactaatcattagagaaatgcaaatcaaaaccacaatgagataccatctcacaccagtcagaatgtgattattaaaaagtcaagaaacaatagatcttggcaaggcagtggagaaataggaatgcttttacagtgttggtgggaatgtaaattagttcaaccattgtggaagacagtgtggtgattcctcaaggatatagaaccagaaataccatttgaccca

SEQ ID NO: 873756 - DNA, 627 bp, Homo sapiens
catacacttcaaggtctttgtatttgctcttcctttaggctctaatgctttctgccgagaccagctcagctggggagaccctaacccagtggcactagaggaattaaagacacacacacagaaatatagaggtgtgaagtgggaaatcaggggtctcacagcctttagagctgagagccccaaacagagatttacccacatatttgttaacagcaaaccagtcattaacattgtttctataaatattaaattaactaaaagtatcccttatgggaaacgaagggatgggccgaattaaagggataggttgggctagttaactgcagcaggagcatgtccttaaggcacagattgctcatgctattktttgtggcttaagaatgcctttaagcggttttccgctttgggcaggccaggtgttccttaccctcattcccgtaaacccacagccttccagcgtgggtgttagggccattatgaacatgttacagtgctgtagagattttgtttatggccaggtttggggccagtttatggccagattttgggaggcctgctcccaacaactttccttcctaataacacaaggccctgtacccaacttttttaaggattctgcaaaaatgt

SEQ ID NO: 873757 - DNA, 642 bp, Homo sapiens; identical to SEQ ID NO: 861699

SEQ ID NO: 873758 - DNA, 497 bp, Homo sapiens
ctactgtatgcttcctcttcttaaaactcttcctctctcctttttctggagatgtcaaatgcctcttctttgttataaaaaggcagcaacatccacacattaggaactgatctgctctgaggaaaggatttccccaacaytggatttccctgaaatgctaatacaagagaaaaaatattttcccaacttttaagactccttatctgttgctctttcatcatgaaagataccgatagttatttctaaataaataaataaattctgagtttttcaccttcttcacatgtgctcactcattgttcctaatgcgaaggactagcaacttccctcctatcaccccaggagcagaagggatagtaagtagcctacataatattctgctcaagaatgttttaaggcatcctaaaggaaacattctccaacagagtctgttttgttatgtgttcaataaccatatgttcatttctatgtggataatgtgcagcataacagatacc

SEQ ID NO: 873759 - DNA, 497 bp, Homo sapiens
ctactgtatgcttcctcttcttaaaactcttcctctctcctttttctggagatgtcaaatgcctcttctttgttataaaaaggcagcaacatccacacattaggaactgatctgctctgaggaaaggatttccccaacactggatttccctgaaatgctaatacaagagaaaaaatattttcccaacttttaagactccttatctgttgctctttcatcatgaaagataccgatagttatttctaaataaataaataaattctgagtttttcaccttcttcacatgtgctcactcattgttcytaatgcgaaggactagcaacttccctcctatcaccccaggagcagaagggatagtaagtagcctacataatattctgctcaagaatgttttaaggcatcctaaaggaaacattctccaacagagtctgttttgttatgtgttcaataaccatatgttcatttctatgtggataatgtgcagcataacagatacc

SEQ ID NO: 873760 - DNA, 611 bp, Homo sapiens
atccacaactgagtgctgacatgatgcaagttgaaaattttacatctgaccacatgtgtcaggtcagtcaaaacagaggcacaccatttgtgttccaaggggggaaaaacaccctccaagcctcctttagccatgatacatcttttctgcacatgcagattcccccatacaaacatgcccacaaaggaaaataagatggcgtgcaggctgggcacaccaatggcagatttcccacaatgccctacttggggacaagagctatrcaaagattattctaagtgttgggagcaggccccccctgaaatctggccataaactggccccaaaactggccataaaaacaaaatctttgcagcactgtgacatgttcatgatggccataatgcccatgctagaaggttgtgggtttatgggaatgagggcaaggaacacctggcccacccaaggcagaaaaccacttaaaggcattcttaagccacaaacaatagcatgagcgatctgtgccttaaggacatgctcctgctgcagttaactaacccaacctactcctttaatttggcccatcccttcgtttcccataagggatacttttagttaatttagtatctata

SEQ ID NO: 873761 - DNA, 577 bp, Homo sapiens
gttgaaaccccatctctactaaaattacaaagattagctgggcatggtggctggtgcctgtaatcccagctactccggaggctgaggctggagaatcgcttgaacctaggcagcagaggttgcagtgagctgagattgcaccactgcactccagcctgggcaataagagcaagactccrtctaaacacacacacacacacacacacacatacacacacacacacacacacacacaacagggatccatacgcaagcccaagcttctcaagttcaagaacatacggtgggtccagctcctccacccaaaaagttcagtggacaggcacccagcgtgacaccgcataactgctgaatttgagccacattataagaatgggctgtagttattcccattttacagaagaggggttgaggcccagagaggggcaggaagttgcctgaagccacacagcagcccagagccacgccctatcagaatctccaccccgtgcacctctcaggagatgctccaggggtgatgtggccagccaacaagcagtggggttaggatttgaacccgggtctgcctgctccacga

SEQ ID NO: 873762 - DNA, 656 bp, Homo sapiens
tacattttcctacttgtgttagattgtagacatataaaggctaaatacatgctccactcttagtgaaagttgatagaattctttaaactatcttttacccttccttaaacttttcatataattatattcaataatattatccatattgtataaaaattgtatgaaaatattttaaaaatcaggggagatatctawctctatatatagagagaaagagacctactagacacactgtgagttctgcaatggatttatctgtagcacttcttggcaatagcagtttgtgaaacacaaactttaatgcaatgctggatatcttaggacaatatactccattcatgtgcatagtgttaaattagaaggtaatcttatcaaataatgtaagcatcatgaatatagtattgtttgcaattacttccctagcacctagaaaagtaagtaacccttcataggaactgcaatgtgattgagtaacagtcaattttaagtttatcacaatttttgagaattactgaatacaaatacttttttgtgaaatatattttgtgccgttgtgaaatgcacatatgttagggcattaaattctgcttaagtggagtatggttaggaaatgtggtaatactcaaaagacctatctaggtgttatttttattgag

SEQ ID NO: 873763 - DNA, 666 bp, Homo sapiens
gaggctgacacgtggggtgagcaacgcactcggtggggcctttaaaaatcaccattatgaattctgcagcagtagtttctgctgaatcaacagccagcagaaagcaaaagggttcagcaagctgagctttgccaagaggtgaaattgtcgtctctccctctctcccagcttgttctgacataagcactagtgctgtgcgggcaggaagggaaagtcagcaggtggaatctcattctgccttttgtgtgtgaatagagagtakaggcattttttcccccagtgccaaaacttttgcatttttgctttcattttctacctgtaggccttttatccttagccactcatacaaagtgttgcattatcacattgtaatatccatgcgagaaaatgtatgtggaaatgctttaggacaatgttgcaaggtgtattaatttaaaattattattcttggatgctaacatttctgtaatatttaatcaaatcaaaagactgctagagaaatgtgatggggggagtaaaagagttcaagctctgaaagaaataaaaagacacacacacatctgggggtaaaggtggcatcttctataaacatccctggaagttctagacagaaagaatgtccagtgctattgaaagtatattctccatttgtcatcatttttggag

SEQ ID NO: 873764 - DNA, 507 bp, Homo sapiens
catcatactatttgttgctagaataccttggttttatttatttatttattgtatttttgttttatagttgctgtgagattcatcctttaaatgggttctattttaatgtgtttccaggatttgtttcaagatttatagttccttttagcagttcttgtagtgctggcttggtagtggtgaattatctcagcatttgtttgtctgaaaaagactgtatctttcctttatttgtgaagcttagttttgctgaatacgaaattcttggctgataattgttttgtttaatgaggctgaagatagggtcccaatcccttctagcttgtagggtttctgctgagaaatctgctgttaatctaatrggtttacctggtgtttctgcctcacagctcttaagattttttttttttcatcttaactttagatgatctgatgctgtgtgcttagttgatgatctttttgtgatgaattttccaggtgttctttgagcttctcttatttggatgtctt

SEQ ID NO: 873765 - DNA, 660 bp, Homo sapiens
gtggaagtaatgttaattgagtattggaagacaacattgtataaagtactcttcctagattctagacatctccaactagaatctacaagtgctgctgtacagagaagtaggttactacctagagggagacgccgggtggtgggagggtgtgtttgctttgcttgttttgcattttgttcaatagtgggagtgactgagcatttttgaatgtaagaatgtaaattacttaagccactatggaaaactattgggaaatttatcaaagaacttaaaacagaactrccattccacccagcaatcccattactgggtatatatccaagtgaaaatcaattgttttaccaaaaagacccacgtacgtgtgtgatcatcacagtactattcacaatagcaaagtcatggaatcaatccaggtgtccatcaatggtggattggatttaaaaaaatgtggtacatatataacatgaaatactatgcagccataaaaatgagtgaaataatatcctttgcagcaacacatatgcagctggaagccattatcctaagcgaattaacaaaggaacagaaaactacattctacatgttctcatttataagcaggagcaaaacactgggtattcatggacataaagattggaacaatagacactggagactact

SEQ ID NO: 873766 - DNA, 693 bp, Homo sapiens
cagctggggcccgagatcacagcgtgggaataagacagaactggacactgaccctcacaggcacgggcagccagctttgaattagtgccgtccccaggagacggaagtgatcttcttggtctaactgcaaaaaagaaaaattacggtaactctcatttaaagatagaaaaactctacacaaatgtttagcaaatgcgacccggcactagatagaaaaggcaatgtatcaagatcaagttgcaaggttagtttcacatctgaaaatcaataaaagtaatttgatgtggggccgggcgcggtggctcacgtctgtaatcccagcrctttgggaggccgaggcgggcggatcacgaggtcaggagatcgagaccatcctggctaacacggtgaagccctgtctctactaaaaatacaaaaaattagccgggcgtggtggcgggcgcctgtagtcccagctactaaggaggctgaggcaggagaatggcgtgaaccagggaggcggagcttgtagtgagccgagattgcgccgctgcactccagcctgggcgacagagcaagactccgtctcaaaaaaaaaaaaaaaaaagtaatttgatgtgggaaaaaaatcatacaatcatctcaatagaagcagaaaaaagcattttatacaattcaatgtttgttcttaatttttaaaaaggaactcttaag

SEQ ID NO: 873767 - DNA, 631 bp, Homo sapiens
caggagcagcaatgggtgcctcactggatcaggagcacagcagacaccctgcctgatctggaggcatggaagtcagcggcaggtctgccactgcggcaaacagcagtggtggacggtgagcgaaagctcagctcgagccatagcaaacacggaccagaagagtgcagttgcaagatttaatatagtgaaatagagtgaaaacagagcttccatacaaagggagggactcaaagagggtagcattgctggctcgaatgcatgggtttatatcccgatccttgttctccctgctgtgctctcaggcaatggatgattgtctatttctttaccttctgttyttgcctaattagcattttagtgagctctccttaccatctgattggttggatgtgagctaagttgcaagccccgtgtttaaaggtggaagtggtcaccttcccagctaggcttagggattcttagttggcctaggaaatccagctagtcctgtctctcagaattgcccttctcaactacagccacagggctcaacacctcctctcccttggatcaggagcatgtataaagacatccacacataagaacaaatctctgattctctgacccaaaataaggaaataagattacctag

SEQ ID NO: 873768 - DNA, 556 bp, Homo sapiens
ctgcaaagggctccaaatatccactagcagatcctacaaaatgagtgttacaaaactgctcagtgtaaaagaagcttctcctctgtgagatgaatgcacacatcataaagaagtttctcagaatgcttctgtctagtttttatgtgaagatattttcttttccaccatagccctcaaagtgctccaaatatccacttgcagattctacaaaaagagtgtttcaaaacttctcaatgtaaaggaagcttcaactctgtgagatgaatgcacccatcrcaaagaagtttctcagaatgcttctgtgtagttttcatgtgaagacattacgtttcccaccataggccaaaatgggctgtaaatatccacatgaagatcctataaaaagagtgattcaaaattactcattcaaaagaaaatttcaactctgtgagttgaaagcacacatcacaaagaagtttctaagaatgcttctgtgtagttttaatgtgaagatatttccttttccaccctaggcccccaagtgctccaaatatcccatttcagaaactacaaaaag

SEQ ID NO: 873769 - DNA, 654 bp, Homo sapiens
tgggatgaatgcacacttcagaaagaagtttgtcagaatacttttgtctagtttttatgtgacaatatttccttttaacaacaggtctcaaagcgctccaaatatgcacttgaagaatctacaaaaagagtgtttcaaatctgataaatcaaaagaaaggttcaactctgtgaaatgaatgcatacatcacaaagaagtttctcagaatgcttctttctagatttatgtgaagatatttccttttccactatagtccttaaagcgctccaaatatccacttgcagaatctacaaaaagagtatttcaaaactgytcaatcaaaagaaaagttcaactctgtgagttgaacgcacacatcataaagaagtttctcagaacgcttctgtctagtttttatgtgaagatattgccttttccaccataggcctaaaagtgctccaaatatccacttgaagattatacaaaaagagagtttaaaaatggcttaaccaaaatataggttcaactctgtgagatgaatgcacacatcacaaagaagcttcttagaatgcttccatgtagtttttatgtgaatatatttccttttctactagaggcctaaaagcgctccaaatatccacccacaaaattcacaaaaagagtgttaccaaatt

SEQ ID NO: 873770 - DNA, 654 bp, Homo sapiens
tgggatgaatgcacacttcagaaagaagtttgtcagaatacttttgtctagtttttatgtgacaatatttccttttaacaacaggtctcaaagcgctccaaatatgcacttgaagaatctacaaaaagagtgtttcaaatctgataaatcaaaagaaaggttcaactctgtgaaatgaatgcatacatcacaaagaagtttctcagaatgcttctttctagatttatgtgaagatatttccttttccactatagtccttaaagcgctccaaatatccacttgcagaatctacaaaaagagtatttcaaaactgttcaatcaaaagaaaagttcaactctgtgagttgaacgcacacatcataaagaagtttctcagaacgcttctgtctagtttttatgtgaagatattgccttttccaccataggcctaaaagtgctccaaatatccacttgaagattatacaaaaagagagtttaaaaatggctyaaccaaaatataggttcaactctgtgagatgaatgcacacatcacaaagaagcttcttagaatgcttccatgtagtttttatgtgaatatatttccttttctactagaggcctaaaagcgctccaaatatccacccacaaaattcacaaaaagagtgttaccaaatt

SEQ ID NO: 873771 - DNA, 684 bp, Homo sapiens
tttcttagaatgcttctgtgtagttttttctgtgaggatattttcttttccaccataggcctcaaaacgttccaaatatccatttcaaatactacaaaaagagtgtttccaaactgctcaatcaaaataaattttcagctctgttaggtgaatgcacacatcccaaagaagtttctcagaatgcttctgtgtaatttttatgtgaagatatttcccttcccattataggccaaaaagggctcaaaacatccacttgcagattctgcaaaaagagagtttcaaaactgctcaatcaaattatatgttctactctgtgagtggaacgctcacatcacaaagaagtttctcagaatgcttccttctagttttatgggaagatatttccttttacaccatacgccccaaaatgccccaaatatccacttgcagaaactacaaaaagagtgtttcaacactgctcaatrtaaagtaacgttcaactctgtgagatgaatggtcccatcacaaagatgtttctcaaatgcttctgtctagtttttatgtaaagatatttccttttccaccataggccactaagggctccaaaaatgcacttgcagattctacaaaaagagagtttcaaaattgctcaatcaaaagaaagtttcaactctgtgagttgaacgtacccataacaaagaattt

SEQ ID NO: 873772 - DNA, 657 bp, Homo sapiens
gtgctccaaatatccacttgcagaatatacaaaaagagtgtttcaaaactgcccagtcaaaagaaaggttcaactgtgtgtgttgaacccacacatcacaaagaagtttctcagaatgcttctgtgtagttcttaggtgaagatatttcctttttcactatgggaatcaaagtgctccaaatatccacttgtagattctacaaaaagagagtttccaaacarctcaatgaaaatataggttcaactctgtgagttgaacacacacattacaaagcagtttctcagaattcttctgtatagtttttatgtgacaatatttccttttccaccataggccacaaagcgctccaaatatccacttgcagaatatacaaaaagagtgtttcaaaactgcccagtcaaaagaaaggttcaactgtgtgtgttgaacccacacatcacaaagaagtttttcagaatgcttctgtgtagtttttaggtgaagatatttcctttttcactatgggcctcaaagtgctccaaatatccacttgcagattctacaaaaagagagtttccaaactgcttaatgaaaatataggttcaactctgtgagttgaacacacatattacaaagcaatttctcagaattcttctgtatagtttttatgggaagat

SEQ ID NO: 873773 - DNA, 652 bp, Homo sapiens
gaatgcttctgtctagtttttatgtgaggatgtttccttttgtaccataggcttcaatgcactccaaatatccacttgcagattctaccataagaatgtttcagcactgctcaatcaaaagaaaggttcaactctgtgagacgaacgcacacctcacaaagaagtttctcagaatgcttctctctattttttatgtgaagatatttccttttcaccaataggccacaaagcacttcaaatatccatttgtagatactacaaaaagagtgttccctaactgaccaatcaaaagaaaggttgaactctgtgagttgaattcacacatcaaagtgaaggttctcagaattcatctttctagtttttatgtgaagatattttcttttcatctacaggcctcaaaacactccaactatacattwgcagatattacaaaaagattgtttcaaaacagctcaatcaaaagaaaggttcaactctgagagatgaatgcacacatcacaaagaagtttctgagaatgcctctgtctactgtttaggtgaagatatttccttttccaccataggcctcaaagcgcccccaatatccattgcagattctacaaaaagagtgtttcaaaattgctcaatcaaaaggaagtttcaactcagtgtg

SEQ ID NO: 873774 - DNA, 652 bp, Homo sapiens
gaatgcttctgtctagtttttatgtgaggatgtttccttttgtaccataggcttcaatgcactccaaatatccacttgcagattctaccataagaatgtttcagcactgctcaatcaaaagaaaggttcaactctgtgagacgaacgcacacctcacaaagaagtttctcagaatgcttctctctattttttatgtgaagatatttccttttcaccaataggccacaaagcacttcaaatatccatttgtagatactacaaaaagagtgttccctaactgaccaatcaaaagaaaggttgaactctgtgagttgaattcacacatcaaagtgaaggttctcagaattcatctttctagtttttatgtgaagatattttcttttcatctacaggcctcaaaacactccaactatacattagcagataytacaaaaagattgtttcaaaacagctcaatcaaaagaaaggttcaactctgagagatgaatgcacacatcacaaagaagtttctgagaatgcctctgtctactgtttaggtgaagatatttccttttccaccataggcctcaaagcgcccccaatatccattgcagattctacaaaaagagtgtttcaaaattgctcaatcaaaaggaagtttcaactcagtgtg

SEQ ID NO: 873775 - DNA, 663 bp, Homo sapiens
ttatatgaagatatttcattaataagtcaggaaaaaacaggtgctggagagaatgtggagaaataagaacacttttacactgttggtgggactgtaaactagttcaaccattgtggaagtcagtgtggcgattcctcagggatctagaactagaagtaacatttgacctagccatcccattactgggtatatacccaaaaaattataaatcacgctgctataaagacacaggcacacgtatgtttattgcagcactattcacaataccaatgacttgcaacaaacctaaatatccaacaatgatagactggattaagaaaatgcggcacatatgcaccatggaatagtatgcagccataaaaatgatgatttcatgtcctttgtagggacatggatgaaactgggaaccatcawtctcagcaaactatggcaaggacaaaaaaccaaacatggcatgttctcgctcataggtgggaatagaagaataagaacacatggacacaggaaggggaacatcacacactggggaccagtgtggggtgggcagagtggggagggataccgttaggagatacacataatgctaaatgacaagttaatggttgcagcacaccaacatggcacatgtatgcgtgtgtaacaaacctgcacatggtgaacatg

SEQ ID NO: 873776 - DNA, 622 bp, Homo sapiens
cattcatctcacagagttgaaactttcttttgattgagcagttttgagacactctttttgtagaatctgcaagtggatatttggagcactttgagatctatggtggagaggaaatatcttcacataacaactaaacagaagcattctcagaaacttctttgtgatgtgtgcattcatctcacagagttgaacctttgtttttattgagcagtttggaaacactctttttgtaatgtctgcacatggattttggagcacttttttgcctatagttgaaaaggaaatatcttcacatgaaaagtagacagaagcggtctgagaaaattctttgtgatgtgagcattcattttacarcgttgaaacgttcttttgattgagtagttttgaaacacccttttgtagaatctgcaagtggatatttgtagcgctttgaggaatatggtggaaaaggaaatatcttctcatgaaaactagtcagaagcattctcagaaacttatctgtgatgtgtgcattgaactcacagagttgaactgttcttttgattgagcactttggaaagactcttgttgttgtatttgcaaatggatatttggagtggtttgaggcctatagctgacaagt

SEQ ID NO: 873777 - DNA, 627 bp, Homo sapiens
tgggagaagaactgctctcttcaaagctgtcagacagggacatgtaagtctgcagaggttactgctgtcttttgtttgtctgtgccttacccccagaggtggagtctatacaggaatgcaggtccctttgagctatggtggtctccccccagttcgtgcttcccagttgcttwctttacctaagcacgactgggctatgccaggtgaccatcccccagcctcgctgccacattgcagtttgatttcagactgctgtgctagaaatcagcgatactccaagggcataggaccctccgagccagagggtactttgaacccagagagatgaacctttcctttgatagagcagttttgaaacgtgtttttgtaagatctgcaagcggataattggcttcgcgttgtgtcctttggtggaaacgggaatatcttctaataaaaactagacagaaatattctcagaatcttctttgtgatgtgggcattcaactaacaacgttgaacatttcttttcacagagcagttttgaaagactcttttggtagaatctgccagtggatatttggagcgctttgaaagctatagtgccaacggaaatatcttcccctaaaatctagacagaagcattct

SEQ ID NO: 873778 - DNA, 627 bp, Homo sapiens
tgggagaagaactgctctcttcaaagctgtcagacagggacatgtaagtctgcagaggttactgctgtcttttgtttgtctgtgccttacccccagaggtggagtctatacaggaatgcaggtccctttgagctatggtggtctccccccagttcgtgcttcccagttgctttctttacctaagcacgactgggctatgccaggtgaccatcccccagcctcgctgccacattgcagtttgatttcagactgctgtgctagaaatcagcgatactccaagggcataggaccctccgagmcagagggtactttgaacccagagagatgaacctttcctttgatagagcagttttgaaacgtgtttttgtaagatctgcaagcggataattggcttcgcgttgtgtcctttggtggaaacgggaatatcttctaataaaaactagacagaaatattctcagaatcttctttgtgatgtgggcattcaactaacaacgttgaacatttcttttcacagagcagttttgaaagactcttttggtagaatctgccagtggatatttggagcgctttgaaagctatagtgccaacggaaatatcttcccctaaaatctagacagaagcattct

SEQ ID NO: 873779 - DNA, 670 bp, Homo sapiens
atctcacagagttgaacatttattttcattgagcagttattaaacacactttttgtggaatctgcaagtggatatttggagtgttttgaggactgtggtggaaaacgaaataacttcacataaaaactagacagaagcattccgtgaaacttccttgtgatgggtgcattcatctcacatagttgaatctttcttttgatagcacagtttggaaaaactattttcgtggtgtctgcaaaaggatatttggagaggtttgaggcctaggtcaggaaagaaaatatatttacattaacacaagacagaagcattctgagaaacttctttgtgttgtatgcattcatctcacagagttgaacctttcttttcattgagcaattttgaaacacccttttggtagaatcagcaagtggatatttggagccctttgagcytattgtggaaaaggaaatatcttcacataaaaactacacagaagcattctgacaaatttctttctgatgtctgcatttaactcaaagagttgaaagtttcttttgattgagcacttttgaaatacactttttgtaggatctgcaagtggttatttggagtgctttgtggccactcatggaaaaggaaatatcttcccataaaatctcgacagaagcattctgagaaacatctctgt

SEQ ID NO: 873780 - DNA, 646 bp, Homo sapiens
aaaaatccactttcagattctacaaaaagagagttttgaaactgctcaatcaaaagaaaggttcaagtctgagagttcaacgcacacatcacaaagaagtttctcagaatgcttctgtctagttattatgtgaagatatttcgttttccaccacagtgctcaaaacactccaaatatccacttgcagattctacaaaaagtgtgtctcaaaactgctcaatgtaaagaaaggttcaaatctgggaggtgatgcaaacatcagaaagaagtttcacagaatgcttctgtatagtttttatgtgatgatatttccttttccacaaraggcctcacagcattccaaatatccacttgcagaatattcaaaaagagtatgtcaaaactgctcaatgaaaagaaagtttcagctctgtgtgatgaatgctcccatcacagagaagtttctcagaatgtttctgtgtagtttttatgcaaagacatttcctttcccaccataggctgaaaagggctccaaatatcatcttgcagaatctacaaaaagagagtttccaaactgctcaatcaaaagaaaggttcaactctgtgagttgaacacacatcacaaagaattttctcagaatgcatctgtctggtttttatgtgaaga

SEQ ID NO: 873781 - DNA, 646 bp, Homo sapiens
aaaaatccactttcagattctacaaaaagagagttttgaaactgctcaatcaaaagaaaggttcaagtctgagagttcaacgcacacatcacaaagaagtttctcagaatgcttctgtctagttattatgtgaagatatttcgttttccaccacagtgctcaaaacactccaaatatccacttgcagattctacaaaaagtgtgtctcaaaactgctcaatgtaaagaaaggttcaaatctgggaggtgatgcaaacatcagaaagaagtttcacagaatgcttctgtatagtttttatgtgatgatatttccttttccacaagaggcctcacagcattccaaatatccacttgcagaatattcaaaaagagtatgtcaaaactgctcaaygaaaagaaagtttcagctctgtgtgatgaatgctcccatcacagagaagtttctcagaatgtttctgtgtagtttttatgcaaagacatttcctttcccaccataggctgaaaagggctccaaatatcatcttgcagaatctacaaaaagagagtttccaaactgctcaatcaaaagaaaggttcaactctgtgagttgaacacacatcacaaagaattttctcagaatgcatctgtctggtttttatgtgaaga

SEQ ID NO: 873782 - DNA, 573 bp, Homo sapiens
tttttatgtgaagatatttccttttccacaataggcctcaaactgccccaaatagccacttgcagattttacaaaagagtgtttcaaaactgctcaatgaaaacaaaggtacaactccgtgagatgaatgcacacatcacaaagaagtttctcagaatgcttctgtgtagtttttatgtgaagacatttcctctcccaccatagatgaaaagggctccaaatatccacttgaagattctacaaaaggagagtttcaaaactgctttatcaaaataaagtcagaatgcttctgtctagtttttatgtgaaggtatttccttttccaccataggcctcaaagcgacccagatatcgacaggcagaatacacaaaaagagtgtttcaaaactgctcaatgaaaacaaagtttcaacactatgagttgaacgcacrcatcacaaacaagtttctgagaatgcctctgagtagtttttatgtgaagatacttccttttccaaagtaggcatcgaagtgctccaaatatccacatgcagaatgtacaaaaagagtgtttcaaagctgctcaatcaaaaa

SEQ ID NO: 873783 - DNA, 578 bp, Homo sapiens
gagattgatttagtaatcaaaaacctgccaacaaagaaaagccccagactagatgactttaaaggtgaattctgccaagcatttaaagaactgttgccagtccttctcaaactcttctgaaaaactgaagatgagggagcactttcaaattcattttatgaggctaacattacatggatactagagcaagatggggacatgacaagaaaatcrcagaagaataactctgatgaacatagatgtaaaaattcttaacaaaatattagccaacttaacagcaattagaagtatcatacactatggttaagcatgtcaagggatcttatccctgatatgcaaggatggttcaacatatacaaatcagtaaaggttatgcaaacacattaacagaatgaagaatcataagattataaaatgcagaaaaagcatttgacaaaattcaacatccttctgagattagaaaactcaacaaattgtttatagaagaaaatgtaccccaaaataatagaagccatatataacaagcccacagctaacatcatactcagcagtgaaaagccgaaagctttttctctaag

SEQ ID NO: 873784 - DNA, 610 bp, Homo sapiens
acctaaataacaccagataaatgaggtgttactgtccacagtctcacaacagagacatgaaaaacccttctttacactggtaacccttaattaaactgaatttttggtgtgtcccttcaggagaaggtcaccatatcagcaataattaggggaaatggcattgtgaacattactggatgagatgtggtgtatttcttactttcaattattgcctccttgtttgaatcattagcatttggcagatttgttgctgaatttgttgttctgatttaaaactcggtgtaaggttgaatatgttcttatcttgatcttatatttctgcyatgacttgcatttcttgctgagtttctgacttgaattgctctatgtttttgctgagcttttgctttgtcttgttgtatttctatctggaggggtttccctccgcctttttctttttgttatatctcttctttggcctattgtatttctctggcccattcattagctttttttttcctttaaagttattctcttgttcagtatatgcagtacctaatcaatacgcttccttgcttgctgcaggatttccaacttactgtgttttctgtcagctttgatactgcctgag

SEQ ID NO: 873785 - DNA, 610 bp, Homo sapiens
acctaaataacaccagataaatgaggtgttactgtccacagtctcacaacagagacatgaaaaacccttctttacactggtaacccttaattaaactgaatttttggtgtgtcccttcaggagaaggtcaccatatcagcaataattaggggaaatggcattgtgaacattactggatgagatgtggtgtatttcttactttcaattattgcctccttgtttgaatcattagcatttggcagatttgttgctgaatttgttgttctgatttaaaactcggtgtaaggttgaatatgttcttatcttgatcttatatttctgccatgacttgcatttcttgctgagtttctgacttgaattgctctatgtttttgctgagcttttgctttgtcttgttgtatttctatctkgaggggtttccctccgcctttttctttttgttatatctcttctttggcctattgtatttctctggcccattcattagctttttttttcctttaaagttattctcttgttcagtatatgcagtacctaatcaatacgcttccttgcttgctgcaggatttccaacttactgtgttttctgtcagctttgatactgcctgag

SEQ ID NO: 873786 - DNA, 678 bp, Homo sapiens
ttaaatctcctgatattattccacatgttatcgatctgtttattttttaacctatttttctcttcatttttctttggttacttcataatgatatgtgtttaaattcattaatcttttattctgcactgaccaatttgctattatacttatccaataaagtttttattgtaaatttatacttttcagatctagaatttccattttatttcttcttagagctatcatttatctcttaaaatattttatcttttcatccattatatgaattttacctttaattttttttaaatgtttacaatatttgctttaaattctttgctttctaattayagtaatttggcaatctgtggatacatttctactgacttatgtagaactgaagttgggctttaattgtatttagttcacttgtgtttagctcaaccttcaaccattggtgatgccaccttttggatcttatcctcatttgagctagcgggggacttggctgggactataaatatttttggctcatatttggattaaatttattcataattctggaatccaatcatggcaagatttcataggaatccacttctagggcctcttcaactgactttatcttagcaaaattcaagtgtggaggataatagtgtaacctggggctgagctacttgctttggcatttagactttt

SEQ ID NO: 873787 - DNA, 678 bp, Homo sapiens
ttaaatctcctgatattattccacatgttatcgatctgtttattttttaacctatttttctcttcatttttctttggttacttcataatgatatgtgtttaaattcattaatcttttattctgcactgaccaatttgctattatacttatccaataaagtttttattgtaaatttatacttttcagatctagaatttccattttatttcttcttagagctatcatttatctcttaaaatattttatcttttcatccattatatgaattttacctttaattttttttaaatgtttacaatatttgctttaaattctttgctttctaattatagtaatttggcaatctgtggatacatttctactgacttatgtagaactgaagttgggctttaattgtatttagttcacttgtgtttagctcaaccttcaaccattggtgatgccaccttttggatcttatcctcatttgagctagcgggggacttggctgggactataaatatttttggytcatatttggattaaatttattcataattctggaatccaatcatggcaagatttcataggaatccacttctagggcctcttcaactgactttatcttagcaaaattcaagtgtggaggataatagtgtaacctggggctgagctacttgctttggcatttagactttt

SEQ ID NO: 873788 - DNA, 596 bp, Homo sapiens
gtacccaataatgggatttaataggattgctgggataaatggtagttctattttaagttccttgaaaaatcaccaaaatgctttctacaatggttaaactaatttatattaccaccagtagtgtataagtgatcatttttccacaaccttgcgagcatctataattgtttgactttttaataatatccattctgactggtatgagatggtttctcattgtggctttaatttgcatttctctaatgaatagtgatgttgagcattttttcatacgcttgttggccatscatatgtcttcttttgaaaagtgtttgttaatgtcctctgtccacttttttaaagttgtttgctttttgcttatcaatttaagttccttagagtttctgtatattaggcctttgtcagatgcacagtttgcaaatatttctcccattctgtgggttgtctgtttactctgttgatagtttctttagctgtgcagaaaatctttagtttaattagatctcatttgtcaatttttgttttggttgcagtggcttttggagatatcattataaaaccttcgcaaaggcctatgtccagaatggtatttccca

SEQ ID NO: 873789 - DNA, 599 bp, Homo sapiens
tgagatgtaaaaaaagacacaaaagattaaagaaactaaaagttggcttttggaaaaataaataaaacagacagactcctagctagactaacaatggcaaaaaagagagaagatccaaataaacataatcagaaatgataaagggggcattaacactgaaggcatagaaatacagaaaaycctcagaggctatgaccatctctgtgcacacaaactagaaaacctagaagaaatggatgagtacctggaaacatacatcctccaaagactgaaccaggaagttgaaatattagaccaataacaagttcagattttgaaacaatgagaaaaaatcttaccaaacagaaaaagccccggaccacatgtattcacagccaaattctaccagatgtataaagaagagctggtatcagtcttactgaaaatatttcaaaagattcagatggagggattcctccctcattcattgtatgaacctggcctcattttgataccaaaacctggtaaagacacaatgaaaaaggaaaacttccatccaaaatccctgatgaacacagaggcaaaaatcctcaacaaaatgctagcaaaccaaatccagc

SEQ ID NO: 873790 - DNA, 566 bp, Homo sapiens
catgggaatcatctagctatgcaaattgtagtctactcatgtctatataagagttgcctagaggagagatgaggcatgatatgggcacaaatatcatgctaagaaaggtaagaaaagaaggcaacactgagaattttgctttaatactatttttatacttatcaattttgtccccacatatttcctttgttgtaatttgtttagtaaaaatatgaaaaagaagactgtttgtataaaatgatttcaaagtacaaacaacatttaagtgcctrtatcatttagaggtccatgcataagttatagaaacattctgctttcactttcttttagaataaactgtcatttttatttcgttaaaagttaagaaaacatattgttgcacaacagtgatgaataaatgccaaaactcgtttattttctcatagagcataatgtaatttgatttttggaaatttttagcaaatttatgcacttggtcctgcaagtgttgcattgctccaattgatggtgtgttaatgccataatcaccacaattgataaacttgatatcaattgtaatgactgca

SEQ ID NO: 873791 - DNA, 650 bp, Homo sapiens
gataaataggtcctaaatccagataaatgacagtggctagttgctggctacttaaaactaggaggctccagaacaagcaaaatgaaaaagcagtagtagtgttttacatattcagacactggtttataacttgacaaaattcagatacgattatgttgaaatgataatatgaggaaacaacatcagaaataaggtgtagaaggtaaaaaacaggaattgtagggtggcaaggatggttttcattttttcagactagcttacagagaatcttgagtatcagtaaatctcaaatgccttaaaggtaatttgatagttaatagaaaccattaaaatattttagaaatttgtcaattcctcaacaacagtatttgattagaatgttggccatgtctgtaatgctcagaataccctctttatgtgtgttattacttttttcaaattcagctgatatctatcttctttttatggacatattcaatgtcttstctcttcctcctccaataaacacagaagacaatatctcttctctcaaaatgtctgttacttaatacacacttctatcagggcatcttggccatattttgttattgtaattgtttatatacatttcacatatctactgggggaaaatataattattaagtttgaaa

SEQ ID NO: 873792 - DNA, 607 bp, Homo sapiens
tacatttaagtaattgatccatcttgagttgatttttgtataaggtgtaagaaaggggtccagtttcagttttctgcatatggctagccagttttcccagcaccatttattaaatagggaatttttccccattgcttgttgtgtcaaggttgtcaaagaacagattgttgttgatatgtggtgctatttctgagggctctgttctgttccattggtctatatctctgttttggtaccagtaccatgctgtttttggttactaccaccttgtagtatagtttgaagtcagatagcatgatgcctccagctttgttctgmttgcccaggattgtcttggctatgcaggttctttttttggttccatatgaaatttaaagtagttttctccaattctttgaagacagtcattggtagcttgatggggatagcatttaatctataaattactgtgggcagcatggccattttcatgatattgattcttcctatccatgagcatggaatgtttttccatttgtttgtgtcctctcttatttccttgagcagtggtttgtagttctcctggaagaggtccttcacatcccttgtaagttgtattcctaggtat

SEQ ID NO: 873793 - DNA, 650 bp, Homo sapiens
ggtcagggatccacttgaggaggcagtctgacccttagcagaccttgaatgctgtgctgggaggtctgctcctctcttcagagccatcaggcagggacatttaagtctgcagaagctgtgcccacagctgccccttccccsaggtgctctgtcccagggagatgggggttttatttatcagaccctgaatggggctgctaactttttatcagagatgccctacccagagaagagaaatctggcaatctggccacagcaaccttgctgagccacagtggactccacccagttggaacttcccagtggctgtttacaccgtgagcataaaaccgcctactcaagcctcagtgatggtggacgcccctccccccaccaagcggggggcatctcaggttgatctcagactgctgctgtgctggcagtgagaatttcaagccagtggatcttagtttgctgggctccattgtgggtgggacctaccgagccagaccacttggctccctggtttcagcacccctttccaggggagtgaatggttctgtcttgctggcagcgttccaggcaccactggggtatggaaaaaaataactcctgcagctagttcagtgtctgcccaaatggcagcccagttttgtgcttaaaaccggggc

SEQ ID NO: 873794 - DNA, 589 bp, Homo sapiens
ttcgcttttgtttgttggaatattttaaaattatcttctcacattttctcacaccattcatgcttctacctcttgttcttgctatctctatcaaagacaattgaattacattttcatgtagatcatactttaagaataaaatgtcttcttaggattttgagaaacttayatgaggttagaacaacactttcctcatttaagtccatttatgtccgtaatttctgggtaattttagggcttttggttttagtttgtagctatttcattgttaaagtttctaattgtgtttccatgttttttattggttttgtttattttgtcatcatccatattcagaattatttaagaatcattttttcttatttttatacacattttatttcagaatactttcagatttacataaaaaaatcacatcttatattagtgtagtaaatttgtcacagctaatgaaccaatattgacacattagtgctagctgaaaaatacactttatccaaattttcttagtttttacctgattttttttctgttccagctttccatctaggatattacattacattttgtgttcataccttctaagcta

SEQ ID NO: 873795 - DNA, 589 bp, Homo sapiens
ttcgcttttgtttgttggaatattttaaaattatcttctcacattttctcacaccattcatgcttctacctcttgttcttgctatctctatcaaagacaattgaattacattttcatgtagatcatactttaagaataaaatgtcttcttaggattttgagaaacttacatgaggttagaacaacactttcctcatttaagtccatttatgtccrtaatttctgggtaattttagggcttttggttttagtttgtagctatttcattgttaaagtttctaattgtgtttccatgttttttattggttttgtttattttgtcatcatccatattcagaattatttaagaatcattttttcttatttttatacacattttatttcagaatactttcagatttacataaaaaaatcacatcttatattagtgtagtaaatttgtcacagctaatgaaccaatattgacacattagtgctagctgaaaaatacactttatccaaattttcttagtttttacctgattttttttctgttccagctttccatctaggatattacattacattttgtgttcataccttctaagcta

SEQ ID NO: 873796 - DNA, 629 bp, Homo sapiens
acccagtaatgggttgctgggtcaaatggtatttctggttctaaatcctttaggaattgccacactgtcttccacaactgttgaactaatttacactcccaccaaaagtgtaaaagcatttttctgcatccttgccagcatctgttgtttccagactttttaatgattgccattttaactgccgtgagatggtrtctcattgtggttttgatttgtatttccctaatgaccagtaataatgagacttttttcatatgtttgttggccacataaatgtcttcttttgaaagtgtctgttcatatctttcgcccactttttgatggggttgttcgtgtttttcttgtaaatttgtttaatttccttgtagattctggatattagacctttgacagatgggttgcaaaattttctcccattctgtggattgcctgttcactctgatggtagtttattttgctgagcagaagttcttcaatttaattagatcccatttgtcaactttggaatatgtgatgccattactccattaaccagaacacatggatcaagaaaatcaggaatggaagaaagggttcatctctccattatttctaagaaaccatataaatatgtgtgtatgcatattgtt

SEQ ID NO: 873797 - DNA, 444 bp, Homo sapiens
tgttctgtccatcactgcctcttacctcctagcaaattcaacactggcgtttttttttctgagcaagttgagctgcatttttgggacaggagccatggctgtgtgtgctggtgctgaagggagggtctgcagggacggccacacggatggctgtgtgtgctggtgctgaagggagggtctgcagggacggccacgcggctctcgggagcygtttcctgcgctcgggctctgcaccggcaggctccacgctgagggtccctccacatccaccccatcgtgggagggaggctcagtgctctgcaggggcctgagcagtcggggagacaccccctgcccacagccaccctctctgggctatgtgggaggtgcccacgtttccacgccttcctcgtggagggtgtggcgggctgtctgtgccgcgggggtactcggctgcactgtgca

SEQ ID NO: 873798 - DNA, 703 bp, Homo sapiens
tttgaattttggttctatatcttcaataccttttttcccctcttaaataaagatgtcactaatcaatggaattaccttaaaccatgaccctttacctctctgggtcttgttcttcaccataaaggaagctagagcagttggtctctcatgtttcctctatgtgataaagattgactgttttcaaaaaccaaatctaccttcaaattaggccatttttgcctctattgagtatgttgctaaactaacctgagagcttagtttaaaagcagttggtgtaaaaaagaaactccttcaagttttaactgacttcaacttttgcatgaaaaatggctatttcaccctggaaggtcctgggttctccatgtcccatycaacttgtatacctcccactctcaaaagtgttgaggtttagaaaagaaatgatttggtcacccaactgcaaatgatgagggaacccagctgcctggcaaatgagcagtcccttaggtcttccggcagaaactgaggcacggcctctctcattctgcaatggccaaagctgctgccttggaacctgctgttggagtctggggacccagaaaaagtgcagcatatatggaggaatctagaaccacatcatatgagaaatgatgttaggaacgcaggatgtttggcctggagaaagttcagtgacgacatgatagctgactttaaatgttttaaa

SEQ ID NO: 873799 - DNA, 389 bp, Homo sapiens
acactcttccaacttatctgattctagcctttcactgctgttgaacgattttacctttctagtttctactgaaaaaaactgatagcaaagcaaaataacacttgtctctaggcatgtaaattctgcctggcggaggttcaaccgacatcccttctccactatgtaagaagccactgctaccttcatttgtgagtcatttcaatattcctcatctataaatctawctgttccctagattctccgtttgaactggttgtaacatcttactggttccttcatttaattaatgagttaaataaaataaaatatctaagttaaataaaactttttacgacatacacacaacaaggaataggtagataactatgaaagggaaaactgcgagactc

SEQ ID NO: 873800 - DNA, 581 bp, Homo sapiens
gttctaaaaatatatgcactcaacacaggagcactcagattcataaggcaagttcttagagaccttccaatagacttagactcccacacactaatagtgggaggctttaacaccccactgacaatattaatcagataattggaaaaaaagttaacaaagatattcgggacctgaactcagcactggatcatataaaattgacagatatctatagaactgaccatccaaaaacagcagaatatacattcttctcatcatcacatgacgcatattctgagattgatcacatattcagaagtagagcacttctcagcaaattcagaggaattgatataataacaaacaatctttcagaccacagcgaatcatattggaaatcaagactaagaattcactcaaaaccctacrattacatggaaattaaacaaactgctcctgaattatttttgggtaaataatgcaattaaggcagaaatcaagaagttggttgaaactaatgagaacaaagaaacaacataccagaatatctgggacacagctaaagcagtgttaagagagaaatttatagcactaaatgccca

SEQ ID NO: 873801 - DNA, 581 bp, Homo sapiens
gttctaaaaatatatgcactcaacacaggagcactcagattcataaggcaagttcttagagaccttccaatagacttagactcccacacactaatagtgggaggctttaacaccccactgacaatattaatcagataattggaaaaaaagttaacaaagatattcgggacctgaactcagcactggatcatataaaattgacagatatctatagaactgaccatccaaaaacagcagaatatacattcttctcatcatcacatgacgcatattctgagattgatcacatattcagaagtagagcacttctcagcaaattcagaggaattgatataataacaaacaatctttcagaccacagcgaatcatattggaaatcaagactaagaattcactcaaaaccctacaattacatggaaattaaacaaactgctcctgaatkatttttgggtaaataatgcaattaaggcagaaatcaagaagttggttgaaactaatgagaacaaagaaacaacataccagaatatctgggacacagctaaagcagtgttaagagagaaatttatagcactaaatgccca

SEQ ID NO: 873802 - DNA, 679 bp, Homo sapiens
aaaataaggtagtttactttctaatctttgatatgctggtatcacatttgctcttgacttactctccacctaccacacaccatggtttctgccattcttgtaatttcataactcctctcaatactattgataactaaactgataatatggacaatttagatcataacacatttactaatcccttgctgaatatataacaagatttaatttgggattcccttggaactctggctctcttagccaatcatttagaaatttttaartcttaattcttaatgaatccttgatttttgctgaaaatgttctaccaagaaaatgaaaacagtaataaattatgaatttaagtagtagatccaatagtattattatattaatgtttaatttttcccacatgtgttttgtaattattttgccagcagaattttttaaatactctgtttagttagataaaagattagctcatcaagtatttactgaatccaaatcattactctattacggaaaatgtaacagaaatatgaaataagccttttcagggaaacttatatttcctttgacaatgagctgaacaaaagttgtaatgccagaataacttttttgcaatgtattttatttatagacttaaatgtgtaaaacaaattttattggtatcttctttgttcatttttggttgttataa

SEQ ID NO: 873803 - DNA, 654 bp, Homo sapiens
tatatgtatgaaaatatttaaatcagataaaagcctaggagcatgttgtttaatgcctctatgctggggcattaaatatcaattgcaattaagcctgtgagccatgtatctgatttatgatcacactcagaaatggaattgagctcctatatatctcacacatcatgttccgtagaactaaatagttaaaaatgtgagtcatttatgcyggtccctgacaacatttcaaattctttaatgtgaagctagaaagcatcatagggagcttttctattttttagaggaataagagcagtacttccaagaatccaattattctcaattaaatgagttctgcaaaagtaaaggcctgatttcactattaagaggcagaagttagcaaccaacagaagagtagagtatgtatgtagacttttcccatttagaaaaaaaaagtgcagctcactgacagcactcattaaattttacgtaaacatgctcttcgaagctgaagcaaatctgactaattttcaatgtgaaaataaaatataaaaaactgttttttggagctatttctaaacagagctaatatcagaattgtctgagtcatcagaatcgtctatttcagaaaaattggatttatcaaatgaatctacaaccaaaaattgttcgaga

SEQ ID NO: 873804 - DNA, 633 bp, Homo sapiens
gttccttgtactagtctatcaacttttataaattttaactcttccaaaataaaaaggtaaaacataaataaatttagggttctatataacccaaggagttatgtctaaaagaaaaaatgtaatattccaacttcatttatgaccttattagtattcaacatcttaggaaattttcacatttatttctagtaagctctctgaaaagtgataaataatacaacaattttaaaacttagaagtgtgaaacataagcatacattttgcctccaacaaaaagtccttcctcagatgttatcatgtagctgataaccccacaaagtggtttaaaacaatttttttaaacactygttcttagaacttttatgttcagagagctccatatcatgtgatccaagtactctctacacatgactttcctgccaaatgatatccacactcttactgaacttctcttggagtggggaataggggtcaagccttctaaggtaatttcaactttgcatagctctatgactgttaagatgttattccacctatatggctttgatgaatgagtgtagtactacatctgcataacagcctacaaaatatttggaaatagctcatatgtcaccctgaagctgaatagtccct

SEQ ID NO: 873805 - DNA, 674 bp, Homo sapiens
tgatgtcgcagtaggccaaagtcacatgacctcaccctttcacttgaagataactaaagaaagacacatggtgagccataaatgttctatagaatatgcagccacctatacagtgtgttttgaaaagtctttaaaattcagtatcttttaaataaacctgaaatttctattattagaaacaatccttgcrgttaggcattgatccagaaagcttccataaatgcaactatagtatgtacagtgaatgaaatatgaatggtctttatcactgaattcacgagaattcatttttagatgaaatatatcaggcaagaggtagaagggacagagaaaatactgtcagaaaataaagaagagaagaaagttctgttgaggcaagaaacccagctaaagtaacataaaactatgtgtggtagggtggggatatgtccagcaacccaaagaaccttgtgacatttctgtataccaggacagaatagatcattgaagaaaattgagactggcatccttgcttggtaagtttgtctaagaccaaccataaaatctccctgctaaggttttttgggttttggggttttgttgttgttgttgttttaaatcctggtccttgaagctgttgcatttccctacctttaatgaaaatggagctttctataattcagaataaaaataat

SEQ ID NO: 873806 - DNA, 567 bp, Homo sapiens
aaatgacaagagccaagccctttggggagccggcactgagatccattttctgtacatttctgcttgctttgtgtgacctggaagcctattaaaaccttgcctagacagagcaagactccgtctcaaaaaaaaaaaaaaaaaaaaaaaaaaaaaacccttgcctaaraaaaaattctgttgggccgggggttcatttctatttacttgagagtcaagaattcatagtctgagcttcagtaaaaacatcactaatcatcagggaaatgcaaataaaaccacaatgacatattacctcacacttgtgagaatagctataataaaaaagacaaaagataacaactgttaacaagaatctggagtaaaaggaatcctggtgcactgttggtagcaatgtaattcagtacagccattaaggaaaatggtatggaagttcctcaaaaaattaaaaatggaactatcatatgatctagctatcctacttctgggtatgcattcaaaggaattgaaataaggatttgtaagatacatctgaactcccatgtgcatttcagaattattcacaatagc

SEQ ID NO: 873807 - DNA, 567 bp, Homo sapiens
aaatgacaagagccaagccctttggggagccggcactgagatccattttctgtacatttctgcttgctttgtgtgacctggaagcctattaaaaccttgcctagacagagcaagactccgtctcaaaaaaaaaaaaaaaaaaaaaaaaaaaaaacccttgcctaaaaaaaaattctgttgggccgggggttcatttctatttacttgagagtcaagaattcatagtctgagctkcagtaaaaacatcactaatcatcagggaaatgcaaataaaaccacaatgacatattacctcacacttgtgagaatagctataataaaaaagacaaaagataacaactgttaacaagaatctggagtaaaaggaatcctggtgcactgttggtagcaatgtaattcagtacagccattaaggaaaatggtatggaagttcctcaaaaaattaaaaatggaactatcatatgatctagctatcctacttctgggtatgcattcaaaggaattgaaataaggatttgtaagatacatctgaactcccatgtgcatttcagaattattcacaatagc

SEQ ID NO: 873808 - DNA, 590 bp, Homo sapiens
aacatcatagaattcccctaaggtgtaatgcacattaggagacatcttttgtcaaaattaagtacaaaagagagccattataatgaaaatacttatggaaagcggtgataagcagaaattaaatttatttggtaggataaaaggaaaaaaatcagttttaaaattagggcttgacaatgtttaaactacttaattatagacgtatgcaatcattgattttctgtcaaaatgcattagtattgtgtgacagaaattttttatgtgaattagccacagttgttgctttattgaaaggttattttaaacaggcagcaagaagtgaagttacgtattttgatggctatatgtgcacaaccctaattgtagaaraaatttattaattatcccttatagttaataatgtaggctgctaaactggttcagactccaaatggatttttatgacctgaagtacaaagtttggttaactaatttaaccatataatttttagcctccctactataatgctattttttaattatctatactttggtcagaagaaagctctatcatatcatctttagatgctcagatgttctatttgtatccc

SEQ ID NO: 873809 - DNA, 691 bp, Homo sapiens
aaaggctcctggaactgacaaatggcttcagtaaagtttcagaatacaaaatcaatgtatgaaaatcagtagcatttctacaaaccaataatgttcaagctgagagccaaatcaagaacacaatcccatttactgtagctgccaataataataataataataaaatacctaggaattcatctaacaaggaggtgaaagatctctacaaggagaattacacagcactgctgaaagaaataacagatgacagacaactggaaagacattccaagctaataggttggaataatcaatatcattaaaatgtccatactgctcaaaacaaactacagagtaaatgctactcctatcaaactaccaatgtcatttttcacagaactagaaaacactattctaaaattcgtacggatccaaaaaagagcccraatagccaaagccatcctaagcaaaaagaacaaagccagaggcatcacactgacttcagagtatactacagggctacagtaaccaaaaaaagtacaaaaacagatacacagaccagtggaccaagaaataaagccatacacctatacccatctgacaatctttgataaaggcagcaaaaacaagcaatagggaaaggagtccctattcaataagggtgctgggatagctggctagccatatgcagaaaaatgaaactggtccccta

SEQ ID NO: 873810 - DNA, 604 bp, Homo sapiens
ttagttctggaagcaattcaacccacatcttccttggggcccggcctcagtcagtgcaaaaaggcagaaatgagtctacggcttcccaggatccctagttgtttcctttatctttcttgtacataagcctttcacttctccttagaggcccaggttgtaagtcattgtactctgccatgcattttttttttttttttgccacttttatacatgtgtaaagaaaggtgaggttttttgggaaacgaatatcagacattgctcagtatgttggagagggatttggacttggatttaggattgaaggcatttcctttacatttgaaagcttatcccaaaaaaggaagtgtgatgctggaaagagtctcaaatgagaatcaggagcacatgggttctgggctgagatcagattctgagctgcactatggytgtgaatagccacattgagtgacttcacacttcattcagtaattcagtgtgcctgtagatccaaatactagtgttcaatccagccctgtagaaggcaaaacttcaccattgttggagtgcccacaagagtctctttccaggcccttggccttttaaaaataagtggacaaatttgaca

SEQ ID NO: 873811 - DNA, 560 bp, Homo sapiens
catcaggtagttctcgtgccatgtttttcagctcagtcaggtcatttaaggacttctctacactggttattctagttagccattcgtctaatcttttttcaaggtttttaacttctttgcgttgggttcgaacttcctcctttagcttggaraagtttgatcgtctgaagccttcttctctcaactcgtcaaagtcattctccatgaagctttgttccgttgctgtcaaggagctgcgttcctttggagggggagaagtgctctgatttttagaattttcagcttttctgttctgttttttccctatcattgtggttttatctgcctttggtctttgatgatggtgacatacagatggggttttggtgtggatgtcctttctgtttgttggttttccttctaacagtcaggatcctcagctgcaggtctgatggagtttgctggaggtccactccagaccctgttttcctgggtatcagcagcagaggctgcagaaaaatgaatattgctgaatagcaaatgtttctgcctgatggttcctctggaagctttgtctcagt

SEQ ID NO: 873812 - DNA, 560 bp, Homo sapiens
catcaggtagttctcgtgccatgtttttcagctcagtcaggtcatttaaggacttctctacactggttattctagttagccattcgtctaatcttttttcaaggtttttaacttctttgcgttgggttcgaacttcctcctttagcttggagaagtttgatcgtctgaagccttcttctctcaactcgtcaaagtcattctccatgaagctttgttccgttgctgtcaaggagctgcgttcctttggagggggagaagtgctctgatttttagaattttcagcttttctgttctgttttttccctrtcattgtggttttatctgcctttggtctttgatgatggtgacatacagatggggttttggtgtggatgtcctttctgtttgttggttttccttctaacagtcaggatcctcagctgcaggtctgatggagtttgctggaggtccactccagaccctgttttcctgggtatcagcagcagaggctgcagaaaaatgaatattgctgaatagcaaatgtttctgcctgatggttcctctggaagctttgtctcagt

SEQ ID NO: 873813 - DNA, 670 bp, Homo sapiens
gggctggaatttctttaacatatatgaaaagtcaaactgttaaaacaggtgtatagcatgaaaggtgattctttgaagagggaaattctacatgttctcataaatttcagtgtatggccttataataagagttcatttaatccttacccaaaactatcatacattttgaggcacttctataagagtgcccccaaacacaaaaggtaatgggaaaaacatggactgtcaaacaaccattcaaatcttggtcttctttattcataaaaattaattgtgaatgcatttattcagttgatccttaaaccaatcctatgagaagcaaagtctgtccatcaatctaaatgaccaaagagaaaaattgacaaactttaaggatatatgtgtataaatatggagatgtgcacttttgaaataacccttcaggaaggttataagaagttcaaggatttctgaagaaaataccttttcctttatagagcaggaccaagacccaccagtcttrtattttttcattatctgatattcttttgtcattggcacagttcattgcctactactctcatccagcatgaaaccaaatcaatgctcacaattctcaggtcaatttccagtatgttgaagtcatccttgtatagtgattttctattgtatcctaaaaaattaccataaa

SEQ ID NO: 873814 - DNA, 581 bp, Homo sapiens
cttcttctctctctttccttgtcatctttttttttcattttaccacaacttatcattgtaactgaaatgtgcagatgctctgtgcccatgtgaaaatgcaacagctgtattagtgatggtacacaacctcgattacaggtaaatatcctaaggacaaaaaactggctcttcttctttatcacaacactagctactaatgaattatgtgataatttgtcaagtgcttgtactattggctatgtaattatgtggaaatcccctgctgaaaacctgaaacctgtccctgaacttcatatatatattttggagatggagtcttgctctgtcacccaggctgragtgcagtggtgtgatctcagctcattgcaacctctgcctcctgggttcaagcgattctcctgcctaagcctcccaagcagctaggattacaggcatgtgtcaccacacccagctatttttttttttttttgttatttttagtagagacagggtttcactgtgttagccaggatggtctcgatctcctgacctcatgatctgccagcctcggcctcccaaagtgctgggattgcaggaatgag

SEQ ID NO: 873815 - DNA, 599 bp, Homo sapiens
cacattgcttttggatggctaaacagcatccatcctgtggggccatgtgggaatatgatgcttttgcttgactcaccacttctacccctggggaatttatctgcagatacttgtgtatgtgtacaaaaatgtgcacacaaagtcattcactgtggcactgtttaagcttcaaaatattggaaacaacaaaattgtcaattagaatattgctaaataaatgatggtttactcatacaattaaatgttatgtggctgaaaaaaagaatgaggacactatgtaataatttggaaaaaattctaaaatatattactaagtgaaaaaacaaagtagggaagaatgtttcagaaaaggmtaacttttgggtaagaaaatgggagaaataagaatatatatttgcccagcgtggtggctcgtgcctgcaatcccagcactttgggaggccgaggtgggcggatcacctgagttcgggagttcaagaccagcctggccaacatggtgacaccctgtttgtactaaaaatacaaaaattagctgggcatggtgttgggtgcttgtaatcccagctattcaagaggctgaggcaggagaattgcttgaa

SEQ ID NO: 873816 - DNA, 618 bp, Homo sapiens
aaataagttaaataaagggcttagtgcctcaaacaggtaaggcctatgtaaatattcactattactacttatatatttgcttatttgtttacgatttctcttctgcaaaagactgtaagtaccattagggcagaggttctatatataggtaatttttttcatgttgaatgaaaggaaaaacaagatcccaatcttctattatagaaagattaaaaaaatttgaatcccttcctcacaccatatacaaagatagrgcgttgaagactcagtgtgaaaagtttaacatttattataaaattttggagaatatcattatcatcttgggggtaaggaaggttttcttaggtaattttagaactacttaccataaaggaaataataaatacattaaaattctgtataacaaaaagtatcagaaacaaagacggaaaagttacactcttgaaaaagatatttgtaaccacatagctgatggagaaatagtgtttgatcacttaataggaaacctaagtggttagcaaacacaagaagttaagcatcatttgttatttggaaaacgcaaattaacattccaataatatttcacattcatcaattcacaagatttaaaatctctga

SEQ ID NO: 873817 - DNA, 606 bp, Homo sapiens
gtgcatagcttgatgaattttctcagagcgaacacacccatgtaatcaggactcagatcaagaaacagagcattaccaacagccctaccaatcactattgcctctgtcatcttcaaaggtgactgatgttttaaattccaaaccaaatacagtatagtcggtcatccataattgttggttctgcatcttcagatttacccaattgtggatcaaaaatattggtaaaaaaagacaataaaaaataacaatacaacaataaaataatacaaataaaaagtagggtataacaactrtctacataggattcacatgtgttaggtacttgtaatatagagatgatttaaagaatatagagaatgtgtgtaggttacatgcaaatactacaccatgttatttaaaggaattgagcatccttgtgttttggtatccaaatggggtcctgggacccatcccccacacatacagaggaacaactgcatgtattcttttgtgtctagactttccctcaatagtttgctcatgcaattcatcaattaccatgtaccacaatttatttattcattctacagtgaataatgctgctgtgagcattcttgaacatatctt

SEQ ID NO: 873818 - DNA, 630 bp, Homo sapiens
tgaatagtgctgcaataaacatacgtgtgcatgtgtccttatactagcatgatttataatcctttgggtatgtacccagtaatgggatgctgggtcaaatggtatttccagttctagatccatgaggaatcgccacactgtcttccacaatggttgaactaatttacactcccaccaacagtgtaaaastgttcctatttctccacaccctctccagcacctgttgtttcctgactttttaatgattgccattctaactggtgtgagatggtgtctcattgtgattttgatttgcatttctctgatggccagtgatgatgagcattttttcatgtgttttttggctgcataaatgtcttcttttgagaagtgtctgtttatatccttcacccgctttttgattgggtcatttgacttttctcttgtaaatttgtttaagttctttgtagattctggatattagccctttgtcagataggtagattgcaaaaattttctcccattctgtaggttgccagttcactctgatgatagtttcttttgctgtacagaagctctttagtttaattagatcacatttatcaattttggcttttgttgccattgcttttggtgttttagtcatgaagt

SEQ ID NO: 873819 - DNA, 642 bp, Homo sapiens
actaggattgaaacccctgcttttttgctttgttttgttttccatttgcttggtagatcttcctccatccctttattctgagcctatgtgtgtctttgcatgtgagatgggtctcctgaatacagcacactgatgggtcttgactctttatccaatttgccagtctgtgtcttttaattggggcatttagctcatttacatttaaggttaatattgttatgtgtgaatttgatcctgtcattatgacgttagctggttattttgcccattagttggtgcagtttcttcagagcatcratggtctttacaatttggcatgtttttgcagtggctggtactggttgttccttcccatgtttagtgcttccttcaggagctcttgtaaggcaggcctggtggtgacaaaatctctcaccatttgcttgtctataaaggattttatttctccttcaattatgaagcttagtttggctggatatgaaattctgggttgaaaattattttctttaagaatgttgaatattggcccccactctcttctggcttgtagagtttttgctgacagatccgctgttagtctgatgggcttcactttgtgggtaacctgacctttctttcttgctgcccttaacattttttcct

SEQ ID NO: 873820 - DNA, 618 bp, Homo sapiens
atatacactgtggaatactatgcagccataaaaaaggatgacttcatgtcctttgcatggacatggatggagctggaaaccatcattctcagcaaagtatcacaagaacagaaaaccaaacactgcatgttctcactcataggtgggaattgaacaatgagaatgcttggacaaagggcgaggaacatcacacactggggcctgttgsggggtggggggcaggaggagggatagcattaggaggaatacctaatttaaatgacgagttaatgggtgcggcaaaccaacatggcacatatatacctatgtaacaaaactgcacgttgtgcacatgtaccctagaactgaaagtataatttaaaaaataataaaaatgatactacagattctaagtacaatatgaagaaaaataagagtaatttaattaaaaaacaatatgactttaagtgtaatattaaaaagctgatttctaacaacaaaaaaaatttttaatatccattcatcaagattttgaaaacaaaatgaaaaggctaatcacatagtgggagaaaatattcacaacacatacacatgtggaggttgtggtactctctccagatttcccttccacaactgcca

SEQ ID NO: 873821 - DNA, 674 bp, Homo sapiens
aggtcttgattcctaggtggcatttataaacttatcctggaccaaagggggagcctactcccctgaagggaaagacccaggcctggttgcatttaccacagctggctgaagaacccatgggctatgagtgaacattgacagtaaccagggagtacttgctgcaggcctgggacagtgatggccacaaataaagaatccttctgcttgaggagaggatatggaaaagtgggaaggactttgtcttgtggtttkggtgccaactaagccatagtaaaatagagaaccaagtaaattcttaaggtttgtgactccaggccctggctcccagatggcatttttgaaccagcatctccactgggggaaattttctgccctgaaaggaaggacaaaacactggcacaattggacacatactgactgaagagcccttgggccttgagtaaacactgttggtaaccaggtagtggtttccaagggctttgggtgagatagagtgcggtgctgggcttcagttctgaccaagtgcagtcccagtggaggtggccacagggacgctgtgtcacatatcccccagctccagacagctcagcatggagagaaaaactccatttgtttgggcacaagtaaagaaagagaacaagagtctctgcctggtaattcagggaattccctca

SEQ ID NO: 873822 - DNA, 584 bp, Homo sapiens
aatattttcccagacaaacaaaagctgagggatgttatcaacaccaggcctgtcatacaagaaatgctaaagggagtttttcagtcccaaggaaaggatattaatgaccaataagaaatcatcacaaggtgtaaaasttactggtaatagtaagtacacaaacagaaaatattataacagtgtaattgtagtgtgtaaattactcatatattgagtagaaagagtagaaaataaacctatcagcaataactacaacaacttttcaagaaatagtataagatacaaactgaaattttaaaaagttaaaaagtaaagagatgaagtttttattttcctctttgcttatttttagtttgtcagtttttagttttgtcagtttttgcaatcagtgttaagctgtcatcagttaaatgtaatgggttacaagatgttctttgcaagcctcatgataacctcaaatcaaaacaagtagaacagatatacagacaaacaataaaaagcaagaaattaaaacataccaccaccgaaaatatgcattcttctccttagcacatggattattatcagggatagaccatatttta

SEQ ID NO: 873823 - DNA, 625 bp, Homo sapiens
gatggtattgcctagattttcttctagggttttataattttgggttttaccttcaagtctttgagtttctttttaataaagtgtaaggaaggcattcagtttcaattttctgcatatggctagccagttctcccaccaccatttgttaaatagggaatcctttctgcattgcttgtttttacctggtttgtcgaagatcagatggttgtaggtgtatagtcttatttctgttccatcattttggtgtctttttttgkaccagtgccatgctcttttggttactgtagccttgtaatatagtttgaagtcaaggagcatgatgcctccagtttttttttttttttttcttttcttttttttccttaggattgtcttggctataagggctccttttgtttcacatgaaatttaaaatagtttttttctaaatctgtgaagaatgtcaatggtagtttaatgggaatagcattgaatctataaattactttgggcagtatggccattttcaccatactgattcttcttattcatgagcatcgaatgtttttccatttgtttgtgttctctctgatttccttgagcagtggtttgtacttctccttgaaggggtctttcacttcccttg

SEQ ID NO: 873824 - DNA, 627 bp, Homo sapiens
acaccatgttaccggtacaaaaacagacctatagaccaatggaacaattaaggctgtacacctacaactgtcggatattcaacaaacctgacaaaaacaagcaataggggaaggattctctattcaataaatggtactgggataactggctatttgcagaagtttgaaactggaatccatccttacaaccatatataaaaatcaattcaagatggattacagacttaaatgtagaatgcaaaactataaaaaccctagaagacaacctagacaatatcattctggacataagaatgggcaaatatttcatgacaaagtcatcaaaagcaatggcaacaaragcaaaaattgacaaatgggatttaattaaactaaagagcctctgcaaagcaaaggaaactatcaatagggtaaatagacaacctacagaatgcgagaaaatttttggaaactatccatctgacaaaggtctaatatccagcatctataagaaacaaacaacaaacaatgtcattaaatagtgggcaaaggacattaacagacatttttcaaaggtatacatacgtgcagccaacaatcatatgaaaaaaagctcaacgtcactgatcattagagaaatgcaaatca

SEQ ID NO: 873825 - DNA, 627 bp, Homo sapiens
acaccatgttaccggtacaaaaacagacctatagaccaatggaacaattaaggctgtacacctacaactgtcggatattcaacaaacctgacaaaaacaagcaataggggaaggattctctattcaataaatggtactgggataactggctatttgcagaagtttgaaactggaatccatccttacaaccatatataaaaatcaattcaagatggattacagacttaaatgtagaatgcaaaactataaaaaccctagaagacaacctagacaatatcattctggacataagaatgggcaaatatttcatgacaaagtcatcaaaagcaatggcaacaaaagcaaaaattgacaaatgggatttaattaaactaaagagcctctgcaaagcaaaggaaactatcaatagggtaaatagacaacctacagaatgcgagaaaatttttggaaactatccatctgacaaaggtctaatmtccagcatctataagaaacaaacaacaaacaatgtcattaaatagtgggcaaaggacattaacagacatttttcaaaggtatacatacgtgcagccaacaatcatatgaaaaaaagctcaacgtcactgatcattagagaaatgcaaatca

SEQ ID NO: 873826 - DNA, 580 bp, Homo sapiens
acttgttcaaggccaggaaaacagcaagtggtagagctagcattcaaattaggtctatgtgctcccaagcccatgttatatcaataactacaaggatgatattatcacagtaatacaatgtggataggatgatataaacttggggatgagtttcaagctgatgaccaagagaaactcatattcagctcccattctattttgcttctgcattacctatccaagagagttgactggatactgcttgccatgaacaacaagccaatctcagaactgcttgtacttctgaaatagacggttgatatgttctctcatacgtgcaacrccatgtgtagaaaaaagtggccaaagtgtttttaggctgcattattgttgattatcagagcagatgttggaacttagaagatctgaattaaaatagtgcctctgctgtggggttgggtgggttattttccttctctgagcctatgtctttattgagcaaatgagtataatagtatctacctcatggtattggtgaacagattcaaattggatgaatatacatatggcatagttgaatgtactatgtatccttgtaaat

SEQ ID NO: 873827 - DNA, 648 bp, Homo sapiens
acctaaagaaaactaaaaactggaaataacccagccattcctcaattggggaatggataaacaaattgtgatacatgcatatgatggaatactactattcagcaatattaaggactgaactgcctgtacaatagcaggaatgaatcttaaatccatttatgctaagttaaagccagacacaaaaattacctactgtatgattatttatttatttaaattctcaagacacatgtggagtgtctggtttattcaaaggggttgtcagaggcctgaccatggagcaggaaccaaawagttgggaactgtggggctgaacagggcagggatgcccaggtatgagaaggtaaaaggaggtatgctgagcaaccagagcagcattagggccaggctgagcaggatgattcactttatattacatcctggaaaaggcaaaatcatggggacagaacacagatcagtgattgccagaggttgggggtatggagaggggtcgactccaaaggggacagaagaatttactgaacataaattataccttaataatattttttaaaaactaaggaaaacacagcattaggatataagattaaatctttaatctaatttcaccaaaaagtgtagaatagatccttattttcatattttttt

SEQ ID NO: 873828 - DNA, 621 bp, Homo sapiens
agtacggaagcaaagagaatctcagggctctgatggtttagaagaaagtgggaccttgcttaaggtgtgtgcttattcaagtgtgtatgttctgggagctaagttgtctctccagtccttgttttataattgcaagacatttttttagtggcataccattcttcatttgacatggtggttatttcagtcactgctggcaaaccaatgattttgaaccaaaaagaaaaagaaatatcaggccaggtgtggcagattgctagaggccaggagttcaagaccagcctggccaatgtggcaaaacccagtctctaataaaattacaaaaaaattgccaggcacgttggtgcacacctgtgatcccagatgcatcgggaggctgaggcacaagaattgyttaaactcaggaggcagaggttgcaatgagccgagattgtgccactgcatgatttgtcactccagcctgggtgacagagtgagactctgtctcaaaaaaaaaaaaaaaaaaaaaaaaagaaatatcaaataataagataagaaccccttgacattcatatctgtttaacagtacttagaaataggaaaactttaatctcaatttccgtgttcatctcttccctattt

SEQ ID NO: 873829 - DNA, 489 bp, Homo sapiens
acataaggaagaattggactcattaatcatattcactgcctttgtcacatgtccttcctccctttttctcttgcttctaacttccctcttcctcccacttctgactgctacagacattttaccctggaatttcaatcatgttgcaggatcactgtgaccctgatgacgtagagtaagccaatgcaatgcattttctgttggtagctcagaatcatgatattctgctaccatgaagtatttgtcatctttattttccttccttccttgataatttacttctctttttaggggatgtgaargacagcggagagacagagaacacttgtattttactttaggggaccactgagggagtagtgttgacccacccccactcaacactcagtccagccaggccagcccaggaggaagtcatgtagccacgaatctgccctgaatcactgttgacttttccttagctttgtttacaaaattcatgaccacagataa

SEQ ID NO: 873830 - DNA, 547 bp, Homo sapiens
accaggaagaaattgaatccctgaacagactaataacaagttctgaaattgaggcagtaataaatagcctaccaactaaaaatagcccaggagcagacagattcatagctgaattctaccagatgctcaaagaagagctggtaccatgcctactgaaactattccaaaaaattragaaggagagacccctccctaactcattgtatgaggccagcatcatcctgataccaaaacctggcagagatacaacgataaaagaaaaattcaggccaatatccttgatgaacattgatggaaaaattttacacaaaatactggcaaaccaaatccagcagtacattaaaaagcttatctaccacaatcaaataggctttatccctgggatgcaagattggttcaacatatgcgaatcaataaatgtgattcatcacataaacagaactaatgacaaaaactagatgattatctcaatagatgcagaaagggcttttgacagaattcaacatcacttcatggtttaaaaaaaaactcaataaactaggtattg

SEQ ID NO: 873831 - DNA, 547 bp, Homo sapiens
accaggaagaaattgaatccctgaacagactaataacaagttctgaaattgaggcagtaataaatagcctaccaactaaaaatagcccaggagcagacagattcatagctgaattctaccagatgctcaaagaagagctggtaccatgcctactgaaactattccaaaaaattgagaaggagagacccctccctaactcattgtatgaggccagcatcatcctgataccaaaacctggcagagatacaacgataaaagaaaaattcaggccaatatccttgatgaacattgatggaaaaattttacacaaaatactggcaaaccaaatccagcagtacattaaaaagcttatctaccmcaatcaaataggctttatccctgggatgcaagattggttcaacatatgcgaatcaataaatgtgattcatcacataaacagaactaatgacaaaaactagatgattatctcaatagatgcagaaagggcttttgacagaattcaacatcacttcatggtttaaaaaaaaactcaataaactaggtattg

SEQ ID NO: 873832 - DNA, 592 bp, Homo sapiens
attggcaatagccctatcattctctatggcgatgctcagattgtaccacgtttggcttgtgagaatatctccaagctgaccatatctttctggcatgtccccatcatttttttttgttcttttttgagacgaagtctcactctatcacccaggctggagtgtagtgacgcaatctgggctcactgyaacctccgcctcctgagttcaagcgattctcctgcctcagcctcctgagtagctgggattacagtcatgcaccaccactcctggctaatttttatatttttagtagagatggagtttcaccatgtcagccaggctggtctcgaactcctgaccacaggtgatcctcccacctcggcctcccaaagtgctgggattacagacatgagccactgcacccagccctccccatcattcttaaagtaattcttcactttctggtatacaaccagtatttcaaattaattatgttcttccgacaatgaactcacatcaggcattactctaaagaaccctagtttgtttttttagtttgttttttagaggaagtttgtattcaataactgagttgtagatagtatgtgtgatg

SEQ ID NO: 873833 - DNA, 629 bp, Homo sapiens
gtgaaggtctctgacgtgccctgtagacatttggcccattgtcttggtgattaacatttggctcctcattatttatgcacatttctgcagcggggttaaatttgtctccagaaaatatggctctcttttctattgcattgtgagsctgcaaatttttcaaacatttgtccttttgattcctcttgaatgctttgcagcttagaaatttcttttgccagataccctaaatcatccctatcaagttcaaagttccacagatctctagggcagtggcaaaatgtggccagtctctttgctaacgtataccaagagttacctttactccagctcccaacagtttcctcatctccatccgagaccacctccacctggatttaattgtccatatcactatcagcagtttggtcaaagccattcaacgagtctctaggaagtttcaaactttcccacgtcttcctctcttcttctgagtcctccaaatctctagggagtttcaaactttcctacgttttcctgtcttctgagccctccaagctgttccaacctctgcctgttacttccaaagttgcttccacattttcaggtctttacatcagctccccaccaccttggtaccagttttctgtatt

SEQ ID NO: 873834 - DNA, 629 bp, Homo sapiens
gtgaaggtctctgacgtgccctgtagacatttggcccattgtcttggtgattaacatttggctcctcattatttatgcacatttctgcagcggggttaaatttgtctccagaaaatatggctctcttttctattgcattgtgagcctgcaaatttttcaaacatttgtcctyttgattcctcttgaatgctttgcagcttagaaatttcttttgccagataccctaaatcatccctatcaagttcaaagttccacagatctctagggcagtggcaaaatgtggccagtctctttgctaacgtataccaagagttacctttactccagctcccaacagtttcctcatctccatccgagaccacctccacctggatttaattgtccatatcactatcagcagtttggtcaaagccattcaacgagtctctaggaagtttcaaactttcccacgtcttcctctcttcttctgagtcctccaaatctctagggagtttcaaactttcctacgttttcctgtcttctgagccctccaagctgttccaacctctgcctgttacttccaaagttgcttccacattttcaggtctttacatcagctccccaccaccttggtaccagttttctgtatt

SEQ ID NO: 873835 - DNA, 643 bp, Homo sapiens
cttaacaataccatagaattttagggtgtatatcatgttattattattgagtgaacttatttgacaattccaaatccaaattgtgtaacctggcaattgaggcctccacaatttttttctcaactattgatacatttttttccagttttttaaatgtttgattccagctgaacaaaactacctctgtttccagagctgtaccctgtcttttctgcatctggacaactcatgctgttctcctcacccgggttgtttcctccagggtcatgtagtgcccacccagcactcagccttcagagccaactctgttctgtgtttccctcattrgaaatcacctagccctttatccgctttttctttgtgcttgctactctctaccttgtatttttttgtgagtattttattttacttttaactgatgttttgaatatttaattcacatagttagaagttgaaatgtattttaaaatatacaatgaacaatctccctctccaaatacactgttctcagcctttatttaaccaatgatttgctttctcatgatcccttgcaggggtgttttgtgtacatacaagcacacacacacttattttcaccgcttttcacacaaaactctacatgttgtcctgcactttgcatttt

SEQ ID NO: 873836 - DNA, 556 bp, Homo sapiens
ctacattcctgggttttttgttcctgtgcctcagattagaactgaaagtcctccatcttctccttctcatacattttattgtatcagtcaagattcttttggttgctaataacagaaacttaattatgatgggtttaagcagaaaaggcgatttattggctcacataatttaaagttctgaaggatattgaaatttaggtatagttgaattcagggatcacaaaaaaaggttgtcaggaatttttttttctatatatggtcattcttttcacttgtattggcctctttctcagacagggtgtccccatatggtggcaaaggtcaccagtagatgctccaggttgacattgtactagttgagtagaaccagatgaaagaaartgtctttccgaaaactcttcaaatacatcctgctattgttcctatctgactgtcagtttcagtcacatgcccatccttgaactaatccctgggatgtctggggggtgctgttctcagtggctggcttgagtggacatcctctcatgaggcttagcttcacccaaaacactgcaat

SEQ ID NO: 873837 - DNA, 574 bp, Homo sapiens
aaaattcactttcaaaaatagattaagatagtgtaaagacctgtattagcataggcagttaagaatcacatttgcagtcaggtgcggtgtctcacatctgtaatcccagcactttgggaggctgaggtgggtggatcaygaggtcaggagttcaagaccagcctggccaagatggtgaaaccccgtctctactaaaaatacaaaaattaggtgggcacggtggcaggcgtctataatcccagctactcgggaggctgaggcaggagaatcacttgaacccaggtggcagaggttgcaatgagctgagatcgtgctactgcactccagccttggcaacagagtgagtctctgtctcaaaaaaaagaataacatttgcaaatggtgtctccagtccactgcaaaatgtggaatggcattagtcacagacctactaatctgtgacatcagataggcacatccgggattggactttcccagcactaaccagacaacagaggtagagatgacaaaagccccttatggatggaatttattaagataaacttccctgagagcttggcacatttagacaaag

SEQ ID NO: 873838 - DNA, 574 bp, Homo sapiens
aaaattcactttcaaaaatagattaagatagtgtaaagacctgtattagcataggcagttaagaatcacatttgcagtcaggtgcggtgtctcacatctgtaatcccagcactttgggaggctgaggtgggtggatcacgaggtcaggagttcaagaccagcctggccaagatggtgaaaccccgtctctactaaaaatacaaaaattakgtgggcacggtggcaggcgtctataatcccagctactcgggaggctgaggcaggagaatcacttgaacccaggtggcagaggttgcaatgagctgagatcgtgctactgcactccagccttggcaacagagtgagtctctgtctcaaaaaaaagaataacatttgcaaatggtgtctccagtccactgcaaaatgtggaatggcattagtcacagacctactaatctgtgacatcagataggcacatccgggattggactttcccagcactaaccagacaacagaggtagagatgacaaaagccccttatggatggaatttattaagataaacttccctgagagcttggcacatttagacaaag

SEQ ID NO: 873839 - DNA, 670 bp, Homo sapiens
tggggaatacaggccaaggcaggacctccgggtggtaaacaaggccactgtcactatccatgccatagtatccaacccatacaaaatgctgggacagattcctgctgatgacacttggttcacatgtctggacttaaagaatgccttcttttgtttgaggctttctccccaaaatcagcctatatttgccttccagtgggggcaatcacaatatacctggacaaggctgccacaagggtttaagaattctcctaccatttttgaggaggctttggctacagatcttgaggctttgcgcaacctagtgacaattgtgtgctattacaatacattgctgattttgttattcgcagccctcaggagggaggaatgccttcaaggaagaaagaggcttcatcacctgctgtgtgaagctggttacaaagtgtccaaggacaaggcaaaacaagtctgttttcgggaagttagatatmtaggattcatggtatcccaaggccagggcaggcttgaaagggcacgctaggaggctgtatgtgcattgcccaccccagttaaaggcagcaggtcagggaatttctaggcgcggtgggattctgccgaatctggattctaaacttctaccctataacaaggcccttacatgagtctaccaaaggtgggaaaagagagc

SEQ ID NO: 873840 - DNA, 647 bp, Homo sapiens
aataacaacaacaacaacaacaacaaaaccttcagaggctattacaaaaacttccatgcacacaagctagaaaacatagaagaaatagataagttacctgaacacatacaacctcccaagactgaaccagaaagaaattgaatccctgaacagaccaataacaagttcagaaattgaatcagtagcaaaaagcctgccaaacaaaagaagtccagcgcctgatcgactacagtggaattctaccamatgtataaagaagagctgataccactcctactgaaactattcaaaaaaattgaggaggaagtactcttccctaacttgttctatgagactagcatcatcctgatacgaaaatctatcagagtcataacaaaaaaagaaaaatttaggccaagaactttgatgaacatagatgcaaaaattctcaacaaacttctagcaagtaaaacccagcagtacgtcaaaaagctaatccgccatgatcaagtcggctttatccctgggatgcaaggttgtttcaacaaatacaaatcaataaatatgattcattacataaacaaaaactaaaaacaaaaagcacatgatcatcttaatagatgcaggaaaggcttttgataaaattcaacagccattcatgttaaaaa

SEQ ID NO: 873841 - DNA, 647 bp, Homo sapiens
aataacaacaacaacaacaacaacaaaaccttcagaggctattacaaaaacttccatgcacacaagctagaaaacatagaagaaatagataagttacctgaacacatacaacctcccaagactgaaccagaaagaaattgaatccctgaacagaccaataacaagttcagaaattgaatcagtagcaaaaagcctgccaaacaaaagaagtccagcgcctgatcgactacagtggaattctaccaaatgtataaagaagagctgataccactcctactgaaactattcaaaaaaattgaggaggaagtactcttccctaacttgttctatgagactagcatcatcctgatacgaaaatctatcagagtcataacaaaaaaagaaaaatttaggccaagaactttgatgaacatagatgcaaaaattctcaacaaacttctagcaagtaaaacccagcagtacrtcaaaaagctaatccgccatgatcaagtcggctttatccctgggatgcaaggttgtttcaacaaatacaaatcaataaatatgattcattacataaacaaaaactaaaaacaaaaagcacatgatcatcttaatagatgcaggaaaggcttttgataaaattcaacagccattcatgttaaaaa

SEQ ID NO: 873842 - DNA, 657 bp, Homo sapiens
aattaaaaagttcaattaaaaaatatattttttggtttttttttgtttgtttttgagaaagagtctctctctgtcacccatgctggagtatagtggcgtgatcatggctcactgcacccttgaccttcctgggctcaggtagttctattctctcagcttcctgaatagctggaactccaggtgtgcgccaccatgtcccgctaatttttctattatttgtagagacagggttttgccgtgttgcccaggtaggtcctgaactcctggcttcaagcaatcctcccacctcagcctcccaaagtgctgggattacagttgtgagtcacagtgcctggctaggaagtaattttatttaaaggaaatttagcaagataaaaggggacaatagagagaaaaagaaaggagctcaagcattggaattgagagaagatttataatggatggggggatagaatgagagaaagagaaaakaaatgggagagagtaaaaagtagaggagaaatgtgtagttgaggaagaagggatgtttgccattgaccttgccaaggagcacttgcctgggaagatttcttcctttccaggctctgtcttttttttctctaaacacccagagcttcctctgtctccacagggcccaccatccaagaactgtatcaa

SEQ ID NO: 873843 - DNA, 649 bp, Homo sapiens
ctttaagagttggggaattgtgagtttaattaaagtccaaatgatcagtttggtgcatcatatcagaaaatgtcctacatgtcatttagtattcctaacaagccatatttcatcaacttgcagacttagtaatgtacccttgaaactatacatggaagtaaactttgtgcagaaaagggatgtctatcaatatctgtcgcttattttaggtgagacactatgaaatctaatgggaaagaaattcttgtctttcatttattcttcagctctctgggacctaacttgcatctgccatattggaaggaacaagagaggaacaatattcgcagcccacaaagcacttgtagttcatgagggatatgctagtatacaaggaaagcacagtccaagaagcgtttgatgtcataggatgrgcacataaaatgcttaaggtacttgttgagtaccttgttactaagtgccaattatcagccccaggccagcatcactttcttattgttcttctcttcctgaagtgagcctccactgcccagcctttgtagttcttgcctcccaaggttggctgcagtactgggcaaagccattcatttcccctcacctttgttgtctttaaagagagccttgtatgctctttcactcactttgaagg

SEQ ID NO: 873844 - DNA, 582 bp, Homo sapiens
gtgtttgggttgcagagagaagaggaaagaatcaataaaaaagtaaagcaaaacagaggaaagaaaattaaatgacttcttttgaggacttagcaaacactattaattgtgtggctgttatttatcatatctgattttcatatttctatgtttaggatatttttaaatagaagaagcaaaaaaaaaataccctgcaaactctcttaaagaataaagaaatttgtctcacataacaggaagtccaagttaacagtgtctatacagcaggwtaagcaataaagctccacttctttccaattcttttgcctccttttggtgacagcttcatcctcagggtggctatctctgtacttgtatgatggattctagaagctcccaggcagcatgtttccagagggccagagtgagaaggctgctcccccattcacagccaacctacatgtagcctcaagctctgacaggtgcaagcctgggtttctgaacccctcacccttcagagagaagggatgaccattattgacttggaccattcaaagtctcattcttagatctgaggatgttgtccactcacctgactcctaa

SEQ ID NO: 873845 - DNA, 582 bp, Homo sapiens
gtgtttgggttgcagagagaagaggaaagaatcaataaaaaagtaaagcaaaacagaggaaagaaaattaaatgacttcttttgaggacttagcaaacactattaattgtgtggctgttatttatcatatctgattttcatatttctatgtttaggatatttttaaatagaagaagcaaaaaaaaaataccctgcaaactctcttaaagaataaagaaatttgtctcacataacaggaagtccaagttaacagtgtctatacagcaggttaagcaataaagctccacttctttccaattcttttgcctccttttggtgacagcttcatcctcagggtggctatctctgtacttgtatgatggattctagaagctcccaggcagcatgtttccagagggccagagtgagaaggctkctcccccattcacagccaacctacatgtagcctcaagctctgacaggtgcaagcctgggtttctgaacccctcacccttcagagagaagggatgaccattattgacttggaccattcaaagtctcattcttagatctgaggatgttgtccactcacctgactcctaa

SEQ ID NO: 873846 - DNA, 582 bp, Homo sapiens
gtgtttgggttgcagagagaagaggaaagaatcaataaaaaagtaaagcaaaacagaggaaagaaaattaaatgacttcttttgaggacttagcaaacactattaattgtgtggctgttatttatcatatctgattttcatatttctatgtttaggatatttttaaatagaagaagcaaaaaaaaaataccctgcaaactctcttaaagaataaagaaatttgtctcacataacaggaagtccaagttaacagtgtctatacagcaggttaagcaataaagctccacttctttccaattcttttgcctccttttggtgacagcttcatcctcagggtggctatctctgtacttgtatgatggattctagaagctcccaggcagcatgtttccagagggccagagtgagaaggctgctcccccattcacagccaacctacaygtagcctcaagctctgacaggtgcaagcctgggtttctgaacccctcacccttcagagagaagggatgaccattattgacttggaccattcaaagtctcattcttagatctgaggatgttgtccactcacctgactcctaa

SEQ ID NO: 873847 - DNA, 515 bp, Homo sapiens
tatttttataagccatcgatttttgtgcctgtgtcattttgttttgttctactgctttggcacaaactagtgaagcaaatatggacatttttgccagaagttgggttctgtgtaataacaaagtaaaacatgcaattcttgtttcaaggtcaggtaatccacaaaaaaccraacaccatatgctctcactcataggtgggaattgaacaatgagaacacttggacacaggaaggtgaccatcacacactggggcctgttgtgggatggggggaggggggagggatagcatttggagatatacctaatgtaaatgaggagttaatgggtgcagcacaccaacatagcacatgtatacatatgtaacaaacctgcatgttgtgcacatgtaccctagaacttaaagtataattaaaaataaataaataaataaaaaattaaaaaaatattattgtagactagaaagaagtaattcatattacacagtgacaaaatgtttggaaatcactaacaatct

SEQ ID NO: 873848 - DNA, 564 bp, Homo sapiens
ctgtatgcatggagtgtgctgatagaaccaagcctgggagtggtctctgaacccagaagagggacgcagggcttgaggaagcctctgcctgccacctggcaggagcccggccctggacagagccttagcaactggaaggctctcttctacttctggagcagacaagctttcacatgtgtgagcgaggttcagcaccactgtctctacccatcacagccacaaccaaggaaatgtatctattacttttcattttgccaaattaattgaaaacgtccagtatttcttaagtgcctcctaatttgtcactgaaatttccttttcttcacctacactctgttttgtaaataccctagtagtccaacytatttatttgaggacaagggacacagtttatctctctttgtataaagtaacagtctctagcccagaactgacacagttgagagtcaaagtcggctacatgtacacatgatgacaagccatgggtccagcagcatgtgatccaactcaatacacatgtactgctagagactggggattttatgacacattcagtcctcggga

SEQ ID NO: 873849 - DNA, 659 bp, Homo sapiens
cttcaaatgatctcaaatcaactgtgagtctagaatggatttcaacagtaagctaagtgagctcccttccctctaacttcttaaacagtaagaacacgtatgttttattaaagtatacaatattaaataagattacactcagagaatgtctgtatcacagctatctattgatgcatataaaactacccaaaatgtagtggtttaaacagcagttatctcttttaatgacagttctggacagttaagtgtctcaacaggtctcaactgartgtatctcgtgcaccatcaggagtcagccaggggtctcccctaggatttcagccagagcataggtttaaaatctgaaaaatgtggtacaaattccagcttctctacctctgtacccttgaacaagccattcaatttatttaaacatccctgtatccatccataaaataataggaataatatctactctatagggaaaaatttttctgacttattttggccagaatgtcaattagattgagccaaagatacctctgattagagacactgtgttaaatgaaaaaatcccatgtctccttttatatatttctaccttagaccccagtatgagtctcttctattctaaatgcagtagtggaatcaagaaagagttctaaaggcaattttctctc

SEQ ID NO: 873850 - DNA, 542 bp, Homo sapiens
atgaaatacacccctaggaccattcagatttctcatgccattcattatatctggctactattctattctatggaatctcaatttttatgagtgagggggaagtacaaggccaaactattgcagggtcagttcagatattggccaaaagcaatctctgcaaagagataatgtggaaggattagtgagaaagataaagtgtctagagttattggagatattttgtctttattttagaaggtcatatccttactctgtaactcagttcatactttggctctactatggggcttgccacagaacatcactatacaacagagtttgtagaaacactactgggttggcttgattgcatagcccatatgcagggaagactacattttatmttgggccctatttgaaatagtcagcaaagaaataggttggatcagtagctctaagtgaggtatgaatggccttctaaatgcagataattccaccaaattctttgcctgtgagttatacaagaaattgtttaaaaagagaaaagggatgtcatatgatgc

SEQ ID NO: 873851 - DNA, 606 bp, Homo sapiens
atgactcacagcagccgatggtgagagctataaggagaaggggaatggaagccacttcctgacctttctctgtatcaagcacagtgcagcatggcttcccgagaaccttgccctcacagtcaaacccagcggtcagtttctagtgcacactgacttactggcatatttggcaccactgattgctcccttcttgaaacaccttccaccctgggcgtcagggtcactatccaccgctggttcgccctgattcccaggcccgcacattcccagtctcttctgctggctccttcttctgttcctcagccctcaatactgtagggccccagcytgagtctttggaaagcttgttttctgtccatgctccagacaagtgtgtccaactcatgctcaccactgcatggagccaggttgggggcatggtgggagggtcctacgaggagctcactccgggatcccacgggtttcactttagggcactaactccacatctgcatccccaacgcagggctctctctgactccagaccctcatgttcatctgggcagcaactttacaagtctcactacagtctcgggctttgcctgacagtgctggcctcttcttctt

SEQ ID NO: 873852 - DNA, 623 bp, Homo sapiens
gcttcctgatcaccttacttcaatctcatttcttctaaattctaacagtattgactatacttctaatttgctacttatcatctcctgcctcctgctttacattattggctgtgctttctttttttttgagaagaagtcttgctccgtcgcccaggctggagtgcagtggcgtgatctcagctcactgcaacctctgcctcctgggtttaagtgcttctcctgcgtcagcctcccgaatagctgagattacaggcacccgattggctctgctttcttgggtatgtatatatttactctttttttttttttgtatttttagtagagacggggtttcactgtgttagccaggatgttcttgatctcttgacctcgtgatccgccygcttcggcctcccaaagtgctgggactacaggcatgagccaccacgcccggccttacatatatttactcttaactgcactgacaactttttaaactatagatcgggtccccagtgtaagtctggggatatcaattaagattcccctgtctaatttttgacactaataccaactacgcttaataaatgtgttgatgagtttaatgttttatgcattagatagatttcagtatgaaagagatc

SEQ ID NO: 873853 - DNA, 596 bp, Homo sapiens
tcttcctcactaacatcacactcagaaggagatctagatgctggtaaaatggctgacccagcagggctcatggaggacagcattctttccaaaggcaatctaagcaaggctgagccagacacagacaaagttacctaggaagagacagaggktgagtggtccaggggtttgtttcagtctttttaatgccaggctccagcatctctaatatggtcgcagtggtatccaaaagaaaaataccttcaaaaaatcaatgaatccaggagctggttttttgaaaagatgaacaaaacagaccgctggcaagactaataaagaagaaaagagagaacaatgaaatagacgcaataacaaatgatataggggatatcagcactgatcacacagaaatacaaactaccatcagataatactataaacacctctacacaaataaactaggaaatctagaagaaatggctaaattcctggacacatacaccctcccaagtctaaaccaggaagaagttgaatccctgaatagatcaataacaagttctgaaattgaggcagtaattaatagcctaccaactaaaaaagtcccagaccagatggat

SEQ ID NO: 873854 - DNA, 615 bp, Homo sapiens
atatgagaaatttctgcctgtatttagtggacacacatctatttgaaaatattcctcctggttgaaaaggtctgtggtgtgtaatctaaagatattttagatgtgcagtgaactgagtttccagaatcttttttttttgtaatgtctatgtataatccaccttgattctttacaggataggaagactgaatacaatataaccaagggtaaatacaaatatgccttaaggatccagtgtgtatttaagtaacacactgctatttattccttcaagtctgtatacatgactaatgtccaacaaaaatgattacatgactgggtgttaatttagagatagttcacctgctgtgttatacctagaggttcaagcccttacctttaggaggtatgcaataaatgtctgttgttctagagatttgttcctggcaattgagaatgctstatacaaaggtacaatgatggataccacacactggctccaccatgagcaacctattaggaaaaatgtaatatataatatgtaaacatgtaaaacacacacacacaccagagttctggggttccccaactttccctggcttactctccagacctcccttctatgatgctctctgg

SEQ ID NO: 873855 - DNA, 620 bp, Homo sapiens
tctaacagtcaggtccctcagctgcaggtctgttggaatttgctggaggtccatcccagaccctgttttcctgggtatcaccagcagaggctgcagaacagcaaatatggcagaacagcaaatattgctgcctgatccttcctccgttagctttgtcccagaggggcacctgcctgtatgaggtgtctgttggcccctactgggaggtgtctcccagttaggctacacagtggtcagggacccacttgaggaggtagtctgtccattctcagagctcaaaygccatgctgggagaaccactgctctcttcagagctgtcagacagggatgtttaagtctgcagaagtttttgctgctttttgttcagctatgccctgcccagaggtggactctatagaggcagtaggccttgctgagctgcggtgggctccacccagtttgagcttcccagacactttgtttacctactcaagactcagcaatggtggacgcccctccccctgcctggatgcagtctcacaggtccatctcagactgctgtgctagcagtgagcaaggctctgtgggcatgggacacatcgagccaggcacaggagagaatctcctggtctgccagttgc

SEQ ID NO: 873856 - DNA, 651 bp, Homo sapiens
tgggaaattacagtggtgaattgggcaatacaacacagtgatctaataaactagcaatttaccatattattatgagctcgaaaggcaatttaatcaaaacaatttggtttatattgcttctaacctagttgtgtagtttcacatttttttttaagtacaaaacttttagtcacaggactacagttttataaattagaatatatgctgctaaaatwattattgaaactaccttggtgatgactatagttataaaggcatccacttaaatgccacagtaaatcaagacacaattacagcctagccaatttttaatctttctgtatgtgcccttctgttttgagaataagtaaaagcacttttctattttttcctctaccgtttttttcaaataaagatagttataaaacatttaaaaaatatattttttgttagatattaagaaattaattaagagtctcatgtcctaaaatttttatacagttagtaagaattatttaaaaagtagtagggcacaaagcaccctaaatatctttattgtataatttcttttggaaaatggagcaattatacttgcttaaactttcccaatttcatataattttattactctttttttgtcaaccatagaatgactctaacgttggaaaagtt

SEQ ID NO: 873857 - DNA, 637 bp, Homo sapiens
cataaaattaggctgacattatcctgaaacacacacatacacacacacacacacacacacacacacacacacacggataatgtcagctaatatacatatacaaaatcaacttatgagaaattctctttttcccactctttggtgggtcatttagaataaggaactggggttctaatttcacactggaacataatatcatattgtttacctttactcakatgcattttctcagctattaaacagtcatgcagtctcctgcctgacaaaacacatgtagttataggaagtattaaaatactaccctacaattatataaccattttaaagtgttaatatataaactttttttctttattgagatcactggagctcatccacttaattgtatttacactcttacccattttttctcaaagtacaatgtttggcctatttgcatcagaaccacctggaatgcctgtttaaaatgcagaattcttaggccccgcctccaatatatagacagaatttctaagtatggggtgaagagtcttacagatttgatatctcctgaattctcaaaaacacagacttttgataatcaaagcgacataagccaaataccatcttggaatgagaagtcaaagaacaatcaaag

SEQ ID NO: 873858 - DNA, 614 bp, Homo sapiens
tttttggcaaagaaatatcctaagacttgccaaccctgaacaactacctttgaaactattgaaagaaaggacaataaaattccactgaatttatgtcatcataacaatgggtccccttgatacagaaatttaaccccagaccatawgtgctatggtttgaatatggttggtttgtcctcacctaaattcatgttgaaatttgattcccaaagtgttagttttgggagacagagcctagtgaaaggtatttgggtcatgggagaggatccctcattaatgatgtgatgctatgtgatagtgaggtctcactccagcaagactgggttaattctacagaaataggttagttgttataacgcaaggcttcttttcctgtttggaccctctgcacatgtatctgcttcccctttgacctccaccatgcaatgacccagcactgaagtgaaagctagaaacaacgcctgaacttctaagtctgcagaaccatgagctaaataaacctcttttccttataaattacccagcctcaggtatcctgttacagtaacacaaagcagactaagacagaaaaagtagctcagaatataaagaggaatccagtaccagagtactca

SEQ ID NO: 873859 - DNA, 682 bp, Homo sapiens
ctatcttagggcatagtttgggggacgaagagtgaatataaataaggagtcagttttaaaagcatttgatttctagccaaacacagggtccagctacctattgacaattcctcttacatatttaataaatatctcaaatttaacctataccttcaaacaaacctaatcctaaattatatgattctccctataatatggaagactaatttcaaaatcagagaaaccttttgaaatttaacatatttaattgtattaaaaataaaacaacagaccaggcatcatgtctcatacctttaatcccagtactttgagtggctgaggtgggaggatcacttgaggcccagggttytagaccaccctggacaatataatgagactccatctctataaaaaaaaaaaaaaagtcaagtgtggtggtgtgtgtctgcagtcccagctactcaggaggctgaggtaggaggattgcttgaacccaggagtttgaggctgcagtgagctatgattgtaccactgcactccagcctgggcaacagagagagactgtctctaaaaaataaaacaaaacatcttttattttttggtctttctaattttatgacaagcaggtaaaaactttatcataactcgtatcattaactttgggaatcactaaattaatccattcttagtatttactatggaa

SEQ ID NO: 873860 - DNA, 577 bp, Homo sapiens
agtgggactgttaagaggtgtttggtcatgagggctctgccttcaggagtggactaatgccattagtacaagagtggattctcctcctcttgttctctctcactttctcttggcccgttctacctcttaccatgtgagcacccagacatccccctttaaaggatgcagcatgcaaggtccaaacttggatgaagagaatagcctcaccagacaccagacctgctagtgccttgaccttagacttcctagactccagaactgtaagccaatacatttctgttctttataaataacccagtctcaggtattttactccagtagcacaaaacagacaaaggaacatatcagtaatggttctttgacstaggtaaagaactattatagtaagttagactaaatgaatatctttaaaatcaaacccctcctacccaaaaagataacaaaaaataatactgcatcctaggtgaaatgagatacatagtgccaccctcaaagatacagaaaaggtcccaaccagagcaattaggtaagatagagagataaaaggcattcaaactggaaaggaagacattaagtt

SEQ ID NO: 873861 - DNA, 564 bp, Homo sapiens
gtaacatgagtcagaaaaacacattcataaaactgaagaagtgccaaaagcatctggtactgagtatcaaagagcaccaagtaaatagaacttgaggctacaagatgatagagagaacataaacaaattgcagggggccagattatactgctcttttatgttggacattgctttccctaaatctcargataaggcataaaggcttagtggaaagcagaaactttgagtttgagatatgattatgggaggaggtaaatatttgttttcagaagtaatagcacacccagaatgtgaaggctaggagtcctggaggagaagaatgacccagggaagcgttcttagaatttcgagtgctttactactctaggccattggtaaattctacaaagcatggggatgaggatccaagaagtcaatcagaaagctattgctaagtgactaaaaagctaaaagctttcaataatcttactttgcagcagaggtaaaattagactgctggacagatgaggagaaatgacagcaaaaaaatcatgcattcagtttagacttattaagcactatgtc

SEQ ID NO: 873862 - DNA, 641 bp, Homo sapiens
aggtacagctcaggctgttgcttcagagggtgcaagccccaaaccttgccaggttccatgtggtgttgagcctgtgggtgcacagaagtcaagaattgaggattgggaaccaccatctaaatctctgaggatattggaaaaagctggatgtccaggcagaagtttgctctaggggtgttgtcctcatggagaacctctgctagagcattgcagaagggaaatgtgggtttcaagcccccacacagagtccccactggggcattgcctagtggagccatgagaagaggaccctcatcatccagaccccagaatggtaggtagatccccagcttgcaccgtgcacctggaaaagccatagacactcaacaccagcctttgagagcagccaagagggaggctgtacactacaaagtcacagggctggagctgctctagatcctgggaacccatcccttgtatcagtgtgacctggatatragacatggagtcaaagaagattattttggaactttaagatttgactgccctgctggattttggactttcatgggacctgtatctccttcattttggccaatttctctcatttggaatggctgtatttacccaatgcctgtaccccagttgtatctaggaagtaa

SEQ ID NO: 873863 - DNA, 611 bp, Homo sapiens
aatagatttatactttgatattttgtttatagctaactcttaaatggatgttttaaagtgtctgatgtatgtaataggataacagtaataaatacatgaggcaatcaaggcaagggaaaaagcagggtgtaaaacagctgaggttaagccaggggagcaggaatgtaaagcgtcattgccgtggggcrctgcctgcttaccaggagagagccaccgttttgttcctgacctttctggccactgttctaaataggaaccacgcagttacatgtttcaagagtgtccatgagctaaatcccaaagagtcattcagaagaagcatgactattcccagttcttaggcttgagagaactttctccctcccatgggtcctcataaaaacgtcagtgcatcatctggtgcagctcctggaaagggtcctcagcagcagccaggggaatctcaaggagaagctgcctcccagcatgtcccacacagccactccataaacaaagccacttcacctctgggtgaccaggatggttcaactggaaaggctggtggcctcttgggctccatccagcagtaaaaatctattccctggagtctgatgattacattaggtctttaa

SEQ ID NO: 873864 - DNA, 611 bp, Homo sapiens
aatagatttatactttgatattttgtttatagctaactcttaaatggatgttttaaagtgtctgatgtatgtaataggataacagtaataaatacatgaggcaatcaaggcaagggaaaaagcagggtgtaaaacagctgaggttaagccaggggagcaggaatgtaaagcgtcattgccgtggggcgctgcctgcttaccaggagagagccaccgttttgttcctgacctttctggccactgttctaaataggaaccacgcagttacatgtttcaagagtgtccatgagctaaatcccaaagagtcattcagaagaagcatgactattcccagttcttaggcttgagagaactttctccctcccatgggtcctcataaaaacgtcagtgcatcatctggtgcagctcctggaragggtcctcagcagcagccaggggaatctcaaggagaagctgcctcccagcatgtcccacacagccactccataaacaaagccacttcacctctgggtgaccaggatggttcaactggaaaggctggtggcctcttgggctccatccagcagtaaaaatctattccctggagtctgatgattacattaggtctttaa

SEQ ID NO: 873865 - DNA, 594 bp, Homo sapiens
tgacatacagatatagcaagttttgtggggatgattgaagacgcaaccctttctgtaaccatatggccgaatcgtcatggaagaaaggtttgtttcacttagacaaaaacaaatcattaaaattaggactgaacttttgggtcaggtggagtggctcatgcctataatctcagcacattgggaggctgagacaggtggaacacttgcggccaggagttcgggaccagcctggccaatgtggagcaaccttgtctctactaaaaatgcaaaaagaaaaaaaaattagtcaggtgtgatggcacatgcctataatcccagctrctcaggaggctgaggcatgagaattgtttgaacctggaggtggaagttgcagtgagctgagatcattccattgcactgcagcctgggtgacagagtcagactgtctcaaaaaaacaaaacaaaacaaaaaaaacaggcaacttcaactgtataaaaatctcaatttcagtcttaatatctgtatgcaaatgatagacagatatagttacaaagattatctatcatcatatatatctatctatttgcatatatagagagaaatggctagatata

SEQ ID NO: 873866 - DNA, 647 bp, Homo sapiens
cttgcacttcgcagcttctagagctataagaaataaacttgtgttgtttataactaggaggccgttgtactattattattcctattttatggttgagaaaaccaaggcatggggaaattaaatgacttgcctgaaggttttctactgctagtaattggcaagaggaaaagaaacgtgcaagaactttattgattggatgggaatggtagatacattaatttgaaggattttgtcttagtagatcttagagaaagaagagtacatttgggagaaataagtgaattttgttttagaaaaaaaaatatgcgtatgtgtgttttattttttagacagagtctcactctgttgcccaagctggagtgcagtggcatgatctctgttcactgcaccctccatctctcaggttcaagtgattctcctgcttcagcctcctgagttgctgggactacaygccaccatgcctggctaatttttgtatttttagtagagatggggttttgccaagttggccaggctggtctcaaactcctgacatccttggcctcccatagttctgggattacaggcatgagccactgtgccctgccaaaaaaaagttttgaagtggaaatgcctagtaggtagctatcattatattatatatatta

SEQ ID NO: 873867 - DNA, 610 bp, Homo sapiens
caaaccactttttatattactttctgtgattgagatttgcatgacatttgggtagtacaaatttacacctcaattatgtacatggatagagtcaatgtttacaaatactgaaggaagacttttcccacccatagttcaggtagaaaggcaagtttctttgacattcctattagtgatagcttcaggtttataaagccatcttcaattcaaattacccactccctattggcctaagaccctggtttctgatgtcagccttctttctccatcccacactcctatgtgtgccccaggattagctcataagcttttatttcgattttcatttacttctttgttttgggtccttagatattttccttacatttttgyaaatttatgcattaaaaggagtatgtattatattttatccagaatctctaagtagattttagaaggagagattttaggctttctggacagctatagtgggagaattgaaagtctgagtcattttacatttccctctcctgtactaatgcaattaatttgtttgttattattgtgctgcaagactttttattgatccctgttactttttaaaattgttattgttaggtttggttctctc

SEQ ID NO: 873868 - DNA, 634 bp, Homo sapiens
gcgtgagaagcacaatagtggggagtgcctggagaatgagctgaacaggaatgacataggaatgtaggcctcagctggccatcaggaacatagggcagggctcctttcccctgccagcctcagcttcaggcaccaatgcctaggatagaagcgggctagaccctcacaccaataccctcacggagataactaggaagctgctgttggatattattatcactagagtctagagaagtctagagatctctccaggcattgcagtcctttgatgaaaacagcaaaatccaatgtctgcctccagggagggttgaggcagctaaaaatgggacattcattgcaaatattgagtctacaaatactacaaatcctttcacatcctgcktaaagcacatttccttagtgaaacttccagtcaccccaacggaagtaaatcactcttcctttttggctttctcagcatttggtctgtgtctttagtagtttgtcttgtgtattgtgcatcatttcgccaactgaactataagcttcttgaagtcaggaatcctgtctgatccattgatatattcccacagtaattatcaaagtgctttgtatgtgacaggtgcaaaatacatatggaattaaaaaccaaatt

SEQ ID NO: 873869 - DNA, 626 bp, Homo sapiens
aatattaatttgtgctctgtagttttttcctttttttttttgtttccttggcagtggcttttttttatatatattatactttaagttttagggtacatgtgcacaacgtgcaggttagttacatttgtatacatgtgccatgttggtgtgctgcacccattaactcrttatttaacattaggtatatctcctaatgctatccttcccccgtccccccacctcacaacagtccccggtgtgtgatgttccccttcctgtgtccatgtgttctcatgttcaattcccacctatgagtgaggacatgtggtgtttagttttttgcccttgcgatagtttgctgagaatgatggtttccagcttcatccatgtccctacaaaggacatgaactcatcaatttttatggctgcagagtattccatggtgtttttcaagacagataatgcctagaatattttacatctattctttctatcaagaatcaataaaatgtttaagattagatatttgaaattttagacttcatttacctacagcatttatggccaagaaatatcatatatccaaatgatattgctaatgggacatcaatgtttcattggtaacaaattctgttgaggaaaaagat

SEQ ID NO: 873870 - DNA, 626 bp, Homo sapiens
aatattaatttgtgctctgtagttttttcctttttttttttgtttccttggcagtggcttttttttatatatattatactttaagttttagggtacatgtgcacaacgtgcaggttagttacatttgtatacatgtgccatgttggtgtgctgcacccattaactcgttatttaacattaggtatatctcctaatgctatccytcccccgtccccccacctcacaacagtccccggtgtgtgatgttccccttcctgtgtccatgtgttctcatgttcaattcccacctatgagtgaggacatgtggtgtttagttttttgcccttgcgatagtttgctgagaatgatggtttccagcttcatccatgtccctacaaaggacatgaactcatcaatttttatggctgcagagtattccatggtgtttttcaagacagataatgcctagaatattttacatctattctttctatcaagaatcaataaaatgtttaagattagatatttgaaattttagacttcatttacctacagcatttatggccaagaaatatcatatatccaaatgatattgctaatgggacatcaatgtttcattggtaacaaattctgttgaggaaaaagat

SEQ ID NO: 873871 - DNA, 626 bp, Homo sapiens
aatattaatttgtgctctgtagttttttcctttttttttttgtttccttggcagtggcttttttttatatatattatactttaagttttagggtacatgtgcacaacgtgcaggttagttacatttgtatacatgtgccatgttggtgtgctgcacccattaactcgttatttaacattaggtatatctcctaatgctatccttcccccgtccccccacctcacaacagtccccrgtgtgtgatgttccccttcctgtgtccatgtgttctcatgttcaattcccacctatgagtgaggacatgtggtgtttagttttttgcccttgcgatagtttgctgagaatgatggtttccagcttcatccatgtccctacaaaggacatgaactcatcaatttttatggctgcagagtattccatggtgtttttcaagacagataatgcctagaatattttacatctattctttctatcaagaatcaataaaatgtttaagattagatatttgaaattttagacttcatttacctacagcatttatggccaagaaatatcatatatccaaatgatattgctaatgggacatcaatgtttcattggtaacaaattctgttgaggaaaaagat

SEQ ID NO: 873872 - DNA, 680 bp, Homo sapiens
ctggtggtgacaaaatctctcagcatttgcttgtctgtaaaggattgtatttctccttcgcttatgaagcttagtttggctggatatgaaattctgggttggaaattctttcctttaagaatgtcgaatattggcccccactctcttctgtcttattgggtttctgctgagtgatccgctgttagtctgatgggtttccctttgtgggtaacccaacctttctctctgcccttgacattttttccttcatatcaaccttgatgaatctgacgattgtatgtcttggggttgctcttctcgatgagtacctctgtggtgttctctatatttcctgtatttgaatgttggcctgccttgctaggttgaggaagttctcttcgatatcctgaagagtgttttccaacttggttccattctcccaatcactttcaggtacaccattcaagcttaagtttgktcttttcatatagtcccatattcttggaggctttgtttgtttcttctcactcttttttctcgaatcttgtgttctcattttatttcattgagttgatcttcagtgtctgatattctttcttctgtttcattcattcagctattgataattgtgtatgcttcatgaagttctcatgctgtgttgttcagctccatcaggtcatttatattcttctctaaactgg

SEQ ID NO: 873873 - DNA, 680 bp, Homo sapiens
ctggtggtgacaaaatctctcagcatttgcttgtctgtaaaggattgtatttctccttcgcttatgaagcttagtttggctggatatgaaattctgggttggaaattctttcctttaagaatgtcgaatattggcccccactctcttctgtcttattgggtttctgctgagtgatccgctgttagtctgatgggtttccctttgtgggtaacccaacctttctctctgcccttgacattttttccttcatatcaaccttgatgaatctgacgattgtatgtcttggggttgctcttctcgatgagtacctctgtggtgttctctatatttcctgtatttgaatgttggcctgccttgctaggttgaggaagttctcttcgatatcctgaagagtgttttccaacttggttccattctcccaatcactttcaggtacaccattcaagcttaagtttggtcttttcatatagtcccatattcttggaggctttgtytgtttcttctcactcttttttctcgaatcttgtgttctcattttatttcattgagttgatcttcagtgtctgatattctttcttctgtttcattcattcagctattgataattgtgtatgcttcatgaagttctcatgctgtgttgttcagctccatcaggtcatttatattcttctctaaactgg

SEQ ID NO: 873874 - DNA, 601 bp, Homo sapiens
tgtctcttgcagcttatattactaggtaaatgtatattaaactaataaatgatcaaacaagagaattacagtttgtgattgtttctataaaggatatgaactgtgtactgtcgtagaaagtaactgaaatatgtgtgcatatttggaagctgttttaaagagttgaagtttcgaaaataaaaataagctgtcargaagagttgggaaaagaaccaagcataaggcagagcaggtgcaaaggctctgagtaggaaaatacttggggtgttcaagaaggtgacagaaaatgatcattgctcatgaagctcagtgggtagcaaaacatgaagttggaaaggaaggcagaatttgggttatgtaggttcatgtagtctggtgaggaattttaacttatttacaagagcaattaagccactgaggttttaagtaagatgttattaaattaaaaattaatttaaaaaactgattctcttgtgtctacaacatattggaaaataagtaagaataaaactaggaaaaacaaatcagatactggcaaagaaatctaggcaagaaatgatggtggcttggaaattctgtggtagtagtggagacaagtgga

SEQ ID NO: 873875 - DNA, 616 bp, Homo sapiens
attcacatgaaacctcaaaagagaccaaatatccaaggcaattctaaacaaaaagaacaaaactggaagcatcatgttacccgacttcaaactatactacagggctacagtaaccaaaacagcatggtactcatacaagaacagatacatagaccaacagaacagaacagagaacccagaaatacaaccacacacctacaaccatctgatcttcaacaaacctgacaaaaacaaaamatggggaaaacattgcctatctgatataaagtatttcatctaaattctgatgatttggtttgtattagaatgtctgtttttaataagttttgcatttatctttttctttcttctttctttttttttgagacagagtcttgctctctgacccaggctggagtgcggtgtgcagtggtgcgatctcagctcactgcaacctccacctcctgggttcaagagattctccagccttagcctcccaagtagctgggattacaggcatgtgcttagcattaagcctagttaatttttgtatttttagtagagacggggtttcgccatgttgccaaggctggtctcgaactcctgagctcaaagtggtctgctcacctcagcctct

SEQ ID NO: 873876 - DNA, 616 bp, Homo sapiens
attcacatgaaacctcaaaagagaccaaatatccaaggcaattctaaacaaaaagaacaaaactggaagcatcatgttacccgacttcaaactatactacagggctacagtaaccaaaacagcatggtactcatacaagaacagatacatagaccaacagaacagaacagagaacccagaaatacaaccacacacctacaaccatctgatcttcaacaaacctgacaaaaacaaaaaatggggaaaacattgcctatctgatataaagtatttcatctaaattctgatgatttggtttgtattagaatgtctgtttttaataagttttgcatttatctttttctttcttctttctttttttttgagacagagtcttgctctctgacccaggctggagtgcggtgtgcagtggygcgatctcagctcactgcaacctccacctcctgggttcaagagattctccagccttagcctcccaagtagctgggattacaggcatgtgcttagcattaagcctagttaatttttgtatttttagtagagacggggtttcgccatgttgccaaggctggtctcgaactcctgagctcaaagtggtctgctcacctcagcctct

SEQ ID NO: 873877 - DNA, 616 bp, Homo sapiens
attcacatgaaacctcaaaagagaccaaatatccaaggcaattctaaacaaaaagaacaaaactggaagcatcatgttacccgacttcaaactatactacagggctacagtaaccaaaacagcatggtactcatacaagaacagatacatagaccaacagaacagaacagagaacccagaaatacaaccacacacctacaaccatctgatcttcaacaaacctgacaaaaacaaaaaatggggaaaacattgcctatctgatataaagtatttcatctaaattctgatgatttggtttgtattagaatgtctgtttttaataagttttgcatttatctttttctttcttctttctttttttttgagacagagtcttgctctctgacccaggctggagtgcggtgtgcagtggtgcgatctcagctcactgcaacctccaccycctgggttcaagagattctccagccttagcctcccaagtagctgggattacaggcatgtgcttagcattaagcctagttaatttttgtatttttagtagagacggggtttcgccatgttgccaaggctggtctcgaactcctgagctcaaagtggtctgctcacctcagcctct

SEQ ID NO: 873878 - DNA, 658 bp, Homo sapiens
gacaccacagaaataacaacaacaacaacaacaacaaaaccttcagaggctattacaaaaacttccatgcacacaagctagaaaacatagaagaaatagataagttacctgaacacatacaacctcccaagactgaaccagaaagaaattgaatccctgaacagaccaataacaagttcagaaattgaatcagtagcaaaaagcctgccaaacaaaagaagtccagcgcctgatcgactacagtggaattctaccamatgtataaagaagagctgataccactcctactgaaactattcaaaaaaattgaggaggaagtactcttccctaacttgttctatgagactagcatcatcctgatacgaaaatctatcagagtcataacaaaaaaagaaaaatttaggccaagaactttgatgaacatagatgcaaaaattctcaacaaacttctagcaagtaaaacccagcagtacgtcaaaaagctaatccgccatgatcaagtcggctttatccctgggatgcaaggttgtttcaacaaatacaaatcaataaatatgattcattacataaacaaaaactaaaaacaaaaagcacatgatcatcttaatagatgcaggaaaggcttttgataaaattcaacagccattcatgttaaaaa

SEQ ID NO: 873879 - DNA, 658 bp, Homo sapiens
gacaccacagaaataacaacaacaacaacaacaacaaaaccttcagaggctattacaaaaacttccatgcacacaagctagaaaacatagaagaaatagataagttacctgaacacatacaacctcccaagactgaaccagaaagaaattgaatccctgaacagaccaataacaagttcagaaattgaatcagtagcaaaaagcctgccaaacaaaagaagtccagcgcctgatcgactacagtggaattctaccaaatgtataaagaagagctgataccactcctactgaaactattcaaaaaaattgaggaggaagtactcttccctaacttgttctatgagactagcatcatcctgatacgaaaatctatcagagtcataacaaaaaaagaaaaatttaggccaagaactttgatgaacatagatgcaaaaattctcaacaaacttctagcaagtaaaacccagcagtacrtcaaaaagctaatccgccatgatcaagtcggctttatccctgggatgcaaggttgtttcaacaaatacaaatcaataaatatgattcattacataaacaaaaactaaaaacaaaaagcacatgatcatcttaatagatgcaggaaaggcttttgataaaattcaacagccattcatgttaaaaa

SEQ ID NO: 873880 - DNA, 604 bp, Homo sapiens
gaaggaaaactaaacacagaaactagaatgggtaggaggagggcatttgaagtagttgcttctacttttattattgcccctccatccagtatgcatatgtgctcttgtggcagaattagaggagagatggaaaaatcagcattcccaggcagcccactttgtgcgaagctttaacacaccttttggagagacactgttgtgcgggtacctccctcatgatgttatgaggaggaaatgagttgatgttaaacagtgcctggcatataataactgctataaattaacttcagccaaataaataaatatatattcatttgactttcatcatcctctgagctagatttttttggcagagacaccgttgattgcctgctcaaaatctacttccttcccctttccttgtgggcagggttgacctccacttgacaaaggctgcaaatgacatattytacatttcccagcattctttgtaactgaagcataaacgtggaacccaggcctggcccatggaaccagaggacatttttgctgggggatcttttagaaaggttttcctgccttacaaaaaaaaaaaacagatggaaaaggaaaagtccccctctat

SEQ ID NO: 873881 - DNA, 609 bp, Homo sapiens
taaaaaagactaggggaaataaattttgtggtcatatttagtgcataaaaaatgtatatatatttttaattttaattcaacacattttctttaaggagctcatattatttaatagaatataaataaagagaaaatagcatgttcagaattcatcatacttgagctaaaagaatcaatatctttggctttgctctgctggcattaaagctttccaagtatctattttaaagaagtaggacactgtttctggctggttatgttctctgcacactgactgttgtgctaaggggttgactagaagatctccatggcccctattcaaaaacgcaatgacttttytggttcaggaagctcagtcaaagcagcccgccaatcctgctggtcagccttgccctgggatgcaagtcttgtcaactggggtacatttcagaagctttctttccctaattttttaaataactttttttaaatcacaaaagtagtccatgcttgtaacagaaaatatggaaaactctaaaatataaaaaggaaattagaaaatgtctcataatctcatgattcagagtcctgatttttcatttccaagaattccaggaagcaagtcattta

SEQ ID NO: 873882 - DNA, 564 bp, Homo sapiens
gatgaagttctgttgtcttaagccacccagtttgtggtgatttgttatggcaggcacaggacactaacgcaacctctccactacttatttaggaaagcttgttatttcacacttttgcctaagagtagctctgggttcttgttagttttaaagctgtcccaacatgaaaaagaacaaataagcaaagtgagtttggctgtggaagaatcttggtaaactgagataatgttctgttaacaaacgagtcaacctcttttacttcctgtctctccyttttgttctaagatagaatgaagaaagggacattagaaaagagaaacttcgttttagcttccttatttttcaacagttcttgtttgtttgtttgctaaatttgccttctgttttctgaaagttaagctgattcttcctttattcttgtgctcaaaattaatcatggccttgcacttcacatttctctaaaatattagttaccacaaaatgctattcacatcccaaagatttcaaactatgttgtaaatgagaatcacttgggtggtattgtaaaatgtgaattgtttgagc

SEQ ID NO: 873883 - DNA, 663 bp, Homo sapiens
tcccatcattaataccttcaaaatatatacagaatgtaaccacttctttatccccatctattttgattgaaatagcctcctagctggtcgatccctcagtcaattccgacacaacagccagggtgatgctatcagaatgcaasacaaatcttttgagatctcaaaaccctccatgacttcgtatcagttagagtctagccaggaaaataggagccacactggatatctcagtctaagaggtgttttccacagatgttgggtgcctgaaagagaaaaagggtaacacagagatttaaaaactcaggcaacagctgatactgctggttgttgaaacaaaagggaaggggtggggttaccagaatctaggagcttagaagaggggctctgcagagctggttctatacttctaggaaaatagccactgccctagagctgctgattcctccgagagtgtgccacagcgctgtgctggaaatgccacaactcatgggaggctggatctagcaatgccgtcaaagacaggaaaaacaggaaggaagttccttctgctcttctctctatgcatcctgcagatggaacctaaaaggaagcctgctggcaagggtaactggaaaatgtaattttcagagtcctcccagcatcacagagtcaccttctttggtt

SEQ ID NO: 873884 - DNA, 521 bp, Homo sapiens
tagctggttattttgcagacttgatatagatgcttcacagtgtcattgctctttgtacttcagtgtgtttttgcaggggctggtaacagtttttcctttccatatttagtgcttcctttaggagttcttgtaaggcagggctagtggtgatgaattcctccagcatttctttgtctgaaaaggatttcatttctccttcacttatgaagcttagtttagctggatatgaaattctgggttgaaaaatgttatctttaagaatattgaatattggccccaatctcttctggcttgtagggtttctgctgagaggtacgctgttagtctgatgggcttctctttgtaggtgacctggcctttctctctggctgcccttaacayttttttcttcatttcaaccttggagagtctgaagattatgtgtatggggttgatcttctcatggagtatcttactggggttctctggatttcctgaatttgaatgttgggctgtcttgctaggttggggaagttctcttg

SEQ ID NO: 873885 - DNA, 494 bp, Homo sapiens
ttaaatctaagacctcaaacaatgaaactactacaaggaaatgttgagaaagctctctaggacactgctctggataaaggtttcctgagcaatactctacaagcacaggcaacctaagcaaaaatggacaaatggaattacatcaaactgataaacttctgcacaacaaaggaaacaatcaayaaagtaaagagagagacaacccaccaaattgaagaaaatatttgcaaactacccagctgacaaaggattaataaccagaatatataaagagctcaaacaactctataggaaaaacatctaacaatctgatttaaaaatttattctcaaaagaagacatatgaattgccaacaggtttatgagaaggtgctcaacatcatgattatcagagtaatacgaatcaaaactacaatattatcccaccccacttaaaatggtttttatccaaaaatgagcaataatgaatgctggcaaggatgtggagaaatggga

SEQ ID NO: 873886 - DNA, 648 bp, Homo sapiens
atagtaagagtcttccctctagtaacaaagcatctttccagaagtcccattaatgttcaacaatcaaagtagctgtgagtggacatttaaaataagaaatcttatcccttacctggagtgtaaagaaagtctacaggactttcttccattctgagttcattggtgggccaaactgattattttattaaagtagctaattgttgtcttagagctcaaggaacaggaccttggggaaatagatcacgggaaccatagaatatgagttgaattctgggagctggggatccaagacaacagcatgagccttaggtgactgagagtgtgaygaaggcaagccttgaacaacaggcatctgtcatagctgctgaatcgaggcctataattctaaaaaaagttcatctggctgattggagaggattgtgattgcaagtcagaaaagcatgttcctgcttgcctgaaagacagaaacagccaagttatgaactgtctctgggagctgtgggcagcctccagaaagtgagagcagattcaagccaacatccagtgaggaaatggggaccctgagtcttgcaaccacaagaaagtgaattctgccaacatgaatgaccttggaaatgagttttggcaccacatcttccagataagaac

SEQ ID NO: 873887 - DNA, 629 bp, Homo sapiens
tttatttcataaccttatgtagcttatttaataaattaggagagtcagattgaaaattaggttaaaacatattttcctgagactattaaaatgatttcaaattatgctgtaactgtagtctctttgtcagaaaggaattcttgctgaaattggtgattaccagtttatcatttatttcacaagcatttatcaagcacactttctgtaaagagcacacaagcatgcatagcttaacatatgaccaaggaatcgttttttagatttctcctttctatttctgtaagttggaaaaaaaaaacttttgattatagaataataaaattagtatgcattaggtaatataaaaattgttacaatttataaaaacccttgatatgaaaacaagtccactaccctygtaaagacatgtgccaatttttctgtgctttctaaaatcattgaaccatttattcacaatttgcctttaaacactttttttccgaaaaaaaaaaaaaagtccatctctaacagtggagctccagatctatcaaaattcaagcaatgtgactgctctttattttataatacatggaaatgctagctgcctttctccccaggtgctttcatgcatatgtcccttttactagaac

SEQ ID NO: 873888 - DNA, 581 bp, Homo sapiens
gggatgatcaaaggtcagtttctggacaccataagtaaataaacttatctagataaactcctttacactcccttgcatctacttctcaccctctgcatcagggtaagggaattagctgcattcagcttttattctctcccgaagctttgcaaaacctcccggccttccaagagggtttgcgtcttgtcctaraaattttcttataatttttcccaccaccctgactgatctcctacacatgtaagatgtggcttgtcctccttgccttccaccatgatagtgaagcctccccagttacgtggaatagtaagtctattaaaccctttttcctggataaagtacccagtctttgtattgtatttatcagctgcacaaaaagagactaatacagtaaattggtaccagtagagtggggtgctgctgtagatccctgaaaatgtggaatcgactttggaactggtttacaggcaggggctggaatagtttggaaggcttagaagaagacaggaaaatttgtgaaagtttgaaacttcctggagacttgttgaatgactttgcccaaaatgctgatagtgatatgg

SEQ ID NO: 873889 - DNA, 613 bp, Homo sapiens
aaaagtgaacataaaacacttcaagattgatcatttatacagacgaaagcagatacataaatattatgtaaatgttctaaactttcatgacttgatatatggtggcttggttttgtttaaggatcatgcattcagctttattttgagcttgaagtaaacagaaaatcaaagtagaaatgtgattatatttaccatcttgggatggtttcctttgcagtcatgtttgttgctttacttttgaacaacctattgctcagcatggtttcctagcccagacattgtctcgattcaccattttttttataattaatgaagtgataaatgttagggtatataaatgttagtttcctgaagagaaaattactggtaaaagaaaaccagctattatagttcatcatgatataagaaagcaatcgtttctgttcaagcgaaacttcaaatgttgaatatgatgatggtgtaacgctscaggatccatcagttgttctctattgcacttccgtcctaaaggggagttaggagtgagaatttacatgctagtctgtggatgcaagtgtgagaatttttattaggtcttacaaaaaacctttcacaaatcaggagtctacaaaaa

SEQ ID NO: 873890 - DNA, 677 bp, Homo sapiens
tatataacagaattactctgcttgcagatttgtctgaagctcaatttatttatttaataatttattgatgtaaatatggaattctggatatgtattttgtactttgtgtaattaagatatttaactttataacgtgaaaaatacattcaaagaatttgcataaattatgatttttaaaagttgtatgggtattactattattrtagaagttttatcttaaatattgcatatagtttaacatatcaataaaaacaaactataaattcaacttctaatcaggaaatttagaataaaaataaaataccaagagccaggtttctgactgtgttgttttgccaagaactgcaaggaaagactaagaattcatgtgctagagataagtctgcttgtttctatgccactttctattctgcattagaatattaaacttgatcagataaggttggaagggaaaggaaaacagccaaatgattttttgggggtggtgcataccaatacaaaagtgcttgtttctcatttccaggacataatttgggggaaattcgagtgaattattaaggctctttatgtacaaggtatctaaacagataaactgaaaaataaacccttgtatcttatggtcaaggcagggtacaagtgggattagaatttttctgcctatcctacagtgggatata

SEQ ID NO: 873891 - DNA, 677 bp, Homo sapiens
tatataacagaattactctgcttgcagatttgtctgaagctcaatttatttatttaataatttattgatgtaaatatggaattctggatatgtattttgtactttgtgtaattaagatatttaactttataacgtgaaaaatacattcaaagaatttgcataaattatgatttttaaaagttgtatgggtattactattattgtagaagttttatcttaaatattgcatatagtttaacatatcaataaaaacaaactataaattcaacttctaatcagraaatttagaataaaaataaaataccaagagccaggtttctgactgtgttgttttgccaagaactgcaaggaaagactaagaattcatgtgctagagataagtctgcttgtttctatgccactttctattctgcattagaatattaaacttgatcagataaggttggaagggaaaggaaaacagccaaatgattttttgggggtggtgcataccaatacaaaagtgcttgtttctcatttccaggacataatttgggggaaattcgagtgaattattaaggctctttatgtacaaggtatctaaacagataaactgaaaaataaacccttgtatcttatggtcaaggcagggtacaagtgggattagaatttttctgcctatcctacagtgggatata

SEQ ID NO: 873892 - DNA, 465 bp, Homo sapiens
ttgaaattatcagtttggtttatcacagggcgagagtggcagaagaagggagtcaagttagaggctattaaaatagagataattccagtgaaataaaatcatagcttgaaccatggtgaagggtggtaagatgcggttagaagatagaactaaaagaatttgytgattgaccagggtgttaaataaagagaggagaaaaggacaacaccaagtattggggcttgagcaaatgagttcaagaatttaagtatcattgacaaaggtaaaattttcagcacggcacaaaataagcaatcaatataaatggaggagggatgagtgttctaaacaagaaacagaggtacaatagaagtagtggatataataagactcctccaagtagttaaagactactaggtgataaagtggaaggcagaacatgtgagcagatgaagcacacagaagtcagtttacaggttcttgtag

SEQ ID NO: 873893 - DNA, 605 bp, Homo sapiens
cacataaagagaatttttttaaaaatcacatgatcacctcaatagaggcagaaaaatcatttgacaaaatccagcatacctttatgattaaaacccttagcaaaatcagcatagaaaagacataccttgaggtaataaatgccatctatgacaaacccatagcgaacrtcatactgagtagggaaatgttgaaatcattccccctgagaattggaacaagataacaatgccaattttcaccacttctattcaacatagtactggaagtcctagccagagcaatcggacatgagaaagaaacaaagggcatccatatcagtaaagaggaagtcaaactgttgctgttcaccagtgatatgatcatatacctagaaaaccctaaagactcatccaaaaatctcctagaactgataaatgaatacagtaaagtttcaagatacaaaaccatgtacacaaatcagtagcattgctatacaccaaaagtgaccaagctgagaatcaaataaagaactcaaccccttttaaaacagcagcaaataaataaataaataaataaataaataaataaataaataaaataaaatacttgggactatacctaacca

SEQ ID NO: 873894 - DNA, 605 bp, Homo sapiens
cacataaagagaatttttttaaaaatcacatgatcacctcaatagaggcagaaaaatcatttgacaaaatccagcatacctttatgattaaaacccttagcaaaatcagcatagaaaagacataccttgaggtaataaatgccatctatgacaaacccatagcgaacgtcatactgagtagggaaatgttgaaatcattccccctgagaattggaacaagataacaatgccaattttcaccacttctattcaacatagtactggaagtcctagccagagcaatcggacrtgagaaagaaacaaagggcatccatatcagtaaagaggaagtcaaactgttgctgttcaccagtgatatgatcatatacctagaaaaccctaaagactcatccaaaaatctcctagaactgataaatgaatacagtaaagtttcaagatacaaaaccatgtacacaaatcagtagcattgctatacaccaaaagtgaccaagctgagaatcaaataaagaactcaaccccttttaaaacagcagcaaataaataaataaataaataaataaataaataaataaataaaataaaatacttgggactatacctaacca

SEQ ID NO: 873895 - DNA, 610 bp, Homo sapiens
gtggcacacacctgtagtcacagctacttgggaggctgaggtgggagaatcccttgagcccaggagttcaaggttacagttagctatgatcaagccactgcactccagcctgggcaacagagcaagatcctgtctcagagagagagaaataataataaattactaaataaattatggtactaaggactatggtgccctaataacattatgatgactatgtggaaacatgaaaattattatgcaatkttaattatgtattttgatttcttaatttatgtccactatgtttgcaactgtatggaaaatgataaatcagtaaggacagatattgaaaaattaacattccaaaacaaatataacaacattactgtggatttgtggggcctttcccatgcaaaattctttggtgaaaataagttgtttgctgataggtataactgaccaggcccaaaaaaaaacacactgaaaatgtgaaaatacttcaatagactttaaaaatactattcatttatactttgattcaaatgtcagtttggaattgtgtaccactagcaacagtggttaaatctaaagtttttgttaccttgaaataaatggctgatgtaaagaa

SEQ ID NO: 873896 - DNA, 652 bp, Homo sapiens
ggagaaagtaaaaatatcaacattaacaggtgtttggaagttgactccaactctcacgagtggctctgaggggttcaaggttccagtggaggaatatactgcagaagtggagcctgaagatgtgactgaattgctgcaatctcatgctaaaacttgaagagaaaaggaggtacttatggatgagtaaagaaagtggtttcttgagataggatctacttatggtgaagatgctgtgaacactgtcaaaatgacaaaaaaggatttagaaaattccataaatttagttgtaaagcagcagcagggtatgagaggattgactcaaactttgaaagaagttctactgtgggcaaaatgctatcaagcagcactccatgctacagggaaatcttttggaaagaaagagtcaatcaagtggcaaagtccattgcattatgccaagaaactgccacagccacccaaccttccagaaactaccaccctgatcactcarcagccatcaactttgaggcaagaccctctaccactaaaaagattacaacatgctaagggctcagaagatctttggcattttctgacaatattttaaaattaaggtatgtatattttaaagatacaatgctattgaaacacattatagactataggataactt

SEQ ID NO: 873897 - DNA, 624 bp, Homo sapiens
cacagaagtcaagaattggggtttgggaacctccgcctaggtttcagaggatgtatggaaatgcctagatgtccaggcagaagtttcctgcaggggcggggccctcatggagaacctctgctagggcagtgtggaagggaaatgtgggatcagagcccccacacagaatccctgctgggacactgcctagtggagatgtgagaagagggccaccatcctccagaccccagaatagtagatccactgatatcttgcaccatgcacctggaaaacctgcagaagtcaatgccagcctgtgaaagcagccagtagggaggctgtaccatgcaaagccacaggggtggagctgcccaagaccatggaaatccatcttgcatcagcatgacttggatgtgagacatggagtcaagggagatcattctsgagttttaagatttgactgccctgctggattttagacttacatggaacttgtagcccctttgttttggccaatttcttccatttggaataggcgtatttacccaatacctgtacccccattgtatctaagaagtaactaacttgcttttgattttacaggctcataggtggaagggacttaccttgtcttaggtgagactt

SEQ ID NO: 873898 - DNA, 657 bp, Homo sapiens
tttggtatcagaattatgctgccctcatagaatgagttagggttgaagtccccccttttcagttttttggaatagtttcagtagaaatggtaccaggtgttctttgtatctctggtagaattcagctgtgaacctgtctgaacctgggctttttttttttttttttttttttttggttgttgtttttgttggtaggctatttactaccgcctcaatttcaraactcattattggtctatgtagaaattcagtttcttcctggtttagtcttgggaggatgtacatgttgaggaacttatcagtttcttctagattttctagtttatgtgcataaaggtgtttatagtattctctgatggtttcttttatgttggtcagtggtgatacccccaaattatttcttattgtgttatttgagtcttttctcttttcttatttattagtctggttagtggtctatttcattatttttttcaaaaagccaactcctgcatttgttgattttttgaagagtgtgtgtgtgtctctatgtccttcagttcatttctgattttggttatttcttgtcttctgctagcattggtgtttgtttgctcttagttctctattcttttagttgtgatgttagattgttaacttgagacctttctagctttt

SEQ ID NO: 873899 - DNA, 661 bp, Homo sapiens
atcatgttacctgacttcaaactatactacagggctacagtaaccaaaacagcatggtactggtacaaaaatagacacatagaccaatgaaactgaatagagagcccagaaataatactgcacatctacaaccatctaatcttcagcaaagctgacaaaaacaagcaatggggaaagaactccctagtcaataaattgtgttgggataactggctaaccacatgcagaagattgaaactggacccctgccttacaccatatacaaaaatcaactcaagatgtgttgaagacttaartgtaaaacccaaaactataaaaaccctggaagacagtctaggcaataccattctggacagaggaacaggaaagattttatgatgaaaatgccaaaagcaatcacaataaaaacaaaaattgacaaatgggatctaattaaacttaagagcttctgcacagcaaaataatctatcaactgagtaagcagacaacctacagaatgtgagaaaatttttgtaaactatgcgtctgacaaagttctaatatccagcatttataaggaacttaaacaaatttataagaaaataaagacaaccccaataaaaagtggcaaaggatgtgaacagacacttttcaaaaaaagatacaatacacatggtcaaca

SEQ ID NO: 873900 - DNA, 611 bp, Homo sapiens
agaaagaaatataaatcatgtttcctctccatttgtggtcacagcagccagctctgcaaggagggaaagcaaaggagaggggaagaaagtgccaggctagatcaggccaggggccacctgtgcaccagctgtgggctcctcatttatttatttatcatcagaaatcctgcccagatttccctgccaagggatcacatctcccttgcaaaatgacccttgttaggcatttttgttctgtggggaaggagatgtgtatraaggggtaagcaagaaagacacagtacctgcccttgtagagctcagagtctgatgtgggaggccaggacctaacagtgaaatgtggctgttccacggtgtgatggcatcaggcgggggagctacctacaccagggaaagcatcagaggagtttccccaaaggaagtggcaatcaaggtgaggttcaaggctgaagccaggaggaggccgccaggcagaagtgcacatttgaaagactacaaatgcatcagagcatggttggtgggcagcttggaggtggtagaacaatgcgggattgttggagcaacctaggcaacagacaatggacaaggggaataccaatggaacttaagag

SEQ ID NO: 873901 - DNA, 600 bp, Homo sapiens
ccctcagccaacgactcccagaagtggtatctacgtatcctagttcccttgcccctcaggtgggataattctgaggcatccgttttgtgtcacttccaagagtttccctgtgggggttaagctttggtcaactactgcattagtagcttaataactcagccttcactgtctgctcccctttctccactctactactggtatttccctgcacttcgcgagggaaataactaaaacttgaatcwttatttcaaaaaaaaaaaaaaaagaagaagaagaagcttctgggggaatctaaatcaaggcaagtacctactgtgtgctgtgtaccatgctatcatatacattcattatctcattcagtcccgttagcaattggaccaaaatattattattccattgtgccactttacggcttaaggttctgcattagttctctatcatgttcagatctgggggaggaaaagccgtgtcagagtgtaggacacacaaattaggacattcttctgaccccatattctttctctagtggctattaccaagctgtcagtccctcctttttggaacctgattttcatctatctctaaaatgaggttttaaaa

SEQ ID NO: 873902 - DNA, 600 bp, Homo sapiens
ccctcagccaacgactcccagaagtggtatctacgtatcctagttcccttgcccctcaggtgggataattctgaggcatccgttttgtgtcacttccaagagtttccctgtgggggttaagctttggtcaactactgcattagtagcttaataactcagccttcactgtctgctcccctttctccactctactactggtatttccctgcacttcgcgagggaaataactaaaacttgaatcattatttcaaaaaaaaaaaaaaaagaagaagaagaagcttctgggggaatctaaatcaaggcaagtacctactgtgtgctgtgtaccatgctatcatatacattcatyatctcattcagtcccgttagcaattggaccaaaatattattattccattgtgccactttacggcttaaggttctgcattagttctctatcatgttcagatctgggggaggaaaagccgtgtcagagtgtaggacacacaaattaggacattcttctgaccccatattctttctctagtggctattaccaagctgtcagtccctcctttttggaacctgattttcatctatctctaaaatgaggttttaaaa

SEQ ID NO: 873903 - DNA, 652 bp, Homo sapiens
gcacctactctaaaattgatcacatagtcaaaactaaaacactcctcagcaaatacaaaagaaatgaaataataacaaacagtttcttggaccacaacacaaacaaattagacctcattattaagaaattcactcaaaaccatccaactacatggaaattgaacaacctgctcctgaatgacttttgggtaaataayaaaattaaggcagaaattaagaagtttttttgaaaccaataagaacaaagatacaatgtaccataatctctgggatacagttaaatcagtgttaagaaggaaatttatagtactaaatgcccacatcaaaaagctagaaagatctcaagttaacaacctaacatcacaactaaaagaactagagaatcaagagcaaacaaagcccaaagctagcagaagacaagaaataaccatgatcagagtgtaactgaaggagatagaggcacaaaaaacacttcaaaagatcaaaaaatcctggattttttttgaaaaaaattaataaaatagaccacaagctagactaataaagaagaaaagagaggagattcaaataaacacaaacaggaatgacaagagagatgttcctgctgaccccacagaaatacaaacaaccagcagggaatattataaacacc

SEQ ID NO: 873904 - DNA, 652 bp, Homo sapiens
gcacctactctaaaattgatcacatagtcaaaactaaaacactcctcagcaaatacaaaagaaatgaaataataacaaacagtttcttggaccacaacacaaacaaattagacctcattattaagaaattcactcaaaaccatccaactacatggaaattgaacaacctgctcctgaatgacttttgggtaaataacraaattaaggcagaaattaagaagtttttttgaaaccaataagaacaaagatacaatgtaccataatctctgggatacagttaaatcagtgttaagaaggaaatttatagtactaaatgcccacatcaaaaagctagaaagatctcaagttaacaacctaacatcacaactaaaagaactagagaatcaagagcaaacaaagcccaaagctagcagaagacaagaaataaccatgatcagagtgtaactgaaggagatagaggcacaaaaaacacttcaaaagatcaaaaaatcctggattttttttgaaaaaaattaataaaatagaccacaagctagactaataaagaagaaaagagaggagattcaaataaacacaaacaggaatgacaagagagatgttcctgctgaccccacagaaatacaaacaaccagcagggaatattataaacacc

SEQ ID NO: 873905 - DNA, 685 bp, Homo sapiens
aacgagaactacaaaccactgctgaaggcaatcagaaaggacacaaacaaatggaaaaacgttccatcctcatggataggaagaatcaatatcatgaaaatggctataatgcccaaaagactttatagattcaatgctattcccattaaactgccattgacatttttcgcagaattagaataacctactttaaaattcttgtggaaccaaaaaakagcctgtaatagccaagtcaattctaagcaaaaagaacaaagctgggggcttcacactacctgacttcaaactatactataaggctacactaacaaaaacagcatggtactggtacaaaaacagcatggtactgttacaaaaatagacacatagaccaattgaacagaatagagaacttataaataagaccacaaatctacaaccatctaatctttgacaaaactgaaaaaaacaagcaatggggaaacgatttcttatttaataaatggtgctgggagaactggctagccatatgcagaaaattgaaagtggaccccttctttacaccttacacaataattaactcaagatggattaaagacttaaatgtaaaacccaaaactacaaaaatcctagaagaaaatctaggcaataccattcaggacataggcatgggcaaggatttcctgatgaaaatgtcaaaggcaat

SEQ ID NO: 873906 - DNA, 685 bp, Homo sapiens
aacgagaactacaaaccactgctgaaggcaatcagaaaggacacaaacaaatggaaaaacgttccatcctcatggataggaagaatcaatatcatgaaaatggctataatgcccaaaagactttatagattcaatgctattcccattaaactgccattgacatttttcgcagaattagaataacctactttaaaattcttgtggaaccaaaaaatagcctgtaatagccaagtcaattctaagcaaaaagaacaaagctgggggcttcacactacctgacttcaaactatactataaggctacactaacaaaaacagcatggtactggtacaaaaacagcatggtactgttacaaaaatagacacatagaccaattgaacagaatagagaacttataaataagaccacaaatctacaaccatctaatctttgacaaaactgaaaaaaacaagcaatggggaaasgatttcttatttaataaatggtgctgggagaactggctagccatatgcagaaaattgaaagtggaccccttctttacaccttacacaataattaactcaagatggattaaagacttaaatgtaaaacccaaaactacaaaaatcctagaagaaaatctaggcaataccattcaggacataggcatgggcaaggatttcctgatgaaaatgtcaaaggcaat

SEQ ID NO: 873907 - DNA, 620 bp, Homo sapiens
ccaaatctcatcttgaattctcacacgttgtgggaggggctgggtgggaggtagttgaatcatggggcaggtctttcccgtgctgttcttgtgatggtgagtgggtctcacaagatctgatggttttaaaaaatgggaattttcctgcacaagtgctctctctttgcctgttgccatccatgtaagacgtggtttagttctccttgtctttcaccatgattrtgaggcctccccagcagtgtggaactgtaagtccattaaacccctttattttgtaaattgcccagtcttgggtatgtctttatcagcagcatgaaaacaaactaatacagtaaattggtaccagtagagtggggtactgctgaaaagatacctgaaaatgtggaagcgactttggaactaggtaacaggcagaggttggaacagcttggagggctcagaagaagacaggaaaatgtgtaaaagtttggaacttcacagagacttgtcgaatggatttttccaaaatgctgataatgataaggacaatgaaacaacaacaaaaaaacttcctgagccagatgtagtcacagccaaactccaccagatattaaaggaattgataccaaccacactgaaac

SEQ ID NO: 873908 - DNA, 614 bp, Homo sapiens
tatttcagtttcaaggatgggtactgggggaggctgggggtggacggggaacctgagggtgcagagtggggtttgtcatgcctgtcttcatctcagcggccccactctgagtggccctatctttgcccatcttgattcttctcagtctttcaagccaggctgaaccgagcctttcctgactcccccagttagaaggaatcagccctgtctctatgtttctgcagatttttgaaaaggaacaactgtcyttgtacaaagcccaacagacctccttgccttttccaccagaccctcgggctctttatttactttgcctccttctgcccttagcggggtgtgtatgtggaggaaggcagcgttggggagtgggcaatgcaaggaatggagcatggagaaggggaaggaagctgtgcatggattgatggacacgcaaagaactaactaacacagggctattttacgcatatacacatcgtatcttactatacacagcctgtgtatgtgtacacagtggctattaggtattacacacacgtatgcatataaaacacatatagcatacagtgtctattgtaagatggagaacatagcaaagggtgctatacagcataaga

SEQ ID NO: 873909 - DNA, 625 bp, Homo sapiens
acctcccctggtgcagccggccatgctggactgtggtgaccccagagcctggctccctggttggtctccctttctcctgtgccctccccgctactccacaatcaaaacttgcctaagaaacgttccctccgaaacattcccacctaagtcagttttctcagctgtctcctctaaccagctgtgcggtcaactagagtccagggctccctgcaggttaattgagagcgattcktcggcctccctgcctccttctcttgccagagtgcatctctgcaggggacttaacaccttattctagaactatgaaaggtggggtctataatgagtaaaaggaggaccataagaggtgtcttttgctgggttctaccctcagctcttcgcttggattgtctcctttaaccattctgcaaggtaggacctattgcccccatttcaaaaaggaggaagcaaatccccaaagactgtgtcacctgcccaaggagtgggactgaagtggcctggattcagcctcagccacacctctctgggatgctatgtccctaacaactgtgctgggattcctaaaacggggctttctaagtgacttaggtcatattgacaacttgccaagaccccaggctttttc

SEQ ID NO: 873910 - DNA, 625 bp, Homo sapiens
acctcccctggtgcagccggccatgctggactgtggtgaccccagagcctggctccctggttggtctccctttctcctgtgccctccccgctactccacaatcaaaacttgcctaagaaacgttccctccgaaacattcccacctaagtcagttttctcagctgtctcctctaaccagctgtgcggtcaactagagtccagggctccctgcaggttaattgagagcgattcgtcggcctccctgcctccttctcttgccagagtgcatctctgcaggggacttaacaccttattctagaactatgaaaggtggggtctataatgagtaaaaggaggaccataagaggtgtcttttgctgggttctaccctcagctcttcgcttggaktgtctcctttaaccattctgcaaggtaggacctattgcccccatttcaaaaaggaggaagcaaatccccaaagactgtgtcacctgcccaaggagtgggactgaagtggcctggattcagcctcagccacacctctctgggatgctatgtccctaacaactgtgctgggattcctaaaacggggctttctaagtgacttaggtcatattgacaacttgccaagaccccaggctttttc

SEQ ID NO: 873911 - DNA, 625 bp, Homo sapiens
acctcccctggtgcagccggccatgctggactgtggtgaccccagagcctggctccctggttggtctccctttctcctgtgccctccccgctactccacaatcaaaacttgcctaagaaacgttccctccgaaacattcccacctaagtcagttttctcagctgtctcctctaaccagctgtgcggtcaactagagtccagggctccctgcaggttaattgagagcgattcgtcggcctccctgcctccttctcttgccagagtgcatctctgcaggggacttaacaccttattctagaactatgaaaggtggggtctataatgagtaaaaggaggaccataagaggtgtcttttgctgggttctaccctcagctcttcgcttggattgtctcctttaaccattctgcaaggtaggacctattgccsccatttcaaaaaggaggaagcaaatccccaaagactgtgtcacctgcccaaggagtgggactgaagtggcctggattcagcctcagccacacctctctgggatgctatgtccctaacaactgtgctgggattcctaaaacggggctttctaagtgacttaggtcatattgacaacttgccaagaccccaggctttttc

SEQ ID NO: 873912 - DNA, 622 bp, Homo sapiens
gctctttttgcttctggtgcccttctcctcttctgttctcctgggggcaactactatagacccaaaccactgttgccagagctgacagcaaagccctttctgcccctcagtggcatctggggcatagtgtctgatatccctacattgaggaaggcagtgtggtgtggaagaaagaatctggtctgtgaggatcagactgagaggagtgctctaccacttactgacttaaccttgcccagcctcggttttctcctcattcattcaagccatacatattgattaaatgcctcatctgggcactggggatgcagcagtgtcacacccagatcttggtttctgccytcagggagcttacagtccggtggaggggcatggacaagcaatgtaaaattaaatgatgggccattttaatcacaattatggcacaggccacagtggaccatagtgggtgttctgggggctcattacagggatcccgacctgttttggaaggcagcagcatttaccccggaattggagttcatcaggtggaagcacattccagggaaaggggccggcgtgtgcacagtccagaggcaggaaggagctgcagagctgggctgtggtttctgccctgcctgtt

SEQ ID NO: 873913 - DNA, 541 bp, Homo sapiens
gcctcatacctctgctcctccatcaaacaagagggacaactggccagggtctgtctgcatggcgctccaagtccctgggtcctggccagggtaccctcgggccctggttacaaaatagcaccacagtaaacttgacagctggctccagccttatacttggtcttgtggtggttggttgaccctctgatgtgtgccagaaagaggtcttatcgagacagggatccatccatctatcccccgtccctctagctatttattcatttatcatattttactgggcacctactatgttccagacactagtctaagctctgggaatacaggagggaagaagacagaaaatgtttyttctctcatagaacttaaattctccttgggtttagggagacagataatatatcaacaagccagcaaaatatcagaccgtgatatatgctaggctgagttaaaaaggggtgctgaggtacagggtgaacaggcagctcctacagattgagtggtacttgagaaggtgacatttaaatagataagcaggggccag

SEQ ID NO: 873914 - DNA, 568 bp, Homo sapiens
gcatgcctgtagtcccagctacctgggaggctgaggtgggagaattgcttgagcccaggagtttgaggcaagcctaggcaacatagtgagatcttgtctctaaaagataaaaattaaaaatgctctgctagaaaaaaaacaacacacacacacacacgcaatagaaaacttgaaggcatcttccttttccaatcccagtaaacacacactactcacagcattggtgatttcaggtctttgtagattctctccccactttcccacctaggagggaaccacccacacttatggtagtctcctcatgccctgggaaggacctgaagaagcacttacttccctttccaaccactttctcatttttgcccagggaaagagcagtagcccatctggcccattggtccctgttttctggtgrgtggtggtatcacctgttccacttccacatcttcttggagcacctgcatttgggggcagcaggttctccagatccttatctcctgcattcagagtgggtgacttcgcctcttcttcccatcccatggcataagcactggaggcagggcccagg

SEQ ID NO: 873915 - DNA, 673 bp, Homo sapiens
ttgtaagttggattcctaggtattttattctctttgtagcaattgtgaatggaagttcacttatgatttgtctctctgtttgtctgattggtgtataggaatgtttatgatttttgcacattgattttgtatcctgagactttgttaaagttgcttatcaccttaaggagattttggactgagacgatggaattttctaaatatacgatcatatcatctgcaaacagagacaatttgacttcctctcttcctatttgaatgccctttatttctttatctttcctgattgccctgtccaggacttccaatattgckttgaataggagtggtgagagagggcatccttgtcttgtgctgattttcaaagggaatgcttccaggttttgcccattcagtatgatattggctgtgggtttgtcataaatacctcttattattttgcgatatgttccatcagtacctactttattgagagtttttgaggtgttgaattttatcaaaggccttttctacatctattgagataatcatgtggttggttgttttgtcattggttctgtttatgtgatggattatgtttattgattttcatatgttgaaccagccttgcatcccagggatgaaactgacttgatcgtgatggacaagctttttcatgtgctgctggattcag

SEQ ID NO: 873916 - DNA, 528 bp, Homo sapiens
tctccaccccaattcaacagaatatacattcttttcagcaccacaccacacctattccaaaactgaccacatagttagaagtaaagcactcctcagcaaatgtaaaagaaaagaaattataacaaactgtctctcagaccacagagcaatcaaactagamctcaggattaagaaactcactcaaaactgctcaactacatggaaactgaacaacctgctcttgaatgactactgggtacacaacgaaatgaaggcaaaaagaaagatgttctttgaaaccaatgagaacaaagacacaacataccagaatctctgggacacatttaaagaaatgtatagagggaaatttatagcactaaatgcccacaagagaaagcagggaagatctaaaatcaacaccctaacaccacaattaaaagaactagagaatcaagagcaaacacattcaaaagctagcagaaggcaagaaataactaagatcagagcagaactgaaggagatagagacacaaaaaacccttcaaaaaat

SEQ ID NO: 873917 - DNA, 640 bp, Homo sapiens
tgatggatttctgaagtcttttatgatgcagtaaaatttttcttagctaaaaaaatgggaaatgttttatcctaaaattgagaacaagagcccagtacagtccccttctagtgataaatttattataacttagcatcttatgggcataaaaataataatctaaacttgagttttttattattaaactggactccatgggacaaattcaggagattcatgaacctcaaacaattatgtgcctactgggtgttaacgtatatctggagtggaaggtggagtctatcactttcatcaggttttaagaggtttgaaacactgtactggctttatacgrccttatatttatattcccactattaggctagtttcaaggagacacttgacactggggctaggtcctctatttcaacttacaccatgttgagaaaatggattttaagaaaaatgtgcatgcgtgtgtatgtctgggggttaaggaaatagaaaaaatgattacaatccacggtatggaatgcttcccgagtttgcagtagagactcctggatgctcaagaacaagaatgaggttgtggctagtaagggaagcgagggttactaataagaatcttaaagacaagctctacttcacattcaatctccaa

SEQ ID NO: 873918 - DNA, 640 bp, Homo sapiens
tgatggatttctgaagtcttttatgatgcagtaaaatttttcttagctaaaaaaatgggaaatgttttatcctaaaattgagaacaagagcccagtacagtccccttctagtgataaatttattataacttagcatcttatgggcataaaaataataatctaaacttgagttttttattattaaactggactccatgggacaaattcaggagattcatgaacctcaaacaattatgtgcctactgggtgttaacgtatatctggagtggaaggtggagtctatcactttcatcaggttttaagaggtttgaaacactgtactggctttatacgaccttatatttataktcccactattaggctagtttcaaggagacacttgacactggggctaggtcctctatttcaacttacaccatgttgagaaaatggattttaagaaaaatgtgcatgcgtgtgtatgtctgggggttaaggaaatagaaaaaatgattacaatccacggtatggaatgcttcccgagtttgcagtagagactcctggatgctcaagaacaagaatgaggttgtggctagtaagggaagcgagggttactaataagaatcttaaagacaagctctacttcacattcaatctccaa

SEQ ID NO: 873919 - DNA, 603 bp, Homo sapiens
taagaaacggactccagtaaagggtgtattaacaagccagttgataccataggcaactggaactcaatctctctggggaactctgagaaacagaagatacctcaaaacaaatgtctgtgcaggagcatagaagtccctgagaagtgaacgagctggagcattcatcctttagctcccatcagtcactggttgacagcagcttatggagggagttaactcagcctcatacacaggccaagtaggctgactaggctctagtgctagagaaagcyttctggctaagttataaatatttacaactggaagtcaggccaaaatgcatgggaattgtgcattccaaagcaatatggatgttacagcagcattgtttatcccgacatgtgggtggtgattttcagtaggctattagagatacacacacacacacctctagagtttagggtttaggggagatgtctccaatggaaatataaatttggtagttatcaatatattgccaggttttttaagccatgagagtggatgatatgaccaagggaaaacgaaaaatggacaagggatatcacctaatgactgagctcatggttacgccagcattcagaa

SEQ ID NO: 873920 - DNA, 599 bp, Homo sapiens
gctaattttttctttcaataatctacatttctcataattttcaagatttacaaaccaacaaatgaaaaacaatggtattctccaaaaagtttaattgaaacaaaaacaaaaccttatcaaaaagtcaacacctttacttccttctcaaagacytaaaagggaggaaaatcagtgatcattttttttttaaacctaagtttagcttttgtgccactgtcttgaatagcctgttccctcgggatcctttagtggcaccactagtttttattggattgtcattgcccatgaccttgttggacagagctaggagattgggcaaagttcttccatatggctttatcacttttagtcactatgaggtatctgaagccaaaaatagtttggaaaacattgctctcattgaggaaaaagacaagctggctgaacaaccaaaggctcccccttctaacctactcacaaaagaccatgaagtgctcgctcacctccacggtcatagtgcaatattcctttgtttgtcgattataaggtgcacttcaaaccttccccaacatctccctccaggctccttttcttaatgtgcctacaattagtcagtcgta

SEQ ID NO: 873921 - DNA, 599 bp, Homo sapiens
gctaattttttctttcaataatctacatttctcataattttcaagatttacaaaccaacaaatgaaaaacaatggtattctccaaaaagtttaattgaaacaaaaacaaaaccttatcaaaaagtcaacacctttacttccttctcaaagacctaaaagggaggaaaatcagtgatcattttttttttaaacytaagtttagcttttgtgccactgtcttgaatagcctgttccctcgggatcctttagtggcaccactagtttttattggattgtcattgcccatgaccttgttggacagagctaggagattgggcaaagttcttccatatggctttatcacttttagtcactatgaggtatctgaagccaaaaatagtttggaaaacattgctctcattgaggaaaaagacaagctggctgaacaaccaaaggctcccccttctaacctactcacaaaagaccatgaagtgctcgctcacctccacggtcatagtgcaatattcctttgtttgtcgattataaggtgcacttcaaaccttccccaacatctccctccaggctccttttcttaatgtgcctacaattagtcagtcgta

SEQ ID NO: 873922 - DNA, 600 bp, Homo sapiens
ccacgacaggccccagtgtgtgatgttccccgccctgtgtccaagtgttttctttgttaaattcccacctatgactgagaacatgcggtgtttggttttctgtgcttgcgatagttggctcagaatgatggtttccagcttcatccacgtccctacaaaggacatgaactcatccttttttatggatgcatagtattccatggtgtatatgtgccacattttcttaatccagtcgatcattgatggacatttgggttcgttccagacagtgtggcaattcctcaaggatctagagctagaaataccatttgacccagccatcccattactgggtatatacccaaaggattataaatcatgctgctataaagacacatgcacacgtatgtttattgcagcactatttacaatagcaaagacttgcagccgtgactyttcttaaagtatctaaccagtgagaagatttccctttaatttggccagtgcactgtaagagaacagagctccacttgggagttgtactgctctggtgcacatcctggttgttggtataatacttcgatttcctcagttaaacaaccatagtgcaccctgcaaaca

SEQ ID NO: 873923 - DNA, 591 bp, Homo sapiens
atactcttaaagaagaaatggtcaagtacttcatttcccaactgttttctatttttcttttcccaaaactattccaaaaagtttatggggctttgtgtttattgtttatgaggtaaacaaatatgagtttttactcccagatttttccaaattaaaaaggcagtgacaaatatccatttaaattaaaaatccaagccattattgacattggaacttgattctacatatgcattaaaaaaaagacctaacagggggaaacctacattgtgttcataactggggatatccaacagcatcagtatgtcaaatttccataaatgaatccatgtattcaatgycattcctttaaaaaatttcacggccttttcccacagaatttgacaagacggaaaaaaatcatttgaaagagtcaaggtaaagaacagccaaaatgtgattaaaagaaaggaatgcttgtctttctagacataaagatactctttaatcatagtaatcaaaggactgtatcattaaagctcaaagagaccaactgaactcagtggacaggcaagaaacagattcacacatttatgtcaagaccatggggaaaga

SEQ ID NO: 873924 - DNA, 591 bp, Homo sapiens
atactcttaaagaagaaatggtcaagtacttcatttcccaactgttttctatttttcttttcccaaaactattccaaaaagtttatggggctttgtgtttattgtttatgaggtaaacaaatatgagtttttactcccagatttttccaaattaaaaaggcagtgacaaatatccatttaaattaaaaatccaagccattattgacattggaacttgattctacatatgcattaaaaaaaagacctaacagggggaaacctacattgtgttcataactggggatatccaacagcatcagtatgtcaaatttccataaatgaatccatgtattcaatgccattcctttaaaaaatttcacggccttttcccacagaatttgacaagayggaaaaaaatcatttgaaagagtcaaggtaaagaacagccaaaatgtgattaaaagaaaggaatgcttgtctttctagacataaagatactctttaatcatagtaatcaaaggactgtatcattaaagctcaaagagaccaactgaactcagtggacaggcaagaaacagattcacacatttatgtcaagaccatggggaaaga

SEQ ID NO: 873925 - DNA, 678 bp, Homo sapiens
gactgaggttatgtttcttctgatctgcattttttgtgtgtttgcttttttgttattgacatggacaactacatactaccagtttcacagctaatttgtaagcagtttaaaagaataatttacaagccacatacacatacacacacacacacacacacagagttccctgcagtcaacttgctttgcagctttcaaatccaatggcaatgcctttaccactatagacatttccatttcagaagagacagtggtcaatttacctaacatgcacttattgagaaatgaacatgtggtatatcagggtctggcaaccagaaatggaatttgcatggtacttcttaagtaagacctttaactctattggccaagtaactcctatgttctgagcyactttcattgttaaaatcagggaagtcgttgcatggttctctgcctttcttttcttagtgtttctctccctctctctctccctcttactcaccctaactccatgtctagtcctctgttcaacacctggctcagttgtacagtttctgaatttattaactctttgatgtctttcccttctatttaataaattttccttctgactagtgcttcaaatcttttctcaagggctggtgaaaattaattgctgtatgtagctaaaagaatgttcatttggtatggactctttta

SEQ ID NO: 873926 - DNA, 525 bp, Homo sapiens
agacaccacttgtgaaaaaggaattctaaatgccaagcttacttctatgggtttctttccttctctaaattttattctccataattcctcactgtattgttagttcaaactcttctgttaatattttcccagattttctatttttagcaagaaaaattgactccagtttccagttccatcattacaaaaagagaaaatccctgtttagctcactttaagccagccttgaccaaccatacattatcacaaacataccttttccatggaaattttgttaaggtattgtagaatgcagttttggaaaaagtttatgtaacttatctagcatttggagtaaarttttcctatggcatttgggaattaaaaatgattcaaaatattatattaaccatttttctttctgagaaaacactgaacattatgaacattattttttcttaataagctaaggtcattagtgtttgcatactgctgttcatattgtaatacttacatacattcctatctatatttttgttgtcatcg

SEQ ID NO: 873927 - DNA, 623 bp, Homo sapiens
ccaactttacccactgcatcaagttagttgtcaaaccatcatgatggggctggtcacaaatgtgtgcagaccattgcttatctgtggtaaacccaagtaatttcttctattcagcagaatctagaattattggtgcggtcccctagtcatttattctggggatctacrtaaccaagtttcattagtcttctgcagaacttctccatgaagtagcctagctctttatttaatagacagcctaccctgtggatgtccctgacatctggccatggcccttgactcccactgtagtcttttttggtgatcaatgataataagcaaattactttgtagatgaatataatatctaaccaggtagccatagtaacatgaaaatgcttttcgggtaactagggaaaaaatggtttaatttctttctgttccacatttctagttaaccctttagagatttcattttcatcagtgatgccagtagtagcttagagttctctctctaatccacttagctaatttccctagggctatttccaccaatgccagttggtaagacttgtcccaagaatcttctacaaggctcttggcacttcttatcaaggatttgttgggagccatcttgaccccaa

SEQ ID NO: 873928 - DNA, 597 bp, Homo sapiens
tagggctcaatctcggtggggaccttaatggtgtagactagaacatgtctgacggtttcccatatgaggattgaagaagctggggtatttatcctccaattcccatccattattgcgtgagggtagctcttagggctggaaccttattgttcagccaagcacctccaatggctagaaaacagactgtcccaagtgattacaaaaacgcaagcatggactgaaagggcacagtccaagaactatggtggggcactgctggagtcagctacagatagcattctgctttcctatacaacctaaagattactcaggctattgctggttgcagggaaacctctgcaggattayggagggatccatataaatgtgttgttcctatgattaatttgaggaggtaatagaatgcttttgacagtatggcagcagcttcttcaacagtcaattaacttacagctttctgtttggcaatgcaaaatacccatagccctagcaggtacaggacagctaacgtgtataaagacagaagagcaactaagagaaacattttccactagataactggcttcagttttaccaaaggttgtggaactattacct

SEQ ID NO: 873929 - DNA, 693 bp, Homo sapiens
aacctctttgtacctctgcttggtcttctgagttttcaaatggatgcaaagatacttacttacaggttgatgattgtgtagatcacataaaattgctttaaaaaggctgatacatttattacctgtacgcagtttgtgatgtgtattaaaagttaggtccctttccttacttttgtctggtagatataaaaattcagcctgttgtcacaacaaagatttgcttaatttcatgtggccctgacagtataagctctgtctgctggaagggatagtgagaccacttgcactcctatccattggagtgtatccagggccaaaagaggacaaagtatgatttgattggaagtgagagtaaatgggcacaacaagaagtatcactgcatatgaaaaataatttgagagacccttgtctgccttagttcatataaattattgatattaaccataataaaatatccatgtttactttcatattaaaagagcatctggcatagagcattgctcaatacttattrgttgaggaagtgaattcatttttgaatgaaaaataatgccttaaagtgtttgccaccaggtaaaattgattcatcatacttaactgtggccttcggtaccttgctgcacaacccctcactcctaccctgaagagtgtgaaccccacagagattcattcttttattgtgcagatgacag

SEQ ID NO: 873930 - DNA, 635 bp, Homo sapiens
ataatgccttgaacatttggggtaagtccaaactggttatgtgtctggtacaatgagaagcatgcttccccaacaccgcaaaaaagaaaggagagagtgagagcaagagatgagatgtccttaggacaactatttaccaggtaaagttgaattcagaaagactcataaggatttaaccatatgagaaaaagccaaaacattcyttaaagccccagtatcatgacacatagacataggaagaaatatgcaaagcaactggaatttcattgatgttggagcaatgagcaccttcctatgcctacatgattagatacaggtattagccctgtttagtccgaaatggattgggttaggtatttgaacctgatgaaaacacagtgataagtgagattcttattaacaaaaaaaaaaacttttattcaaccagcagcaatataacacaaaacacataattattatcttattcttcattgtatttcatttaacttttatcttgaactgccattaaatttgtagggaggccagaccatttcctaggaaaaattcccattttcagtgtagataaaagtcagaggacaattatagtatctggcagatggaatctctacttgtaagattatgtttagctactgtta

SEQ ID NO: 873931 - DNA, 618 bp, Homo sapiens
tcaaattgtcagaagttagagacaaagaaatggtattaaaagcagcaagggagaagtgaattgtcacatagaggagaatcactgtaatactatcaacagtttttagcagaaattgtgcaagtcagaaaatttctttcttttaaaatttcatacctttaatattttggtcatatttcaaaaatatgttcccaactttgaggtagtrtcccactctttcagaaataaaaacataatgagtccatataatttggctgagtccatgacacattttttaaaaggtaaatcttagcaatttttctacccaaagcaagtggaaaccagtagaagaactaaaactatattgtcattgtggtgatttttgctgcaggataataatgcaatttgtatttttattaaaatcctatataaatttgtaagtatagtatgttgcatctaataatgaatttcttaaatgaaggaaaaactatctaaagacatttattctgtgttgaggtttacctgaaattaactttgcttttgtggctttaccttcagtatatagtctttggaattaagtttcaaatgaatttcaggaggatttgcacaacgtgtttatatggattgcaatatttgctgaag

SEQ ID NO: 873932 - DNA, 670 bp, Homo sapiens
taattgtcagattcaccaaagttcaaatgaaggaaaaaatgttaagggcggccagagagaaaggtcaggttaaccacaaagggaagcccattagactaacagcaaatctctcagcagaaactctacaagccagaagagagtgggggccaatattcaacattcttaaagaaaagaattttcaacccagaatttcatatccagccaacctaagctttctaagtgaaagagaaataaaatcctttacagacaatcaaatgctgagagattttgtcaccaccagkcctgccttacaagagctcctgaaggaagcaactaaacatggaaatgaacaaccagtaccagcctctgccaaaacatgccaaattgtaaagaccatcaatgctaggaagaaactgcatcaactaacaagcaaaataaccagctaacttcataatgacaggatcaaattcacacataacaatattaaccttaaatgtaaatgggataaatgctccaattaaaaggcacagactggcaaattggataaagagtcaagacccatcagtgtgctgtattcaggagacccatctcacctgcacagacacacataggctcaaaataaagagatggaggaagatctaccaagcaaatgggaaacaaaaaaaagcaagagttgcaatcctagtctctg

SEQ ID NO: 873933 - DNA, 588 bp, Homo sapiens
gtgaagctggaaaccatcattctcagcaaactatcgcaaggacagaaaaccaaacaccacacgttctcactcataggtgggaattgaacaatgagaacacatggacacaggatggggaacatcacacaccagggcctgttgtggggtggggggagggggatwgcattaggagatatatctaatgtaaatgaggagttaatgggtgcagcacaccatcatggcacatgtatacatatgtaacaaacctgcacattgagcacacgtaccctagaacttaaagtataataataaaaaaaagtaagaaaagaattgtgctgcataccaataatacaatttatctatctactttactattaatgaatatttatgttgtttctaaattttgctattacgaatttgatactatgaatattcccatatttgccacttggtaaatatgtgtatataattctgctagtatacatgtcacagtaaaattgatgggtgatagagcacatgtatgttcctgtaagctagacaatgcctaacagtttatccaagctctacatatagtgtatgagtatttcacttgttccacatccttgccaa

SEQ ID NO: 873934 - DNA, 618 bp, Homo sapiens
ctccagacattgccaaatgtcctcttgggagcaaaaggccccgtccctaagaaccattgttccagagtctatgactactgggaagtgtgaaggtagtttgtagctcctcatactcatgcttagtttagagtaaatgtggctcaagaatgtaataggtccccttagttttactcagacaaatagagtargcaaagctggtgcagagtgtacagaattgggagaagggcagcacggttctggaagcaactatagcagatgaaggatgaaattctggggcagggtaagctgggggtgggagaggagatgtcccactggttattctgcagagaagttcctgggcagggaagactgcttaggtgaagtcagctcaggtaggaagggattgatcattaccataggccaaggcaagcaagattcaacaagagtcccaaggctaataactgggcatagtggcatgcacctatagtcccagctactcgggaggctgaggcatgagcatcacttgagtccaggagtccaaggctgcaatgagccataatggctccagggcactccagcctgggtgaagagtgagacaccaccccaaaaaggaagagccctgaggatgagagaaccaat

SEQ ID NO: 873935 - DNA, 598 bp, Homo sapiens
aggcagcagaaacctctgcagacttaaatgtccctgtctgacagctttgaagggagtagtggttctctcagcacggagtttgagatctgaaaatggacagactgcttcctcaagtgggtccctgacacccaagtagcctatctgggaggcaccccccagtaggggcagactgacacctcacacagctggtggaggtttctgagatgaaatctccagaggaacgatcagacagtaacatttgctgtttagcaaattcactsttctgcagcctctgctgctgatacccaggcaaacagggtctggagtggacctccagcaagctccaacagacctgcagctgagggtcctgactgttaaaaggaaaattaacaaacagaaaggacatccacaccaaaaccccatctgtacatcaccatcatcaaagaccaaaggtagataaaaccacaaagatggggataaaacagaacaggaaaactgaaaattctaaaaatcagagcacctctcttcctccaaatgaatgcagctcctcacaagcaatggaacaaagctgggtggagaatgactttgatgagctgagacaagaaggcttcaggcgatc

SEQ ID NO: 873936 - DNA, 598 bp, Homo sapiens
aggcagcagaaacctctgcagacttaaatgtccctgtctgacagctttgaagggagtagtggttctctcagcacggagtttgagatctgaaaatggacagactgcttcctcaagtgggtccctgacacccaagtagcctatctgggaggcaccccccagtaggggcagactgacacctcacacagctggtggaggtttctgagatgaaatctccagaggaacgatcagacagtaacatttgctgtttagcaaattcactgttctgcagcctctgctgctgatacccaggcaaacagggtctggagtggacctccagcaagctccaacagacctgcagctgagggtcctgactgttaaraggaaaattaacaaacagaaaggacatccacaccaaaaccccatctgtacatcaccatcatcaaagaccaaaggtagataaaaccacaaagatggggataaaacagaacaggaaaactgaaaattctaaaaatcagagcacctctcttcctccaaatgaatgcagctcctcacaagcaatggaacaaagctgggtggagaatgactttgatgagctgagacaagaaggcttcaggcgatc

SEQ ID NO: 873937 - DNA, 587 bp, Homo sapiens
tgggccctgacttgctaagatgggagcaagagcttagggctaaaactcagcagtcccagctctgggggacaaggacccacaaagtgatgcaagatatcctgagttgggtgtgacaagtacaccttgacacacaaactgcacagggaggggaggaatctgagccagcttcctccacaaagcacagaagtctgccaaaagcccaggctggatagggagcatcacactgttgggaaatgtgcaattttcactcagccagcatcactaccagctccgggcttctctcctctggcctcccaccttgcagctttgagatcccaggcctctcarggctctggctgagggctgtgagccagaggctgaggtagccaggtctgccttgggctgtcactcagggctgagctctgctgaaggatctgggaggtcagtaggcacctgtgtccacccagctgtccatacagatccctgcctgcacaagagctgctgcagcatttcaatagggccatcccaggcaccctaggacttgagaccagcctcctctgtatggtcccttccctggtgcacctaccacagcccactctgatgacccc

SEQ ID NO: 873938 - DNA, 631 bp, Homo sapiens
aatccatttcctgtgtcttccagcttctgctggcttctggcattcctttgctgtggccaaaccactccaatctctttctctttggtcacattgccttctccttctctgtttgtgtcacattctccctctgtctctctcttataatgatacttgtgattgcttttagggcccacccagacaatctaggataatcactccattactccattttaagattcttaatcacatatgcaaaggccatttttaaagtaaggtaacatttatagattccatggattggggcctgatatctttgggggccattattcagtctgctacagtcttctctctggcccccartgatttatgttcattccacggtaaaatgtgttcatcccacctccaaatcctcaaaagcctcaacccaacacagcatcaactaaagcccaaaatatcatctaaatatcatcagcttgaaagtcctaaatctcattatctaaattacctaaatcagatataggtaggatactgtgtatgatccatcctggggcaaaatttctctccatctgtggacctgtgaaacaagaagacaagatatctgttccccaaatataatgatgatacaggcatcatgatgtaacagtaatagaca

SEQ ID NO: 873939 - DNA, 629 bp, Homo sapiens
attttctaatatttttgtgtcatttgtttctagtttcagatcattgtgattgaaaagacacttgatttgtttcaattttcttaaatttgttaacgtttgttttgtagcctaacataagatctatcctggagaatgttctgtgtgttcttgaggaagacrtatattgtactactgttggatgtgtttctgttaggcttatttggtctaacgtgtagttcaagtctgttgtaatctattaggatatttttctctattttgttcttcaggtttctttctttagagtgactgtatgccaaaatagccattctttagaagaactcaccagagagaaaattggtttcaggtgtgtcaggtgaaacacaaataggaggtaaacccaaaatgcatgaaacaaaaggaatttattatgcacaagtacaagagaggttggggtgctgaagggaggacagtgggtagtctgaaggtggcaggaagttcaacgtgcaagagaggccccatggaactatacccttattaaggttcatgtgcattaccccttagtttttccatgggggttgtggattggctagtttaaaagggaacacacacaggccaggcgtggtggctcatgcctgtaattgcagcacttt

SEQ ID NO: 873940 - DNA, 621 bp, Homo sapiens
tgtaaatactgtcccttttgtggttttctgcatcacatgaataaatgtcaatatattaataatttttatatacccatgaatataataccatcatattgttctggacaacaacagtacctaaatctgacactgtgactacatacagttttagatgtactagtacaaataacgtaatcaaagatattttgtttatttttgtgtaaaaatcattacagtctaaggcaggcatgggtgaaatcagcgactgagtcctctgctcccgggcaactggggctctgaagagkgggggtcaggggagtcccctgagaagtttgtgtcctggaatccaagacaaggtgagggcagggcctgaagaaaatacaagtctcaggaaatatgtagatttcaaattgatctgacaaaaaaccctagtggtctgtccaaagaagccagtagccagaagaagcattacaggcaggaagcattatgaagttaagtgtgtctggtgttggaagccttttgcacagtgctagtttgtgtgtgcagtggtgattttggcacctgtttaataattgtatatcctcaatcgcaagtattggacaggatattgaataatgggaggttgcaatttcttaatgtgtt

SEQ ID NO: 873941 - DNA, 603 bp, Homo sapiens
actagggtggtctaggagtagattctagggagttccccaagctctggcagtacatgtgtcttgtatggggccatatgcacatttttggaggggtgatagtctatgtcttttatccatttctcaaagcaataaaagtgaagacccactagccaactgtagcagtttcccaagtaaaatataaagatgattcactggggtaggtgaagaaaatactagaatttctatttatattcatgctcatttagaaaagaaaagctgtcctaatatgtagtatatggattgagagcagcatgtatcagtctatagagttgttgtcctacaatattttattaacagattgcaggaatctaaaaggttggagaatagtgctctagggcagtgaacatcaagttctcatattttccaaaacatctttaatttacatgtgcaaggaggtgaaggaatagtaaattctcaaatamtaatacattttcattcacttcaatgttataagatacaacttattcagggaagacggcagctcactgtgattaagcagtgtctggatgctgcacatccctgtatcactgggaatgattatttctaaaggcccagaattcccag

SEQ ID NO: 873942 - DNA, 651 bp, Homo sapiens
taagctttggagggattattggaaagacatgatactgttttgcaatgtgaaaaggacatgagatttgggaggggccaaggatggaatgatatggtttggatctctgtctctaccaaattttatgttgaattataatccccartgttggagctggggcctggtgggaggtgattgaatggtggaagtgtttcttataagtggtttattaccattcccttaatgctgttctcataatgaaatctggttgtttaagagcctgtagcacctcccctttcactgtatttcttgctcctgctccaaccatgtgaagtgtctgctccccctttaccttctgccatgaatgtgagtgtcctgaggcctccccagaaacaaaacagatgccagcaccatgcttcctatatagcctgtggaaccatgagccaatcaaatctcttttctttttaaattacccagtctcaggtatttctttgtagcaatgcaagagtgaacaaatatagaccctaatgatgagtttatatgctttattaagaaaaagaagagagagagagagattgctctccttctgtattggatatagcaagaaggcagctatctgcaaaccaggaagaagattatcaccaagaactgaactgattggcatgttgatcttgg

SEQ ID NO: 873943 - DNA, 651 bp, Homo sapiens
taagctttggagggattattggaaagacatgatactgttttgcaatgtgaaaaggacatgagatttgggaggggccaaggatggaatgatatggtttggatctctgtctctaccaaattttatgttgaattataatccccagtgttggagctggggcctggtgggaggtgattgaatggtggaagtgtttcttataagtggtttattaccattcccttaatgctgytctcataatgaaatctggttgtttaagagcctgtagcacctcccctttcactgtatttcttgctcctgctccaaccatgtgaagtgtctgctccccctttaccttctgccatgaatgtgagtgtcctgaggcctccccagaaacaaaacagatgccagcaccatgcttcctatatagcctgtggaaccatgagccaatcaaatctcttttctttttaaattacccagtctcaggtatttctttgtagcaatgcaagagtgaacaaatatagaccctaatgatgagtttatatgctttattaagaaaaagaagagagagagagagattgctctccttctgtattggatatagcaagaaggcagctatctgcaaaccaggaagaagattatcaccaagaactgaactgattggcatgttgatcttgg

SEQ ID NO: 873944 - DNA, 651 bp, Homo sapiens
taagctttggagggattattggaaagacatgatactgttttgcaatgtgaaaaggacatgagatttgggaggggccaaggatggaatgatatggtttggatctctgtctctaccaaattttatgttgaattataatccccagtgttggagctggggcctggtgggaggtgattgaatggtggaagtgtttcttataagtggtttattaccattcccttaatgctgttctcataatgaaatctggttgtttaagagcctgtagcacctcccctttcactgtatttcttgctcctgctccaaccatgtgaagtgtctgctccccctttaccttctgccatgaatgtgagtgtcctgaggcctccccagaaacaaaacagatgccagcaccatgcttcctatatagcctgtggaaccatgagccaatcaaatctcttttctttttaaattacccagtctcaggtatttctttgtagcaatgcaagagtgaacaaatatagaccctaatgrtgagtttatatgctttattaagaaaaagaagagagagagagagattgctctccttctgtattggatatagcaagaaggcagctatctgcaaaccaggaagaagattatcaccaagaactgaactgattggcatgttgatcttgg

SEQ ID NO: 873945 - DNA, 586 bp, Homo sapiens
taggtttatttggctcacagttctgtaggctgcacaagaggcatggtgccagcatctgcttagcgtctggtaagggactttgggtggttccactcatggcagaaggtgaagaggagctggcttgtgtagagatcacatggcgagaaaagaagccagagagygagggaaggtgctagactctttttaacaactcagctctgtagagaatttccatgggaactaataaagcaagaactgagtccccctcctcccagggagggcattaatctattcatggagaatccacccccattacccaaacaccttccattaggcctcacttccaacagtggagatcaaatttcaataggacatttgaagggaacacacatccaaattatagcagactctatcttacactctgtacaaaaaaaataaaataaaataactagaaatggcttacagacttaaatgtaagatctgaaattataaccctcctagaagaaaacataggggtaagattctttgacattagtgttggcaataattttttggatatgacaccagaagcataggcaagaaaagaaaaaataaaaaagaatgagac

SEQ ID NO: 873946 - DNA, 598 bp, Homo sapiens
gagaacaaagtgtctgatttccatccctgactgagtcttagtgcctagcaagctgtttaataacaactctgtgcctctgttttctcatatataaaatggtgacaataatagtgtctatctcataggctcattgtgtccataaartaaactaatacatatagagagcttagagaaaattcctaatatgtagaaatgttcaagaaaaattaaccctatcatcatcattgtccttattgttatttgctcgtttcacttaatacatatcttgagtcccaggttacatgcattttgttttaaatatctcaaaatctagaaaaagaaacagacacataaataaataactcagtaacaaactatattttgctaaagttgaaacatttacagacacacagaaagctgagcaacctattcttctatagaggctcctatagtggtgagggtgagggatagaggaaatcttcaataaagatgtgccactttagttatatattgagtaacatgtaggagtctgaaggatgaagaatttaatatatggttaagtcttcttcctcagcataatcaatttgaatcttcactggcttacaaaacacttggattt

SEQ ID NO: 873947 - DNA, 608 bp, Homo sapiens
tcttttgagaagtgtctgttcatatactctgcccactttttgatggggtggtttgatttttttcttgtaaatatgcttaagttctttgtaaattctctatactatccctttgtcagatgagtagattgcaaaaattttctmccattctgtaggttacctgttcactctgacggtagtttcttttgctgtgcagaaactcttttagtttaattagatccaatttctcaattttgacttttgttgccattgctctggtgttttaggcataaatgaagtccttgcccatgcctatgtcctgaatggtatgcctaggttttcttctagggtttttatggttttaggtctaacatttaagtctttaatccatcttgaattaatttttgtgtaaggtataaggaagggatccagtttcagctttctacctatggctagccagttttcccagcaccattgattaaatagggaatcctttccccatttcttgtttttgtcaggtttgtcaaagatcagatggttatagatgtgtggtattatttctgagggctctgttgtgttccattggtctatatctctgttttgggaccggtactgtgctgttttggttactg

SEQ ID NO: 873948 - DNA, 513 bp, Homo sapiens
tgatggactcacagtttcacatggctggtgaggcctcacaatcatggcagaaaatgaaggaggaacaaaggcatgtcttacatggcagcagacaagagagagctatgcaagggaactcccatttataaaaccatcagatatcatgagacttattcattaccacaggaacaatatggaggaactgtccccatgattcaattatctctacctggcccctcccttgacacacagggattattacaattcaagttgagatttgggtggggacacagctaaaccatatcgttctgcccttgactgytcccaaatctcatgtcctcacatttcaaaaccaatcatgccttctcaacagtcccccaaaatcttaactcatttcagcattaactcaaaagtccacagttcaaagtctcatctgagaccaggcaaatcacttccccttatgagcctttaaaatcaaaagcaagttagttacttcctagatacaatggggatataggcattgggtaaatatac

SEQ ID NO: 873949 - DNA, 686 bp, Homo sapiens
tagtgacgaaagtggaagcctcagggtagaacacaggcttcagtgggctgggctacaatcaaaatgttaaggtggggcagggtggctattctatgggtctctggccagggaaggtaacacccctcaatggaagcagaggaagctgacagctgttgggcccatggcctcctgcaraagcagaacccaccactggtgcacacaaagatgaacagtctcccctttccctctctagccaggccatggcaactgcagcagccaggaatagatactactttgagggtgaagagtgaagacctcgaaagagctctttgttttaaatccctggccataatatatatttatatattggcattcatttggatgggttctcaaatgacccaattaggtagaatgcccagggcctcctatgagagacagccttcccctatcttcaaaagcccagtaggtgaccaagtagttaaggatcaaaacagtgttcagaaagatagagccataattatgcatgaccacttaagtctctttaggatattgtaggaggcacttaaccactcaaagatttttagcccctagacaaaaaagtctacatgagggtgacagaccaaacccctaaatggtaataaactggttgtcttcatagtcttttccttagttcagggttttgggctctgatacccaaactaaacgtt

SEQ ID NO: 873950 - DNA, 576 bp, Homo sapiens
caggacagagggcattcaagcagggaaaatgccagacacttttaaaaccatcatatctggggagactcactcaatatcatgagaatagcatgggggaaacccaccaccatgatacaattacctccacctggtcccagccttgacacatggggattatggggattacaatttgaggtgagatttgggtgaggacacagaatcaaaccataacaacagcatycccttggtgatatgtgagttgtcactcagtaagttcacacaagatttggttgtttaaaagagtctggggccaggcacggtggctgatgcctgtaatcccagcattttgggaggctgagacagggggatcacctgagcttgggagttcaagaccagcctggacaacatggtgaaaccctatctatactaaaactacaaaaattacctgggcgtggtggcacaaaacctgtaatcccagctacctgggaagctgagacaggagaatcgcttgaatccaggagacagagattgcagtgagccaagatcacgccattgcactccagcctgggtgacagagggagactccattaaaaaaaa

SEQ ID NO: 873951 - DNA, 634 bp, Homo sapiens
atagccaagacaatcctaagcaaaaagaacgcagctggaggcatcacactacctgacttcaaactatactacaaggctacagtaaccaaaacagcatggtactgctaccaaaacagacatatagaccaatggagcagaacagagacctcataaataacaccacacatctacaaccatctgatctttgacaaacctggcaaaaacaagcagtgggaaaaggatctcctatttaataaatggtgtttggaaaactggctagccagatgcagaatactgaaactggatcccttccttataccttatacgaaaattaactcaagatggattaaagacttgaatgtaaacccaaaaccataaaaatcctagaagaaaacctaggcaatacyattcatgacataggtaaaacctcatgacaaaaatgacaaaagcaattgcagtgaaagccaaaattgaaaaatgggatctagttaaactaaggaccttcttctcagtaaaagaaaatatgatcagcgtgaacaagcaacttccagaatgggagaaatatttcctaaggatttaaagaatgaagatctcagaggaaaacagagtacagctccaaaagcttacgcaatattggatatagttttctaaccct

SEQ ID NO: 873952 - DNA, 550 bp, Homo sapiens
ctattttgcactaaatatgaatttaaagatgtatatcttgttcataacggaagtatttccagaatgcaggagaatacataccaactcttatgtaaagagtacaacccagcactttgggaggctgaggctggtggatcatgaggtcaagagatcgagaccatcctggccaacatggtgaaaccaaaataccaaaaaaaaaaaaaaaaaaaaaaaaattagccaratgtggtggtgggcgcctgtggtcccaactactcgggaggctgaggcaggagaatggcgtgaacccgggaagcagaggttgcagtgagccgagatcaccccactgcactccagcctggtgacagagcaagactctgtttcaaaaaaaaaaaaaaaaaaaaaaaaagtacaatttaaattaatctgagtgtttggaactctgtgactaaaatctctaaaggtgggacttgcctcccctaaaagccaaagcttcatttatagagtattgtttcaaattttctgttggaaacatatttttttctcaagacaatcttacataagaagagct

SEQ ID NO: 873953 - DNA, 569 bp, Homo sapiens
tttgacccagccatcccattactgggtatatacccaaaggactataagtcatgctgctttaaagacacatgcacacgtatgtttattgcagcattattcacaatagcaaagacttggaaccaacccaaatgtccaacaatgatagactggactaagaaaatgtggcacatatacaacacagaatactatgcagccataaaaaatgatgagttcatgtcctttgtagggacgtggatgaaattggaaatcatcattctcagtaaactatagcaagaacaaaaaaccaaacaccacatgttctcactcataggtgggaattgaacaatgagaacacatggacacaggaaggggaacatcacactctgggaactgttgtagggtggggggagggggrgggatagcattaggagatatacctaatgctagatgacgagttagtaggtgcagcacaccagcatggcacatgtatacataagtatctaacctgcagattgtgcacatgtaccctaaaacttaaagtataataataataataaataaataaataaataattaaataaaataaaaaa

SEQ ID NO: 873954 - DNA, 639 bp, Homo sapiens
atattaaaagatgctccatctcattagcaacaaaaaatgcaaataaaactacaagaactatgcacatcatgctataaattttttaaactattattatatggtacatgtgcacaatgtgcatgtttgttacatatgtatacatgtgccatgttggtgtgctgcrcccattaactcgtcatttaacattaggtatatctcccaacgctatccctccctgctcaacccaccccacaacaggccccagtgtgtgatgttccccttcctgtgtccatgtgtgctcattgttcatttcccacctatgagtgagaacatgtggtgtttggctttttgtccttacgatagtttgctgagaatgatggtttccagtttcttccatgtccctacaaaggacatgacctcatcattttttatggctgcatagtattccatggtgtgtatgtgccacattttcttaatccagtctgtcactgttcgacatttgggttggcgccaagtctttgctattgtgaatagtgccacaataaactcatgtgtgcatgtgtctttatagcagcatgatttataatcctttgggtatatacccagtaatgggatggctgggtcaaatggtatttctagttctagatccctgaggaatcg

SEQ ID NO: 873955 - DNA, 639 bp, Homo sapiens
atattaaaagatgctccatctcattagcaacaaaaaatgcaaataaaactacaagaactatgcacatcatgctataaattttttaaactattattatatggtacatgtgcacaatgtgcatgtttgttacatatgtatacatgtgccatgttggtgtgctgcacccattaactcgtcatttaacattaggtatatctcccaacgctatccctccctgctcaacccaccccacaacaggccccagtgtgtgatgttccccttcctgtgtscatgtgtgctcattgttcatttcccacctatgagtgagaacatgtggtgtttggctttttgtccttacgatagtttgctgagaatgatggtttccagtttcttccatgtccctacaaaggacatgacctcatcattttttatggctgcatagtattccatggtgtgtatgtgccacattttcttaatccagtctgtcactgttcgacatttgggttggcgccaagtctttgctattgtgaatagtgccacaataaactcatgtgtgcatgtgtctttatagcagcatgatttataatcctttgggtatatacccagtaatgggatggctgggtcaaatggtatttctagttctagatccctgaggaatcg

SEQ ID NO: 873956 - DNA, 666 bp, Homo sapiens
aggaaagattgtgacatattgcaagaccaggcacacagctgatgttactcttttgccagagccatgcaaggagagcattttgagatatctctggacctatcacctaggtgatgtggctctcctgcttgggccctgccagtctggacagtgacatatttctaggccaggcacacaggtgatggtactcttttgccagggctatgcttcatagagracaatgtgacaaatctctgagcctatctcctaggtgaagtgactccctccttgggctctactcacatggagcattgtgacataagcaaagaacctatgcctaggtgatgtaactctcttgcctgggtgctgtcctaagagagccttgtgacatatctcattacccagaacccatgtgatgtggcccttctgcctgttttttctgcccacaaattaaattgtgacatatttctagggaagcacctaggtgatatgactctccttgtctacctgagctctgcctacttggtacatggggacatatctttgatctcaggtcctaagtgatatgattctcttctcctgccttggtctttaaaatggtgagattgtgacatattgctgagcccagcatttaggtcatgtgaccctactctgttttctgaaccatgcccacaaagggaaattgcgacc

SEQ ID NO: 873957 - DNA, 665 bp, Homo sapiens
agcacgtcactagtccatgatcttcaaagtatagaaacatctgtaaagaaaattaaaactgattatagggaccccgaaaagcagagaagtgtctaataccacattaacacatgtgcgtgtgagatatgtgccttaaagactcctttggatctgggtgtagaacttcatttcatttttcagtattggtaagtcacatacaaataatatctaatattttaatcagaattttgttaatattgttcaactacagaatagctatttttgtaaagtacatgaattctcatagttcttccagattttttcatcatctgatttttcaagtattggttttacttaaccattacttatactgtataatggctatggaaaaaatgtctgaattctaaatttcccaagataaacactggcttcagctctctataaaagtagatatactcaatccataggtrttaagtgtcagcactacgtttatggtccctaccctcaagaagattctgaaaagcaaatcataattgaaacaataaaggtaccaatgagagattatgtaatcaggtactaaataatgcagtatagactatgacatgtcacagaaattcagaaaaagcttcaaagggagaaaatgccccaagtaaggggaaggggcttgcccagtgaaggaataggct

SEQ ID NO: 873958 - DNA, 667 bp, Homo sapiens
aaccaaagaaggtgactctgtgatgctgggaggactctgaaaattacattttccagttacccttgccagcaagcttccttttaggttccatctgcaggatgcatagagagaagagcagaaggaacttccttcctgtttttcctgtctttgacggcattgctagatccagcctcccatgagttgtggcatttccagcacagcgctgtggcacactctcggaggaatcagcagctctagggcagtggctattttcctagaagtatagaaccagctctgcagagcccctcttctaagctcctagattctggtaaccccaccccttcccttttgtttcaacaaccagcagtatcagctgttgcctgagtttttaaatctctgtgttaccctttttctctttcaggcacccaacatctgtggaaaacacctcttagactgagatatccagtgtggctcctattttcctggctagactctaactgatacgaagtcatggagggttttgagatctcaaaagatttgtsttgcattctgatagcatcaacctggctgttgtgtcggaattgactgagggatcgaccagctaggaggctatttcaatcaaaatagatggggataaagaagtggttacattctgtatatattttgaaggtattaatgatgggatttg

SEQ ID NO: 873959 - DNA, 635 bp, Homo sapiens
ccataagatttagagtaaccaactagaaatgccacagggttttctcctgaccacagaagaactctatttacagagcagtttgactagtccagttgaggtacactggagctacgccagggtcttcatttactctccagtgtttcaggaaatccaaatgggtgattcatctggggtcatccaccaaaaccaggcctagctacaggtgtagctcctaccccagtggttttggggaccctcacaaactcaaaataaaaaacacaaactagaggaaatgaaaatgatagcatcgtgggagaggggagaaaccaccgtgtaagaggagaccaagatgctatttcaattytaaagataaatagctctatgactttaccaagatttacagcagtgatctgtttcctcttgaaacagtggaaaagaaaaaaaaaacccagaaaatgttttttataattgatatcattgtaggatcaccaggtgagcttttaaaaactaggaatattcaggacccctcacagagattctaatttcatgcatctgggatacaacctaaatattagtatttttaagactcccccaaataattttaacgtgcagcaagtgttaaaaaccacaaatctgaaattccaaatgagctcaaa

SEQ ID NO: 873960 - DNA, 591 bp, Homo sapiens
attattttcctgcatctattatgtgagagatattgagccagggtaaggggtagagagggtggaatcctcttttcatttaaaaagactaagatccactcagtccaataattaaaatattacaatggtgttaatgtggtcttctgtggtgctgaatttttggaatatctatatgttatgtgaattgacacatttagataatcataggggaaaataaattctccaaaactttttgattaacttyagaaaataaatttgagtggcacattggtatataagggtaaagctctttcttgtctcctgatagtattcataaaacggtgaaaataaaaacttggaaagagtgacaataaaattttattactagaatgaacttattggcatagaaatgaaagtcaagtgaaagttatttaaaatgagggaaagtggagtaccagatcttaacaaggacaaaagactacctaaaacctgacacacagagcatgcaaaacattctcaaaaaatttccagataaaattcaaaatgcagccacaggaagagggcaaaatttcttacattgtgttttagttcacacacattaaatttatacattaa

SEQ ID NO: 873961 - DNA, 591 bp, Homo sapiens
attattttcctgcatctattatgtgagagatattgagccagggtaaggggtagagagggtggaatcctcttttcatttaaaaagactaagatccactcagtccaataattaaaatattacaatggtgttaatgtggtcttctgtggtgctgaatttttggaatatctatatgttatgtgaattgacacatttagataatcataggggaaaataaattctccaaaactttttgattaacttcagaaaataaatttgagtggcacattggtatataagggtaaagctctttcttgtctcctgatagtattcataaaacggtgaaaataaaaacttggaaagagtgacaataaaattttattactagaatgaacttattggcatrgaaatgaaagtcaagtgaaagttatttaaaatgagggaaagtggagtaccagatcttaacaaggacaaaagactacctaaaacctgacacacagagcatgcaaaacattctcaaaaaatttccagataaaattcaaaatgcagccacaggaagagggcaaaatttcttacattgtgttttagttcacacacattaaatttatacattaa

SEQ ID NO: 873962 - DNA, 596 bp, Homo sapiens
tctcaggaacatagtgccttctgtggtcttgagaggctgaaggcaaaatttggagagggaggggttcagtgctccctcccaggacatggttggggtcagcctctccccaccatagcaaagaacagacttaggggctatctgttactcattaccctgcagccagccctctggacctacctgcctataccctgggagcaggagctaaggcagctttccccgccctgctcccaccccaytcctggagagaacgttcatggttagacctttccctctcttagatcactctccatctggcttgacctagtggaatttgaggaaacccaaaactcggatcttaaaagctggtgttgcttgggagctgctgtcctgccttaccgccctcccccacattcctaaaacacattttcaggtggtgtaagcttttcagggcttatctgcaagggccatccctgggtgtttatgaccgttaggtattttgtagcactgcagacttcaaaggcaatgtgtctagagaccagaacttcaaattcctttcatacttccttccctgaaaaatccaaggggcttacttttctgtaacaggtgaactgggctgc

SEQ ID NO: 873963 - DNA, 607 bp, Homo sapiens
tgaggcacaagcattgcttgaagccgggaggtggaggtagcagtaagttgagatagagccactgtaccccagcctgggtgacagagactgtacaaaaaaaaaaaaaaacatggaatcaaatcataattgcctggggaaggagcaaggaaaaggrgagaaaaggattataaaggggcatgaggaaatgttctagggtgatgaatatgttcattacctggttacattcatgagaaaacttatcaaattacatattttaatatgtaccctttatagtatgtcaacattacaggtactctcacaaagctatcaacaaaaataggaaagaagcagcagcaagcaacaacagccataactactgcctggagaatttcccccaaaacaaacaaaccaaaaaaagtgtgggctgcagctaaaagcagtacatttttaggattaaaatttatatttaaatgaatatactagaaagaaggactaaaaagtaataagccaaacatccatctcaagacttctgtttgttttttgttttttttttaagggtagtcaagtgaagcagtgggagtgaagaaggaataaagaaatctgtaactggctatgattgatgagttat

SEQ ID NO: 873964 - DNA, 579 bp, Homo sapiens
ctaggaaccgtgagacttaaagtggcaaggacatggaagaatctgctggaagaagtcagccacctacgttaaccaggagattttatttacataaaagtctcccccagtaaagataattgcattggaacagactttttgaaatgttgatgatcacccacaggactatctatgtgaaaataataatgaccttaaaccaacaacaacttgaaaacttgatttgtgtttcttataagaagccaactcyttagagtgactggactgaggattccacaaggaatttggacttgaaattttcagaagttattgatattggtactgaactcaactgaagaggtattcttgcaaacatattactagtttcatagactgccttgctgtctcattcatagcacggtggtttcagttactttaaggatcacgtttttctagaaaacaaatttattttttacattactttttctttctgtactcccagtaatggttcccacaatctcatttccgatcagctccaaattgtactccatataaataggttttgatttacaaattgaaaaatctgattatttataaagtaaaaat

SEQ ID NO: 873965 - DNA, 704 bp, Homo sapiens
gaatggttttgatcaaaatactgatagtaatatgctgatagtaataaagtccaggctgggtcccagatggagaggaggagctaatctggaactggagcaaaggtaattcttgctatgcttcagcaacaaaaactggcagtgtttggcccctgccctagagatctgtggaattttgaacttgagagagatgatttagagtatctagtgaaagaaatttctaagcatcaaagcattcaagrggtgacctgagtgctctttaaagcattcaatttttttaaattatactttaagttctagggtacaggtgcacaacatgcaggtttgttacatatgtatacatgtgccatgttggtgtgctgcacccattaactcatcatttacattaggtatatctcctaatgctatccctcccccctccccccaccccacgacagtccctggtgtgtgctgttctccttcctgtgtccaagtgttctcattgttcaattcccacctatgagtgagaacatgcggtgtttggttttttgtccttgtgatagtttgctgagaatgatggtttccagcttcatccatgtccctacaaaggacatgaactcatccttttttatggctgcatagtattttattcattcactgagacatggtttggaatttgaacttatgtttaaaaggaaagcagagcataaaggttcagtaaatttcca

SEQ ID NO: 873966 - DNA, 615 bp, Homo sapiens
ttgctgagaatgatggtttctagcttcatccatgccactgcaaaggacatgaaactcatccttttttatggctgcatggtattccatgtgtatatgtgccacattttctttatccagtgtattattgatggacatttgggttggttccaagtctttgctattgtgaatagtgccacaataaacatacgtgtgcatgtgtctttatagtagcatgatttacaatcctttgggcatatacccagtaatgggatcatggggacaaatggtatttctagttgtagatccttgaggaatcaccacactgtcttccacattcgatgarctaatttacactcccaccaacagtgtaaaagtgttcctatttctccacatcctttccagcatctgttgtttcctgactttttaatgattgctattctaactggtgtgagatggtatctcattgtggttttgatttgcatttctcggatgaccggtgataacgagcattttttcagatgtttgttagttgcataaatgtcttcttttgagaagtgtttgttcatatccttttttgatggagttgtttgtttttttcttgtaaatttgtttaagttctttgtagattctggatat

SEQ ID NO: 873967 - DNA, 569 bp, Homo sapiens; identical to SEQ ID NO: 870840

SEQ ID NO: 873968 - DNA, 660 bp, Homo sapiens
ttaaagcacagtaaaaattaaaaaaaaaactggtttctttaaaaagatttttaaaaatagcctaaatgcttgaataggtgaagaaaaaaacaaaaagtaaagagagcctctgcttctaggtatgatagagtagtgtgcatcagaccaaatctccctttgtgaaaaagtagaaaaggcagataatatacaaaatggaaacattggtttgcaggtgtcatagagatgtcaagcaaccaagaattcctggagaaggagtgaccacagaagtgagtggacattcccctcagggagtawgcctattttgggcacagggctgcaggctgaattattttcctagtctctctctaaagaaatatattacagagattgtgctgtactacaaagagcacaaagatgatataaccaaagaatgtaggaaaaaacaatattagagaggagttatagtcaacaaaggtagtttggtatatgtgacatttgccatcttttaaaatctcggtaaatcattatgattttttttcccattctaaataaatttgtacctagttttgttttattttatttaaagacgacttaatccacccttaaccagttatctgggcttcaggttccatagaacaagatctgctcctgattaggatagaggaatgggacaaatatttt

SEQ ID NO: 873969 - DNA, 660 bp, Homo sapiens
ttaaagcacagtaaaaattaaaaaaaaaactggtttctttaaaaagatttttaaaaatagcctaaatgcttgaataggtgaagaaaaaaacaaaaagtaaagagagcctctgcttctaggtatgatagagtagtgtgcatcagaccaaatctccctttgtgaaaaagtagaaaaggcagataatatacaaaatggaaacattggtttgcaggtgtcatagagatgtcaagcaaccaagaattcctggagaaggagtgaccacagaagtgagtggacattcccctcagggagtatgcctattttgggcacagggctgcaggctgaattattttcctagtctctctctaaagaaatatattacagagattgtgctgtactacaaagagcacaaagatgatataaccaaagaatgtaggaaaaaacaatattagagaggagttatagtcaacaaaggtagtttggtatatgtgacatttgccatcttttaaaatctyggtaaatcattatgattttttttcccattctaaataaatttgtacctagttttgttttattttatttaaagacgacttaatccacccttaaccagttatctgggcttcaggttccatagaacaagatctgctcctgattaggatagaggaatgggacaaatatttt

SEQ ID NO: 873970 - DNA, 585 bp, Homo sapiens
catctcacaccagttaggatggtgatcattaaagtctggaaacaacagatgctggcaaggatgtggagaaataggaaagcttttacattgttggtgggagtgtaaattagttcaaccattgtggaagacagtgtggcaattcctcaaggatctagaaacagaaataccatttgactcagcaatccctttactgggtatatacccaagggattataaatcatgctactataaagacacatgcacacacatgtttattgcagcactataccctatagaaaagacttggaatcaaccyaaatgcccatcaatgttagactggataaagaaaatgtggcacatatacaccatgaaatactatgcagccataaaaaagaatgagttcatgtcctgtgcagagacatgggtgaagttggaaaccatcattctcagcaaagtaatacaggaacagaaaatcaaacactgcatgttctcactcataagtgggagttgagcaatgagaacacgtggacacagggaggagaacatcacacaccagggcctgtcaggtagtggggagcaaggggagggagaacatttggataaata

SEQ ID NO: 873971 - DNA, 667 bp, Homo sapiens
attcttcaaatgcacagatgttagtgtaaggcaacaagtaacatgaaagcaatgaaacataataccacccaaataacacaataacctcccagtggttgacaccaaagaaatggagatatatagactgtctgacaaataaatcaaaataaatgttttaaggaagcttagcaaacttcaagaatatacagagaaacaattcaatraaatgaggaaaacaataattgaccaaataagatatttaaaagggatattgaaattattttttaaaaaatcaaacataaattcaggagatgagaaatataatgaatgaaataaaaatacaatagagagtatcaatagcagaacctattaagcagaagaaacaatttgtgaacttgaccacaggctatttgaaacaaacacacacagaagagaaaaataaagcataaaaagaaactaagaaaactttcaagattttggggacagcatcaaaagagaaaacatttgagttacacaatttcaaggagaagaagagagagacataggagctgaaagcttatttaaagaactaatatcaaaagatttccaaatctggggaataagaaatatcttgaatgtaaatggattgaattctccaattaaatacatagagtgactgaatggttgagaaaataaaatccaatctaca

SEQ ID NO: 873972 - DNA, 605 bp, Homo sapiens
ttcttgcaagaaaaagaaaaaaaatggcaattttgcttaaaaattggtcccttcactctctctgagcatcaaaggtagtaaaaatccggtgcctattttcttacctataatgctcaggggagatgaatgatttcacctgagagtggcttttatgccctcctttgttatattattccataaaacatggaagattggaggaagaaggagtcagggatgagtgagcatgctgctgtcctcccagaattcctttgtaattaattggtaaaagtatgaataaacaaatccactaatgttttcttgaatggctaatttattaatgaatttcaaatataaattcattattattcttcacaaatatagttctagttttaaagattttckttgctttttattttttaaatatttttatttactgttaaagttatttaatatattgttgtttctctctttccattgtaatgtaaggcacatgaggacagggcctatgtctatgttcttctttacataccccaatgattagaatagtgactggaacatagtaggtactcaagagatacatacaaaatgagtgatttttatttttatgttcaacctcttaacttatc

SEQ ID NO: 873973 - DNA, 585 bp, Homo sapiens
attaattcaagatggattaaagacttaaatgttagatctgaaaccataaaaaccctagaagaaatcctaggtaataccattcaggatataggcatgggcaaggacttcatgtctaaaacacygaaagcaatgacaacaaaagccaaaattgacaaatgggatctaattaaactaaagagcttctacacagcaaaagaaactaccatcagagtgaacaggcaacctgcagaatgggaggaaatttttacaatctactcatctgacaaacggctaatatccagaatctacaatgaactcaaacaaatttacaagaaaaaaacaaccccatcaaaaagtgggcaaaggatatgaacagacacttctcaaaagaagacatttatgcagccaaaagacacatggaaaaatgctcatcatcactggccatcagagaaatgcaaatcaaaaccacaatgagataccatctcacaccagttagaatggcgatcattaaaaagccaggaaacaacaggtgctggagaggatgtggagaaataggaacacttttacactgttggtgggactgtaaactggttcaaccattgtgga

SEQ ID NO: 873974 - DNA, 585 bp, Homo sapiens
attaattcaagatggattaaagacttaaatgttagatctgaaaccataaaaaccctagaagaaatcctaggtaataccattcaggatataggcatgggcaaggacttcatgtctaaaacactraaagcaatgacaacaaaagccaaaattgacaaatgggatctaattaaactaaagagcttctacacagcaaaagaaactaccatcagagtgaacaggcaacctgcagaatgggaggaaatttttacaatctactcatctgacaaacggctaatatccagaatctacaatgaactcaaacaaatttacaagaaaaaaacaaccccatcaaaaagtgggcaaaggatatgaacagacacttctcaaaagaagacatttatgcagccaaaagacacatggaaaaatgctcatcatcactggccatcagagaaatgcaaatcaaaaccacaatgagataccatctcacaccagttagaatggcgatcattaaaaagccaggaaacaacaggtgctggagaggatgtggagaaataggaacacttttacactgttggtgggactgtaaactggttcaaccattgtgga

SEQ ID NO: 873975 - DNA, 585 bp, Homo sapiens
attaattcaagatggattaaagacttaaatgttagatctgaaaccataaaaaccctagaagaaatcctaggtaataccattcaggatataggcatgggcaaggacttcatgtctaaaacactgaaagcaatgrcaacaaaagccaaaattgacaaatgggatctaattaaactaaagagcttctacacagcaaaagaaactaccatcagagtgaacaggcaacctgcagaatgggaggaaatttttacaatctactcatctgacaaacggctaatatccagaatctacaatgaactcaaacaaatttacaagaaaaaaacaaccccatcaaaaagtgggcaaaggatatgaacagacacttctcaaaagaagacatttatgcagccaaaagacacatggaaaaatgctcatcatcactggccatcagagaaatgcaaatcaaaaccacaatgagataccatctcacaccagttagaatggcgatcattaaaaagccaggaaacaacaggtgctggagaggatgtggagaaataggaacacttttacactgttggtgggactgtaaactggttcaaccattgtgga

SEQ ID NO: 873976 - DNA, 651 bp, Homo sapiens
cttttagggcaggcctggtggtgacaaaatctctcagcatttgcttgtctgtaaaggattttatttctccttcacttatgaagcttagtttggctggatatgaaattctgggttgaaaattcttctcttgaagaatgttgaatattggcccccactctcttctggcttgtagagtttctgccaagagatccgctgttagtctgatgggcttccctttgagggtaacccgacctttctctctggctgcccttaacattttttccttcatttcaactttggtgaatctgacaattatgtgtcttggagttgctcttctcgaggagtatctttgtggcgttctctgtatttcctgaatctgaatgttggcctgccttgctagattggggaagttctcctggataatatcctgcagagtgttttccaacttggttccattctccccgtcactttcaggtacaccaatcagacatagatttggtcttttcacatagtctmatatttcttggaggctttgtttgtttctttttattcttttttctctgaacttcccttctcgcttcatttcattcatttcatcttccatcgctgatatcctttcttccagttgatcacatcagctcctgaggcttctgcattcttcacatcgttctc

SEQ ID NO: 873977 - DNA, 571 bp, Homo sapiens
actttcttttgattgagcattttggtaactgtctctttgtagaatctgcaaagggatatttctcagaggtttgaggcctgtggtgaaaaaggaaatatcttcatgcaaaaactagatggaagctttttgggaaacttctttgtgatgtgtgtattcatctgacagagttgtacctttcttttcattgagcattttggacggattcttttttgtggaatctgcaaagggatatttgggagcccttcaaggactacaatgaaaagggaaatatcttcacataaaactagacagaatctctctgagaaacttctttgtgatgtgttcattcatgtcacagagttgaacgtttctttggattgaccagttttgaaactctttttataaaatctgcaaagggatatttggaatccrtttgaggcctatggtgaaaaagcaaatatcatcacataaaaaaaagacagaagatttctgagaaacttatttgtgatatgtgcattcatctctctgatttgaaccttcctttgattgagcagtttgtaacattctttttgaggaatctgcaaaggtatat

SEQ ID NO: 873978 - DNA, 631 bp, Homo sapiens; identical to SEQ ID NO: 870024

SEQ ID NO: 873979 - DNA, 463 bp, Homo sapiens; identical to SEQ ID NO: 870025

SEQ ID NO: 873980 - DNA, 544 bp, Homo sapiens; identical to SEQ ID NO: 870026

SEQ ID NO: 873981 - DNA, 544 bp, Homo sapiens; identical to SEQ ID NO: 870027

SEQ ID NO: 873982 - DNA, 576 bp, Homo sapiens
aagacacataattgtcaaattcaccaaagttgaaatgaagcaaaaaaaggtaagggcagtcagagagaaagttcgggttagccacaaaaggaagaccatcacactaacagcagatgtcttggcagaaactccacaagccagaagacagtgggggacaatattcaacattcttaaagaaaagaattttcaaccyagaatttcatagccagccaaactaagcttcataagtgaaagagaaataaaatactttacagacaagcaaacgctgagagagtttgtcaccaccaggcctgccctaaaagaaatcctgaaggaacactaaacatggaaaggaacaaccggtaccagccactgtgaaaacatgccaaaatgtaaagaccatcaaggctaggaagaaaactgcattaaataacgagcaaaataaccagctaacatcataatgacaggaccaaatacacacataaaaatattaactttgaatgtaaatgggctaagcgctccaattaaaagacacagactggcaaattggataaaaagtcaagacctattagtgtactgtattcaggaaacccatct

SEQ ID NO: 873983 - DNA, 561 bp, Homo sapiens
cattctttatggacaacatgcaaagggatattttggaacccttggaggcttactgtgaaaaaggaaatatcttcacataaaatgtagacagaacctttctgagaatcttgtttgtgatgtgtgcatttatctcacagagttgaactttttatgattgagcagtttttgaaacagtatttttctaggatctgcgaagtgatayttgagggcactttgaggcctatggtgaaaaaggaaataccttcacacaaaaactagacagaagctttctgagaaactgcattgtgatgcatgcattcatctcacaatactgaccttttcttttgattgagcactttggaaacattctttttgcagaatctgcaaagggatatttctgagctgtttgaggcctatgatgaaaaagtaaatatcttcatataaaaaacagagagatgcgtctgagaaacttctttatgatgtgttcattcatcttacagaattgaacatttcttttgattgagcagtttggaggcagtcgttttgtggaatctgcaaagtggtatttgggagccctttgag

SEQ ID NO: 873984 - DNA, 561 bp, Homo sapiens
cattctttatggacaacatgcaaagggatattttggaacccttggaggcttactgtgaaaaaggaaatatcttcacataaaatgtagacagaacctttctgagaatcttgtttgtgatgtgtgcatttatctcacagagttgaactttttatgattgagcagtttttgaaacagtatttttctaggatctgcgaagtgatatttgagggcactttgaggcctatggtgaaaaaggaaataccttcacacaaaaactagacagaagctttctgagaaactgcattgtgatgyatgcattcatctcacaatactgaccttttcttttgattgagcactttggaaacattctttttgcagaatctgcaaagggatatttctgagctgtttgaggcctatgatgaaaaagtaaatatcttcatataaaaaacagagagatgcgtctgagaaacttctttatgatgtgttcattcatcttacagaattgaacatttcttttgattgagcagtttggaggcagtcgttttgtggaatctgcaaagtggtatttgggagccctttgag

SEQ ID NO: 873985 - DNA, 513 bp, Homo sapiens
  misc_feature 384: n = A,T,C or G
ggaaatatcttcacataaaaactagacagaagtttgctgagaaacttccttttgatgcatggattcaatgcacagagttgaacctttcttttggttgagcattttggaaacagtatttttgtagaatctgcaaagtgatatttgggagccatttgakgcctatggtgaaaaaggaaatatcttcacataaaaactagacagaagctttctgataaattcctttgtgatgtgcacattcatctcacagagttgaacctttcttttgaaagagcagtttggatagagtctttttgtagaatcttcaaagggatatttctgagcagtttgaggcctatggtgaaaaaggaaatatctgcacaaaaaactagacagaagctttctganaaacttctttgtgatgtgtgcatttatttctcaaagttgaaactttctttcaattgagcagtttggaaacagtctttttctacaatctgaaaacggatattttggatccctatgaggccaatgttaaaa

SEQ ID NO: 873986 - DNA, 599 bp, Homo sapiens
tcacataaaaagaagaccaaagatttctgagaaacttgtttgttatgcttgcattcatctaacagagttgcaattgtcttttaattgagcagttaggaaacatcctttttctagaatctgcaaagggatatttgggagccctctgaggcctattttgaaaaaggaattaccttcacagaaaaagtagatagtacatttcagaggaacttgtttgtaattstgcattcatctcacagtcctaaaactttcctttgattgaacagttcagaaacagtctttttgtacaacctgcaacatgatatatgggatccctttgaggcttatggtaaaaaaggaaatatcttcacatgaaaactagacagaagctttctgagaaacttctttgtgatgagtgcattcatctcacagagttgaaaatttcttttgattgagcagctggaaatagtccttttgtagcatctgcaaagtgatatttgagggtgcagtgaggcatatggtgaaaaaggaaatatcttcacataaaaactagacagaaactttctggaaagcttctttgtgatgtgtgcatctgtctctcagagttgaaacttagtttcaat

SEQ ID NO: 873987 - DNA, 599 bp, Homo sapiens
tcacataaaaagaagaccaaagatttctgagaaacttgtttgttatgcttgcattcatctaacagagttgcaattgtcttttaattgagcagttaggaaacatcctttttctagaatctgcaaagggatatttgggagccctctgaggcctattttgaaaaaggaattaccttcacagaaaaagtagatagtacatttcagaggaacttgtttgtaattgtgcattcatctcacagtcctaaaactttcctttgattgaacagttcagaaacagtctttttgtacaacctgcaamatgatatatgggatccctttgaggcttatggtaaaaaaggaaatatcttcacatgaaaactagacagaagctttctgagaaacttctttgtgatgagtgcattcatctcacagagttgaaaatttcttttgattgagcagctggaaatagtccttttgtagcatctgcaaagtgatatttgagggtgcagtgaggcatatggtgaaaaaggaaatatcttcacataaaaactagacagaaactttctggaaagcttctttgtgatgtgtgcatctgtctctcagagttgaaacttagtttcaat

SEQ ID NO: 873988 - DNA, 577 bp, Homo sapiens
aacttttgatagagcagtttggaaacagtctttttgtagtatctgcaaatggatatttggagtgttttgaggcctattttgaaaaggtcatatcttcaaatgaaaactagacggaagcattctgagaaattgctttgtgatgtctgcattcaaataamagagtttaaactttgttttgattgagaagttttgaaacactctttttgtagattctgcaagaggatatttggagtgctttgaggcctatggtggaaaagggaatatcttcacataaaaactagacagaagcattctgagatacttctttgtgatgcatgcattctcatagagttgaatttttctttggattgagcagttttgaaacactctttttgtagtatctgcaagtgggtatttggggcgtttagtgggctatggtggaaaaaaatatcttcacataaatactatacagaagcattatgaataacttctctgtgatgtttgcattcaactcacagagttgaacttttctgttgattgagcagttttgaaatactcttcatgtagaatctgcaagtagatatttgtagtgtttggt

SEQ ID NO: 873989 - DNA, 625 bp, Homo sapiens
tctgcattaatctcataatgttgaatctttctttggattaagcagttttggaacactgtttttgtagaatctgcaagtgggtattgtgggcgcttagtggactatggaggaaaaaaatatcttcacgtaaacactagactgaagcattatgagaaacttctctgtgatgtgtgcattcaactcacagagatgaacctttctattgattgagcagttttgaaacactctttttgtagaatctgcaagtggatatttgtagtgcttggtgtcctatggtggaaaatgaaatatcttcacataaaaamtagacagaagcattctcagaatcttctttgtgatgtcagcattcatctcacagagttgaacttttgatagaccagtttggaaacagtatttttgtagtatctgcaaatggatatttggagtgctttgaggcctattttgaaaaggacatatcttgaaatgaaaactagacagaagcattaggagaaactgctttgtgatgtgtccattcaactaacagagtttcacctttcttttgactgagaagttttgaaacagtctttttgtagaatctgcaagaggatatttggagcgctttgaggcctatggtggaaaagggaat

SEQ ID NO: 873990 - DNA, 631 bp, Homo sapiens
tgatgtgtgctttcatctcacagagttgaacctcccttttgattgagcagtttggaaacactcttttggaagtatatgcaaatggatattttgagcgttttgaagcctatcgtgaaaaaggaaatatcttcacataaaaagtagacagaagcattctgagaaacttctttgtgatgcatgcattcatctcacagagttgaaactttcttctagtggagcaatttggaaacagtctttttgtagaatctccaaatggatactagtgagctgtttaaggcctatggtgaaaaagggaatatgttaacataaaaactagacagaagcattctgagaaacttctttgtgatatgtgcattcatctcacagagttcaaactttcttttgattcagtgctttggaaacagtcttattgcacaatctgcaaagtgatatttggaatgctttggagcctatggtgaaaaaggaaatatcttcacttaaaaactagamagaagcattctgagaaacttctttgcaatgtgtgcattcatctcacagagttgaaactttcttttgattgaacagtttagaaacagtccttctgttgaatctgcaaatggatatttgtgagccctttgaggcctgtggtgaa

SEQ ID NO: 873991 - DNA, 552 bp, Homo sapiens
gtgtagtttttatgtgaagatattttcttttccacattaggcctcaaagcactcccaatctccacttgcagactctgtgaaaagagagattgaaaactgatcaatcaaaatgtagcttcaactctgtaagttgaatgctcacatagcaaagaagtttctcagaatacttttgagtaatttttatgtgaagatatttccttttccaaaattggcctcaaacccctccaaatatccacttccagattttataaaaagagtttcaaaactgctcaatgaaaagagagrttcaaatctgtgtgatgaatgcactcatcacaaaggagtttctctgattgcctctgtgcagtttttatttgatgaaatttccttttccaccatagggtgcaaagggctcgaaatatctactttcagattctacaaaaacagagattcaaaactgctcaataaaagaaaggttcaactctgttagttgaatgcacacatcacaaagaggtttctcagaatgcttctgcctagttttcatctgaagatacttccttttccaaaagagga

SEQ ID NO: 873992 - DNA, 594 bp, Homo sapiens
actgatcaatcaaaatgtagcttcaactctgtaagttgaatgctcacatagcaaagaagtttctcagaatacttttgagtaatttttatgtgaagatatttccttttccaaaattggcctcaaacccctccaaatatccacttccagattttataaaaagagtttcaaaactgctcaatgaaaagagagattcaaatctgtgtgatgaatgcactcatcacaaaggagtttctctgattgcctctgtgcagtttttatttgatgaaatttccttttccaccatagggtgcaaagggctcgaaatatctactttcagattctacaaaaacagagattcaaaactgctcaataaaagaaaggttcaactctgttagttgaatgcacacatcacaaagaggtttctcagaatgcttcygcctagttttcatctgaagatacttccttttccaaaagaggatgcaagcgctctaaatatccacttgcagattctacaaaaagagtgtttccaaactcctcaatcaaagcaaagattccattctgtgagttgaatgtacacatcacaaagaagtttctgagaatgcttctgtctagttt

SEQ ID NO: 873993 - DNA, 702 bp, Homo sapiens
ttaccactgaccccacagaaataaaaatagccgtcagagaatattaagaagacctctatgcacacaaaccagaaatctggaagaaatggataaatccctggacaaaggaaccctcccaagactgaaccagaaagaaactaaatctttgaacagaccaataacaagctccaaagttgaatcagtcatagtctactgatgaaaaacagcccaggaccagattcacagccraattctaccagatgtacaaagaagagatgatagcatttctgtagaaactattccaaaaattgagtaggaggaactccctcctaactcattctatgaggctagcaacatcctgaaaccaaaagctggcagagacacacacaaaaaattcaaaacttcaggccaatatccttgacgaacatcaatgcaaaaatcctcaacaaaatactggcaatccaaatccagcagcacatccaaaagcttatccaccatgatcaagttggttttatccctgggatgcaaggctggttcaacatacacaaaacaataaatgtgatacatcacataaacagaactaaagacaaaaaacacatcattatcttaatagatgcagaaaaggctttcaacaaaatcaacacccttcatgttaagaagtctcagtaaactaggtattgaaggaacatgcctcaaaataataagacccatctatgacaaacc

SEQ ID NO: 873994 - DNA, 569 bp, Homo sapiens
ccagtcatatatccaaagaaagaattaatagcatatgtccacacaaaagcttgtacatgaatatttgtaacaatactactgaaatagacaaaaggtgaaaacaagctgtgcccatcaacaggcgaacagataaacaaaatgtggtatatccatacaatgaaatatgatttggtcaaaaaaaakaagtaaactactgatgtaggctacaatacttatgaatcttgaaaatgatatgctaagtgagagaagttggttgtaaaagatgacatactatatgattccattcatgtagaagtcccaagtaaggagacaaaaaggagttggtgttgctcagggctaagatggggagtatagggtggtgataactaaaggtcatggggtttccctttgaggtgatgaaaatgttttaaaattgactgaggtgatggttgtatatgtccgcgaatatactaaaaaccattaaattgtatgctttacttgaattgtatggtatacaaattctatctcaagctgttagaaaagaataaaaagaatattacgaaatcctatgtcaataaatttgacaaatt

SEQ ID NO: 873995 - DNA, 667 bp, Homo sapiens
tagtgattagcttttttaaaaattattttaagttctgagatacatgtgcaggacgtgcagttctgttacctaggtaaacatgccatggtggtttgctgcacctatcaacccatcacctaggtatttagacccacatgcattagccatttatcctgatgctctagctacccctgatcgccaacaggccccagtgtgtgttgtttccctccctgtgtccatgtgttctcattgttcagttcccacttatgagtgagaataggtggtgtttggttttctgtacctgtgttwgtttgctgaggatgatggcttccagtcatccacatccctgcaaaggacatgatcttgttccttttcatggctgtatagtattccatggtgtatatgtactacattttctttatccagtttatcattaatgggcctttgggctgatttaatgtctttgctattgtgactagtgctgcaataaacatacacatgcatgtatctttgtaatggaatgatttatattcctttgggtatatatgcagtaatgggattggtgggtcaaatggtatttctggttctagatccttgaggaatcaccatactgtcttccacaatggttgaactaatttaccttcccaccaacagtgtgaaagcatttctatttctccatagcctcgcc

SEQ ID NO: 873996 - DNA, 541 bp, Homo sapiens
acgcggctgctcatgcttgtaatcccagcactttgggaggcgaggcaggtggatcacctgagattaggagttcgagaccagcctgaccaacatggcaaaaccctgtctctactaaaaatacaaaaaattagctgggcatggtggtgcatgcctgtagtcccagctacttgggaggctgaggcgggagaatggcatgaacccgggaggcagagcttgcagtgatccaagaccgcaccactgcactccagcctgggtgacagagggggggtccatctcaaaaaaaaaaaaaaaaatcatgaaaccatcatcaccaacaaggccatagacatactcaacacctttcaaagtttcctcccatccccattatcatgattattattgkggtaagaacagttaaaacaagatctagtctcttaacagatctaattatactatatactaactatactccctgtgttgtgtgttgtatctcttacgtaactggaactttgtaccctttgaccatctccccacttctcccactccccagctcctggaaacc

SEQ ID NO: 873997 - DNA, 618 bp, Homo sapiens
ctgtgaagaatgtcaatggtagtttcatgggaatagcattgaatctataaactactttgggcagtatggccatttttgcgatattaattcttcctgtctgtgaggatggaatgtttttccatttgtttgtgtcctctcttatttccttgagtagtggtttgtagttctccttgaagaggtccttcacatctcttgttagctgtattcctyggtgttttattctctttgtagtgattgtgaatgggagttcattgatgatttggctctctgcttgtctattgctggtgtcaaggaatgcttgtgatttttgcatattgattttgtatcctgagatcttgctgaagttgcttatcagcttaaggagtttttgggttgagatgatggggttttctaaatataaaattatatcatctgcaaacagagacaatttgacttcccctcttcctatttgaatactctttatttatttctcttgcctgattgccctgtccagaactcccaatactatgttgaatagaagtggtgagagagggcatccttgtcttgtaccagttttcaaagggaatgcttccaacttttgcccattcaatatgatattggctgtgggtttgtcataag

SEQ ID NO: 873998 - DNA, 594 bp, Homo sapiens
ttcttttagcttttggattagtttgctcttgcctctctagctcttttaattgtgatgttagggtgtcaattttagatctttctagctttctgatgtgggcatttagtgctataaatttccctcttaactttgctttakctgtgtcccagagattgtggtacattttctctttgttgtcattgatttcaaagaacttcttggtttctgccttaatttcattatttacccaggagtcattcaggagcaggttggccaatttccataaaattatgtggttttaagtgagtttcttaatcttgaattctaatttgattgcactgtggtctaagggactttttctgtctcattgatctatctaatattgacagtggggtgttaaagtcttctgctattattgtgtgggttgaagtctctttgttagtctctaagaacttgctttatgaatctgggtcctcctgtattgggtacatgtatatttaggatagttagctcttcttgttgcattgatccctttaccattatgtaatgcccttctttgcctttttttgttctttgttggtttaaagtctgttttaacagagattaggattgcaa

SEQ ID NO: 873999 - DNA, 594 bp, Homo sapiens
ttcttttagcttttggattagtttgctcttgcctctctagctcttttaattgtgatgttagggtgtcaattttagatctttctagctttctgatgtgggcatttagtgctataaatttccctcttaactttgctttagctgtgtcccagagattgtggtacattttctctttgttgtcattgatttcaaagaacttcttggtttctgccttaatttcattatttacccaggagtcattcaggagcaggttggccaatttccataaaattatgtggttttaagtgagtttcttaatcytgaattctaatttgattgcactgtggtctaagggactttttctgtctcattgatctatctaatattgacagtggggtgttaaagtcttctgctattattgtgtgggttgaagtctctttgttagtctctaagaacttgctttatgaatctgggtcctcctgtattgggtacatgtatatttaggatagttagctcttcttgttgcattgatccctttaccattatgtaatgcccttctttgcctttttttgttctttgttggtttaaagtctgttttaacagagattaggattgcaa

SEQ ID NO: 874000 - DNA, 594 bp, Homo sapiens
ttcttttagcttttggattagtttgctcttgcctctctagctcttttaattgtgatgttagggtgtcaattttagatctttctagctttctgatgtgggcatttagtgctataaatttccctcttaactttgctttagctgtgtcccagagattgtggtacattttctctttgttgtcattgatttcaaagaacttcttggtttctgccttaatttcattatttacccaggagtcattcaggagcaggttggccaatttccataaaattatgtggttttaagtgagtttcttaatcttgaattctaatttgattgcactgtggtctaagggactttttctgtctcrttgatctatctaatattgacagtggggtgttaaagtcttctgctattattgtgtgggttgaagtctctttgttagtctctaagaacttgctttatgaatctgggtcctcctgtattgggtacatgtatatttaggatagttagctcttcttgttgcattgatccctttaccattatgtaatgcccttctttgcctttttttgttctttgttggtttaaagtctgttttaacagagattaggattgcaa

SEQ ID NO: 874001 - DNA, 594 bp, Homo sapiens
ttcttttagcttttggattagtttgctcttgcctctctagctcttttaattgtgatgttagggtgtcaattttagatctttctagctttctgatgtgggcatttagtgctataaatttccctcttaactttgctttagctgtgtcccagagattgtggtacattttctctttgttgtcattgatttcaaagaacttcttggtttctgccttaatttcattatttacccaggagtcattcaggagcaggttggccaatttccataaaattatgtggttttaagtgagtttcttaatcttgaattctaatttgattgcactgtggtctaagggactttttctgtctcattgwtctatctaatattgacagtggggtgttaaagtcttctgctattattgtgtgggttgaagtctctttgttagtctctaagaacttgctttatgaatctgggtcctcctgtattgggtacatgtatatttaggatagttagctcttcttgttgcattgatccctttaccattatgtaatgcccttctttgcctttttttgttctttgttggtttaaagtctgttttaacagagattaggattgcaa

SEQ ID NO: 874002 - DNA, 638 bp, Homo sapiens
gcaatttgctggggattcattttaggccctattcagctggtttgctcccacacctggagatgtcactcagggaggccagagaacagcaaagatgggtgcctgctccttcttctgggatctctgaccttgaggggcaccaacctgatgccagcagtattgttcctgtatagggtgtctcgtgagtgggatcttccgatccgtgggttgcagagttcygtggaataagcatgatttccctaggtggataacatgctcactcactgcttcccttggctggggggtgggggctcccctgcccatgtggctctcaggtgggccaccacaccacactgctcttcattcctctctgtggatcatgccagctgcctagttcgttctgatgagagaacctggatacaagctatatatggttcttttgatgggagcctctgatcaccactgtttctagttggccatcttgaacccatcccctcaaaattgtttttattagattaaaaaattttattttatactaacattattgtggtataatttatgtaaaataaaatatatccatttcaaatgtacagggtagtgggttttgacaaatgtatagtcagtctcctcctatcctgccccaggtaactactgctctgatt

SEQ ID NO: 874003 - DNA, 683 bp, Homo sapiens
tccagctgcttcctatctgcaaagagactggaacttttagatctgacttctatgtcagggaggcagaacacacgatgcagagtttttccaaaaataggaagtccattcaacatataaagggcagttatgaatataacagatgtttgctgctcagtggattggtaggcagcagggaaatcaaagcacaaactaaatgtctattgtgttggtttagcaaggtgaatctgacaatatcaagatggacatacatgtgcattcagatacaggagctcagttgagaagccccactggataactatttggttatctcaggcatcaggtaaactgcacttgccatagggtggtagctatggaagttttaagggcatgatgaaataaggagatgtaggagactttataataaagggggagaaaatgaaagagaagagtcagtagtgacaccatggtgtttagattcagagaatgatcttkctataattgaaacaagaatgtcaaagaaagaagagtttagggtaggaaatatctcatttggggtgatgtcatctctttcctctactgtaagtatgagagcaggaactgtgtttttcatgtttgaatctcaggaatctagtattaggtggcagatggtagttgctcattgaacatttgttaaataagggtgttgaatggtaatacacaaagaa

SEQ ID NO: 874004 - DNA, 653 bp, Homo sapiens
gcttttcagctaagcaaatgctgagggagtttcttaccaccaaacccaccttacaagagatcttgaaaaaagcactatatgtggaaaggaaagaccattaccaaccaatacaaaaacacatttaagtacacagatctgtaatactataaaggaactacacaaaaaaggtgacataacaaccagctaacaacacaataacaggatcaaatccacatgtatcactactaaccttgaatgtaaataggctaaatgccccaattaaaaggcacagagtrgcaacctggataaaaaagcaagacccaatggtatgctgcattcaagaaatccatctaacatgcaatgacacccatagacttaaaataaagggatggagaaaaacctaccaagcaaatggaaatcagaaaaaatgcacatgttgcaatcctaatttcagacaaaacagattttaaaccaacaaagatcaaaaaagacaaagagttaaaaactctcaataaactagatattgaaggaacatacctcaaaataataagagccatatatgacaaacccacagacaacatcatactgaactggcaaaagctggaagcattccccttgaaaactaacacaagacaaggatgccctctctcaccactcctattcaacatactatt

SEQ ID NO: 874005 - DNA, 653 bp, Homo sapiens
gcttttcagctaagcaaatgctgagggagtttcttaccaccaaacccaccttacaagagatcttgaaaaaagcactatatgtggaaaggaaagaccattaccaaccaatacaaaaacacatttaagtacacagatctgtaatactataaaggaactacacaaaaaaggtgacataacaaccagctaacaacacaataacaggatcaaatccacatgtatcactactaaccttgaatgtaaataggctaaatgccccaattaaaaggcacagagtagcaacctggataaaaaagcaagacccaatggtatgctgcattcaagaaatccatctaacatgcaatgacacccatagacttaaaataaagggatggagaaaaayctaccaagcaaatggaaatcagaaaaaatgcacatgttgcaatcctaatttcagacaaaacagattttaaaccaacaaagatcaaaaaagacaaagagttaaaaactctcaataaactagatattgaaggaacatacctcaaaataataagagccatatatgacaaacccacagacaacatcatactgaactggcaaaagctggaagcattccccttgaaaactaacacaagacaaggatgccctctctcaccactcctattcaacatactatt

SEQ ID NO: 874006 - DNA, 634 bp, Homo sapiens
cctcattcaatgctttgtaaacacactattatgatatctttccctttctagcgatgtatgtgggctttcctatagtcatttcagtagatgctatagatattatggtatttgggaaactatatttcaatgtaaagaaggcaaggtgtcatgctttgacattgatttggtgggtaagagtgagaaagtgcaagtgtctatgggaatacacaacatacttaatacctttgaagtrtgtactgaagacttgcagtgaggaaatgcccttgtacttctcctttaagagggtattttttatatgtaagcttttcattggtttactctaagcatcctagttttttggctgctgagtgcatgaacgatatcttggggccttttattactttcttaataataatcgccttctcattggcaagggagtcacctcccaatggtaggggaattacttaggtctctctctgtgctcgtgtgtgtgtgtgtgtgtgtgtattttatgcaggcaagttggatttttgacgtgtactttgagccaagccaagtacaaataattttaatttcctgaaacaagaatttgaattaagggtgccagaggctagatatcaccattaaacctcgtaattctagcttgaacatggct

SEQ ID NO: 874007 - DNA, 612 bp, Homo sapiens
cacaattgtgttagttgaaattaatgacaactttatgtcattttctcataacttttctcttgttttgccttattgcaatggctgaaatgctcagttaagtgttgaatagaaattgcaatattggacatccttgccctgctctgaaactcatggagaagatgttgaatattttactcttaagtatgatgttaaaatggcagctttaaaaaaattgacagttttcaccagataaaagatttccctctagtttgttgacatttttaaaaataagaatgggtattgggtttcatcaagtgcattttatgcatatattgagataattgtatattttatcctttattctgttaatctggtgaattatgtagattgattgtagaatgctaaatamattttaaagtgatttcaattgcaggaaatttctccatagccactaatatttgaactaaactctttagcaaaatacactttcagtatgattagaagtgcttattttatcatgttaatttttaaattttatatatataatagattcatgtaatagatactttgttatctcatgtacctcagttttgtctatcaggacacatacataacacgtgggctatttctttt

SEQ ID NO: 874008 - DNA, 653 bp, Homo sapiens
gtcgtgctcccttcattcatcaactgcacaatagttgcttggataccctgctcatctcatcagccacggtggcctgttaccaattctcagaaaatgaaacgagacccctgaggactgtaatttggggagtgcagtcatttaggaatgtttagagggatctggaaaacctgcccagccagttcgttcccaggcacaaatggcaggaggcccagggtgcgagggaaaataccaggttctgtgcttggccttctttatcagcctcagaaccagggaccttttgtttgtttactagcttakataaactcccaaatccttgggaatattccagtaaatctgttttcccaaatacttcactcttgtttatagaacaccttcaaaatatgacagcttgttgcagatggaaaacaacgcctccctcttagcaaacccgccttcttcccttgccccaaagtgcttcttgagaattttcaagctctctatgtcatgatctcaagtttgagcctcagtggaaaaaccctgttggaattcctttcagtgcgatttgcatattctgtgttaactcaggacagtggcatggaagctaagctcacttctctaattacatttggattgcttaacatatttcatgtatagccataagacaatgattatca

SEQ ID NO: 874009 - DNA, 642 bp, Homo sapiens
cctcagcctggacttcattatccataacactatcagcattttgttcaaagtcactcaacaagtctctaggaagttcccaaagttcctatatcttcttatctttttctgagccatccaaactgttccaacttctgcctgttacccagttccaaagttgcttccacattttcaggtgtccttatagcagtaccacactctctggggtaccaatatactgtattagtccattctcatgctgctataaagaactgcctgagactgggtaatttattaaaggaaagagatttaattgactcacagttctgcagggctgggaaggtctcaggaaacttacaatcatggcagaaggggaagcaaataygtccttcacatgttgacaggaaggagaataatgagaaccaagcgaaggaggaggctccttataaaattatcagatcttgtgaaaacttactatcatgagaatagcatgggggaaaccaaccacatgattcaattacctcccactggtccctcccaccacatgtggggattatgggaactgcagctcaagatgagattttggtgggacacaaccaaatcatatcaaatggcaaaaaatatatatatttttaaaacgcagtatatccagtgtgttttctggaa

SEQ ID NO: 874010 - DNA, 642 bp, Homo sapiens
cctcagcctggacttcattatccataacactatcagcattttgttcaaagtcactcaacaagtctctaggaagttcccaaagttcctatatcttcttatctttttctgagccatccaaactgttccaacttctgcctgttacccagttccaaagttgcttccacattttcaggtgtccttatagcagtaccacactctctggggtaccaatatactgtattagtccattctcatgctgctataaagaactgcctgagactgggtaatttattaaaggaaagagatttaattgactcacagttctgcagggctgggaaggtctcaggaaacttacaatcatggcagaaggggaagcaaatatgtccttcacatgttgacaggaaggagaataatgagaaccaagcgaaggaggaggctccttataaaattatcagatcttgtgaaaacttactatcatgagaatagcatgggggaaaccaaccmcatgattcaattacctcccactggtccctcccaccacatgtggggattatgggaactgcagctcaagatgagattttggtgggacacaaccaaatcatatcaaatggcaaaaaatatatatatttttaaaacgcagtatatccagtgtgttttctggaa

SEQ ID NO: 874011 - DNA, 654 bp, Homo sapiens
gatgcgatgagatatcgctcctatgattgtgttatggtatatggcatgtttcatttgtcaaaacagagattatccagggctaatcacatgagcccttaaaagcagggaaattttggtggcagaaaaagaaggcataagaagtcagagagatttgaggagtgagaaacactacacacacgattgctgcctttgaacttggagggagtcatctgagatggaatgcgggtggcagtaaggaaagggaaactcagatctaccaccacatggagctgtactctaccaacaacctaaatgagcttagaggaaaattcttccccttcagcctctagrtaagaattcatcctgcctgacaccttcatttcacccttgtgaggccgtgaccagagaaccccaccaaactctccaagacttctgacctacagaattgtgaaataataaatgagtattgtaagatgtcttatagcatcttattaaatagtatgtaacaagtatatatacaatatgcattgtatggctaacatcatgccattaagcaattggaaaggcccgccaccaaatgtaaaaagaattcctaaaaatcaataagaaaccactagacaacctggcagaaaaatgttcacaagacttgatcaggtacttcaaaaatgcatatct

SEQ ID NO: 874012 - DNA, 664 bp, Homo sapiens
tggaagtaggagagagaaagagagattcaggtggagggaaactatattagaggggatgatataagaaatcaaaggatcaaagtcatctttggagagttgagaagtaacatttgtgggttcacacaaagaattcttacagatgctatctcagttaattttctgaactttcaaaggttatctagacaaaaatacataaaacttgtgaatgggtctcaasatgttgaactggattctactgtcatttcagtataataggtatttctcatgctgattcatagcagtgatagaacagatgctgcctgctatctgcatattagtggataaaagcttttctctaatttagtcgactttttcatttccattatagaatgatacttaatgggcctacattctttcttcaaatagagaacatgtaaacagtttttaattagcatttgatccaatcattctgtaaaaatataatatttaaaatcattaaacatgagaatcattatattattctgcttatcaataattatttcattctgcctatcactgctcttttctcttaaatcagagttcttgtcaatattacatgaataaatactatgaagtggaagttgagcttgtggctttcttaagaaatctgaggtaaagatttaaagagacttaaaaggaaaactgg

SEQ ID NO: 874013 - DNA, 586 bp, Homo sapiens
gcaatcaaacaaggaacaaaccacaaagatatacaggatgacctaagggaaagaaatttggagattcacataagtctcattcatgccactttccctccatggaattgatcattgcttctaatttatctttcagcatagaatgtgtgctcagttgcctcatttttcaccccagccaactaagaaatacttgtttaaggttgaaatcaacactgaacatcataaaacatagttcagttatacactttttataataggakatattaatgctttgtgtgtaccaggcattggtctaaatattgaacaggtatgaacatttaatttgcacaaaatttaatgaagtcagtattattgttattaccacattgcaaaagaggcaagtgagacacagaaaagtcaaatgatttgctcaaagtcacatagttaataagggccagaagagggacacagacccaggtatctattccagagtctgtgcaccacaattttattttattttgtttacttattttttttgagacagtcttgctctgttgcctagtctggagtgcagtggcatgatcttagctccctgcaacctctgccttca

SEQ ID NO: 874014 - DNA, 586 bp, Homo sapiens
gcaatcaaacaaggaacaaaccacaaagatatacaggatgacctaagggaaagaaatttggagattcacataagtctcattcatgccactttccctccatggaattgatcattgcttctaatttatctttcagcatagaatgtgtgctcagttgcctcatttttcaccccagccaactaagaaatacttgtttaaggttgaaatcaacactgaacatcataaaacatagttcagttatacactttttataataggatatattaatgctttgtgtgtaccaggcattggtctaaatattgaacaggtatgaacatttaatttgcacaaaatttaatgaagtcagtattattgttatyaccacattgcaaaagaggcaagtgagacacagaaaagtcaaatgatttgctcaaagtcacatagttaataagggccagaagagggacacagacccaggtatctattccagagtctgtgcaccacaattttattttattttgtttacttattttttttgagacagtcttgctctgttgcctagtctggagtgcagtggcatgatcttagctccctgcaacctctgccttca

SEQ ID NO: 874015 - DNA, 559 bp, Homo sapiens
gtggatcacttgaggccaggagtttgagaccagcctggccaacatggggaaaccacgtctctactaaaaatacaaaaattagccaggcgtggtggtgcatgcctgtaatcccagccactcaggaggctgaggcaggagaatcgcttgaacctgggagatggaggttgcagtgagccgagatggtgccactgcactctagcctgggcaagagagtgagtgagactttgtctcaaaaaawaataataataataataataaaataaaaataaaaaatatataaaagtgcatataaaatgtggaagagtctgtgtcaagcagtggtgggaggtgtgtgaattggcataaggttttcagaggacaatgtgttactaataatcaacatatttaatgtgtatcctctgatgcattcttagatacatcattgaaccttggtagaaaataacaaaacataggtcttaagacttttagttaataataaaatagagaaaacctggaaatataatcaaatctgaacattaattggtcaaagcttgtgacgcatatcgtttactaggcaaat

SEQ ID NO: 874016 - DNA, 636 bp, Homo sapiens
gatataccaaatgtaaggaaattctccaaactgtgaaagtttcttacattgccaatgctaattcgcatttttaaaaaaatagtgatctatggatgcctatcctatagcaatcatgcaaaattttgggaataaatgagagatgaatgaatackaaacttgagcaggaaactgtcttcatcccatgagcctgattttagtccataaggattatgctgtgtctccattaaatcagaagtgttataattctacttttgacccattgccaaccgttattttaaatctaccaaatagccttttgttaagacgcttaaggggctaaacactgtggttcaaaaccataaaaagattcccggttgttgatcaggcaacataaaatgggttgtcttaagacctgggcaagcaggggttcacttctcaaataagcatccagatgtaacagaaggggctataaagatcttctgctttggtctcccgagtatgaattgttttgtgatggggcttcatctgtgtttgtagaatgtcatctttcccatttcgtccgatagaaaaatgtcatttctttccctgctctgcccaaatgagaattttaaggaagctgaacactgcgcacattccagccagcgagtgggagaaaaa

SEQ ID NO: 874017 - DNA, 636 bp, Homo sapiens
gatataccaaatgtaaggaaattctccaaactgtgaaagtttcttacattgccaatgctaattcgcatttttaaaaaaatagtgatctatggatgcctatcctatagcaatcatgcaaaattttgggaataaatgagagatgaatgaatactaaacttgagcaggaaactstcttcatcccatgagcctgattttagtccataaggattatgctgtgtctccattaaatcagaagtgttataattctacttttgacccattgccaaccgttattttaaatctaccaaatagccttttgttaagacgcttaaggggctaaacactgtggttcaaaaccataaaaagattcccggttgttgatcaggcaacataaaatgggttgtcttaagacctgggcaagcaggggttcacttctcaaataagcatccagatgtaacagaaggggctataaagatcttctgctttggtctcccgagtatgaattgttttgtgatggggcttcatctgtgtttgtagaatgtcatctttcccatttcgtccgatagaaaaatgtcatttctttccctgctctgcccaaatgagaattttaaggaagctgaacactgcgcacattccagccagcgagtgggagaaaaa

SEQ ID NO: 874018 - DNA, 636 bp, Homo sapiens
gatataccaaatgtaaggaaattctccaaactgtgaaagtttcttacattgccaatgctaattcgcatttttaaaaaaatagtgatctatggatgcctatcctatagcaatcatgcaaaattttgggaataaatgagagatgaatgaatactaaacttgagcaggaaactgtcttcatcccatgagcctgattttagtccataaggattatgctgtgtctccattaaatcagaagtgttataattctacttttgacccattgccaaccgttattttaaatctaccaaatagccttttgttaagacgcttaaggggctaaacactgtggttcaaaaccataaaaagattcccggttgttgatcaggcaacataaaatgggttgtcttaagacctgggcaagcaggggttcacttctcaaataagcatccagatgtaacagaaggggctataaagatcttctgctttggtctcccgagtatgaattgttttgtgatggrgcttcatctgtgtttgtagaatgtcatctttcccatttcgtccgatagaaaaatgtcatttctttccctgctctgcccaaatgagaattttaaggaagctgaacactgcgcacattccagccagcgagtgggagaaaaa

SEQ ID NO: 874019 - DNA, 646 bp, Homo sapiens
cccggtacctcagatggaaatgcagaaatcacccatcttctgcgtcgctcacactgggagctgtagacccagtgtaagagctgttcctattcagccgtcttggcttccagctctctagttcttttaattgtgatgttaggtgtcaattttagatctttcccactttatcctttgggcatttagtgctgtaaatttccctgtaaacactgctttrgctgtgtcccggagattctggtacattctgtctttgttctcattggtttcaaagaactttatttctgccttcatgtcattatttatccagtagtcatacaggagtgggtttccatgtagttatgcagttttgagtgagtttcttaatcctgagttctagtttgattgcactgtggtctgagagacagtttgttatgatttctgttcttttgtatttgctgagaaatgtttcacttccaattatgtgatcagttttagcataagtgtgatgtagtgctgagaagaatgtatattcggctgatttggggtggagagttctgtagatgtctattaggtccacttggtccagagctgagttcaagtcctgaatatttttgttcattttctgtctcttttatctaatattgacagtggggtgttaaaatctcccact

SEQ ID NO: 874020 - DNA, 646 bp, Homo sapiens
cccggtacctcagatggaaatgcagaaatcacccatcttctgcgtcgctcacactgggagctgtagacccagtgtaagagctgttcctattcagccgtcttggcttccagctctctagttcttttaattgtgatgttaggtgtcaattttagatctttcccactttatcctttgggcatttagtgctgtaaatttccctgtaaacactgctttagctgtgtmccggagattctggtacattctgtctttgttctcattggtttcaaagaactttatttctgccttcatgtcattatttatccagtagtcatacaggagtgggtttccatgtagttatgcagttttgagtgagtttcttaatcctgagttctagtttgattgcactgtggtctgagagacagtttgttatgatttctgttcttttgtatttgctgagaaatgtttcacttccaattatgtgatcagttttagcataagtgtgatgtagtgctgagaagaatgtatattcggctgatttggggtggagagttctgtagatgtctattaggtccacttggtccagagctgagttcaagtcctgaatatttttgttcattttctgtctcttttatctaatattgacagtggggtgttaaaatctcccact

SEQ ID NO: 874021 - DNA, 656 bp, Homo sapiens
ccatcatagctaaactcatttgcattctcaccaacagtgtataagcattctcttttctccacaaccatgtcaacgtctgttattttttgactttttagtatagtcattccgactgatgtgagatggaatctcaatatggtttttgatttgcaagtccctaatcactagtgatgttaatcattttttcacatatttgttggcagcataaatgtcttcttttatgaaatgtctgttcatgccctttgcctattatgtacccaaagaaaaataagtcattcaaccaaaaagacacgtgcaatcgtatgctcattgtagcactattcacaatagcaaagacatggaaccaaccaggatgaccatcaccagtggactggataaaagyaatgtggtacatacacacaatagaatactatgcagccataaaaaatgaaatcatgttctttaaagaaacatggatgcagctacagtccattattctaagtgaatttattcaggaacagaaatccaaatactgcatattctaacttgtaagtggtagctaaacattgagcacacatggatataaagatgcaagacttgtggggatgcaggttacaaaactacatattgggtactatgctcactacctgggtgactgaaccattcgtacaaacctt

SEQ ID NO: 874022 - DNA, 652 bp, Homo sapiens
tgattgtaagtcttctgaggcttccaagccatgcagaactgtgagtcaattaaatctctttcctttataaattactcattctcaggcatttccttatagcagtgtgaaaacagcctaatacagataattggtaccaaggtagtaggtcattgctataaagataaactgaaaatatggaaactacattggaactgggtaacaggcagaggttggaacagtatggagggctcagaaaaagaaagatgtgagaaagtttggaacttcctagaaacttsttgaatgtttttgaccaaaatactcatagtgatataaacaatgaagtctcaaatggagatgagcaacttattgggatctggagtaaaggtgattctccctatgctttatggtttagcaaaaagaatagtggtattttgcccctgccctagatatctgtggaactttgaacttgagagagatgatttatggtatctggcaaaaaaaaaaaaaaaaaaaaatctaagcagcaaagcattgaaagagtgactcgagtgctcttaaaagcattcagttttattcattcacaaagatatggtttggaattagaacttatgtataaaaggtaaatagagcataaaagttcagaaaatttgcagcctgacgatgcgatagaaaa

SEQ ID NO: 874023 - DNA, 645 bp, Homo sapiens
ttggtgagacagtttctgcttgagaaaagtagaggaaaaagtaaaggggactttgtcttgaactttaggtacctgctcaaccacagggagatagagcaccaagaaagcacttggggtccctaattccaggacatggcttttggatgccattgatgtacctgcccagggccagaagggaacctattgcctagcagggtgagtcagggtgattcccagtccaggcagcatttataatgtgtttatccaagtgccccagagccttaaaaggatatcagcagtagtctggcagcactgtccttggacctgtggtggcagtggccacaggatggggttcctttgtctttggaaaaggaaagaaattgtgggaatgactgcttcttgtggtttgagagccagttcaaccttaatacartagaattccagggagacttctaaggttttgaccctagtccctgacttccagatggcatttctggacccactcagggcctgggggacctcactgccttgaagggaaaaacacaggcctggctagctttgccacttggtaagtgtagtggaagagaacaaaagtatctccctggtaatctagagaatcatcacagattttgtccaacaccatcaagccagtacctatacaagttt

SEQ ID NO: 874024 - DNA, 645 bp, Homo sapiens
ttggtgagacagtttctgcttgagaaaagtagaggaaaaagtaaaggggactttgtcttgaactttaggtacctgctcaaccacagggagatagagcaccaagaaagcacttggggtccctaattccaggacatggcttttggatgccattgatgtacctgcccagggccagaagggaacctattgcctagcagggtgagtcagggtgattcccagtccaggcagcatttataatgtgtttatccaagtgccccagagccttaaaaggatatcagcagtagtctggcagcactgtccttggacctgtggtggcagtggccacaggatggggttcctttgtctttggaaaaggaaagaaattgtgggaatgactgcttcttgtggtttgagagccagttcaaccttaatacaatagaattccagggagacttctaaggttttgaccctagtccctgacttccagatggcatttctggacccactcasggcctgggggacctcactgccttgaagggaaaaacacaggcctggctagctttgccacttggtaagtgtagtggaagagaacaaaagtatctccctggtaatctagagaatcatcacagattttgtccaacaccatcaagccagtacctatacaagttt

SEQ ID NO: 874025 - DNA, 630 bp, Homo sapiens
atgccattcatggaactcaatctatggtggtgggttagtatcagtgttggtggtggtgggttaatatcagtgttgctgtcagaaaggaagagatccttgaattgatgagaacatgtgaggcaattccagccattatcatggcataggttatagcaagagcactgaaagtgaaaaagtcacccaggtgaacaaatctgcgtggttaataagtgtaaaggagaatgaaagctggagatcgccaatgcctatgaaaagagcacagggagaggagctttccaaatgaggcttacaatcaatgtaagataaaataaaaagagagggaatgtaattgctgaaccaagttgtcacagagctgttaggcaagggaagcactgacataagtacaytggatttggcaagcaggcttttcctggcttatgggaaagcttttttttaaatagaatatggtagaaatgtaatcagcaagtataaacaacaattttaagaatcttttctgtgatgacagggaaagatagaatagtaattagagggaatgtatggttagtagggtacattcctttttcttaacttttaaaaatgagagacgctgaggtgtgagtatgtactttaggagaaaaaatagttgagcgg

SEQ ID NO: 874026 - DNA, 641 bp, Homo sapiens
tgatttaaatcataaagagaaagtgagctcacttcccattgcatcaggagaattggtgctgtgaactctgcaagtgaggttcattgcatgatgtcttaggaaagtgatcgagattatgaattttattcatgcttgtgcctttaaacatgaccagtttactggatatactgaagaagttgaagcagaaaatggagatctggtttgctttaatgcaagcagatggmtaggtcatggaaattctgaagagctatactcagctgcttttgttactgttgttaatgttttctacataaaaactaacaattttatgaaaatgaaaacttttctaattgaatgtatgcatcaaattttgtgctaggcaaggatctttttagcatggtaaatataaatatcagaaaggttaccatttaaccaaatttcagcgtacaattcagtggcattaagcacattcacaatattgtgcaaccattgctactgttcatctccagaactttctcatcctcccaaatggaaatactgaacccattaaacaataactccctgaaccttcctgtcccccagtcccttgtaacctcagttctactctctaactccatgaatgttcgtattctaggtacctcatagaagtagaatcatactat

SEQ ID NO: 874027 - DNA, 587 bp, Homo sapiens
aatttgaagatacaaaactgattttcagggactttagaaaaggacaatgttttcataaaatcaccactaaaatattacagaagtcatgaggttcatccatatacaggaccaatgttttttacatagccatgtcaaagactaagtagatatggtggcaattttcagttttctatttttttccaatattgtattttacttttctaatctttctggccattttaataatgactgtgaaataatgtgattccggtaatatccacggtggaaaatagtcaaagtaattacattatttttgtcacagtatagtctactagcgatgaatattaactctaggaaagttcatctccrtagagcactaaactttgtgttgcaaagcactcaatatttatttaagagaaaacagataaaacagtcacatgacgaaacacatttagtaagtgctccacatggtacccactactggaagatatgcaatgcatatatttatattaaacatggtagtgataagtcctacagtaaagtaatatgtttagtttaactcagcattttctttaacaacatttttatatagctttaagtaacgtcta

SEQ ID NO: 874028 - DNA, 631 bp, Homo sapiens
tttcctcttcattgggaaaacagtagttgaacttgaactattaaaacaaaatgccataattatcactagcggggaaacaaaggatgccagggaagcaaattagaataatacctaatctagatgagaaagtcttcagaaaatactctctcattatacaaacctggagtatcatctttcttacaaccaacagataatgtaaatctatagagttctcaaacttacttctgactatactatagtaaaaaaataagtatttgtgaagaaatgagcatttgctttaaaattcatttcagcttaaataatattmatatttatgtaaagagagatgggtgaatctaactgtccacttaaatcttccttttaattcccaagaataaatgaactgtccaaagcacaatcaatattaaagacaatccagaatactttagactttccgtaggtaaatatcttgagataagaaggaaagtgtttgtctttcctggtgttcagcatttttgctgaccatgaaaaaagatgacgaagtaaagggtgggggcaagagaagggagaggaggaggaagaggaagaaagcaacagcagcattttaaaggcagacagcttgtagtatatttgaatttagacaatctcggtt

SEQ ID NO: 874029 - DNA, 631 bp, Homo sapiens
tttcctcttcattgggaaaacagtagttgaacttgaactattaaaacaaaatgccataattatcactagcggggaaacaaaggatgccagggaagcaaattagaataatacctaatctagatgagaaagtcttcagaaaatactctctcattatacaaacctggagtatcatctttcttacaaccaacagataatgtaaatctatagagttctcaaacttacttctgactatactatagtaaaaaaataagtatttgtgaagaaatgagcatttgctttaaaattcatttcagcttaaataatattcatatttatgtaaagagagatgggtgaatctaactgtccacttaaatcttccttttaattcccaagaataaatgaactgtccaaagcacaatcaatattaaagacaatccagaataytttagactttccgtaggtaaatatcttgagataagaaggaaagtgtttgtctttcctggtgttcagcatttttgctgaccatgaaaaaagatgacgaagtaaagggtgggggcaagagaagggagaggaggaggaagaggaagaaagcaacagcagcattttaaaggcagacagcttgtagtatatttgaatttagacaatctcggtt

SEQ ID NO: 874030 - DNA, 641 bp, Homo sapiens
gttatatttcagctttgccactgacctttaaattgctctaatctgcttttatttacaaatgtggtttctgcaaatgagcgttggatagaacagattcgagacacactaacaggacacaatccaggctcaagcagaggaggaaacagcgagctcccagatcgtcttcttactattctgtttgacaatgtcaggatgccttatttccagaacacaagggaagtcatttagacggcacatttctctacttaaagtgttcactctctggctaaaagggggttcatcatgttgttcctgatgtctaatccaagttctgccttgaagtagatgagctcaatgtcaagaaaatcatgtgtttgcatttggatagtcttactgactgctgagactgatatatacctagtcagagcctgggaaacacctgagccttcctttccttcctactaaaatttaayccagaaggactctgaatgaaggcacaggaatgcttgataaagttacttaggttccaggaacttgaggttgccttatactttgcttattacatctttactctttttttggatatttacttcccattgatatctaacttctgaattatttctctcccttggtgtaaggataactaacatttgcacagaaca

SEQ ID NO: 874031 - DNA, 617 bp, Homo sapiens
ctttttcccactgtattagagtgtttataaattatgcattaggtctcatatatacgtgagtttctgacctttctattttgttttagttgcatatctgattaaccttgtaacaagtccagaaaattttaattagaatagggtgataattataatctaagttatccaaatattttagcttttgtttcttcttaagaatgcctagattgtacttggcccttgcatttccataaacttatttttattgagcwtgtcaatttcttttgaaaaatgactgagatttttattggatttacaatggatatataggtcacttcatggagaaatatctttacattgaatcttctattccatgatgtttacaatgtacattccactccatttatttagaccatcttaatattttcaataatttgtagtttcctttgaagaaatattgtacatttttgagagatattcaatatttcaacgttttcttgaagatagtgtaaatggcttgttttttctgtttctatatctttttacttggggtacatctgaatttgccgggaattgtgactactcatttttagattttcactcctagtataactgaatgtctaatctccattgtattagtc

SEQ ID NO: 874032 - DNA, 655 bp, Homo sapiens
gaatgactaaaaagtgatactcgtgataaaattggagagaaagaaataaagaaggaattttggtaagaatgaaaaaaggaaagtaagagaactgttttgtatgtgatttactgcaactgattacgtgaaagttgaaagtggttctactatccggcctttaatcttttttaaaagagcctacactgacttggaaatgggtgaactgatacagagaaaaactgaggggaggatactggtgtcaaaggactcacttkccttccatctgtaattgcaggattatctgccatgcttccagaaacgggagcaagtgagagaaaggggaagacagatggcttcttggtctccctgctgtgcctagatgattgtacattttagagggaaaaaaattaataatctgattttttaaatcctcacccacacttgatcctcagctaaatatttttgaaagtgacacttttaggttaactttcatttctttcgattacactaccctctgctccagtttttagttgagatttcaaaggtcatgctccaaaaaaagcactttattgtgatattctgagtcaaaattaaagtgaaaaattgtgactagtctcataggaactcctaagggagcaaggctttgtcttcttttaaacacagtatgtttgaggga

SEQ ID NO: 874033 - DNA, 584 bp, Homo sapiens
tgtatcagttttgtgttcatttctcctgaaaaaaattcattatgacttcataacacattttgaatcctggagtatttacagtacagtaatttaacatctgcattactcatccccttgggacagaggaatttataaaataattataaagattcaatgagggtatagttcaaaaagacacagaggatttgagaacttacatttctttgaacaatttgtgcagcaagattaaacccattaggaaacaaactgaacaaatgatatgaatcagaatagtttagtaaacattacatgatcaaagcagaaaacaatattttagtcgtctacttataaatatttacaagtcaggagaaaatatgtgttctgtataaatcatttaaatatatatttgaatttttaatactttttgtatacsattccaactttgaaatctttaaattttgattaatttatttgttaatgacagagttttcagtgtttctttaaaaagtcttggccagtagttcacgcctgtaatcccagcactttggaaggctgaggagggcagatcacttgagcccaggagttcaagactagcctgtgcaaca

SEQ ID NO: 874034 - DNA, 622 bp, Homo sapiens
tatcagttctaggagccttttggtggagtctttggtgttttctatgcatagaatcatattgtctgcaaagagaaatcatttgaattcttcttttcctatgcagatgcattttgtttctttctcctgggtgattactctggcttgcactttcagtacatgttaaatagaaatggtaggagtgggcatctttgtcttgttatagttctcargagaaatccctccagtttttgcccattcagtatgatgttggctgtaggtttgtgatagatggttcttattattttaataagatagtaagagggctcttattatcttattatatccttttgatgcctagtttcttgtgggtttttatcatgaagggatgttggattttatcaaaagccttttccatgtctattgagatgatcatatggtttttgtttttaattttttaatgtggtgaatcacatttattgatttgcaaatattgaatcaacctagtatcccatgaatgtagcccacttgatcatggtgaattaactttttaatgtgttgttggattcaatttgctagtattttgtttaggatttttgtggcaatgttcatcagggatattggcctgcagttttatttttttgtt

SEQ ID NO: 874035 - DNA, 622 bp, Homo sapiens
tatcagttctaggagccttttggtggagtctttggtgttttctatgcatagaatcatattgtctgcaaagagaaatcatttgaattcttcttttcctatgcagatgcattttgtttctttctcctgggtgattactctggcttgcactttcagtacatgttaaatagaaatggtaggagtgggcatctttgtcttgttatagttctcaggagaaatccctccagtttttgcccattcagtatgatgttggctgtargtttgtgatagatggttcttattattttaataagatagtaagagggctcttattatcttattatatccttttgatgcctagtttcttgtgggtttttatcatgaagggatgttggattttatcaaaagccttttccatgtctattgagatgatcatatggtttttgtttttaattttttaatgtggtgaatcacatttattgatttgcaaatattgaatcaacctagtatcccatgaatgtagcccacttgatcatggtgaattaactttttaatgtgttgttggattcaatttgctagtattttgtttaggatttttgtggcaatgttcatcagggatattggcctgcagttttatttttttgtt

SEQ ID NO: 874036 - DNA, 622 bp, Homo sapiens
tatcagttctaggagccttttggtggagtctttggtgttttctatgcatagaatcatattgtctgcaaagagaaatcatttgaattcttcttttcctatgcagatgcattttgtttctttctcctgggtgattactctggcttgcactttcagtacatgttaaatagaaatggtaggagtgggcatctttgtcttgttatagttctcaggagaaatccctccagtttttgcccattcagtatgatgttggctgtaggtttgtgatagatggttcttattattttaataagatagtaagagggctcttattatcttattatatccttttgatgcctagtttcttgtgggtttttatcatgaarggatgttggattttatcaaaagccttttccatgtctattgagatgatcatatggtttttgtttttaattttttaatgtggtgaatcacatttattgatttgcaaatattgaatcaacctagtatcccatgaatgtagcccacttgatcatggtgaattaactttttaatgtgttgttggattcaatttgctagtattttgtttaggatttttgtggcaatgttcatcagggatattggcctgcagttttatttttttgtt

SEQ ID NO: 874037 - DNA, 587 bp, Homo sapiens
aatatagcaggaagagcaccacttcctcagacatatttttaatatgccactgattatataatgtgtatattttatttataaaatacaatacacacagtcagacatttataacctgagtatcatctaaattcagattaatgttaaatggatatcctttacattccatatttcttwttgactacattacaaatcatgcaaatttagtcctaaaggtatcaatattataattaactgcacagttgaactttcttattggctttagatttttttaagacaaagaatagagcagaataaacagacaaccttctgataactttttgtaaaccaaaatagagttggaaatggcagtagtccaaactcatcacactggagatcacacagatggggagataaaagttgcccacgtgagccccttgacaatgctcagtattttgttcagaatctcaggtaagccacctgcatgctgatgacatcacaaaaataaaggccaagggctgattactggctgggtgctctttattatcatatatcaggtgtcacctgcaatttcatgtctctggcaatgcgacagaatccatctgtcatcc

SEQ ID NO: 874038 - DNA, 642 bp, Homo sapiens
acagccgttatcagatataagtgctaaaatgttgacagcttagaaattaaaattcctggcagaccacaaagctttcttttataaacattagaattacctttctatttcaaaaaagaaaaatgactttgacctcattctaatgcttattaccaagaacgtttcagaaagcagattagtcaaaatacgctttgccttcrttagtattccctgcatcatgctataactaatgatttctattactaattgtcattactaaacaggttttatctgaaaactttgtgacaaattttatgcattctttcactttactccctttgaagaaaaggaaactttattatacaataatataatctttcagtcagttagcaaaataagttggttacccacagtgtgaataatactgtggttagacatattcgggagtgtccaaaggaagaaagtggcatttttcttctttttcctgaagttcataagatagttggaaggcaggctatagtcaagtgaaaaagacttgtagatccctgaaaggaactcagaaaatttctgtgtagcatgtttagtctctcgttgaaatagattcttcacaaattatgaagatctgtaaaggatgcaattattacattaaataacattaataaatca

SEQ ID NO: 874039 - DNA, 645 bp, Homo sapiens
gcttttgttgccattccttttggtgttttagtcatgaagactgcccatgtctatatcctgaatggtactgcccaggttttcttctagggtttttatggttttaggtcttatatttaagtctttaatcctcttgagttaatttttgtataagttgtaaggaaggggttcagtttcagtgttctgcatacggctagccagttttcccaacacaatttattaaataaggaatcttttcccattgcttgtttttgtcatgtttgtcaaagatcatatggttgtagatgtatggcattatttctgaggcctctgttctgttccatggtctatatatctgttttgctaccagtaccatgctattttggttactgtagccttgtagaatagtttgaartcaggtagcataatgcctccagctttgttctttttgcttaggagtgtcttggctctatgggctcttttttggtttcatataaaatttaaagtagttttttctaattcgatgaagaaagtcaatggtagcttgatggggatagcattgaatctataaattactttgggcggtatggccattttcatgatattgattcttcccatccatgagtatggagtgtttttccatttgtttgtgtcctctctttttgtcta

SEQ ID NO: 874040 - DNA, 593 bp, Homo sapiens
ctcatgcacagatatgtcatctgaagccagaaactaaggtgcagatatgggcgaatctaaatccatatggaagaaggaaacgtttcctcatttagcaagttgtctatcatttcctataaaaatagtaattctcatttctgtgtaaaatattacttgtttgtttttatacctatcaattgccttgatgaataagcaagtgtaataaatgtcctrttagtagcctacttcttgcttattacagaaaagggccctggtttgttcattctaataaagacaagaagaaattatgttatacttagtttttctttgggtgtggatgaaggaaatgagaaaggataattacattttatagatatagtttaaatgtttttctacttaatatttgcctcccataacatccaaaatgaccccatttttagtgcttctttcaactgtaattttaatatcttcactaaaaaatttttcccttggattatgagtttgcaacatctttaatataaaaaataatttaaaaagtaaattaaagtaattatggacaaccttcccttattcacttcctccaacagtcaaatttctagttcttacctacattt

SEQ ID NO: 874041 - DNA, 630 bp, Homo sapiens
atagattgccatctgaatatgcatcccctttaatactttcacatttaatataactaagtttattaaacacatttagaaaactatgcgtaagtatccttttccaataaaggtaaaatttattcaatagataggtttctgaaaagttgtatttgaatcaaaatcatataaatcaaatagtatttgattgtaagaggtctctatttaaaagaacttcctgactaattcttgtataaacaagagaaatccttgctaaattcacactttcttaatttattataaaaatcacagttttagagttaaaattaattatatgatyattaattttaaaaccacaaaaagtagagaaaatgtgtagacaactacacatacaaccatcacttcaactgaacagatatgaatgttttgcaatattttttcaggtccctttttttaaaaagaaataaattgctatagatacagctaattgccacacatgctatatttttcccttccttattctccaaaagcatttactattctaaagttattatacaccatttagtttaagagctgaaattgacactcagagatttggtttttcaatatcgtattaatcaagttcaagaaccagaaatttttaagtacctctat

SEQ ID NO: 874042 - DNA, 643 bp, Homo sapiens
tttatttctttggttttaccaagtggctattgcattaatattatctgagtgccacaactactcagtgaactaaaagaacaataatacttaatgcctaatattaaagttttgcttaattccatagattgttttcaagtgtccatcctgcaaaatccgcatgagatttccccaaatatgtaactgtcttcctttatcagatgctccactcctcacctgcttttcccattagaattacatagcaagagctatgtaaagaattatctagaaaaaagtaactttccatgaaagcataatgtcaaggtaacaggctgaatagtcatgatttgttaaattctctttaggtaccaagacatgctaatttgcatgattacattacgtatgtttcctctttggtttccatactgagctcatakgactgcttaactataatgttttttcgtgaaaacaaacaagcattgcattagaagcttcccataactgtgtactaaatatcctgtcttttctatttctggctgttgtcactgaaaatcttatttctttgtacacttttaaaattagtatatttttagagctttttcacccgtttatatgccctcctttgtgactctcacataacacattgtgggatgttatcacctctagt

SEQ ID NO: 874043 - DNA, 592 bp, Homo sapiens
caaaccgttgtttttgacaaccagcctgaaccaatgatgtgcactaatcattttagtgttagaatatttgctcagactgtggccacatgatagtgttaaaatgttaaaagaaagtcaaagtcatttaatattgacaaggctactcctgaaggctccctctttacctgacaacattaaaaaacaaaagatatttatttagtttaaatagggggaagtggagagacaaaaagggaaagagattgtatggtagggttaaaatatgtattaaaataatttacttattattattgtaattttaaagctttttaacatgaaaaatgtgaaatatatgtaaagttagaacagtataacaggctgggcgtggtggctcatgcctgtaatccaagcactttgggaggccgaggtgggcagatcatgaggtcagaagttygagatcagcctggccaatatggtgaaaccccgtctctactaaaaatacaaaaacaattagccgggcatggtggcacacgcctgtaatcccagctactcaggaggctgaggcaggagaattgcttgaacctgggaggaggaggttgcagtgagctgagatcgc

SEQ ID NO: 874044 - DNA, 544 bp, Homo sapiens
aggcattttgcacaatggtggcagaggcatcgggatgtgaatttagcctcccagtctaactgtgtagaaggacaatcccacccttttctgctcttactgcgttttttccccttttttaaagttagctactttaaaatcacttatagaaatcacttccacacaaaacttctttttgtgatttaacctttaagtgataaaatttcttgtgaattccaaaaatccctacactttacttttattcattaaaatactgtacctatactttcaacttttaaaagtgttattataaaatgctcattaaatttatgtaatatggaaagtaaaagggaacaaaaatctgctgtctgcatttcctagtaccrttcttcagaggtatgcactgtgtacatgcgctccataattatgtaaacataaatcacatgttttttaacataaatggtatcatctgttacatgctaatccacaacatgaatttttatataaatatattttgaacatatttccatatcaggacacataattgtttcactgctttcaatagttg

SEQ ID NO: 874045 - DNA, 608 bp, Homo sapiens
tggcataatctatggaggaagttgtgtctgaaggagttcagagtgtgaaaggagcctaggagggttactgaagcaactcaagaaagaccatgtagactacattaagtagtttacattttatcttcacagcaatgagaaagcattggsggttttataaacagagtttcagaataatcagatttgagttttagagtttctgagttttagaaaaatcactctcaatgcaatttcagtttcagttttgggaatagaatctattttgtttccctttaaaagcaacattaacaattttttgacctattacattttaaaagcctatattaaaggtagtttgttggccgggcacggtggctcatgcctataatcccagcattttgggaggcgagacgggcggatcacgaggtcaggagattgagaccatcctggctaacacggtgaaaccctgtctctactaaaaatacaaaaaaaaaaaaaaaaaaaaaaatagctgggcgtagtggcgggcgcgtgtagtcccagctactcgggaggctgaggcaggagaatggcgtgaacccggggggcagagcttgcagtgagccgagattgcgccactgcactccagcctg

SEQ ID NO: 874046 - DNA, 608 bp, Homo sapiens
tggcataatctatggaggaagttgtgtctgaaggagttcagagtgtgaaaggagcctaggagggttactgaagcaactcaagaaagaccatgtagactacattaagtagtttacattttatcttcacagcaatgagaaagcattggcggttttataaacagrgtttcagaataatcagatttgagttttagagtttctgagttttagaaaaatcactctcaatgcaatttcagtttcagttttgggaatagaatctattttgtttccctttaaaagcaacattaacaattttttgacctattacattttaaaagcctatattaaaggtagtttgttggccgggcacggtggctcatgcctataatcccagcattttgggaggcgagacgggcggatcacgaggtcaggagattgagaccatcctggctaacacggtgaaaccctgtctctactaaaaatacaaaaaaaaaaaaaaaaaaaaaaatagctgggcgtagtggcgggcgcgtgtagtcccagctactcgggaggctgaggcaggagaatggcgtgaacccggggggcagagcttgcagtgagccgagattgcgccactgcactccagcctg

SEQ ID NO: 874047 - DNA, 608 bp, Homo sapiens
tggcataatctatggaggaagttgtgtctgaaggagttcagagtgtgaaaggagcctaggagggttactgaagcaactcaagaaagaccatgtagactacattaagtagtttacattttatcttcacagcaatgagaaagcattggcggttttataaacagagtttcagaataatcagatttgagttttagagtttctgagttttagaaaaatcactctcaatgcaatttcagtttcagttttgggaatagaatctattttgtttccctttaaaagcaacattaacaattttttgacctattacattttaaaagcctatattaaaggtagtttgttggcygggcacggtggctcatgcctataatcccagcattttgggaggcgagacgggcggatcacgaggtcaggagattgagaccatcctggctaacacggtgaaaccctgtctctactaaaaatacaaaaaaaaaaaaaaaaaaaaaaatagctgggcgtagtggcgggcgcgtgtagtcccagctactcgggaggctgaggcaggagaatggcgtgaacccggggggcagagcttgcagtgagccgagattgcgccactgcactccagcctg

SEQ ID NO: 874048 - DNA, 578 bp, Homo sapiens
gcaaccacagctgtgaccataacttttttgaagtagctacatcatgtctaatcaagacatgatgaatgatctgtccaagttcttgaagtcaccactcctaagaaactttgtaaaagtagcaggcagcaaatggcagaagatgatttatttattgttttgtctctgacagatgaaaactcccttttcgactagtcaaaatttggataccttgttctcttgaaattattcaccaaaggtaccaccactctttaactctaacagttgttacttgtctttctttgatgcagtgttgacattycttgtaatgattttagaaacaatggtgaagatttctctcaaacacagaagttattctatttgacttaataatctttctttaggttcaaatccacagcagcgtctaaaaaatcatgagaaccattttaaacattacgtttcccaagttgaatttttgctgtcgattcctaatctttgtcagtaagtgttaatatatttcctggcagctgccgtaatttttcagttaagctattcaggtggtcaaatgtcaattaagtaacccaggtgtgtaactaagaact

SEQ ID NO: 874049 - DNA, 607 bp, Homo sapiens
aatacatatatgagcaatgaatagatcactgctttggaattttaagtggtttatttttcggttgctattttaactgcaaattccaaatggcttgacatataacaccagagggaatctgttacattaagtgatttaagaactctacattgagggagtagctgtaatcgaaagcaaaggaagaaattagctcaaaggaaaaatgtaaccaaaaagccaataagaattatgactatatgggtctaccagaaactcagagtaaggaatcattstatgtcacctgcccaccgcacctccacaggcttccataggtgcatttcctatgccactaactcacacaattgctgtgaattcccaattcttgtgaagacctaatgtagctaaggtgactcaggaagactcatggccacaggatccactggcattaaaaggcctccctcaaaatccacaaagttagaagcaactgaagttgcacgcagatagactccccaaatgcagttccttttatatatcagcatacagcaagatggatttagcaagtttttgagattgggatgatttagaaatcaattgaattaatatgtcaggacagaggacaaggacagaggat

SEQ ID NO: 874050 - DNA, 618 bp, Homo sapiens
acacatggacacaggaaggggaacatcacactctggggactgttgtggggtggggggagggggggagggatagctttaggagatatacctaatgctaaatgacgagttaatgggtgcaacacaccagcatggcacatgtatacatatgtaactaacctgcacattgtgcacatgtaccctaaaactcaaagtataattaaaaaaaaaagaatctrtatgagtggttctactaaatatcctaaataaattgtaaacctgttttgtaaccccaagacagatatgtactgctctcatttgtaacatacctccttttaaatttttaaatttttttttttttaaacagagacaggatatcagtatgttttccaggctggtctcacactcttggcctcaagcaatcttctctcctcagcctcccaaagtgctggggttacaagaataagccgccacacccatcctagatctccttttttaaatagaaaaattgagttctgtaaaatataatcagattaattttaaatgccactgtaatcaaatattcataattccattaaatcatatgtcttaatccatgataactaaaatatagccccaaattagtgcacatgtttaagcagc

SEQ ID NO: 874051 - DNA, 679 bp, Homo sapiens
aaaaaaggcaacatgtttaatcttggctattatatcttacaacgtaaaatgccaaaaaaagtaagaattgtttttaactgaaggctaattttgacactaacaactccacattaagactgctatttttttcttatctccagtagtatttttggaccttaaataccaccacaatattttggaatttgtgtaaaaacctttttccccctactggtccaaaagyatcttaggttcctttgcatttaatcatagtttttttgttctcagttaaatgtagtttaagtggtattataaagataaaatgaggtaaaatattaataaatttttcacacacagtaagtattcaataggtagtgaggggttttggttggttggatgtttggtgactcattattgcttatctctgaggtcttgaactctaaggagtagggtttttttaatgtttataagcctaactactccctaccatgattgagagtaaacagcatgttttttaggagagtaaccacatcatgctgtatctctagtttatattacacaaattacaagtacattttataggtactcagtaagatgtcttgcaacaaaggccatttatgataaacccatagctaacatcatactgaatagggaaaaccttaaagcttttcctctaagaagtggaacaagacagcccactctt

SEQ ID NO: 874052 - DNA, 679 bp, Homo sapiens
aaaaaaggcaacatgtttaatcttggctattatatcttacaacgtaaaatgccaaaaaaagtaagaattgtttttaactgaaggctaattttgacactaacaactccacattaagactgctatttttttcttatctccagtagtatttttggaccttaaataccaccacaatattttggaatttgtgtaaaaacctttttccccctactggtccaaaagtatcttaggttcctttgcatttaatcatagtttttttgttctcagttaaatgtagtttaagtggtattataaagataaaatgaggtaaaatattaataaatttttcacacacagtaagtattcaataggtagtgaggggttttggttggttggatgtttggtgactcattattgcttatctctgaggtcttgaactctaaggagtagggtttttttaatgtttataagcctaacyactccctaccatgattgagagtaaacagcatgttttttaggagagtaaccacatcatgctgtatctctagtttatattacacaaattacaagtacattttataggtactcagtaagatgtcttgcaacaaaggccatttatgataaacccatagctaacatcatactgaatagggaaaaccttaaagcttttcctctaagaagtggaacaagacagcccactctt

SEQ ID NO: 874053 - DNA, 668 bp, Homo sapiens
tcaaaagacataaaatttcagctggataaacctagagtttacaagggtattgggaaatggattttaaaaaaatacttctgggagagtaatgttgcaggctttcaaaaaagcagtttgcgttaattaaggtttttaattctgtatacttctagggatttattctaagggaattcatatgattcacatacagattccaatatactaatctcagcattatgtatactaatgcaaatttgaaagcaatgaacattgatttaataaactgtcacattcatataataccatgtaggtattaacatagtaagaaaaaaagtattctaatatgaaaagctatattcatgacaaattattaatttaaaatcaagttaaatggtttatttataataatcctttctttctcatatctctttatatgcatgtagacaggataccaaaatgttarcagtgatattctctgggtagtgggattatcaattataaattttctttttgtattatttgtattttctaaatttcataaaataggtattattttataataaagttttctaaaattgcattgcatatatcatgtagcttacccttcttttttcttttaatttccaatttatgcattttctaatcacaagcaaggtcaagaaattgagagagaagagttggctgaagaa

SEQ ID NO: 874054 - DNA, 668 bp, Homo sapiens
tcaaaagacataaaatttcagctggataaacctagagtttacaagggtattgggaaatggattttaaaaaaatacttctgggagagtaatgttgcaggctttcaaaaaagcagtttgcgttaattaaggtttttaattctgtatacttctagggatttattctaagggaattcatatgattcacatacagattccaatatactaatctcagcattatgtatactaatgcaaatttgaaagcaatgaacattgatttaataaactgtcacattcatataataccatgtaggtattaacatagtaagaaaaaaagtattctaatatgaaaagctatattcatgacaaattattaatttaaaatcaagttaaatggtttatttataataatcctttctttctcatatctctttatatgcatgtagacaggataccaaaatgttagcagtgatattctctgggtagtgggattatcaattataaattytctttttgtattatttgtattttctaaatttcataaaataggtattattttataataaagttttctaaaattgcattgcatatatcatgtagcttacccttcttttttcttttaatttccaatttatgcattttctaatcacaagcaaggtcaagaaattgagagagaagagttggctgaagaa

SEQ ID NO: 874055 - DNA, 682 bp, Homo sapiens
ctagtggtaaaactaactgataatgataaaagaagcccagagtcatataacaacatttattagggaaactgcacattcaactagtgataacaaaagcaaaatattaacagaaaatatgggcaaggattatggtttctgaatgttggaattagaaaagctaaaatrtcccatgcaaaacatttatttcaaattaaaatgttctttaataacaaactagtttgcatttcaaacaattactgataaagatttctgcattaataggccctataactcattatatgaattgataaatatagttacacagtcaaataggaaaagtttgtcatttttcctattttttatgccctctatttgttcacatcaatgaatataaagaaaaatgtaatgtgttaattttctttcagacagggtgttactctgccatccaggctggagtgcagtggcatgattacagttcactgcagcctcaacctcctgggctcaaatgatcctcccttctcagccgcctgagtagctatgactacaggcatgcaccaccatgcccagctaattaaaaaaatttatgtatatataaatcatgtcttattatgttgcttgggttggtctcaaacctctggactcaagcaatgctcctgtctcagcctcccaaagtgccaggattacaggtatgagccaccacacc

SEQ ID NO: 874056 - DNA, 682 bp, Homo sapiens
ctagtggtaaaactaactgataatgataaaagaagcccagagtcatataacaacatttattagggaaactgcacattcaactagtgataacaaaagcaaaatattaacagaaaatatgggcaaggattatggtttctgaatgttggaattagaaaagctaaaatgtcccatgcaaaacatttatttcaaattaaaatgttctttaataacaaactagtttgcatttcaaacaattactgataaagatttctgcattaataggccctataactcattatatgaattgataaatatagttacacagtcaaataggaaaagtttgtcatttttsctattttttatgccctctatttgttcacatcaatgaatataaagaaaaatgtaatgtgttaattttctttcagacagggtgttactctgccatccaggctggagtgcagtggcatgattacagttcactgcagcctcaacctcctgggctcaaatgatcctcccttctcagccgcctgagtagctatgactacaggcatgcaccaccatgcccagctaattaaaaaaatttatgtatatataaatcatgtcttattatgttgcttgggttggtctcaaacctctggactcaagcaatgctcctgtctcagcctcccaaagtgccaggattacaggtatgagccaccacacc

SEQ ID NO: 874057 - DNA, 682 bp, Homo sapiens
ctagtggtaaaactaactgataatgataaaagaagcccagagtcatataacaacatttattagggaaactgcacattcaactagtgataacaaaagcaaaatattaacagaaaatatgggcaaggattatggtttctgaatgttggaattagaaaagctaaaatgtcccatgcaaaacatttatttcaaattaaaatgttctttaataacaaactagtttgcatttcaaacaattactgataaagatttctgcattaataggccctataactcattatatgaattgataaatatagttacacagtcaaataggaaaagtttgtcatttttcctattttttatgccctctatttgttcacatcaatgaatataaagaaaaatgtaatgtgttaattttytttcagacagggtgttactctgccatccaggctggagtgcagtggcatgattacagttcactgcagcctcaacctcctgggctcaaatgatcctcccttctcagccgcctgagtagctatgactacaggcatgcaccaccatgcccagctaattaaaaaaatttatgtatatataaatcatgtcttattatgttgcttgggttggtctcaaacctctggactcaagcaatgctcctgtctcagcctcccaaagtgccaggattacaggtatgagccaccacacc

SEQ ID NO: 874058 - DNA, 637 bp, Homo sapiens
aggtgctctgaatgcctggagacctgcctagacaagtgtcagagaggacccctgcaccccatactacaatctatgtccaggaagggttgggtggctcaggctgctggaccaggcaaatgggtgctccagatacctgcatttttgcctgcatgtgaagcagggagagacccactgcaccataatctattttgaggaagggtggagcagctcaagctgctgaactaggaaaatgggtgctccaaatgtctggagatctgcttggtcatggagcagagatagccttgctacaccacaatctatgtacttaaatggtggggtgactcaggctgttgaagcaggtgaatgagtactctgaatgcctgcagatctgctaggtgtggagcagagagaacctgactgcrccacaatctatgtccaggaaaggtggggtagctcaggctgctggtccaggcaagcaggtgctctgaatacctgctattttctctggggatggagaagagaggacaccactttgtaccccaatctcaggaaagcagggtacgtacaccagcagtggcacatgcagatcagttcctgcttgccaagctggactttgctgcaagtgttgccacccaggagaaactgcagctgtagtatc

SEQ ID NO: 874059 - DNA, 602 bp, Homo sapiens
gtatatctatttctgtatataaaatcaagagttcatactgagaccttcaagtccaatccaataccataggatttattctagccttactcctttcctaattttaatctccttttctaacagtgaaaaagctgactgttattatccacaatatagctaaaatcacacttttaatgaattatctatagtattcactggtaactttctctctttgacctggctacacttgctttcagtagagaagaggaagaaaaatgcccacagtgaacaacagttgacatatatattccccacattttccaatacaaaggcaaacatagagtgaaatgtttccagggcagttaaggactagtaacctcacatgtgtccttagatgggagtttattttctcagactaagtctgggcttgwcattccagctgcttgcccttccactgcagagggatatgaagaagtctgcaccagccgctaatggagaaagcagctgcctccggagagaggatgagccaccctttccagtcccccgcctccccaaacttctccccatcactgcaaacacagcgtgcacaaccacacacaaatgaagggaaaaggacccctgtttgt

SEQ ID NO: 874060 - DNA, 644 bp, Homo sapiens
ttgtctcagcccaaaatctccttaagctgataagcatcttcaggaaattctttaagactgttgaaaattgtccccaatctcttctggcttgtaaagtttctgctgagaaatctgttgtttttctgatgggctttcctttttaggtgacctggcctttttctctggctgccccacacattttttttccttcattttgactttggagaatctgacrattatgtgtcttggagttgatcttctcatggagtatcttactggggttctctggatttcttgaatttgaatgttggcctgtcttgctaggttggggaagttctcctggatgatatcctgaagtgtattttccaacttgattctgttctcctcatctttttcaggtacctctgtcagtcttaggttcagtcttgtaacataatcccatagttcttgaaggttttgtttgttccttttcattcctttttctctaatcttgtctgcctgtcttatttcagcaagattgtcttcaagctctgatatcctttcttctgcttggtctatttggctattgatacctgtgtttgcattatgaaattctcatgttgtgtttttcagctcctttagatcatttattttcctctctacactgataattctggttaatagct

SEQ ID NO: 874061 - DNA, 644 bp, Homo sapiens
ttgtctcagcccaaaatctccttaagctgataagcatcttcaggaaattctttaagactgttgaaaattgtccccaatctcttctggcttgtaaagtttctgctgagaaatctgttgtttttctgatgggctttcctttttaggtgacctggcctttttctctggctgccccacacattttttttccttcattttgactttggagaatctgacaattatgtgtcttggagttgatcttctcatggagtatcttactggggttctctggatttcttgaatttgaatgttggcctgtcttgctaggttggggaagttctcctggatgrtatcctgaagtgtattttccaacttgattctgttctcctcatctttttcaggtacctctgtcagtcttaggttcagtcttgtaacataatcccatagttcttgaaggttttgtttgttccttttcattcctttttctctaatcttgtctgcctgtcttatttcagcaagattgtcttcaagctctgatatcctttcttctgcttggtctatttggctattgatacctgtgtttgcattatgaaattctcatgttgtgtttttcagctcctttagatcatttattttcctctctacactgataattctggttaatagct

SEQ ID NO: 874062 - DNA, 625 bp, Homo sapiens
caacctctctcatgacctaaaatgtccctgccccatgcaatacaatctatttagagaacccaatgccctagtaggtgctgggccttctatttcccactacaatcacaaaaagaacagcagtggcttttgcccttgggaagctcrttgtcttggaactgggggtgaaaatggggattgctaaggggacctggaaatacggcaatgtattaagttccataatgaaagtatatcaatatactgtgataatacagaggagaagagattccacgtggagttttgggaatagtgggaaaccttctagaatgtaagttccccaaagccagtcacgggccaaccttgtaagccttttttttttttttttctggatatcagtctcaggcctgctacattaacttctttctgcacacctgttcatttatttgtgtatacatgtagtcatataattagaagaatagccattgaatttgtattatagtttcaatttatgttaaagaatactggatcttccctataatatataaaacaaatttaatacctatttttagtggtatgctggagctattctgtaactgcatgttagagccaattattaaatctccaggaattttgtgagctactcacttgc

SEQ ID NO: 874063 - DNA, 589 bp, Homo sapiens
cagttcctgcccctgttttttcctgtcttctgatttgaaaatgggtgttttattttcttcttttcacatttagtctgggatcccttcttcattccttggctttttatttttctccaaggggcttattattgcaaagttaagaagccataagcaaggggagtttgtgaggccaactgtagcagaggcacagctctcatcttaccatcgtaaccactctgaattgctgggtggcaccagaaagctcactggcaccttggcatatggcagggagaacctggtaatttgggtagattaaaagtgggtatggaattgccattaagctatcatccaggtcttgtgtgtgtgtctgtggtgtgaagggggcaggaaaggggaaggwaataagagaaagggagagaagaggataggagagtattaaacaaatcctagactctgctaccttcatgttttgattatgaatgtgtagaggtcagtgcttcaactctatggactttatctttccacagatctcaatattttgttaatagctcttttgctggagtccgccaagctgactgtttaactggctttgccttccctatttctttat

SEQ ID NO: 874064 - DNA, 587 bp, Homo sapiens
ggttatttcttttacttctttgtattccttccactatacaaaatacaaacccttgtttatagctgattccccagtaaatttctgaaagaacaaatggatgaaagaaggatgatttatgatatgtccatggttgctgaaagaatggggaaaaatgtaaaatcacctgaaaagttaatagataataaatgcaagaagttttatttgtaaaaagccaatagataataaataaaagaagttttatccatgataagtagatgctgctactttgtcaatgtcccagagaaatacatgtgtccagagaacatttatttgaccaattcaatcaaccaaccagaaattcagttgaaacatcagtttgacaggtattgactgaagtggctgggtagcatagttgatcttattggcccttttgtggtccacattttagtggtgacccagtattcctctcrgaaaccagaaggaaaggaaaaagggaggcagggctttagctatgccatgatgtggttcagagaatattggatgagagctagtagacctggtttctcctcagtcttggggaggggcttcctggccattgctatgtgacc

SEQ ID NO: 874065 - DNA, 664 bp, Homo sapiens
gactttggactgtggacctttgggttaatgctgaaatgagttaagactttgggggactgttgggaaggcatgattggttttgaaatgtgaggacatgagatctagaggggccagaggcagaatgatatggtttggctgtgtccccacccaaatctcaacttgaattttatctcccaggattcccacgtgttgtgggagggacccagggggaggtaattgaatcatgggggccggtctttcccatgctattctcttgatagtgaataagtctcacgagatctgaygggtttatcaggggtttctactttgcttcctcctcattttcttttgccaccaccaagtaagaagtgccttttgcctcctgccatgattgtgaggcctccccaggcatgtggaactgtaaatccaattaaacctctttttgttcccagtttcaggtttgtctttatcagcatcatgaaaatgaacaaatacagacttttgacaaatacttcttctgtctttctgggtagtggaaatattataacagcaaataaaacatgttccctggctatgaacaatttttagtccaagaggagtaatacccaggcaaacaaataagtaaagaatatgataaatgctaaaatacagctacatatcaggtgctaactggctccttgggaaa

SEQ ID NO: 874066 - DNA, 626 bp, Homo sapiens
catttgtttgtttgaaggtccaatatccgtatttttaatatttcttctatttaggggtatcatacagtttttagttttcttaccatataatacatgttggacatgcatgtctaagattttaagctgctttcctctccagttggtgacaatagaagccctgaatccctattgggacattttgcaaactaagcctgacatgaggtaggtaaaaagtcaatcaatcttatttgtgggtcttctggactttytgacttctgttccattggtatgtctgccccttttccaatgttccactgtcttaattattagggctaaataatatcttaaaattgagtagtgtgattcctccatctttatttgttttcaaaacagttttagctattctggttcctttgtttttccacatacgttttagaagaagcttgttcatatctacaaacaatcctatcagcattttgattggaattacaattcaatctatagatcagtttggggacaatcaacattttttcatgttgagtcttctagtctcagtgagacttctcagagtgagaagtcaagtctttctcccccacggggtggtcttcttgtgctggtgccttaattattgcttgtccatctgttcc

SEQ ID NO: 874067 - DNA, 588 bp, Homo sapiens
aggacagtgggtacagcgcaccgtgcgtgagccgaagcagggcgaggcattgccttacctgggaagtgcaaagggtcagggaattccctttcctagtcaaagaaaggggtgatagatggcacctggaaaatagggtcactcccaccctaatactgtgcttttccaatgggcttcacaaatggcacaccaggagattatatccagcacctggctcggagggtcctacgcccacaaagcctcactcattgctagcacagcagtctgaggtcaaactgcaaggtggcagcgaagctgggggagtrgcgcccaccattgcccaggcttcagtagctaaacagagcggccaggaagcttgaactgggtggagtccaccacagctcaaggaggcctgcctgcctctgtaggctccacctctgggggcagggcacagacaaacaaaagacagaaataacctctgcaaacttaaatgtccctgtctgacagctttgaagagagtagtggttctcccagcacgcagcttgagatctgagaatgggcagactgcctcctcaagtgggcccctgacccccaagtagcctaactgggagg

SEQ ID NO: 874068 - DNA, 607 bp, Homo sapiens
gcaaactatcgcaaggacaaaaaaccaaacaccgcatgttctcactcataggtgggaattgaacaatgagaacacttggacacaggaaggggaacatcacacaccggagactgttgtcgggtgggaggaggggggagggatagcattgggagatatacctaatgctaaatgacgagttgatgggtgcagcacaccaacatggcacatgtatacatatgtaacraagctgcacgttgtgcacatgtaccctaaaacttaaagtataataataattttaaaaaaagaaatttaacacaataaataaataaataaataaatatatttggcatattgaaaaacaaaagtttctttcacacactcaaactaaaagctgtaatttttaccagcttccaaactaccagtaaaatcggtcagttttcacactaaatcaagctaatttggtgaaagtaagactcaaatcaaattaatttatgtaattttactaatcccatatgcaaatggcaatgttgaaaaaaaaagtgacctggggtatgattatcattttctcaagctttattgaggtataattgacaaaagttgtatatatttaaggtttacaatgtgatgg

SEQ ID NO: 874069 - DNA, 656 bp, Homo sapiens
gggaccttatgacctaatcactcttcatactgttacaatggcaatgaaatttcaacatgagttttggaggagagaagcattcaaaccacagcaagcgtgctcctacctcctctctcagggcatctgcagaaagagctgcaactgcacgtccttcctccgtccatcctccgtcccttcccgatgtctgtgcatttcctgtgacccaggaggtctggtgtagggggtgctcctgccttaggtctgaggccctgtctgaagaggggtaggtgaggaggccacctgattgtctgggccaagacagtcacaggatgaatcattcatcatcaaggaggctgagggttgagtctccaggtccagggaactccccacaaagtgcgaaccctgcccagctccacacagcctctgctgggggaccctgctctggcacagagcctgggaacaggtcttgagctcagccagagtctgcctccctgtcatttaggaaytaaacctagcggcaggatgctggagcccagcccccatctgaccttacagggccaagcctggggccctgggttcccctcaaggcgcagcaggactggagccccaggcagtgcaggagtggccaaagctggggcttcctccagagccaccaagcatcacggcatcaggaaggg

SEQ ID NO: 874070 - DNA, 589 bp, Homo sapiens
cctgttcactcaccagtggtgacttagcatttaaatccattacagtcaggccctatgtgcaaatagcagaagcagagacacaaaggcactcagggtgcacattctgtaaacggccagagccaggccatggtcagtggcctctgatcaggaaaaagatcctgatagcaaatgttcaatcaaagctggggttatggcttgtggaacagggggtcagttcatcaggggatgsgctgcaattgtcttcatagtgcttgtctcagtgccagtgcttactgagccactagagaaaaggaataacctattggcagttaaaacatagtttatcttttaagtgtagaagtgagtggcaaaatccttgcctggcaaggccttaggtcttgtttataatttgacatcttactgccactcttctgtcagtcttaagatctctattttaacatgagtgttggtcactgctgtgactaaaccacaaaggggagtaggtataacgaggcgtgtctgatctcttgtttagtcatggttggaaaaagtttttagatttttagggggttccctaggccaagagatggactatttaatcagtggtggg

SEQ ID NO: 874071 - DNA, 549 bp, Homo sapiens
tgtttaatgacacagagcaaaaccacatcagcatgtgacaaaggtctaatatcaagaatctatgagggggcagttccaagatggctgaataggaacagctccagtctgcagctcccagcatgagctatgcagaagacgggtgatttctgcatttccaactgaggttctgggttcatctcatgggggcttgttggacagtgggggcaggacagtgtgtgcagaccaccaagagtgagctgaagcagggtgaggcattgcctaacccaggaagtgcaaggggtcagggaattcccrttcctagccaagggaagtggtgatggacggcacctggaaaatccagtcactcccaccctaatactgcacttttccaatggtcttagcaaacggcacaccaggagattatatcccatgcctgtcttggagggtcccacacccacagagcctcgctcattgctagcacagcagtctgagatcaaactgcaaggtggcagcgaggctgggggaggggtgcccatcattgctgaggcttgagtaggtaaacaaagtggc

SEQ ID NO: 874072 - DNA, 549 bp, Homo sapiens
tgtttaatgacacagagcaaaaccacatcagcatgtgacaaaggtctaatatcaagaatctatgagggggcagttccaagatggctgaataggaacagctccagtctgcagctcccagcatgagctatgcagaagacgggtgatttctgcatttccaactgaggttctgggttcatctcatgggggcttgttggacagtgggggcaggacagtgtgtgcagaccaccaagagtgagctgaagcagggtgaggcattgcctaacccaggaagtgcaaggggtcagggaattcccattcctagccaagggaagtggtgatggacggcacctggaaaatccagtcactcccaccctaatactgcacttttccaatggtcttagcaaacrgcacaccaggagattatatcccatgcctgtcttggagggtcccacacccacagagcctcgctcattgctagcacagcagtctgagatcaaactgcaaggtggcagcgaggctgggggaggggtgcccatcattgctgaggcttgagtaggtaaacaaagtggc

SEQ ID NO: 874073 - DNA, 570 bp, Homo sapiens
ccaaggcctccggcagtcttgcctctatggattttctgggttcagtccactcagcctctctcacaggtgggactgtcaagcctctagctctcctaggtggactggataccctttgtggtgcctccaaacccatatttctgcttggcattgtgctgagggctcagtgtggtgactctgtctctgcaacaactcactgcccgagaccttaggctgtccacagcattctttgaaatctacgtggagaaagccatgccctcgtggttcttctattctgcacacctgcagaattaacaacacatggatgccatggaagttgatgacttgtaccattgaagtgatggcttgagccacacctaggtcctcctgagccacagcatgggcagccaaggagtgctgtgcctggacacagggaacrgagtcctaaagtgcctgctagaagtgaggccatagatttgcttcaaatttcttccatcatatatcctcgtttatggctctgaacttccactttacagaaagacctagggatgagcacaattcagccacattctttgccactttatggcaaggatg

SEQ ID NO: 874074 - DNA, 628 bp, Homo sapiens
taacaatagcttgagctgtgtccagcagactggagtgggtggcacaagtgtgtaatccagctggaaaaaatcagtactattctccatcagacaaggaagaactcaaaagaattcttgctgtttaacagggagctgagcaagagtaaggtgtagaaagcttacttaaagaaataataacagataaatttccaaaacttgagaaagatataaatatccaggtacaggaaggcatgacaacaccaaacagaatcaacaaaaataagactactacaagacatatactaatcacactttcaaagacaaggacaaaaaatggatcctaaaaccagcaagaggaaagaaacaaataacatatgaaggcattccaattcctctggcaacaggcttctcaatgcagattacacaggcyaggagggaatggattgacattttttaagtgctcaaaagaaaaaaaacctgccatccaagaatatattcttcagcaaattacccctccaattgaaaggagagataaagactttcctaaacagaaaaaagatgagaggattcaccaccctcgggcccatcttacaagaaatgctaaagggagttcttaaatctcaaagaaaaaaatgctaaagaataaaac

SEQ ID NO: 874075 - DNA, 601 bp, Homo sapiens
aaattactatttgacaaaatttcttaattctgtgtctaataagcctaataataaagctgtttgtgaaggaaaatagtcatgaaaatttatgctcctttttataccaacatctgaaacaaagtggacttcgagatacagaaaagttactgctccacctgcccataattccatatcctaaatgttgcccgggagtcaaatagcctctaagtaaggcaccttttgattcttttctttacaaaggcccctttcaggctttactcagatgtagaacatgccacaaatctccccattcctcattacttatcccttccagagtctgaggctctgtctctggwgatctcaatcctgggaccagtgggggcaattaacgtgcattatgcaggcttgagtatgtttcatcttcagagataatcatattggagacaaaaactacataatatgcatacacgctcatgtgcagtcacacacacacttacacacacacagatcaggctgttaacatagcagtattccttccagagtttcctctcctaatcttaataaattatctttgcgctaacaaactttttctgccatgagaggcaccattaccttcaaattt

SEQ ID NO: 874076 - DNA, 641 bp, Homo sapiens
tttttactttagtatgttccaatcatcaataacaatcttcctgtgttaaactattggtttgtcttaagtgatgtcctaagtgaaacacacagtacactagctttgccttcaaagctttcttttacttaagtaatccagccacatagaaaaaaataamtattgaatagtatttttagacagtaagatagctctcccacccaagaccctcagttcttctaaaagaaaactgctattcctaagtcacatatagataatcagtgcatttacaaatatgtgtataaacacatggctttgggcatttaatttttaatttacataatgcataatattaacaggtaatagttttacatatttacaaggtacacgtgttattttgatacaggtatatagtatgtagtgaccaaatcaaggtaattgggatatctgtcacctcaatcatttatcattactttgtaagcacgtttttaaataaattatagcgtactaatcacacatttctgtactttatttcacttagaactacttcttggacatattgcttcttatcaaaatgtatacatctatcttaattcttaatggctgtgtagtttttcattctctaaatgtaacatgatttattgattcagtcacctattaataga

SEQ ID NO: 874077 - DNA, 613 bp, Homo sapiens
tatttttagacagtaagatagctctcccacccaagaccctcagttcttctaaaagaaaactgctattcctaagtcacatatagataatcagtgcatttacaaatatgtgtataaacacatggctttgggcatttaatttttaatttacataatgcataatattaacaggtaatagttttacatatttacaaggtacacgtgttattttgatacaggtatatagtatgtagtgaccaaatcaaggtaattgggatatctgtcacctcaatcatttatcattactttgtaagcacgtttttaaataaattatagcgtactaatcacacatttctgtactttatttcacttagaactacttcttggacatattgcttcttatcaaaatgtatacatctatcttaattcttaatggctgtgtagtttttcattctctaaatgtaacatgatttattgattcagtcacctattaatagacrtatttgtttccaagattcagctatgacaaataatgctgaaagcttattaatttatgtagaaatttgcaaaatacacaatatctgaaagaaatattctgaaagtgaaaatgctgagtcataaactgtgcacttttttt

SEQ ID NO: 874078 - DNA, 621 bp, Homo sapiens
cccgtctctactaaaaatataaaaatgagccgggtgtagtggcgcatgcttgtaatcccagctactcgggaggttgaggcaggagaatcacttgaactcaggaggcggaggttggagtgagccaagatcgtgccactggactcaagcctgggcaacagagcaagactytgcttaaaattaaaagaaaaaaaaaaaaggccaggcacggtggctcacgcctgtaatcccagcactttgggaggccaaggcaggtggatcacaaagtcaggagttcaagaccagcctggccaacatagtgaaagcccgtgtctactaaaaatacaaaaaaattagctaggcatggttgggggcacctgtaatcccagatactctggaggctgaggcaggagaattgcttcaacccaggaggcggaggttgcagtgagcggagattgtgccactgcactccagcctgggtgaaagagtgagactccgtctcaaaaaaaaaaaaagattaagggttctcttataaaagggatggggtaaatgtcagaagtgtttaaaccaggccagacacattggctcatgcttgtcatcggttcatgcctgtaatcccagcactttgggaggtccaggcgaatg

SEQ ID NO: 874079 - DNA, 533 bp, Homo sapiens
atcctggacatgaaaaaatcaatggcggtttagtgtgtgataccacaatattgtgatttatttgtttatttttttgagacggaccctcgctcttgtggccgaggctggagtgcagcggcgcaatctcggctcactgcaagctccgcctcccaggttcaagcagttctcctgcctcagcctaccgtgtagctgggattacaggtgcccmccaccacgcctagctaaatttttgtatttttagtagagacggggtttcatcatgttggccaggctggtcatgaacccctgacctcaggtgacccacctgcctcaacctcccaaagtgctgggattacaggtgtgagccaccgtgactggcctttattttttgtaaacataaaaatattgtaaaatattgttattttaacaatacattttaaagaaggtattagatctgctgcatggtcatttttaaatgctttaaaaaagacataatacaaaatagctttccctttcaaataacataataaatcctacataattgcatattttag

SEQ ID NO: 874080 - DNA, 665 bp, Homo sapiens
taaacactcagaaaaaggattcttgaaaaacgaatgaaattctggcaaaaacaaacaaacaacaaaaaaacaaaaccacctaaatactaagtagtttagattatttgaatgaaatattttcccatgctgtcaaatttacatccaattttctatgttttattcaargagagttctgtcatacaaagattagaggttcaccaaaaacggctactacatcttattgttttctaaacctgacttcttcatatataggtaaacaattttagataaatttaactttccatgtatttgtttcaccatttgtaaactgaaagaattggacttagatgatctttagattctgaacttcagagactttgtgtataatagctaaagtagagataaattcaatatttgcaggatggtttgatttgtaatatctagatagatacacataaatagattgaaacagataaaatacttggtacacctggaaacactatatatatgaaaattaatagatgataaaatgaatatgcagattggtaaaaacaataaatatgtacttgaacacttaaagagaaaaactctaaataaagtcatagaggggatggtagagatggccacagaaaatgaccacggagagtattatgaagattgcaagattagacattgatgatgtaaat

SEQ ID NO: 874081 - DNA, 665 bp, Homo sapiens
taaacactcagaaaaaggattcttgaaaaacgaatgaaattctggcaaaaacaaacaaacaacaaaaaaacaaaaccacctaaatactaagtagtttagattatttgaatgaaatattttcccatgctgtcaaatttacatccaattttctatgttttattcaaagagagttctgtcatacaaagattagaggttcaccaaaaacggctactacatcttattgttttctaaacctgacttcttcatatataggtaaacaattttagataaatttaactttccatgtatttgtttcaccatttgtaaactgaaagaattggacttagatgatctttagattctgaacttcagagactttgtgtataatagctaaagtagagataaattcaatatttgcaggatggtttgatttgtaatatctagayagatacacataaatagattgaaacagataaaatacttggtacacctggaaacactatatatatgaaaattaatagatgataaaatgaatatgcagattggtaaaaacaataaatatgtacttgaacacttaaagagaaaaactctaaataaagtcatagaggggatggtagagatggccacagaaaatgaccacggagagtattatgaagattgcaagattagacattgatgatgtaaat

SEQ ID NO: 874082 - DNA, 584 bp, Homo sapiens
cttgtcttctgctagattttgaatttgtttgctgttgcttctctagttcttttcattttgattttagggtgtcaattttagatctttcctgttttctcttgtggacatttagtgctataaatttccctttacacactgctctaaatgtgtccagagatcctggtttgttgtgtcttcattctcattggtttcaaagaacatctttatttctgccttcattttgttatttacctagtggtcatttaggagcaggttgttcagtttccatgtagttgtgtggttttgagtgagtttttaaatcctaagttctagtttgattgcactgtgatctgagagactgtttgttatgatttctgttctctacatttsctcaggagtgttttacttccaattatgtggtcaattttagaataagtgcaatgagatgctgagaacaacgtatattctgttgatcttgggtggagagtgctgtagatgtctattaggtctgcttggtccagagctgagttgaagtcctgaatatccgtgttaattttctgacacattgatatgttgtgttaaagtctcccactattattatgtgg

SEQ ID NO: 874083 - DNA, 683 bp, Homo sapiens
cttcaaaccattctcaacagaagtacaatgactaaggcctggcatggcgtctcacacctgtaatcccagcactttgggaggccaaggcaggaggactgcttgagcctaggagtttgagaccagcctgggcacatagcaagactccatctcttcaaaaaaatttttttcaattagctgggcatggtagtgcatgcctgtagtctcagttacttgggaggctgaggtgggagtattgcttgagcacaggagttcgaggctgcagtgagctaggatcacaccaytgcacttcagactgggtgacagagagagcccattccttaaaaaaaaaaaaaaaggacaatggctgggtcaccaggtatgtacatttgaagttttcagaggtactgacaactgctatcaaaagattatactaatttatatacctttatcttctgacgtgctgcaaactgttcacttgcaagaaacaatggcagccatacattttctagcctattttgcacatgcttctggatttcaactagaacaggtgcatcaagctgctcatgaagaatcttcccccagccaccacttaaatgcattacctaagaaaattaagatggaaacagaaactattgtgctttctaaaagaaacactaatagtcattaattcattcattcactacaaaaccatttgctgcaccctg

SEQ ID NO: 874084 - DNA, 613 bp, Homo sapiens
tctatttctcctttcatttctatcagcttttgcatcatgtactctgaacctctgttgttcggtgcatatatgagttgttaagctttcttggtgaattgaccctcccccctttatcattatgtaatgttcctctttatccatagtaagattccttgttctgaggggtgctttgccagatatcaatatagtcactccagctttcctttaattcataattgcatagtataccttttaatatcctttttacttctaacctatttatgtctcatttttaaggttagtttcttgtagacagcaaataattgggatttttttaaaaaatcatccctgactctggcttttacttggggtgcttacgccatttaaatatcatgtaattattgatgtatattattattatcattatttttagaratgaggcctcactctgtcacccaggctggagtgcagtggcaccatcatagcttactgcagcctcaaactcctgggctcaagtgatcctcctgcctcagcctcctaaagctctggaatcaaacgaatgagacatcatgacaactcaatatgattaattatattatattattaatcatatatattatatgattaatgtgat

SEQ ID NO: 874085 - DNA, 604 bp, Homo sapiens
aaggaggtagagtgtgttttccacaatagataatttttttatcatgggtgggtggaactatctttaagctaatatgaatatgaacaagtctaactttgctaggacaagaggtaatgagataaactttgtaaaataggtattttaaaaaccaactatagacttatacacagtgaacccttagttttatgactttctcctttaaggctgcccttggtctccattttaatatcttttctacaatatagcatgacagacttacaatactaggtagctattaaaaagcatgctataggagtaaatttgttcatataacaaacatttattaagtatcaaatgttattatgctaaattgtaggcgtaaaaaggtgaatacaacacactgccctctttcaggcaggaagacatccatgagaacaaatattaggaaataatgttgattctgatscatgttctgactaggtatggttttggcacagaggagagaatgatggggtatggggacaataggtcagggaggtctcagcaagagtgatgacacttgcattgggccatgagggagtttgccagttggaaggcatttattccactttgataaagtctaacc

SEQ ID NO: 874086 - DNA, 666 bp, Homo sapiens
ccatgagacagaaggaagagctgaattggagagcagaaaaaagaatggagaaaaaaattagaataaatgaagacacacacacacacacacaaaagagggtaggggaagaaaatctatattttgattaatgttttgctttctaaatagcgttaaaatgaagaacaatgtttaatttattcttaatacatattaatttgctgacattgttgggggaaaaagtgaacaaatattcctgtttgcatcttcaaggaaatctyagctgcttcattaattagagacaatatcctctatataatacctgcattgtactattaatacacatgagatagctcaaacgatttaaaatacgacatttcccattgcaatttatatttttccaacattatgatatttttcatgcaagatttccgcaccacttaatagtttccaaaatcattttgaaattgtgtgtttataagcatattcttggatagaagtgaatccccatctcctttcaaatgtatcataatgcatgccagacttacttttcccacattaatgttttcttattgaagataaggtctagataaacatacctgagaaatgaaaattgtgtgtttattgaatttattgtttttaacaatgtcaaaagcaaaaaaaaaaaaatggaaatgttttccacaactg

SEQ ID NO: 874087 - DNA, 599 bp, Homo sapiens
ttacaggaatgttgaaaaatttgaaattatatagaaattcagttagtaagtactatatcacaaatttggttataattcaggccaattcatattaccgatatgcatagaattttcccattctttctttggtacagtaccacaaataattagaaaagcaatgttataagtaatctactgattttggtcaattaatggagaaaaatacatttactttgtgccagaaaggaagagggaagagaagaggagaggacagggaggggaggggaggggacaattcatatggtccccggtaactactgagattctgattcttcagtaaaacttagttttacattcctgcctttggattctgagagatatccctgtgttttacacacacacataaaaagggggagagagaragagagaattttatttaattcagctgggtagagtagggaattttttatcttaaaaattatttttcacaaaattattgtattcatttttttctgagatttaattggtaattgtaactatagagagttgttacatgttttaaaataatgtgagtttattagtaaaatcaatcagtaggcagttaaagtgactattaatat

SEQ ID NO: 874088 - DNA, 606 bp, Homo sapiens
tggcagtggccacattaggactgtaatagtggcagcagagaaaagtggaaggattgtagatacattttagagaaatattccacagaatttattccttgagtggttttaggatttaagtaaaaaataaaaatgaagaatcactcctagattttgggcttgggaaactaataggtaatgatccaaaatacttagatggggaaagcttgaggaggagcacatttggcaatggatgatgatattaatagcactatttgggtcatgttaagtttaagatttctataggaaattcaaatgcatatgatgggaaggtagtgggatataagaggatagagtccagcaaagaggtctgggctaatgatttaaacttggcagtctttagcatactgatgttatttcaagtgattggattacatattttcayctaaggtaaaaatgtaacaatagaaaaaaggagtcaaggtctgagcccaaggtaatctaagatttccttagatggcaataaaagaggctacagctcacaaagataaccttacggaagcatgtagtgaaggaagtgaaggaagaaaaacaaggtaagtgtggttaggagtaatgtcagcaagatgg

SEQ ID NO: 874089 - DNA, 674 bp, Homo sapiens
ggcaaaactctctttgtaatgtagacttcagcaatggaaccttcctccaggatagtagccaaagtgaggggtggaaataggtctcccttcctgggacccttaggcagccctcaatgggtaatagtaataagtgtcatgtagggagccctatgatttacaaagtgctatttcagtgyttcacttgattatcgtaatagctcagcaagggatatgtaagaggaataatagacatgttagtgttggccacagatttgagaagaaaagagaaacatctactagatcaaccttaaatgtccccaccattgttcttgtcttggtccatgaatgccagtgttttcagtctgatgattggtctggggaagaatcttttgttcatattggattaattggtatctcattcctggttgcaaacttttcaccgtcccaaaaggtgaattcctcatcttttgtactctggggctctgctacagtggaggtgtagaaaagctgccttcaatcccactcttgccttctgaagttcagtttcacatctaactggggcataggcaaaaggatatgatggttcttgaatgttctcaacctgccacatctgtaactctcaaattctgaaaactaacatgtctcttttaaccagcccagctctatctttggctctggtcctacacatcacacag

SEQ ID NO: 874090 - DNA, 634 bp, Homo sapiens
tttatttttaatttacaaataaaaattgtgtatatttgtgaggtacaatgtgatgttttaaaatatgtatacattgtggaatagataaataacctaattaacatattcatatttcacatatttgtcattcatttgtaatgagaatatttaaaatctaccctcagcacttttcaagtatacaacacactgtaattaactatagtcaccatgttgtacaatagatytcttgagattattcctcgtttaaccaaaattttgtatcctttgtccaacaatccccaatcccacccaatctcccaggccctggtaatcaccattctattcttctccttccatgactttgacatttttagatgccacatatatgccattccattttctgccagaaagcctatcatattcttatgccaaagagatgattccaatgtcacaaactattggctatatgttttgctactatgctctgtacccattctctgtctttttttttttttaatgaccgcatggcaattggtttcctcaatatctttattctttcataggccttcattcagccactcacctgaagtttctccactttgttttgcttctgttttatgatacaagaataggcagatgtgagttcaaatcctgg

SEQ ID NO: 874091 - DNA, 630 bp, Homo sapiens
acccaacatggggcagatctttatttcttgcttttcctttgttcctttataatctatgtgcccaaggtgacacgccatggtttcacaggcgccccaaagctagaaaggcagtttttcataaggggaacccttacctgtccccaactccgccaccagcgccacccccacagagctttgctgaaagtccccgcgtccacytgccttctgtgcacacctggctgctgctgatgctgccaactccttatcttgatggcctccaccgagtcgtacttgtccagtttgttggtgtggttggttatgctggtgttgaggagggtaggcgagacggggtggacgacagtcgcattgtgggattgctgttggtgctgctactgtaggtatagaccagcaggctgagccccacgtgatcatgtggaacacactgaaccctggggggacaggagcaaagtggtactggctcccttccccatcccttacttcccttcctgaacaattcagcctttgggtgcagaacaaggcaggcatgtgagaagggctgccctagctcaggggcctcagcttgagtagcagggtgagaagcctatccacagacaggagcagcccagggagagacgtgaaatgcttgctggg

SEQ ID NO: 874092 - DNA, 630 bp, Homo sapiens
acccaacatggggcagatctttatttcttgcttttcctttgttcctttataatctatgtgcccaaggtgacacgccatggtttcacaggcgccccaaagctagaaaggcagtttttcataaggggaacccttacctgtccccaactccgccaccagcgccacccccacagagctttgctgaaagtccccgcgtccacttgccttctgtgcacacctggctgctgctgatgctgccaactccttatcttgatggcctccaccgagtcgtacttgtccagtttgttggtgtggttggttatgctggtgttgaggrgggtaggcgagacggggtggacgacagtcgcattgtgggattgctgttggtgctgctactgtaggtatagaccagcaggctgagccccacgtgatcatgtggaacacactgaaccctggggggacaggagcaaagtggtactggctcccttccccatcccttacttcccttcctgaacaattcagcctttgggtgcagaacaaggcaggcatgtgagaagggctgccctagctcaggggcctcagcttgagtagcagggtgagaagcctatccacagacaggagcagcccagggagagacgtgaaatgcttgctggg

SEQ ID NO: 874093 - DNA, 630 bp, Homo sapiens
acccaacatggggcagatctttatttcttgcttttcctttgttcctttataatctatgtgcccaaggtgacacgccatggtttcacaggcgccccaaagctagaaaggcagtttttcataaggggaacccttacctgtccccaactccgccaccagcgccacccccacagagctttgctgaaagtccccgcgtccacttgccttctgtgcacacctggctgctgctgatgctgccaactccttatcttgatggcctccaccgagtcgtacttgtccagtttgttggtgtggttggttatgctggtgttgaggagggtaggcgagacggrgtggacgacagtcgcattgtgggattgctgttggtgctgctactgtaggtatagaccagcaggctgagccccacgtgatcatgtggaacacactgaaccctggggggacaggagcaaagtggtactggctcccttccccatcccttacttcccttcctgaacaattcagcctttgggtgcagaacaaggcaggcatgtgagaagggctgccctagctcaggggcctcagcttgagtagcagggtgagaagcctatccacagacaggagcagcccagggagagacgtgaaatgcttgctggg

SEQ ID NO: 874094 - DNA, 570 bp, Homo sapiens
tctgatttgttgcactaatgaagctcctataaatcctggcctgagatttactcttagtttaggaattatgagggtggtgggtagaagaaggggatgtcatagatgctttttctggccccttggaattgtaaagtaatgtgatattcacaaagcagcatgcaaattaaaaactcagcctacattagcttcgtaggatgttagctgtgtggtaccactttcactattcaatatagcatgagcatggtcaatatagggtaaaaagagtttaaaattcatgaaagtcagagtcagaattggttttaracatctgcacccatcggtcacttcagctgtgctgttggacaccgcagtcataggctcagagaggagcaacttcatcttataaaatcaaagccagtgaaacaggaaggcagcactgctccccagcttcattctcagagagaaatggtgacctccttaagtttcacgagctcagattcctccagctgcggcaggtttggtggggaggaaagaactcctaatgcaagcacaaccttactggagagttctctgtggctctaagcccataag

SEQ ID NO: 874095 - DNA, 586 bp, Homo sapiens
gtgtgcaggcattgaaagagttgttcttatggaaggtgtatgtgagttttttgccttgtcctgtgagaatttcctatggctcagttttgttgcaaggagcatcttctttggcacaagtacttgtaattccttctactcagctcctatccacagaggtggatcccacagcttccccctgctggagcccctttgcctggaggatgaggaactggcaaaaaggactcaagactagctccttttctggtgtccttggacctataagaaactcacacaccgttaccattgcaaatgttaacttggctgctgcactgtcttcctctttcttagtgtgccatcatctctctttaattcatagggaatggtcagcaagtcctagcagatagatagtatagtctttctccaaatgcraggcagtcgctcatcttgaaggcagtaagaaattatattcagtaatcgtcaaatcccattcagtaatcgtgaaatcccttcctgccaccttggcttaagggctggatagtacctttttccatgaacactatagtccacacaagcccagtgactatagcaactcttccctctctccctc

SEQ ID NO: 874096 - DNA, 632 bp, Homo sapiens
tgggtgtggtggctcatgcctgtaatcccagcattttgggaggccgaggcaggtggatcacctgaggtcaggagttcaagaccaacctggccaagatagtgaaaccccgttgctactaaaaatacaaaatattagcctggcgtggtggcgggtgcctgtaatctcagttactcaggaggctgaagcagagaattgcttgaacccaggaagcagaggttgcaatgagccgagattgcaccactgcactccagcctgggcgacagagcgagactcggtctaaaaaaaaaaaaaawagtgagcttgaggttatgttctttatttaacattagaagaatatttgctggttataaagtactacaagttttacaagatatcatcttttctaattgtaaatacaatacttgcttattgtggaaaacttggaaaatcattaactcactaactagaaaaagctgatctgaatagtttgctgaagatccagattataacttgcattatagtattacataatccattttttttgtttagcaatacattatgtacattatccatgttgttggatattttatgcagggttactgttctgctttgcaaagtatgaatatgccataacttacaatctctgattgttg

SEQ ID NO: 874097 - DNA, 598 bp, Homo sapiens
ctggaatgaaccccatttgatcatggtgaattatctttttgatatactgttgtattcagttagctagtattttgttaaggactttttgcatctatattcatcagggatactggtctgtagttttcttgttttctgtcacgtcctttccccgttttggtattakggtgatgctggcttcatagaatgatttagggaggatttcctctttctctattttgtggaatagtgtcaacaggattggtaccaattcttctttgaaagactgatagaattcacctgtgaatccgtctagtcctggacttttgttgttggcaatttttttttgtaccatttcaatctcactgctcgttattggcctgttcagggtttctaattcttcctgctttaagctaggagggttgtatatttccaggaatttatccatctcctccaggttttctaatttatgcacataaaggtgttcatagtaactttgaatgaccttttgtatttctgtggtgtcagttgtaatatctcctttttcgtttctaattgagcttatttggatcttctctcttcttttcttggttaatctcactaatggtctatcagttttatt

SEQ ID NO: 874098 - DNA, 598 bp, Homo sapiens
ctggaatgaaccccatttgatcatggtgaattatctttttgatatactgttgtattcagttagctagtattttgttaaggactttttgcatctatattcatcagggatactggtctgtagttttcttgttttctgtcacgtcctttccccgttttggtattagggtgatgctggcttcatagaatgatttagggaggatttcctctttctctattttgtggaatagtgtcaacaggattggtaccaattcttctttgaaagactgatagaattcacctgtgaatccrtctagtcctggacttttgttgttggcaatttttttttgtaccatttcaatctcactgctcgttattggcctgttcagggtttctaattcttcctgctttaagctaggagggttgtatatttccaggaatttatccatctcctccaggttttctaatttatgcacataaaggtgttcatagtaactttgaatgaccttttgtatttctgtggtgtcagttgtaatatctcctttttcgtttctaattgagcttatttggatcttctctcttcttttcttggttaatctcactaatggtctatcagttttatt

SEQ ID NO: 874099 - DNA, 554 bp, Homo sapiens
atcttggagtatgttccatgtgcagataagaagaatgcatactctgtggtttgtgggttgagtgttttctagaccttcattaggtctagttggtcaagtgttgagtttaagttcagagtttctttgttagtttgctgccttcatgacctgtctactgctgtcagttgggggttgaagacccctaccattattgtgtggctgtctaagtcttttagcaggcttataaatctggttgctccaaagttgatgcatacatatttatgagagtcaagacttcttgttgaattgaaccctttatcattacstaatggccttctttgtcttttttttactgttgttggcttaaagtatgttttatcagatagaagaatagtgacccctgcttttttgtttattatttaaaggatggggccttcctatgttgtccaggcttgttttgaaatcttgggctcaagtgatctgcctgccttggcctcccaaagtgctgggattagaggtgtgagccacagcacctgggctgtgaccgctgcttttatttcttctctgtttgcatg

SEQ ID NO: 874100 - DNA, 585 bp, Homo sapiens
gagtgatatggtttggttatttgtccccatccaaatctcatgtctaattataatcctcacatgtcaggggagctggtgggaagtgattggatcatgggggggatttcccgcttgctgtttttgtgatagtgagtgagttctcacgagatttgatggtttaaaagtgtgtgccacttcccctttcactctctctccctcttgtcaccatgtgaagaaggtccttgcttccccttcaccttctgccataattgcaagtttcctgaggcctcccagtcatgcctcccattaagcgtgcagacctgtgagtcagttaaacctcttttcttcacaaattgcccaatttcgggtagttttttatagcagtgtgaaaacggactaayacagtgagatattaagaatgaatactaggcctggcaaggtggctcatgcctgtaatcctagcatttggaaggctgaggcagcaggatcacttgagttcaggagttcaagaccatctggggcaatatagcaagacctcctccgctaaaaaaaaaaaaaaaaaaaaaaaaaaaagaaaatagttaaaagaaattagtctggggttgt

SEQ ID NO: 874101 - DNA, 581 bp, Homo sapiens
aaacaatgttctcctacttcattgaattccttaagtgttctgtagttcctgtcactgacatgtacgcagaaggtgtactcagtaccttctctgcacctgtcatggaagtgtgagaaatttaaaaaaattacatatatctatctctatgtgatgttgtgccaggaataaaaatgataaaaatttcatgtaatcttttttatatcattttgagtgatacayatatgttctgaggaagaataaattttatctccataatgatagtaaaaccacaatatctttgtaaggacatcactatttcattttttaaatgaaggagctgagggacaaagagattaagtaacttacataataaggtcacatagatttgattcatccattgaatcaatttttctatgctacataacaaatcactacacacttagcagctttaaataacaaaagtttattatttcatcatttctgtgagtcatgagtccaggtatcgtagattaataccttcttctactcagggtctcaccaggcagaaattaagctgtcagccagagctgctgtctcatttggagcactggatcctcttctaa

SEQ ID NO: 874102 - DNA, 612 bp, Homo sapiens
tatttcattttttaaatgaaggagctgagggacaaagagattaagtaacttacataataaggtcacatagatttgattcatccattgaatcaatttttctatgctacataacaaatcactacacacttagcagctttaaataacaaaagtttattatttcatcatttctgtgagtcatgagtccaggtatcgtagattaataccttcttctactcagggtctcaccaggcagaaattaagctgtcagccagagctgctgtctcatttggagcactggatcctcttctaagctcattggttgtttgcagaatrtatttctctggtgttgtatgcttgagatccctgttttctgactagttatcaaccagggacttctctcagcttctgcaggctaccctccagtccttgccatgtaaccacctcctcacaatatgaaatctatagtcaagaggaaagaagctctctcatgcttcactctcttttaaggactctcatgattaggttagacccacactgggaaagctctgttttgatgaactcgaattaaaaagtaacatatcataagagttatatctcatcataatcacagcttcttcctctgcttaccaccac

SEQ ID NO: 874103 - DNA, 614 bp, Homo sapiens
  misc_feature 68, 78, 139: n = A,T,C or G
atttcttctctaaaggaatgtggactttttctttttccttcatgatacttggaaaatgaattacattntaatacttantttcctgagtctatcatcttccggaggttgctaataaaaaaaatgatgaaagcctccctcnaactccagaatagacacatgatgacttttgatgaattgacttgtaaactagtttataggtttcaccattgctcatcctatttaaaaccaagtttcacttttccattactagaaataagtctgctacctggggtaattatatcagttcctacaatgtcattactaattttgctctagaattcagtcaggcgcatcttaaagcacaaccgtgaagttaatcctttttcattcaggatcattttctttgacacatgctgccttgaaagcaaagtcaaatatcttaatcttttcttgcatttgtttcccagaactgcrgtaaaaattagcacaaaccaaggggtttacaacataacttattttctcacagttcttggagctgtaagtctaaaatgaaggtgtcagcctgccttctggagactctgagggagaatctgttccacacccctctttcgtagcttttcatggttgcaggcagt

SEQ ID NO: 874104 - DNA, 589 bp, Homo sapiens
tttatcaacaaacacatatcgattatatgcctgatactatttcaatccttggggattcaaatgttaataaaataagagctctgctttcaagcaggaaagatggacatgtacaaaattaattagaatatgatatgacaacccctctagtagagtcctataaaaagttttgtatacactgaaatatatatggataatgtaataggatacctaggattggcttcaaaatgatatgtggtggagggaatgatttctgtacatgaaaaatatgttcataaatgttgaatctgggtaatgggaatatagggattcattctttctgtgttttaaaatgttcaacattttccataataaaaagtgaaaaaaaatmtatggcaatataatggatgaaacagtaactgttcctatgctgaggaggagtctttgcagaggaaacagtatttagactgattcctcatggaaatcaaagcaagaactcattaaaatggagagcaaaagaagggcagccccacccttatgtcacatctgccctgcaaagaaacagaacaatgcctgggctacaaattagatgtggctcagtccagttgggtga

SEQ ID NO: 874105 - DNA, 610 bp, Homo sapiens
cggggactgttgtgtggtggggggagsggggagggatagcattaggagatatacctaatgctaaatgacgagttaatgggtgcagcataccagcatggcacatgtatacatatgtaacaaacctgcacattgtgcacatgtaccctaaaacttatagtataataataataaaaaaaaagaaatggaaaatctttccatgcttatggatagcaagcatcaatatcatgtaactggccatacggctcaaagtaatttatagattcaatgctatttccattaaactaccattgaaattctcacagaattagaaaaaactattttaaaattcatatggaaccaaaaaagggctcgtatagctaatacattcttaaccaaaaggaacaaagctggaggcatcatgctacctgacttcaaatatactacgaggccacaataaccaagacagtataataccagtacaaaaacagacacatagaccaatggaacagaatacagagctcagaaataagactgcacatctacaagcatctgatcttcaataaacctgacaaaaacaaacaatgaagaaaggattccctatttaataaatggtgctaggaaaactggctag

SEQ ID NO: 874106 - DNA, 610 bp, Homo sapiens
cggggactgttgtgtggtggggggaggggggagggatagcattaggagatatacctaatgctaaatgacgagttaatgggtgcagcayaccagcatggcacatgtatacatatgtaacaaacctgcacattgtgcacatgtaccctaaaacttatagtataataataataaaaaaaaagaaatggaaaatctttccatgcttatggatagcaagcatcaatatcatgtaactggccatacggctcaaagtaatttatagattcaatgctatttccattaaactaccattgaaattctcacagaattagaaaaaactattttaaaattcatatggaaccaaaaaagggctcgtatagctaatacattcttaaccaaaaggaacaaagctggaggcatcatgctacctgacttcaaatatactacgaggccacaataaccaagacagtataataccagtacaaaaacagacacatagaccaatggaacagaatacagagctcagaaataagactgcacatctacaagcatctgatcttcaataaacctgacaaaaacaaacaatgaagaaaggattccctatttaataaatggtgctaggaaaactggctag

SEQ ID NO: 874107 - DNA, 571 bp, Homo sapiens
ggaatatttacaccaaggaaattggcaagtgctacgaatcaaggcttcctctgggtctggatgacattcagaaaatactgtgtctgggcaatgtcacacatctacagaaaaagcccatttatttctcagacctcgaaaagcaaaaccacctcagttctagggaaggccttcaacagagatggacaatcccagaaactcagccctgtgaacacattgcctgcaaacttccaaagctgcttggattcagggtagaagaaaygattagagaaggtcctacaatgcattttggtgtaagtttttaagtggcctatatcattacaaaaggagtcatgatccccctttttaataattgcagaaccccaattttccttttgtactttttgtcatggggtgatatcagattcatcacatgtaaatgacaagtaaaagagacattggcctgtacaagagtgggaacacaaataagttgtacagaaagatgaaacaatcattttgtagtttaaaaatactgagcaaatttcctgtttttaacaagcacgagagattcaaaaaccagacacctagacttagt

SEQ ID NO: 874108 - DNA, 556 bp, Homo sapiens
  misc_feature 340: n = A,T,C or G
cccctgatggctccttcatatgttttaaaggacccatcctggctgggtgtggtgactcacacctgtaattccagcactttgggaggctgaggcaggcagatcacttgaggtcaggaatttgagacgagcctggccaacatggtgaaaccccgtctctcctaaaaatacaaaaattagccatgcgtggtggtgggcacctgtaatcccagctaattgggaggctgaggtggagaattgcttgaacccaggaggcagaggttgcagtcagctgggattgcaccactgctctccagcctgggtgacagagtgagactstgtctcaaaaaaaaaaaaaaaaaanaaagacccatttttactctttatttgagggctcacattataaacagaaagctcagggccttgtgccacaggatataacctgattcctggctttttagcagggaaacattttctcatagagaggtcagcaatgcactttcactctgggctggagaattatagagcatttggtaaaatgatcaattctttgaacacgacctgacctacagcgctgagc

SEQ ID NO: 874109 - DNA, 646 bp, Homo sapiens
tgaattacttaatatagtagctggtgcatagtgaacacttaatagatattcaatacttttatattaaagggagataatgcatgtaaaactaatgtgagtagtggatcacttagttctcagtatgtaaaagacattatcagataatacttatgtcgaggtatgtttaatgccagagataagcttttggtctgctggccaacccaagtattcttgggtccatttatctttgtaaaatagagaaattttagtaagaaaatttaacaattctctaagtgtctgccaagtttcttactaagcactttgattgatctgtttcgactttcctagtgggaaattatctaagtctccttatcccctccactctctgcattttgaagaagataaatagacttggagcaacttcattccacttgtctgtgttctctaatctayggactcgaaatctcagagaagccatactgataaccttcccttcccatctttgcttctgtgccaacgttgtcccccactgtttgtcagttttagaagagaagtaacaagaaaattcttcccttctggaaactccagatgttcttggggtcagtttataggctaattaaatattttatcttgatttaagatcagaaatgttcaactccctatcttg

SEQ ID NO: 874110 - DNA, 621 bp, Homo sapiens
gtataatggattttagcctgagtatcctaggctgcatctgctggaaagcagagcctgatgcacagattataatgttgacacttcgaggggtataaatccaagcagtgattgaggaaaataggtgatgtgaggcaagaaaagatgtacagcgattgtgttgctgtgctggccaccacttccgtacaagttcagagacattcagttgcaaagacatttaagcatattccctctgcttatgggaacttttctaaaaggtttgtaagaggaaacggcactgcggagggacaggagtggaaatgtatctgtctggttccctcctgactcttgcttcccattggtcaaattttattccacagagatctaatgcttytatacatttggcaacttggtagctactcaagaagccatttcccaagccctgttttgtggcatttcatctaagaccagaagtggaggggagattcagcaggtcagactaccaaccaagagagaaggaggcagctgagggaatgtagaaagcatacaaaaaaaaaaaaaaaaaaaaaaaaccttacatacaataccacacagaaaaagcattgcgtgcaacttaacacttttttgtgagaaaaaataaataaa

SEQ ID NO: 874111 - DNA, 628 bp, Homo sapiens
ggaatgtttttctttttgtttgtgtcctctctgatttccttaagtagtggtttgtagttttccttgaagaagtccttcactttccttgttagctgtattcctaggtattttaacctttttgtagcaattgtgaatgggaggtcattcatgaattgactctctacttgtctaatgttgtataggaatgcttatgatttttgcacrttgattttgtatcctgatactttgctgaagttgcttatcagtttaataagcttttgggctgagatgatggagttttctaaatatagaatcatgtcatctgcaaacagagacagttgacttcctctcttcctgtttggataccctttatttctttctcttcccggatgccttggccagaacttccaatactatattgaaaaggagtggtgagagaggacatccttgtattgtgccagttttcaagggaatgcttccagcttttgcccattcagtatgatactgggtgtgggtttgtcataaatggctcttattatttggaggtatattccttcaatacctagtttattaagagtttttaatatgaagggatgtcgaattttactgaaggccttttctgtacctattgagataatcatgtggtttt

SEQ ID NO: 874112 - DNA, 628 bp, Homo sapiens
ggaatgtttttctttttgtttgtgtcctctctgatttccttaagtagtggtttgtagttttccttgaagaagtccttcactttccttgttagctgtattcctaggtattttaacctttttgtagcaattgtgaatgggaggtcattcatgaattgactctctacttgtctaatgttgtataggaatgcttatgatttttgcacgttgattttgtatcctgatactttgctgaagttgcttatcagtttaataagcttttgggctgagatgatggrgttttctaaatatagaatcatgtcatctgcaaacagagacagttgacttcctctcttcctgtttggataccctttatttctttctcttcccggatgccttggccagaacttccaatactatattgaaaaggagtggtgagagaggacatccttgtattgtgccagttttcaagggaatgcttccagcttttgcccattcagtatgatactgggtgtgggtttgtcataaatggctcttattatttggaggtatattccttcaatacctagtttattaagagtttttaatatgaagggatgtcgaattttactgaaggccttttctgtacctattgagataatcatgtggtttt

SEQ ID NO: 874113 - DNA, 564 bp, Homo sapiens
aacagagagacaggccaaagacattaattggaaaagttattgcttttgatcaatgtctgggaggtaagatttcctccagtttctttattatccatttttaaattttattttttagatttctgagcaaattttaattctttcctcatatccatcatttttctttcataaagccacttctctcttatagtagaaccatatgtcttctatatttgaatcaaataacattcctgcatgacagtccttccagtgcactctaaacttcaggcaagaatgaaatagttcacaagacaatgatttacaaaacagagtaggtatcaaatcattgtgatatagtagccatccttcagtcattagcatttcttgtaaacatrtaacatgtatatatcataggatgtacctgctgttaccaggtactcgatcttttttcgtgccatgcatgtagtatagcaatgaaaataaaaattacccaaataatagtataattgattttataaatagggatatagggggtattatagaagcttgatctttggcataaatattcatgggattgggtctttgaat

SEQ ID NO: 874114 - DNA, 605 bp, Homo sapiens
cctctctatccactctcaatgcctttcttgtgatagtctgctcagagtttgcccatcctcttgatgggctggtctctcagtagaagaaggtcttccagactgtgtctagttgaccatccggactcatctccagaatagatcttttccaagaaatagtttgtatccttccttgaggtgtccaggaatcagtgcaggagaactcaatggcacagggactgcccatacactctgagcctccccatctcctcacggcaagtcagttgtcacccagcatgyggcttgttacctctacccaaacccgcatctgctcataaagtgctcaggtcacctgcgattgggccaagctaagcaccctgtccacctgtcaaccacactccctctgcctcttccctccatacactgcccagtgactcagctgactctgctgcacaccagtgcatatggcctgtgatggcctgggcacatccaagtgtgaggcatcaccaggcaactagaactaggcacttgccagcccaccccaacatgtgtctttctgtctttcttgcacactgtccatctgcctcgcctgccacatccaccagtccaaggaccactgaggtgtgaac

SEQ ID NO: 874115 - DNA, 605 bp, Homo sapiens
cctctctatccactctcaatgcctttcttgtgatagtctgctcagagtttgcccatcctcttgatgggctggtctctcagtagaagaaggtcttccagactgtgtctagttgaccatccggactcatctccagaatagatcttttccaagaaatagtttgtatccttccttgaggtgtccaggaatcagtgcaggagaactcaatggcacagggactgcccatacactctgagcctccccatctcctcacggcaagtcagttgtcacccagcatgcggcttgttacctctacccaaacccgcatctgctcataaagtgctcargtcacctgcgattgggccaagctaagcaccctgtccacctgtcaaccacactccctctgcctcttccctccatacactgcccagtgactcagctgactctgctgcacaccagtgcatatggcctgtgatggcctgggcacatccaagtgtgaggcatcaccaggcaactagaactaggcacttgccagcccaccccaacatgtgtctttctgtctttcttgcacactgtccatctgcctcgcctgccacatccaccagtccaaggaccactgaggtgtgaac

SEQ ID NO: 874116 - DNA, 595 bp, Homo sapiens
aagtcctggagcaaacatatcttgatgtccccaaaatctttaactattcaattctcttagttttttctgcttttctctcccactaactttttgaatctaattttaattttaattaaaatttattattatttttttttgagacagagtcttgctgtgtcgcccaggctggagtgcagtggtgcaatctcagctcactgcaagctccacctcccgggttcacgccattctcctgcctcagcctcctgagtagctgggactacaggcgcytgccactgcacccggctaattttttgtatttttagtagagatggggtttcaccgtggtcttgaattcctgaccttgtgatccacccgcctcagcctcccaaagtgctaggattacaggtgtgagccacgcgccaggccttaaaatttaattttaattaattctaccttccccctgttctatcttctctcactcttagaaagtaaatctagagatctttcttaaattcttgcttcttgttcacataggaatttttcatattgaccttatattagggtattatttatctagcagtacagtcatgtgacacacaataatgttttggtcaac

SEQ ID NO: 874117 - DNA, 647 bp, Homo sapiens; identical to SEQ ID NO: 868707

SEQ ID NO: 874118 - DNA, 647 bp, Homo sapiens; identical to SEQ ID NO: 868708

SEQ ID NO: 874119 - DNA, 640 bp, Homo sapiens
gccacctctggctcattttcacttgccattccatttgataatctagtaacttcattttgccaacttgatgaatttggttctaagtagtttaaaaatttaaggacatactatgtcagtatttacaggtgcttcttatttattcttcrgtattctcaaatgttcaatttgaggtcaagttttgctaaaaacaactcattgcaaatagtagatgttttataaatataagataaatttcttaaaattcgtgctgagttctaaagagaaaacttaggttaccaagtaacatgattttcagaacaccaccaatttgctatttcaagtctaattttatattagaccgattcccaaagcttttccattgttacaaaattttcaaaatactgtacttttattatacaaggtttgtggcctagttttattaatattccaaaagacaaaatattcaaacattcaattgtttcatcaataatttaaactaaatttactattttgattaaagatacaatgagtatctttgcatgaaatagattactaaattctatttgaaaactaatgtacacttttattctagtttttaaggcaacatatgtttattttgaactttattttaagaaaacataccaaaacaatgccaaattgt

SEQ ID NO: 874120 - DNA, 646 bp, Homo sapiens; identical to SEQ ID NO: 868706

SEQ ID NO: 874121 - DNA, 616 bp, Homo sapiens
attattttatgaataccctttgatgttctatgtagggtgatcagaatcttcacaataaggataatctgtctttccaattcttttatttcttttatcttattgaagtggctagcattacaagaatattactgaataaaagtcatacataataacaaacatgcttatcattatatttttttcatgtgtttcatacttttttttatttttattttttttagagagggtctggctctgtcacccaggctggrgtgcagtggtgcaatcttggctcactgcaactttcacctcctgggtccaacagtggagaaataggaatacttttacactgttggtgggactataaactagttcaaccattgtggaagacagtgtggcaattcctcaaggatctagaactagagataccatttgatccagccatcccattactgggtatatacccaaaggattataaatcatgctgctataaagacacatgcacacgtatgtttattgtgttactattcacaatagtgaagacttggaaccaacccaaatgtccatcaatgatagactggattaagaaaatgcagcacatatacaccatggaatactaagcagccataaaaaatgatgt

SEQ ID NO: 874122 - DNA, 654 bp, Homo sapiens
ttgtcagatgcatagattgcaaaaactttctcccattctgtaagttgtctgctcacaatgttaatagttccctttgctgtgcaggaactctttagtttaattagatcccgtttgtcaatttttgctttggttgcaattgcttttggcgtctttgtcacaaaaactttgcctatgcctatatcctgaatggcattgcctaggttttcttctagggtttttataattttgagttttacatttaagtgtttaatccaccttgtgttagtttttgtatatggtgtaaggaagaagtccagtttcaattttctgcatatggcaagccagttctcccagcaccattcattatatggggaattctttccccattgcttgttcttgtcaggtttgtcaaagatcagatgctgatatgtgtacagtcttatttctcggttctctattctgttccactggtctatgtgtctgtctttgkaccagtactgtgctgttttggttactgtagccctgtggtatagtttgaactcaggtaccataatgcctttttgtagacttgttctttttacttaggattgccttggctattcgggctcttttttggttccatatgaattttaaaatcgtttcttctaattctgtgaagaatgtcaatggtagttt

SEQ ID NO: 874123 - DNA, 600 bp, Homo sapiens
aaaattagaacacttaggaattgtttaaattataagtgtgagtatgaaagacagggattggataatgtgtttctatagatgctgttgaagattattaatacatttaaaagattttcattgtaataaaggtttggaaaaaattcaacgggaattatcagatcctttaacattctaaggtattctgtgactcacaaaaagcaatacaatatctagctttcccccagatgtcttaaccataaaagtttttttttaaagaaaatcttactagtatctccagagattaagcttctgaaaaacataacgagaaatcatatgttaatagagttgtattaagaaataaagggaaagtggagaataaaaaaaacagcctaacctgttttgcctaaaatcyacatatattctctccttgcaaatcctgttttgtcccagtcacttctctctgtacgtgatattcattctgccataatttactttatttttgaaacataacccccatgttctcctgtgtgtatgtacatctatatatgtatatgtgcatacatgcattcatatatatgtatgtatatatacacacacacacatacatacttgcataaatac

SEQ ID NO: 874124 - DNA, 635 bp, Homo sapiens
acaaagatcaaaagagacaaagaaggccattacataatggtgaagggatcaattcaacaagaagagctaactatcctaaatatacatgcaaccaatacaggagcacccagattcataaagcaagctcttagagacctagaaasagccttagactcacacacaataatagtgggagactttaacaccccactgtcaacattagacagatcaatgagacagaagtttaacaaggatatccaggacctgaactcagctctgcacaaagcagacctaatagacatttacagaactctccacccaaaatcaacagaatatacactctaatcagcatcacatcacacttattcaaaattgaccacataattggaagtaaagcactcctcagcaaatgtaaaagaacagaaatcacaacaaactgtctctcagaccacagtgatatcaaattagaactcacgatcaagaaactcactcaaaaccacacacaactacatgaaaactgaacaacttgctcctgagtgaccaccgggtaaataacgaaattaaggcagaaataaagatgttctttgaaagcaaagagaacaagacacaacgtaccagaatctctgggacacatttaaagcagtgtgtagcgggaa

SEQ ID NO: 874125 - DNA, 670 bp, Homo sapiens
agaaactggataaattaacgggaaaaataaccagcgaacatcacaatgacaggatcaaattcacacataacaatattaacgttaaatgtaatgggttaaatgacccaattaaaagacacagactggcaaattggataaagactcaagacccatcagtgtgctgtattcaggagacccatctcacgtgcaaagatgcacataggttcaaaataaggggatggaggaagatctaccaagaaaatggaaagcaaaaaaaagaaggggttgcaatcctagtctctgataaaacagatcttaaaccaacaaagatcaaaagagacaaagaaggccattacataatggtgaagggatcaattcaacaagaagagctaactatcctaaatatacatgcaaccaatacaggagcacccagattcataaagcaagctcttagagacctagaaacagccttagactcacacasaataatagtgggagactttaacaccccactgtcaacattagacagatcaatgagacagaagtttaacaaggatatccaggacctgaactcagctctgcacaaagcagacctaatagacatttacagaactctccacccaaaatcaacagaatatacactctaatcagcatcacatcacacttattcaaaattgaccacataattgga

SEQ ID NO: 874126 - DNA, 617 bp, Homo sapiens
tctgtacgtcaccatcttcaaacaccaaaggtagagaaaaccacaaagatggggaaaaaacagagcagaaaaaccagaaactctaaaaatcagagtgtctctcctcctgcaaaggaacacagctcctcagcagcaatggaacaaagctggatggagaatgactttgaggagttgagagaagaaggcttcagaagaccaactacgccgagctaaaggaggaagttcaaaccaatgacaaagaagttaaaaactttgaaaaaaagttagacgaatggctaactagaataaccaatgcagagaagtccttaaaggacctcatggagctgaaaaccacagcacgagaactacatgacaaatgcacaagcctcagtagccratgcgataaactgaaagaaagggtattagcgatggaagatgaaatgaatgaaatgaagtcagaagagaagtttagagaaaaaagaaaaaaaagaaaccaacaaagcctccaagagataagtgactatgtgaaaagaccaaatctacgtctgactagtgtacctgaaagtgacgggcagaatggaaccaagttggaaaacagtctgcaggatattatccaagagaactttcccaatctagca

SEQ ID NO: 874127 - DNA, 592 bp, Homo sapiens
agatctcatgagaaatcactcactattatgagaacagcatgagggaaactgccctcatgatccaatcacctcacaccaagttcttccctcaacacctggggattacaattcaatatgagatttgggtggagacatagagcctaaccatatcattccaccctttggccctcccaaatcccatgtccctttttcttttttcttcttcttttttttttttttttttgagatagagtctcactctgtcacccaggctggagtgcagtggtacaatcttggctcactgcaacctcttcctcctgggttcaagtgattctcctgcctcagcctcctgagtagctgagattacagggacacaccactatgcctggctwattttttgtatttttagtagagacgagatttcactgtgttggccaggctgctggtcttgaactcctgacctcgtgatccagctacctcaacctcccaaagtgctgggattacaggcatgagccaccacacccggccccatgttccttttacatttcaagcctcctcaacagtcccccaaagtcttaattcattccaacattaacccaaaagtccaagtcca

SEQ ID NO: 874128 - DNA, 608 bp, Homo sapiens
actgcccagtaggggcagactgacacttcacacgactgggtactcctctgacacaaaacttccagaggaatgatcaggcagcagcatttgcggttcaccaatatctgctgtactgcagccaccgctgctgatactgaggcaaatagggtctggagtggacttccagcaaactccaacagacctgcagctgaaggtcctgaccgttagaaggaaatctaagaaacagaaaggacatccacaccaacaacccatctgtacgtcaccatcttcaaagaccaaaggtagagaaaaccacaaagatggggaaaaaacagagcagaaaaaccagaaactctaaaaatcagagtgcctctcctcctgcaaaggaacgcagctcctcascagcaatggaacaaagctggatggagaatgactttgaggagttgagagaagaaggtttcagaagaccaaactactctgagctaaaggaggaagttcaaaccaatgacaaagaagttaaaaaccttgaaaaaaaattagacgaatggctaactagaataaccgatgcagagaagtccttaaagaacctcatggagctgaaaaccacagcatgagaactacatgacaaa

SEQ ID NO: 874129 - DNA, 587 bp, Homo sapiens
ccaaccaacacaaagcaagtgcatttaacaaaaatacaagcaaggaagttcacagagtccacttcactccctgctacctccaccagagcaggtactggtattcatggctgagaaacctgaaggtggatcacatcacaggactctttgcaggcactcctcagtaccagcccagagcccagtagctctgctgggtggctagacccagaagagaaatgacactcaccgcagtttggctgtaaggaagctccatctctagaggaaaggggagaacactacatcaagagagcaccccatgggacagaagaatctgagcagcagcgcttcamtcccagatcttccctctgacatggtctccccaaaagagaaggaaccagaagaacaattctggtaatatgagaaaaacagggtttttaacaccctcaaaagatcacactagctcaccagcaatgcatcaaaactaagacaaaatctctgaattgccagaaaaagaattcatgaggtccactattaagccaaacaaggagacaaaagagaaaggcgaaatccaacttaaagaaattttttaaaaagatacagaatatgaatgg

SEQ ID NO: 874130 - DNA, 623 bp, Homo sapiens
aaagaatctcattacaaaaatatcaggtgtgggcattttcacaacataaatacaaaagggttctttccatatataatgtttggttcaaacgaagtgttctattggaagcctcttccttatacatacttcctttgctatttmtttgctaataaaatcccatgtgtaccttctgggacaattccaacccgtcctctctgtgaaactttttccttcttatttttttagagttggggtgtcactccattgcccaggctagagtacagtggtgtgatcgtagctcactgcagccttgacctcctgggctcaagagatcctcctgcctcaacttcctgaggagctggaactacagacacgagccactacacctggcctgtgaaactttttcttaccaactctataaacacttccagtccccacccaagcctgaagggataactgtttcctttggcagccatgtcatatagataaaatcgcatatcatctggcctcagagagcttgggttcaagtccctccctttttccttttcttaagagccatttaactgcacaatttaattttgggggtcttagtggcttcacagtgaaaaggatgtaatagatcatagatgtgaaaatgtatctgt

SEQ ID NO: 874131 - DNA, 674 bp, Homo sapiens
aacattccgcttcttgttacttatgcaaatttctgtaaccagcttgaatttctcctcagaaaatgagtttttcttttctatcacattgtcaggctacaaatttttcaatcttttatgctctgcttcccttataaaactgaatgcctttaatagcacccaagtcacatcttgaatgctttgctgcttagaaatttcttctgccagatattctaaatcatctctcacaagttcagagttccacaaatctccagggcaggggcaaaaggctgccagtctctttgctaagacataacaagagtcacctttgctccagttcccatctccacctaagactacctcagcctggaccttattgttcatatcactgtcagcattttgggcaaagccattcaacaagtctctaggaagttccaaacttwcccacacttttctgtcttcttctgagccctccaaactgttccaacctctgtctcttacccagttccaaagttgcttccacatttttgggtgttttttcaacaaggccccactctactggtaccaatttaccacattattttgttttcatgctgctgataaagatatacttgagactgagcaatttacaaaataaagagctttaattggacctacagtttcgtatggctggggaagcctcacaatcatggtggaaa

SEQ ID NO: 874132 - DNA, 674 bp, Homo sapiens
aacattccgcttcttgttacttatgcaaatttctgtaaccagcttgaatttctcctcagaaaatgagtttttcttttctatcacattgtcaggctacaaatttttcaatcttttatgctctgcttcccttataaaactgaatgcctttaatagcacccaagtcacatcttgaatgctttgctgcttagaaatttcttctgccagatattctaaatcatctctcacaagttcagagttccacaaatctccagggcaggggcaaaaggctgccagtctctttgctaagacataacaagagtcacctttgctccagttcccatctccacctaagactacctcagcctggaccttattgttcatatcactgtcagcattttgggcaaagccattcaacaagtctctaggaagttccaaactttcccacacttttctgtcttcttctgagccctccaaactgttccaacctytgtctcttacccagttccaaagttgcttccacatttttgggtgttttttcaacaaggccccactctactggtaccaatttaccacattattttgttttcatgctgctgataaagatatacttgagactgagcaatttacaaaataaagagctttaattggacctacagtttcgtatggctggggaagcctcacaatcatggtggaaa

SEQ ID NO: 874133 - DNA, 674 bp, Homo sapiens
aacattccgcttcttgttacttatgcaaatttctgtaaccagcttgaatttctcctcagaaaatgagtttttcttttctatcacattgtcaggctacaaatttttcaatcttttatgctctgcttcccttataaaactgaatgcctttaatagcacccaagtcacatcttgaatgctttgctgcttagaaatttcttctgccagatattctaaatcatctctcacaagttcagagttccacaaatctccagggcaggggcaaaaggctgccagtctctttgctaagacataacaagagtcacctttgctccagttcccatctccacctaagactacctcagcctggaccttattgttcatatcactgtcagcattttgggcaaagccattcaacaagtctctaggaagttccaaactttcccacacttttctgtcttcttctgagccctccaaactgttccaacctctgtctsttacccagttccaaagttgcttccacatttttgggtgttttttcaacaaggccccactctactggtaccaatttaccacattattttgttttcatgctgctgataaagatatacttgagactgagcaatttacaaaataaagagctttaattggacctacagtttcgtatggctggggaagcctcacaatcatggtggaaa

SEQ ID NO: 874134 - DNA, 674 bp, Homo sapiens
aacattccgcttcttgttacttatgcaaatttctgtaaccagcttgaatttctcctcagaaaatgagtttttcttttctatcacattgtcaggctacaaatttttcaatcttttatgctctgcttcccttataaaactgaatgcctttaatagcacccaagtcacatcttgaatgctttgctgcttagaaatttcttctgccagatattctaaatcatctctcacaagttcagagttccacaaatctccagggcaggggcaaaaggctgccagtctctttgctaagacataacaagagtcacctttgctccagttcccatctccacctaagactacctcagcctggaccttattgttcatatcactgtcagcattttgggcaaagccattcaacaagtctctaggaagttccaaactttcccacacttttctgtcttcttctgagccctccaaactgttccaacctctgtctcttacccagttccaaagttgcttccacatttttgggtgttttttcaacaaggccycactctactggtaccaatttaccacattattttgttttcatgctgctgataaagatatacttgagactgagcaatttacaaaataaagagctttaattggacctacagtttcgtatggctggggaagcctcacaatcatggtggaaa

SEQ ID NO: 874135 - DNA, 639 bp, Homo sapiens
acaatattggaggatgaggtggaggattgcttgagctcaggagtttgaggccagcctgagcaacatagtgagaacttgtctctactaaaaatataataaaataaaataaactagtcatggtgttacatacttgtggtcccagctcctcaggaagctgaagaaggaggattgcttgagcccagaagtttgaggttgcagtgagctgtgatagcaccactgcactccagcctgggtgacagagcaaaatcctgtttcaaataaaaaaaaaaaaaagagagagagaggaatttcaattattttttactgctaagatgaaaatacaaaaatgccatatggtagagtaactggggtgkggttgttctgcttagggtagctaaggtctcaggttaacctcctgatactattccatttgagttagcacccaaatgaagagaaggcggccatgcagaataaacagattttataccatttggaatatttcaaatggaaggaacagcacgtttataaagacttggatggaacaacaaaagggagagtagagatgaagtggacatgaagtcaaggttcaagttaagtgaaaccatttaagttgttgtagtaagtaaagagtttaatttttaatgtaattacactgggggt

SEQ ID NO: 874136 - DNA, 580 bp, Homo sapiens
acctcttatttgcatgattcagtggggtcgaccaaatcagccaaaagcaaaacctttgtcttggaaagaagcttgatgtactgaaaaagaaaaccaatactagaagaagatacaatttttgacagtggacatgggactgaagaagcaaggaggcagatcacacaggtgtggagggaagctatcagaggcaacaagattttactgaaatggtgtaatctttccttgcaaccctatcactatctcatgactccattttgccaccaagacataactgaacattcctttaggaaaagacaaactcagatttctggagagctgatgggaggtgaggtggtgggtattgtggggtgcttgtttggggtgaagatggggtatgttctatcaccctttgaattstattccattccacccgtgcatgatatagctgtctatattatttaaagtgtaaataacaacaagcctagaagtcttcattttctaaccattaatggggccataaaattttatctaaaaacactgttcattttcacacacttctgctttattggttctgaaatcttatgcccaccggcccagcaga

SEQ ID NO: 874137 - DNA, 635 bp, Homo sapiens
ggagtcaaaggagatcattttggagctttaagatttgactgccctgctggattttggacttgcatggggcctgtagccccttggttttggccaatttgtctcattggaatgggagtatttacccaatgcctgtacccccattgtatataggaagtaactaacttgcttttttgattttttttttttttttgagatggagtcttgctctgtcacccaggctggagtgcagtggtgtgatcttggctcactgcaagctctgcttcctgggttcacaccattcttctgccttggcctcccgaatagctgggactacaggtgcccaccaccacgcctggctagatcttttgtayttttagtagagacagagtttcgccatgttagccaggatggtctcgatctcctgaccttgtgatttgcccacctcggcctcccaaagtgctaggattagaggcgtgagccaccgcatccggccactaacttgcttttgattttacaggctcgtaggcagaagagaattgccttgtctcagatgagactttggactgtggactttagagttaatgctgaaataagactttgggggatttttgggaaggcatgattggttttgaaaagtgaggacatgagatttggga

SEQ ID NO: 874138 - DNA, 636 bp, Homo sapiens
ctgttttagttactgtagtcttgtagtatagtttgaagtcaggtagtgtgatgcttccagctttgttctttttgcttaggattatcttggctatgtgagctcttttttgattccatatgaattttaaaataggttcttctaattctgtgaagaatgtcaatggtagtttaatgggaatagcattgaacctataaattactttgggtggtatggccattttcatgatattgattcttcctatccatgagcatagaatgtttttccatttgtatgtgtccactctgatttcttggaacagtggtttgtagttctccttgaagaggtccttcacttcccttgttagctgtattcctacgtattttattctctttgtaacaattgtggatgggagttcattcatgatttggctctctgttgttagtgtacagaaatgctagcaatttttgcacattgattttgtatcctgagaatttcctgaagttkcttatcagcttaagaagcttttggcctgagacgatggggttttctagatacagggtcatgtcatctgcaaacaaagattatttaacttcctctcttcctatttgaatatgctttatttctttctcttgcctgattgacctggtcagaactgct

SEQ ID NO: 874139 - DNA, 656 bp, Homo sapiens
atgagacagttaaggcaagatccccaatctctataaagtgtttgttcatctgaaaggcaatgatcattttggctgttcttctttatcatggtattgctgagagggccaaatgaacaaaaggcaatgaaaatgatacagccagagctgtatgatccagcaatcccactgctgggtatataccccgccaaaaaggaaatcagtatattgaagagtgtattagtctgttctcatgctgctaataaagacatacctgagattgggtaacttagaaaggaaagaggtttaattgactcacaattccacatggctggggaggcctcataatcatgacggaaggcaaatgaggagcaaagtcatgttttacatggtggcaggcaagagagcttgtgtaggagaacttcccttcataaaaccatcagatcttgtgaaacttattcactatcacaagaacagcatgggaaagacctgccccatgatttaattaccctccaccrggtcccatccatgacacataggaattgtgggagctacaattcaagaagagatttgggtagggacacagtcaaagcatatcattctgtccctggccccttccaaatctcatgtcctcacatttcaaacccaaacatgccttcccaatagttccccaaagtctt

SEQ ID NO: 874140 - DNA, 612 bp, Homo sapiens
gtgttgaggaaactcaaagaaattcaagataacacagagaaggaatttcaaattatatcagataaatttaacaaaaagaaataaagaaaatcaatcagaaattcaggagatgaaaactgcaattggtatattaaagaatgcatcaggctggcaagatggccgaataagaacagctccagtctgcagctcccagggagaccaacatagaaggagggtgattcctggatttccagctgacgtayctggttcatctccctgggactggttagacagtgggtgcagcccacagagggtgagcacaagcagggtggggcatcacctcacctgggaacagcaaggggccaaggaactccctgccttagccaagggaagccatgaggaactatgccatgagggactgtgctatccagcccagatactatgcttttcccaaggattttgcaacctgctgaccaggagatgccctcctgtgcctacaccaccaaggtcctgggtttcaagcacaaaactgggcagctgtttgggcaggcatcaagctagctgcaggagtttttgtttgttggtttgtaccccagtacaattgttctggagacagaaccattcatccctctg

SEQ ID NO: 874141 - DNA, 675 bp, Homo sapiens
tccctgggactggttagacagtgggtgcagcccacagagggtgagcacaagcagggtggggcatcacctcacctgggaacagcaaggggccaaggaactccctgccttagccaagggaagccatgaggaactatgccatgagggactgtgctatccagcccagatactatgcttttcccaaggattttgcaacctgctgaccaggagatgccctcctgtgcctayaccaccaaggtcctgggtttcaagcacaaaactgggcagctgtttgggcaggcatcaagctagctgcaggagtttttgtttgttggtttgtaccccagtacaattgttctggagacagaaccattcatccctctgtaaagggggctgaagccagggagccaagtggtctcactcagcaggtcccactcccacagagcccagaaagataagaatcactggcttgaaattcccgctgccatcacagcagtctgaagtccacctggaatgactgagttggtagggggaggtgtatccaccattagtgaggcttgagtagacagttttcccctgatggtgctaaggaggcctggaagttcagactgggctgaactcaacacagcgtggcaaagcagctgtggccaaactgcctctctagattcctcttcactgggcagggcatctctgaaagaa

SEQ ID NO: 874142 - DNA, 675 bp, Homo sapiens
tccctgggactggttagacagtgggtgcagcccacagagggtgagcacaagcagggtggggcatcacctcacctgggaacagcaaggggccaaggaactccctgccttagccaagggaagccatgaggaactatgccatgagggactgtgctatccagcccagatactatgcttttcccaaggattttgcaacctgctgaccaggagatgccctcctgtgcctacaccaccaaggtcctgggtttcaagcacaaaactgggcagctgtttgggcaggcatcaagctagctgcaggagtttttgtttgttggtttgtaccccagtacaattgttctggagacagaaccattcatccctctgtaaagggggctgaagccagggagccaagtggtctcactcagcaggtcccactcccacagagcccagaaagataagaatcactggcttgaaattcccgytgccatcacagcagtctgaagtccacctggaatgactgagttggtagggggaggtgtatccaccattagtgaggcttgagtagacagttttcccctgatggtgctaaggaggcctggaagttcagactgggctgaactcaacacagcgtggcaaagcagctgtggccaaactgcctctctagattcctcttcactgggcagggcatctctgaaagaa

SEQ ID NO: 874143 - DNA, 523 bp, Homo sapiens
gatctctaggcaggggcaaaatgctgccagtctctttgcataacaagagtgacctttactccagtttccaacaagtgccttatctccatctgagaccacctcagcctggactttattgtccatattactaacagacttttggccaaagccattcaaaaagtctctaggaagttccaaacgttcccacatcttcctgtcctttgagccctccaagttttaagaagtttcaaactttctcacattttcctgttttcttctgarccctccaaactgttgcaacctctacctgttacccagttccaaagtcacctccacatttttgggtatttttgcagcagtgccctactctctgtggtaccaatttactgtattcattctcatgttgctggtgaagacatacctgagactgggtgatttgtaaagaaaagaggtttaattgactcagcatggctggggaggcctcaggaagcttataatcattgtggaaggggaagcaaacacgtccttcttttcatggcagcag

SEQ ID NO: 874144 - DNA, 586 bp, Homo sapiens
tgctcagttgctggtgaggaggtgcgatcctttggaggagaagaggtgctctgatttttagaattttcagcttttccgctctggtttctccccatctttgtggtttttatctacctttcgtatttgatgatggtgacctacagatgaggttttggtgtgggtgtcctttttgttgatgttgatgcaattcctttctgtttgttagttttccttctaacagttaggaccctcagctgcaggtctgttggagtttgctgaaggtccactccagacccagtttgcctgggtatctggctgcagaacagcaaatattgcacaacagcaaaggttgctgcctgatccttcctctggaagcttcatctcagaggggcacctggctgtatgagktgtcagttggcccctactgggaggtgtctcccagttaggctactcatgggtcagggacccacacacgaggcagtctgtccgttctcagatctcaaactccgtgctgggagaaccactcctctcttcatagctcagatggaaatgcagaaatcacccatcttctgcgtcactcatgttgggaactgtagactggagctgt

SEQ ID NO: 874145 - DNA, 620 bp, Homo sapiens
tatgcagatagaaataagttgctaaattgttggttgacatctcatattgagccattttttttaactaggcagcattttttattaagcccgccactctgattaccattattttagtaactatacctagcgcaaccagcatctttctctttcagtttttctcaccacagacttaagaatatgtccccctacaatctttatatttctttctttttcctattctcagagatgaaaaggtgagtaaatacctaaacttcatttaacaacccaattttcaccacagtgccctactttggacattatkgagcacttcctcaatattattcactcttcctttgttctgtgtgtatatttctctcaacccagaattccacagggagacaacgtaaatggaaggcaggatctggctgtatctttggtcttggaagtaataatatcaaaatcccatctcttgaatatctagtttacagtgacagcaatactagtaacagtaatggatgacatgcactgagctcctcatgagcccttctaaactttgtgtatttgctagtgcacatgaaccacagaacaatgaagagaattaagttatgaagcagaagttaaccactttgcctagtgacagc

SEQ ID NO: 874146 - DNA, 555 bp, Homo sapiens
tcaaatgagaaaattatttgacagttgacatctccccaaatctaagaggatacctgaatcttgaactttcacaaagtttttattatatgattgtcagtccaaaattgttaattaccaaggacctatcttttattaaaccagatcaattataaagtcaggttgatagatggtaacaaattgtctttaagatctctytttttttttttttttttttttttggaaatggcatcttgctctgtcacccaggctggagtgaagtggtgcgatccttgctcattgcagcctttgcctcccaggttccagcgattttcctgcctcagcctcctgggtagttgggattacaggtgtgcaccaccacgctcagctaatttttgtatttttagtagtgatggggtttcaccattttggccaagcttgtcttgaactcctgacctcaggtgatccacctgcctcggcctcccaaaatgctgggattacaggcgtgagccactgcacctggccaagatctcttaagcgtatctttattttatgactttaacatttatgtatgctaac

SEQ ID NO: 874147 - DNA, 555 bp, Homo sapiens
tcaaatgagaaaattatttgacagttgacatctccccaaatctaagaggatacctgaatcttgaactttcacaaagtttttattatatgattgtcagtccaaaattgttaattaccaaggacctatcttttattaaaccagatcaattataaagtcaggttgatagatggtaacaaattgtctttaagatctctctttttttttttttttttttttttggaaatggcatcttgctctgtcacccaggctggagtgaagtggtgcgatccttgctcattgcagcctttgcctcccaggttccagcgattytcctgcctcagcctcctgggtagttgggattacaggtgtgcaccaccacgctcagctaatttttgtatttttagtagtgatggggtttcaccattttggccaagcttgtcttgaactcctgacctcaggtgatccacctgcctcggcctcccaaaatgctgggattacaggcgtgagccactgcacctggccaagatctcttaagcgtatctttattttatgactttaacatttatgtatgctaac

SEQ ID NO: 874148 - DNA, 567 bp, Homo sapiens
caacaagtttgctcaataacagagcatccaaatccactggagtgaatttggaccccaataaataataacctctttaagtaggtggaatagggtcatcttttgggtactacaagaagcaggatcttaacaaattgtgagaggctacatgtttttaaaaaggaaaaacaggcctcgcatggtggctcacgcctgtaatcccagcmctttgggaggccaaggcgggcagatcacaaggtcaagagatcgagaccatcctggctaacacagtgaaaccccgtctctactaaaaatacaaaaaattagccggttgtggtggcatgcgcttgtagtcccagctactcgggaggctgaggcaggagaatcacttgaacctgggaggcacagactgcagtgagccgagatcatgtcattgcactccagcctgggcaaaagagcgagactccatctcaaaaaaaaaaaaaaaaaaaaaaaaagaaagaaggaaaaaagaaataaggaagaaaaaagtctaaataagctaaatagttttggatgcataatatatgagcatgattacagaattcatag

SEQ ID NO: 874149 - DNA, 567 bp, Homo sapiens
caacaagtttgctcaataacagagcatccaaatccactggagtgaatttggaccccaataaataataacctctttaagtaggtggaatagggtcatcttttgggtactacaagaagcaggatcttaacaaattgtgagaggctacatgtttttaaaaaggaaaaacaggcctcgcatggtggctcacgcctgtaatcccagcactttgggaggccaaggcgggcagatcacaaggtcaagagatcgagaccatcctggctaacmcagtgaaaccccgtctctactaaaaatacaaaaaattagccggttgtggtggcatgcgcttgtagtcccagctactcgggaggctgaggcaggagaatcacttgaacctgggaggcacagactgcagtgagccgagatcatgtcattgcactccagcctgggcaaaagagcgagactccatctcaaaaaaaaaaaaaaaaaaaaaaaaagaaagaaggaaaaaagaaataaggaagaaaaaagtctaaataagctaaatagttttggatgcataatatatgagcatgattacagaattcatag

SEQ ID NO: 874150 - DNA, 626 bp, Homo sapiens
caatttgattggatgcattttggggccacgagatcaaacagaagacctggataatctttttgttatattaatatttcacccagtgttttaccactgcctatgggcaaagaattgaatttgacctgccttggaattagattttctttttaaattttccattaggaaaatattgctgactcttgtcctagattttcagtctattaaaaaatattctcatccatggctaaaacacatagaaatttttatattttaagttcctccttagaacttagtgttttggtctccctttatatcacaattggaaaaacattaaaaatatgaaattaaagcaaaatacctggaagcaactgtatatagaatcacaaatcatctatccaagagctaagacattgctgcttattactatttatatatacaaaattaattaaagatgtgatagttctcttccaagctaaatcctgagtacccttggaacagagactgtstcattctctttggtcctgacctcaagtgatccgcccacctcagcctcccaaagtgctggggttacaggcgtgagccgcggcacccaacagtcgcattccctttggctagcccattacctgcatagcaactggaactcagga

SEQ ID NO: 874151 - DNA, 615 bp, Homo sapiens
agtttatttgtctgtaaaactggaataataatagattgctatgaaaattaaagtgatggtttccagcttcatccatgtccctacaaaggacatgaactcatcattttttatggctgcatagtagtccatggtgtatatgtgccacattttcttaatccagtctatcattgttggacatttgggttggttccaagtctttgctattgtgaatagtgccgcgataaacatacgtgtgcatgtgtctttatagcagcatgatttataatcctttgggtatatacccagtaatgagatggctgggtcaaatggtatttctagttctagatccctgaggaattgccacactgtcttccacaatggttgaactagtttayagtcccaccaatcattctcagcaaactatcgcaaggacaaaaaaccaaacaccacatgttctcactcataggtgggaattgaacaatgagaacacttggacacaggaaggggaacatcacacaccagggcctgttgtggggtgggggaagcggggagggatagcattaggagatatacctaatgtaaatgacgagttaatgggcgcagcacaccaacatggcacatgtatacatatgtaac

SEQ ID NO: 874152 - DNA, 599 bp, Homo sapiens
catccctgggacctccctttttttttttttttttaataacatttactttaaaattacaactgtaaattcttcctcccttcctttgagatataaatatttttccagcctcttgacattttttaccacccactgatgtctttctcaaggacctggaggccatccttttgaaatgtagtaaaggaagatagtgtcactattttccagtctctgtgagyggtaggagcctaacttcaataggagacaattagcaaacacagatgacctaatcacattggcaatcattctgctaagaagctagctcaccccagtgcttaaaagctcttctaccttttatttcagtagaagtcttcctcccctactacagtagcctgaataaactcatcttactatttttaacaagtgtccagtgcatttttacttagatgggacaaagcctaggccttggactttaccaagtcccctgggtgattctaatactgacccaagtttgagaacccctttagcttttgtagtatttttcaaaacaccacagtaataagtcttgaaatttatttgtggttataagacaaatttgtaatgccggagaaatactcccttac

SEQ ID NO: 874153 - DNA, 599 bp, Homo sapiens
catccctgggacctccctttttttttttttttttaataacatttactttaaaattacaactgtaaattcttcctcccttcctttgagatataaatatttttccagcctcttgacattttttaccacccactgatgtctttctcaaggacctggaggccatccttttgaaatgtagtaaaggaagatagtgtcactattttccagtctctgtgagtggtaggagcctaacttcaataggagacaattagcaaacacagatgacctaatcacattggcaatcattctgctaagaagctagctcaccccagtgcttaaargctcttctaccttttatttcagtagaagtcttcctcccctactacagtagcctgaataaactcatcttactatttttaacaagtgtccagtgcatttttacttagatgggacaaagcctaggccttggactttaccaagtcccctgggtgattctaatactgacccaagtttgagaacccctttagcttttgtagtatttttcaaaacaccacagtaataagtcttgaaatttatttgtggttataagacaaatttgtaatgccggagaaatactcccttac

SEQ ID NO: 874154 - DNA, 599 bp, Homo sapiens
catccctgggacctccctttttttttttttttttaataacatttactttaaaattacaactgtaaattcttcctcccttcctttgagatataaatatttttccagcctcttgacattttttaccacccactgatgtctttctcaaggacctggaggccatccttttgaaatgtagtaaaggaagatagtgtcactattttccagtctctgtgagtggtaggagcctaacttcaataggagacaattagcaaacacagatgacctaatcacattggcaatcattctgctaagaagctagctcaccccagtgcttaaaagctcttctaccttttatttcagtagaagtcttcctcccctactacagtagcctgaataaactcatcttactatttttaacaagtgtccagtgcatttttacttagatgggacaaagcctasgccttggactttaccaagtcccctgggtgattctaatactgacccaagtttgagaacccctttagcttttgtagtatttttcaaaacaccacagtaataagtcttgaaatttatttgtggttataagacaaatttgtaatgccggagaaatactcccttac

SEQ ID NO: 874155 - DNA, 615 bp, Homo sapiens
gatctttcacacattgatggtagggatgcaaaatggtacagccactttggaaacagtttggcaacttcttataaagttaaacctagtcttacatggtccagctgaccaaacacgtgaaaacttaacgtcaacacaaataattgcacaaaaatgcttatatcagcattattcataattaccagaacccaagatgtcyttaatacgtgaatgaataaattgtggtgcatgcatacaacggaataccattcagcaataaatagcaatcaactataaatccatacaataacatagatgaatcttaaatgtatattggtaagtgaaatgagccaatctgaaaatattacatgttgtaaactttatgtgacactctaggaaaggcacaactacagagacaataacagattcagtagctttcaggggattgtggggagtggttgaatagatgaagtacagggaattttttatgatagtgaaactattctgtatgatactgtaatgatggatatgagacggattgcatttttcaaagcccatggaacattataatacaaagagtgaacattaatgtatacaaataaaaatcaatttaaaaatctgggtatcggagcatggaat

SEQ ID NO: 874156 - DNA, 691 bp, Homo sapiens
caagatatttattactattatttattataatacctcccacttccccttcactgttccttcccatttttcaggttttttttttggtatcttttctactttattgggacacaggtgtcccataaaattagggtcccaattaggtattagggtcccaatttagtgactctaattcccatatttgttttagtgttttcttggttttgttatttgtaagttgaatttgttttgctcgtctgcttctatcattttatctgtaatttaaaaaactcttcctttattttgaagtaatgtggtttcttattcctttcttctatatcccacaagccctttctacttcaaagtgtcatccactgataaacgccagctgggagcttgttagaaatgtagactctcaggccctatcccagacctactgaatttgaatctgtgttttaacaaaacccccagctgagtcacatacattttaggtacgagaaacattgttttacagtgttttttgaagactctaacccttgggatccacgatggttttatttttgacttctactyttttttgggggagagtggggttgtaccagcttacctttcctatcctcttgttgtctgaccatcttctccctgattcttacatttctttctgtagcattccttccttcataaaggctatttatagttcatggtgaaagtcctg

SEQ ID NO: 874157 - DNA, 604 bp, Homo sapiens
ccagctacgcaggaggctaaggccaggggatcacttgagtccaggagttagagactgcaaagagctatgatcatgccactgcactatagcctgggcaacaaagcaagaccgtatctctccaaaataaaaaataaaaacctgcaagttaaaactacagaatttttccaaagttattaaaaccatctcaaattattgtaaactttatagtaaaaagtccttgtaaatcagtatatttatcacttggtaaatttagtgaactggtcatttgatgaaatttgcaaatctataaatgttaaaatgttgtcaatagggaaaatgacttatataatagaataatatttaagtgtaacctaagaaaaatttatagaaaactcaaaaaatgtagttatgttcaaaaaaactatgcatttattcaacaatatcactgtatatctcttatgagccaagccctattytaggcacttaggcaacatcagtgaacaaaataaagatttttgcctccatagaataataagcatatcagtgctattgcatgtcaaaagacaaagagtgcaacaggaaaacagaaatgtatagcaggatgagggaatcagaaatgcaggag

SEQ ID NO: 874158 - DNA, 633 bp, Homo sapiens
tacacacttgcatgttaactttttctttgctctaaatgagtcagttgagatgggaacatagtatgtcagagtattcatgggttgattctactctaggaaagatgctggtacactacattggtaatatgagcaatgcaaatttctacaaaaattttatttatttacttatttatttatttttttatcataatttaagttctgggataaatctgcagaatgtgcagttttttttacacaggtatacatgtgctatggtggtttgctgcacccatcaaccagtcagctacattagatatttatcctaatgctatccctcccctatccccccaccccgcagcaggccccrttgtgtgatatttccctccctgagtccatttgttctccttgttcaacttccgcttatgagtgaaaacctgtggtgtttggttttctgttcttgaaatcatttgctgagaatgatgatttccagctccatccatgtccctgcaaaggaaatgaactcatcttttatatggatgaatagtatcccatggtgtatatgtgccacattttctttatccagtatatcactgatgggcatttgaattggttccaagtctttgctattgtgaatagtgctgcaataaacatacg

SEQ ID NO: 874159 - DNA, 633 bp, Homo sapiens
tacacacttgcatgttaactttttctttgctctaaatgagtcagttgagatgggaacatagtatgtcagagtattcatgggttgattctactctaggaaagatgctggtacactacattggtaatatgagcaatgcaaatttctacaaaaattttatttatttacttatttatttatttttttatcataatttaagttctgggataaatctgcagaatgtgcagttttttttacacaggtatacatgtgctatggtggtttgctgcacccatcaaccagtcagctacattagatatttatcctaatgctatccctcccctatccccccaccccgcagcaggccccgttgtgtgatatttccctccctgagtccatttgttctccttgttcaacttccgcttatgagtgaaaacctgtggtgtttggttttctgttcttgaaatcatttgctgagaatgatgrtttccagctccatccatgtccctgcaaaggaaatgaactcatcttttatatggatgaatagtatcccatggtgtatatgtgccacattttctttatccagtatatcactgatgggcatttgaattggttccaagtctttgctattgtgaatagtgctgcaataaacatacg

SEQ ID NO: 874160 - DNA, 654 bp, Homo sapiens
aggctaggctagctccagtcacctccaactttaatgatttcaagctatattccactacacagatagacattttcagctcaaagacattttggcttagataactataacaatttctaggcctttcaaaacttctctgaactttcccagaaaaatatacttccagttgtsctagtaatgtgaaagcaacctctgagaaatgttaactagcttgtttgtctgctaaatcccttaattaaaagtggattagaaatgactgtcctagaaaagactgcaatgttccatattttgtgcattggtaatcagtccactgtaaaacttcagaggcaattttaaatgctgtatattttacctattaacgtttacaaatggttactaaatgaataaataaatgaataaaaaataaaaaggttttgtatgccacaagtgtattctgtaaaggctagccagtctcctgaaaattcatactagtaatagaaagtattaaaaataataaacttttatagaattcttttttttattatacttctatgacttttactggaatgctaaccacatgtaacttattagaatctttgggtcttagtttattgatttttttcctcttgtattaggaagccaccctaatacacaggcaaggggtacaactcctatttc

SEQ ID NO: 874161 - DNA, 689 bp, Homo sapiens
tacgaaatcaatgtgcaaaaatcacaagcattcatatacaccaataacagacaaacagagagccaaatcatgagtgaactcccattcacaattgctacaaagagaataaaatacctaggaatacaaaccactggtcaagggaataagagaggacacaaacaaatggaaaaayattccatgctcatggataggaagaatcaatatcatgaaagtggccatactacctaaagtaatttatagattcaatactatccccatcaagctaccattgagtttcttcacagaattagaaaaatctactttaaatttcacacggaaccaaaaaagactccgtatagcaaagacaatcctaagcaaaaagaagaaagctggaggcatcatgctatctgacttcaaactattctacaaggctacagtaaccaaaatgcatggtactggtaccaaaacagatatatagaccaatggaacagaacagaggcctcagacgtaatgtcacacatctgcaaccatctgatctttgacaaacttgacaaaatcaagcaatgaggaaaggatttcgtgtttaataaatagtgttgggaaaactggctagccatatgcaaaacactgaaactggaccccttccttacactttatacaaaaattaactcaagatagattaaagacttaaacataaaatctcggatttt

SEQ ID NO: 874162 - DNA, 689 bp, Homo sapiens
tacgaaatcaatgtgcaaaaatcacaagcattcatatacaccaataacagacaaacagagagccaaatcatgagtgaactcccattcacaattgctacaaagagaataaaatacctaggaatacaaaccactggtcaagggaataagagaggacacaaacaaatggaaaaatattccatgctcatggatargaagaatcaatatcatgaaagtggccatactacctaaagtaatttatagattcaatactatccccatcaagctaccattgagtttcttcacagaattagaaaaatctactttaaatttcacacggaaccaaaaaagactccgtatagcaaagacaatcctaagcaaaaagaagaaagctggaggcatcatgctatctgacttcaaactattctacaaggctacagtaaccaaaatgcatggtactggtaccaaaacagatatatagaccaatggaacagaacagaggcctcagacgtaatgtcacacatctgcaaccatctgatctttgacaaacttgacaaaatcaagcaatgaggaaaggatttcgtgtttaataaatagtgttgggaaaactggctagccatatgcaaaacactgaaactggaccccttccttacactttatacaaaaattaactcaagatagattaaagacttaaacataaaatctcggatttt

SEQ ID NO: 874163 - DNA, 689 bp, Homo sapiens
tacgaaatcaatgtgcaaaaatcacaagcattcatatacaccaataacagacaaacagagagccaaatcatgagtgaactcccattcacaattgctacaaagagaataaaatacctaggaatacaaaccactggtcaagggaataagagaggacacaaacaaatggaaaaatattccatgctcatggataggaagaatcaatatcatgaaagtggccatactacctaaagtaatttatagattcaatactatccccatcaagctaccattgagtttcttcacagaattagaaaaatctactttaaatttcacacggaaccaaaaaagactccgtatagcaaagacaatcctaagmaaaaagaagaaagctggaggcatcatgctatctgacttcaaactattctacaaggctacagtaaccaaaatgcatggtactggtaccaaaacagatatatagaccaatggaacagaacagaggcctcagacgtaatgtcacacatctgcaaccatctgatctttgacaaacttgacaaaatcaagcaatgaggaaaggatttcgtgtttaataaatagtgttgggaaaactggctagccatatgcaaaacactgaaactggaccccttccttacactttatacaaaaattaactcaagatagattaaagacttaaacataaaatctcggatttt

SEQ ID NO: 874164 - DNA, 622 bp, Homo sapiens
gaagacatttgccttcctattatttcattgcaggaggagatatgtttatttaaaagcagataagtttatttaaaagtagagctaattgtttaggttaaatgaagaaagggcttacccaatgttctgtcttacccagtgaaactatgcccagtcatactgtcttgatgaaatagggagaggaagaggaggaaaactaccacttagccatcaacacctttccataggcctggcactgtgctaagcaccttctgtacagaaattcagttaaactttcctgcagcattttggagaagatattactcccatttacagataaagaaacggaagcatggggaacttaaataacttacacaattaatcagtggtgcagctggaattaaaactcaggtcagtgtgattaaacagtccttctcttaacaaaagctctgaaagagcatttacatgtttggctcttgttaggttatatagtacaagcytcagacacttctactcatgccatcaaaggctgataataatagatcagtaaactttaagagaactatcaaattactcttaatccatttaactcctaagtaatagatactgtataagtctcaattgtaggtgatctgtgcctgatgct

SEQ ID NO: 874165 - DNA, 578 bp, Homo sapiens
ctcggagaatccatgctgaaaaaagaatgtatatcctgcagctattgggtagaatgttctgtaaatatctgttaagtccatttgttctaggttatagtttaagtccatagtttatttgttgactttctgtcttggtgacctgtttagtgctgtcagtggagtattgaagtcmcccactattattgcattgccatccatctcatttctttggtctagtagtaattgttttataaatttgcgattgtcagtgttagctgcatatatattcaggattatgatattttcctgttggactagtccttttatcattatataatatccatctttgtctttttaactgttgttgctttacagtttgttttgtctgatataagaacagctactccttctcacttttggcttccatttgtgtggactacctttttccacccctttaccttaagtttatgtgaatcttttatgtgttaggtaaatctcttgaagacagcagaaacttggttggtgaattcttatgcattctgccattctgtgtcttcttttttttttttcaaaccatatccagctttattaaagatact

SEQ ID NO: 874166 - DNA, 624 bp, Homo sapiens
attgatcatggtggataagctttttgatgtgctggtggattcagtttgctagtattttgtacaggatttttgcatcaaagttcatcaagaatattggcctgaagttttctttttttgtcgtggccctgccatgttttggtattaggatgatgctggtctcatagaatgagttgggaaggagtcctttctactcattgctttttaatagttttagtagaaatggcatgagctcttctttgtacatcttgtagaattcatctgtgaatccatccagtcctgggatttttttgattgttaggctatttattactgattcaattttggagctcattattggtctgttcagtgatttcatttcttcctgcttcagtyttgggagggtgtatgtgtccagaaatttatcaatttcttctagattttctaatttgtgtgcatagaggtattcatcatagtctctgatggatatttgtatttctgtcgcatcaatggtaatatccccttcgtcatttctaattgcgtttatttggatcttctctcttttcttccttattagtctagctagtgatctatttaccttattaattaaaaaaaacaactcctggatttattttatttatttattta

SEQ ID NO: 874167 - DNA, 722 bp, Homo sapiens
ggcaaacatttgcagcctgtgtacgaagtcatgaagtgaggataagcagaggtttaattcaaattattatgtaagggtttgaaatttgggaccctctagaagatatcacttcaacttcagaattatgaggcaagaataaattccagccagcttaaatgatcaataatggagtcctgttttgttctgctagttgaaattgttagtggaaataaagaatgagctgtaagcatgatgggaaatatcttactggaagaaacacttccagctttgtggtatattagaaagattaagggctaggtgtaagtctggattcaaatcctgatgtttccacttgttatataaattaaacaggcagcaactgctctgagcctttgttttcttccctgtaatgtggcagtgatagtagcattcatggcattactgtggtaaytaaataagatcatgtactagtgcaggattattgctcaatgctatagttctcttccctaaataatataaatgctggagagaaacagctgtctcagaaattttttgaatgttctaatttaacttgagcatgtggacattacatagcccacgaagcaagtttccgaacttaaaaacaacaagaaaataagtatgtgctagcctccaaaatgcgtgtatttaaaaaaagagtcaagattatatgtattggaattgatctggccgtctgcaggaaatggtgatcaggccctggagtc

SEQ ID NO: 874168 - DNA, 579 bp, Homo sapiens
cacagtaactgtccaacaacagaccccaaggaaaaataaatctacaaatttccagaaagggaattcaaaatcatgatcttaaggaaactcagtgagatacaagagagtacagataaacaatttaatgaaatccagaaaacaattcattatctgaatgataaatttrgcaaagagatggatataaaaaagaaacaagcagaaatattaagaggtgaagaattcaacaagtgaaatgaaaaaatacaatatagagcttcaacagcagactaggtgaatcagaagaaagaatatctgaacttgaagatacatcatgtaaaattacccagtcagaggataaaaatgaaataagaatgaaaaagaattaagacagcctgtgggacttatgggacaccattaagtaaacaaacaatattatgggatttccagaaaggaaagcgtcaaaaatggggcagtaagcttagttaatgctgtaattgctagaaacttcccaagtcttcaaagagatatggatttccagatacatgaaacacaaaagttgccaaacagattcaaccaaaaattgtcctcaacaaggcattt

SEQ ID NO: 874169 - DNA, 615 bp, Homo sapiens
ggcttattaccctatgactcctggatatactgttgctcagctaagatagaggagatagggcagtatacaacttttacagagcaggaggcagccagttcagctaaccttttagatgttattaatggagaggctagaatgggtggaaaatacaggattctattaatgtcaagatattttccattggtcatcctagtcaaatatggtggctttattactatgatgagtgcaaacctgggtacaacaagcaggagtagagacgatggccacatatgtctgtttggatttttcagcacaaactgcaattctctgcatcagcctcctgagtagctgtgactacaggtgcccgccacaatgcccagttaatttttctatttttagtaaagayggggtttcaccatcttggccaggctggtcttgaactccttaccttgtgatccacccgcctcagcctcccaaagtgctgggagtacaggcatgagccaccacaccatgcccaaattatttcttttaaatgtggtcacatcacatggacaggtatacatgtaacactaagactgagttcatgattgagttgtttcaatgagaggtagctgctaaaggcagcactttcttgcc

SEQ ID NO: 874170 - DNA, 644 bp, Homo sapiens
aattctccatctcatccttcagtatatagacctctcatgctctattatattattttagacacagagattttaatgtgctgggttaataactgtgaactgcgaggacattagaggctctggatcttgttatcttcctctagaaaggattcacttcaagttcttyagtctcctatgactgaattgttctcaaggcctctcagccatggcagttgtgatgtccaatttctttctcttctgtctggcacagttcagtctagagattctgctcatcttgtcagttccctcagcaatcatttttagttagcacatgccacagcaagaggagtttagtgttattttaatgtctctgtatttctctcctacatacctcctcagattttgactgcatgagaagctctcaggattcttcaaattttttttttgtatgtcgctagcattggtttgatacactctcacttatcacattcagaaataatttataaaaaatatagtatacttatttagtagtatttataatatttaataattttagtatttagtaattgagtagtatttgtaggaataagattttaaaataacaacaatatttcttataccattatttgagaagtctttatgtaagaatcaaactgttacagcatgtg

SEQ ID NO: 874171 - DNA, 715 bp, Homo sapiens
atatgtatgtatatgtataccatatatatggtatacatatatatacacacacatgcatacacacacatatatattaaatatatatgaatatatatgtttttcagcatctgtgtcattacattataataggttgtccgtacatctgtgtcccctattaatcagcaagcttcattaggaaagtgattggatcccctgatttctattccttatatctaatacactactggactacaatacagactttaaattgattggytgagtgagggaatggatgaatacccagcatttttcttcctcaatgtatggaaagaaataaaagcattactttttgaatattaaaatatgccagcacccgaatttaagactttatttaccatataccatgtattctcccatatatttcctagaaaaaaagaaaaattattaattccacgtaactaatgtggaagccaaggcttaaaatcattaatatatccaaagattatacaaatagtaaatagtgaagatgaaatttgaatgaagataccttgcactgcataacctatgttagtaggggtagataacctgaaataaggatgttggcaaaggaaaaagcctgactcagattgggaattttcagacaaaactcagactctaagctaccaaaaaccatcaagaagaacattccagacctaataactcttatcttgtatattttagaccagagctgagcttg

SEQ ID NO: 874172 - DNA, 667 bp, Homo sapiens
ctccaacagtatgtcagactctgaagagttgtcagtggccctggggtggactgtgtacaggctgacagtctggcaccacactctccctcaacccctggaatgctctgaatctccccctccccggggtggtctccagtccagctgtctctttccccgagcaggttggaactgtcttctactattgcctttgttctacttcccatgctggcaaatagagtccaagtgtcatgaggttttttcctttgagggggagaaggaagttatgataccatctagtacttcagggatgagcttgtaggggaaggggtggtggtagataagggaatcctctaaatgttgagtgggaccagtgaaagatgcaggttttagtgagtaatacacacctcctcagcactttggacttcccagagctctttcacattccacaacccacttcactcaccaggcctctgaggcaggcagggtggggacrattttcctgtgcaacacaaagatccaaatacagattaaactgtatcatttgcttaagaacacaaagctagtgacaaagccaggaggctctctgctagaaaggatcctagctaatttacttttacaaaaagaaatttgcaaactggctgcaatggctcatgcctataatcccagcactttgggatgggaagcagga

SEQ ID NO: 874173 - DNA, 667 bp, Homo sapiens
ctccaacagtatgtcagactctgaagagttgtcagtggccctggggtggactgtgtacaggctgacagtctggcaccacactctccctcaacccctggaatgctctgaatctccccctccccggggtggtctccagtccagctgtctctttccccgagcaggttggaactgtcttctactattgcctttgttctacttcccatgctggcaaatagagtccaagtgtcatgaggttttttcctttgagggggagaaggaagttatgataccatctagtacttcagggatgagcttgtaggggaaggggtggtggtagataagggaatcctctaaatgttgagtgggaccagtgaaagatgcaggttttagtgagtaatacacacctcctcagcactttggacttcccagagctctttcacattccacaacccacttcactcaccaggcctctgaggcaggcagggtggggacgattttcctgtgcaacacaaagatcyaaatacagattaaactgtatcatttgcttaagaacacaaagctagtgacaaagccaggaggctctctgctagaaaggatcctagctaatttacttttacaaaaagaaatttgcaaactggctgcaatggctcatgcctataatcccagcactttgggatgggaagcagga

SEQ ID NO: 874174 - DNA, 653 bp, Homo sapiens
gagtggtgagagtggacatctttgccttgttgcagttcttaggaagaatgcttccaacatttgcccattcagtacaatattggctgtgagtttgtcaaagatgactcattattatgaggtatgcttctttgatgctagtttcttgggtttttttaattgtaaaasgatgttggattttattgaatgatttctctgcatctatagagatgatcatatggtttttgtttttaagtctatataaattttatttcttaacataaactctatcaaggacaaggcacttttgtaagatataccagctatttagttcatcctaaagagatgaagaatttaatcatgtgaatgcagtcttctttacattattaactgaaaaacaatgggtgtcctttccaactcttttaatattaggaatcaaaaataaatcagaaggaacctaatcataacagtaaggtggatggctacagttttatgatagaaattttcacaaatctgttcttgcttgatgcaagtaatgaataggagcattgttgtggtacagaaggactctccggtgaagtttagctgggcatttttctgctaaagctttggctaactttctcaaaaatctcttataatgagcagatgttatcattcttgggctctccagagagcca

SEQ ID NO: 874175 - DNA, 653 bp, Homo sapiens
gagtggtgagagtggacatctttgccttgttgcagttcttaggaagaatgcttccaacatttgcccattcagtacaatattggctgtgagtttgtcaaagatgactcattattatgaggtatgcttctttgatgctagtttcttgggtttttttaattgtaaaaggatgttggattttattgaatgatttctctgcatctatagagatgatcatatggtttttgtttttaagtctatataaattttatttcttaacataaactctatcaaggacaaggcacttttgtaagakataccagctatttagttcatcctaaagagatgaagaatttaatcatgtgaatgcagtcttctttacattattaactgaaaaacaatgggtgtcctttccaactcttttaatattaggaatcaaaaataaatcagaaggaacctaatcataacagtaaggtggatggctacagttttatgatagaaattttcacaaatctgttcttgcttgatgcaagtaatgaataggagcattgttgtggtacagaaggactctccggtgaagtttagctgggcatttttctgctaaagctttggctaactttctcaaaaatctcttataatgagcagatgttatcattcttgggctctccagagagcca

SEQ ID NO: 874176 - DNA, 679 bp, Homo sapiens
tttgtatgtctctatttatgtcctttgcctactttttaataaggttattgtaaattttttgttgaattatttgaattccttataaattggtcccatgttggatgcatactttgcaaatattttctcccattttgcaggttgtcttttcactctgttgattattactattattattattattattatttgctgtgcagttttgaagttgaagccccattgtcgatttttcattttatttttttttcttgtgcttttgagttcttagtcatcaattatttgcctagaccaatgtccagaagtattttttcctagattttcttctaggatttttgtattttcaggtcttacatttaagcctctaatctgtcttgagttgatgtttctgtgtggtgagaaacaagagtmcagtccatttattcttctgcatatggcaatctgattttccaagtacattttattgaaaagattgttcttttcccggtgtatgtttttgttgacattgtcaaagattaattggctgtaaaatgtggctttatttctaggtgctcagttctgtgtcattgatctatgtgtctatttttatgctagtacctttctgtttagttactattgccttgcattataatttgaggttaggtagggatgttttcagctttcttttgcttaggattgctttcaa

SEQ ID NO: 874177 - DNA, 679 bp, Homo sapiens
tttgtatgtctctatttatgtcctttgcctactttttaataaggttattgtaaattttttgttgaattatttgaattccttataaattggtcccatgttggatgcatactttgcaaatattttctcccattttgcaggttgtcttttcactctgttgattattactattattattattattattatttgctgtgcagttttgaagttgaagccccattgtcgatttttcattttatttttttttcttgtgcttttgagttcttagtcatcaattatttgcctagaccaatgtccagaagtattttttcctagattttcttctaggatttttgtattttcaggtcttacatttaagcctctaatctgtcttgagttgatgtttctgtgtggtgagaaacaagagtacrgtccatttattcttctgcatatggcaatctgattttccaagtacattttattgaaaagattgttcttttcccggtgtatgtttttgttgacattgtcaaagattaattggctgtaaaatgtggctttatttctaggtgctcagttctgtgtcattgatctatgtgtctatttttatgctagtacctttctgtttagttactattgccttgcattataatttgaggttaggtagggatgttttcagctttcttttgcttaggattgctttcaa

SEQ ID NO: 874178 - DNA, 646 bp, Homo sapiens
gcattgtcatgagtatccctccttatttgttatgaatatgtttgtgtgtgtatatctatatctagatagagagaataattaagcaaacatattttttcttctctttcttatccccttattatgtaacatagatatattgatattataatagtatttaagtattattaattttacatcacagtatttaagttagaagatataaagaagaaggcgaaacaccactgaaggactttacctccacttctggggaaaagattagcatgctttgggttgtatgcaggacagmtgtagcattttaggtggaattatgaacttgttattgcttcattggggattatatatcatttaaggatgtggatatgaagttgacaaggggtaaagttgtaatggttaattttatgtgtcaacttaaatgggccatgtggagcctacataaacattattctcagtggctttgtgatcctttttctggatgagattaacacttttattggtaatctgagtaaagcagattgccttctttaaggcggctgggccacatccaatctgttggaggcctgaataggaaaaatatataaataaaagtggagtaaaggtatatttactctctctgtctgacagtcaaccagctgggacatcaatcttc

SEQ ID NO: 874179 - DNA, 573 bp, Homo sapiens
atattcttggtttttttttgttttgtctttttttttcctcagagaaaaaacatttctaacctcttattggctaacttaaaaatatacattattggcctaaggaaagcaaattaacatagtggggatatagctgtacaaactacaactcacccctyccttctagaatacaaagagtatttcagtatgtgtggtgtgctatcaataagcattagcttcagtttagtaggatgggcacaggtaaagagtttgcaacacgctttggctcatttcagctgctgctgtgcagtgccaacagtggctacgttactgagctgtgcactgcagttcagtagtcatgatcattgaatgtaattggtaatggtcgatgagatttctcactggatgatgccagtcacaccacaaactcctctagatggcattggttggggcatctgcttcagcgtgcctggagactggtgtgtggcttcccttatttcattagcaggatgttgtttcctgtgtgtctggcctttctagctcttccaaggcatgatcttgactctgcaccaacttctagagtctaactcactgaaa

SEQ ID NO: 874180 - DNA, 573 bp, Homo sapiens
atattcttggtttttttttgttttgtctttttttttcctcagagaaaaaacatttctaacctcttattggctaacttaaaaatatacattattggcctaaggaaagcaaattaacatagtggggatatagctgtacaaactacaactcacccctcccttctagaatacaaagagtatttcagtatgtgtggkgtgctatcaataagcattagcttcagtttagtaggatgggcacaggtaaagagtttgcaacacgctttggctcatttcagctgctgctgtgcagtgccaacagtggctacgttactgagctgtgcactgcagttcagtagtcatgatcattgaatgtaattggtaatggtcgatgagatttctcactggatgatgccagtcacaccacaaactcctctagatggcattggttggggcatctgcttcagcgtgcctggagactggtgtgtggcttcccttatttcattagcaggatgttgtttcctgtgtgtctggcctttctagctcttccaaggcatgatcttgactctgcaccaacttctagagtctaactcactgaaa

SEQ ID NO: 874181 - DNA, 660 bp, Homo sapiens
ggacttcttccctgtgtgtctctctgtgtccaaatctctctctcctttctcttgtaaagacatcagtcactagatctagggcccaccctaaatccaggatgatatcatctcaagctctttaaccaattatatctgcaaaaaccttatttccaaataaggtcacctattctgaggttccaggtagacacaaattttgaggaacactcttcaccycactatattggggaacatgtactttagtgagacaaatggccattacctacaatacacagtagcacagaaattccatgagagacctgcaatgagttctgggtatataaaggaagtgatgttcccattcatcagatttgggggaaatggatggataaggtcatttgaaaggtaggtcttgaaggatgggagacgttttacaggacagggcattcctggaagaggaaaaaatatgagtacaaaaacagagagaatagcagggctgttcgggaatcataggattctattattgtattattctgaataataagtattggctactttatatgtggctaggcaacttgattacaagtgtctagcacggcaccttgcacacaccacagagctggttaatatttgttgactgatactaagaaaaagcaaaagtgtaactctgccttctccattcaa

SEQ ID NO: 874182 - DNA, 660 bp, Homo sapiens
ggacttcttccctgtgtgtctctctgtgtccaaatctctctctcctttctcttgtaaagacatcagtcactagatctagggcccaccctaaatccaggatgatatcatctcaagctctttaaccaattatatctgcaaaaaccttatttccaaataaggtcacctattctgaggttccaggtagacacaaattttgaggaacactcttcaccccactatattggggaacatgtactttagtgagacaaatrgccattacctacaatacacagtagcacagaaattccatgagagacctgcaatgagttctgggtatataaaggaagtgatgttcccattcatcagatttgggggaaatggatggataaggtcatttgaaaggtaggtcttgaaggatgggagacgttttacaggacagggcattcctggaagaggaaaaaatatgagtacaaaaacagagagaatagcagggctgttcgggaatcataggattctattattgtattattctgaataataagtattggctactttatatgtggctaggcaacttgattacaagtgtctagcacggcaccttgcacacaccacagagctggttaatatttgttgactgatactaagaaaaagcaaaagtgtaactctgccttctccattcaa

SEQ ID NO: 874183 - DNA, 660 bp, Homo sapiens
ggacttcttccctgtgtgtctctctgtgtccaaatctctctctcctttctcttgtaaagacatcagtcactagatctagggcccaccctaaatccaggatgatatcatctcaagctctttaaccaattatatctgcaaaaaccttatttccaaataaggtcacctattctgaggttccaggtagacacaaattttgaggaacactcttcaccccactatattggggaacatgtactttagtgagacaaatggccattacctacaatacacagtagcacagaaattccatgagagacctgcaatgagttctgggtatataaaggaagtgatgttcccattcatcagatttgggggaaatggatggataaggtcatttgaaaggtaggtcttgaaggatgggagacgttttacaggacagggcattcctggaagaggaaaaaatatgagtacaaaaacagagagaatarcagggctgttcgggaatcataggattctattattgtattattctgaataataagtattggctactttatatgtggctaggcaacttgattacaagtgtctagcacggcaccttgcacacaccacagagctggttaatatttgttgactgatactaagaaaaagcaaaagtgtaactctgccttctccattcaa

SEQ ID NO: 874184 - DNA, 481 bp, Homo sapiens
cagagacttaacttcttcctggtttagtcttgggagggtgtatgtgttgaggaatttatccatttactcttgattttctagtttatttgaatagaggtgtttataatattctctgatggtagtttgtatttctgtgggatcagtggtgatatctcctttaycattttttattgcgtctatttgattcttctctcttttcttccttattagtcttgctagtggtctatcaattttgttgatcttttcaaaaaaccagctcctggattccttgatgttttaaagggtttttttgtgtctctttctgcttcagttctggcctaatcttagttatttcttgccttctactagcttttgaatgtgtttgctattgccttctctagttcttttaattgtgattctagggtgtcaactttagatctttcctgctttctcttgtgggcatttagtgctatcaatttccctctacacactgctttgaatg

SEQ ID NO: 874185 - DNA, 620 bp, Homo sapiens
atctgttctacatagtacaaagacaattgacataagtcactgagttgagtttttttgtgtgcgtgtgtgtctgtgtgtgtgtgtgtgtgcagttgtgtgtctccatgtatatttgcagtacagtaaaaaataaaataaaataaagcaaaataaaataacaatgtagaataaaaacttgtgttttgggctcctgattgaaaagaaggcagctattgataaaaaaattttttcatactrcaggaatataatgggcattatttattgagaatgttattgcttttaatgtatattttatttaaaataatgtgttctgtgattttaaaaagcaggtgctataggaattataaacagtataactatttctccaggtatttactttttggaatattttacaaatactcaacgaatgcttaagttacgtgttaaaagaaaaacattaaacctggattatttcatatgcacataatttctactaatttcccattttttacattctgtgtcttatttatccacagttttactttctttcattttatctccccattaaaggcatcaataatattgcaccatcccttaactctcactgtaacaccgtaccaatgtaccactaaatcaagctc

SEQ ID NO: 874186 - DNA, 620 bp, Homo sapiens
atctgttctacatagtacaaagacaattgacataagtcactgagttgagtttttttgtgtgcgtgtgtgtctgtgtgtgtgtgtgtgtgcagttgtgtgtctccatgtatatttgcagtacagtaaaaaataaaataaaataaagcaaaataaaataacaatgtagaataaaaacttgtgttttgggctcctgattgaaaagaaggcagctattgataaaaaaattttttcatactgcaggaatataatgggcattatttattgagaatgttattgcttttaatgtatattttatttaaaataatgtgttctgtgattttaaaaagcagrtgctataggaattataaacagtataactatttctccaggtatttactttttggaatattttacaaatactcaacgaatgcttaagttacgtgttaaaagaaaaacattaaacctggattatttcatatgcacataatttctactaatttcccattttttacattctgtgtcttatttatccacagttttactttctttcattttatctccccattaaaggcatcaataatattgcaccatcccttaactctcactgtaacaccgtaccaatgtaccactaaatcaagctc

SEQ ID NO: 874187 - DNA, 648 bp, Homo sapiens
cattgattttaatgctcatttggatactttatcagtgtgtttccttgacaagaagacatcagaataaaattactcatgcaagagatttactggatgaaatgcctataaagaataaaggaggaaggagcagaagtgagagggggcttcagattccaatgcaggctgaagacctgacatagatggaatgtatcctccccagttcaggcattgaaaacaacccttaatgcaacagtctcaggaggcagaacctaatataacatgtttaggtcaggagggctctaccatcatgaatggattaatgctgttatggcaggagtgggtttgttataaaagtaagcttggctctctcatgccttctctctcctgttctctgtcacgctgttgccttccactacaggatcatgtgacaaggcggtcctcatcagatgtggtcmctgaattttgaacttttcagcctccagaaccataagccaaataaacttctgttgtttgtaataacccagtctgtggtattctgttatagcagcttaaaaccaactaagatggcacctgtgaaaggaaagaagaagaaaggaggattggggaagagcctctgtctgtagtgatgctctgagaaagctgtgacatgcctgatgggaagccccagat

SEQ ID NO: 874188 - DNA, 548 bp, Homo sapiens
ttagacgtcatttacttggtaagacattatagaaatatttttggccgttttgtttgctttaaaatccacttaactacaaagtgacttcacagtttaaaaatgacataacataatctatatggtactacactgataatatcatctaatctttcattatgctgtgaccaagtcttctgttaaaagtctaattttaacctggcacagtggctcacgcctgtaatcccagcactttgggaggccaaggcgggtggatcacaaggtcaggagttcgagaccatcctggctaacatggtgaaacaccgtctctactaaaaatacaaaaattagccaggcgtgggggctggagcctgtagtccaagctattcgggaggctgaggcaggagaatggcgtgarcccaggaggcggagcttgcagtgagctgagatcgcgccactgcactccagcctgggcaacagagccagactctgtctcaaaaaaaaaaaaaaaaaaagtctaattttcttgttgtatcaacatttgatgtccaatatgatctttaagcagctat

SEQ ID NO: 874189 - DNA, 618 bp, Homo sapiens
gatattttgaaactcaataagtctttgctgaaatacagtgtatctatattcttttatctttaacttttgtatattacacaccattctacttttcttttttttaatttttttttttgagatggagtctcgctctgtcacccaggctggagtacagtggcgtggcgagatctcagctcactgcaagctctgcctcctgggttcatgccattctccagcctcagcctcccgagtasctgggactacaggtgcccgccaccacacccagccaattttttgtatttttttagtagagacggggtttcactgtgttagccaggatggtctcgatctcctgaccttgtgatctgtccgcctcggcctcccaaagtgttgggattataggcgtgagccatctacttttcaaataaagtgatatatttgctaaaattgtgtgtaaactaattatagcaaaatttttataaataaaattatttcaaagataaatcttacatcctacagttacacataaagagtagtgttgtatcagatctacagtgtctaacagcctttctctctgttaatgttacaaaacattgatcattggtagcccatgctactgtcattttaatacaagcccat

SEQ ID NO: 874190 - DNA, 586 bp, Homo sapiens
tgctgacagtccaaacatcagccagaccactaccagcaaagaccaatcactctgttttgatatgtgagtttagagctatttgctatcttttgtatacattccctgaatatttgtcttcataatatatgagaaatatatgatgtcataattccttttgggattcactatttgagctccacttttccattcaggaaactggaatcataaatggaaaaaaaaattactatgtaattaagcttctagcatgtgctggacactgtcctagataaataattgtctcttcaatcctgagaatgaagctttattgacctcgtccacactgttggttagtaagtgacattgatcaaacagttttgcagtttaaacattatayatttgttcataaaataaaaataaatgaatatataacatttgaattttctcagattcaaaagatggtacagacaaattaggtcttgaattccactttgttatcctgatgttttttacatattcgtttccatctattgctttctaaatagaatccccctataaatgtccaatatcattacaactattgttataaacaaaaagtgaataaagagca

SEQ ID NO: 874191 - DNA, 603 bp, Homo sapiens
cagcagtgggcgagagggcattatttagtggatggaggtaaggaaaaaataaagcgtatgaagtcgaaggttgagcactatgtggaaaagttttattgttaagcagggaacctgtgtctaggctctggggatgagatgcctagacttgggagggggtgtggggagaactagggtgggtccttcaaagccaagacactgcaaacgctatttgtgcccttaggatagcaaagtctctgatggttgctgttgtgctgatgatgtgtgaactgtcccggggagggtctcctgcttgggatatggtgatataagatgtggtgcccagctgcccctgctatgcacaggtcatgcgggtcaggattgggtggcccagtccactttgcaccagtatcagccggctcatggccargtcagggtttatcagtggccacagtggtgggaggtgaagacagtgctcttctcatatactccttttatttattatactcccctgcccatttctaccatctacatcatatggcatatgggaacacgaagtttgatcctggacactaccctcagcctcttggagcctcagcctgctcacctctgaggaaggaggataaa

SEQ ID NO: 874192 - DNA, 644 bp, Homo sapiens
gctatataagacatgcctttgctcctccttcgccttccgccatgattgtgaggcctcccaagccatgtggaactgagtccattaaacctctttttctttataaattacccactcttgggtatttctttatagcagtatgaaaatggactaatacagtaaattggtactgatagagtggggtactgctgctaaaatactgaaaaatgttgacatgactttggaactgggtaacaggcagagtttggaaccttttggaggggtcagaagaagacaggaaaatgtgggaaagtttggaacttgaacttcctagagttgtggagggygccaaagacaggaagatgtgggaaagtttggaacttcctagagacttgttgaatggctttgaccaaaatgctgatagtgatatggacaatggattgcaggctcaggtggtttcagatggagacaaagaacttgttgggaaatggaataaaggttactcttgctatgcaaagtgactggaggcatttttttccctgccctagagatctgtagaacattgaactttagagagattatttagggtatgtggtggaagaaatttctaagcagaaaattgttcaagaagtgacttgggtgctcttaaaagcattcagttttgttca

SEQ ID NO: 874193 - DNA, 685 bp, Homo sapiens
caagaagctggaaaaataagaagataaacctgcacctgtgccctatacattgtcttcccccttgtccactggattgagtattaacgtccctctgcaaagcctatctttcaggcttcttcaaggatgtgactggtggaaaagaagagataggtgaccgctgcacaaatggttcccctcatctactagcccttcctggaggttggcaaacatgctgtcacatctcccagctcaggaaaaacaaaactgtctcttaaccctccctcctgcaaccaccccatttctctgtttttccttatagcacaactcctaaaaataattatctataatccttctctctctccctccaactctctctcttcacacatctccctccttcagaaattgtattccaacaaggctgtagtcctcatcactccaactgaatcagttattgccaaggacaccaatgacttcaccactttccttctgcctcttcttccttgcttgtttactgtctgcccctcataaaagactgtagtttccaaggcaacagggytgcacctgactgcctgaggttgtgagttatctctagcacctagggttgtgcctgggatagagcaacttctcagtaagtatttgttgagtcagtgacagaacttgaaatgataaaggcagaagaataaaataaaaattaaactgtgaagat

SEQ ID NO: 874194 - DNA, 594 bp, Homo sapiens
gttatttccacagttttgaatagtaactaaggacatacctggatggaggtataaatggccacctgagattgccatttgttgaatcaatgaacctgagtgggttgggtcagtggctgactcctagttagtattaattaagtctttaaacaaatggaaaayttagaaaacatgagagaagtagcagaatgagataactctctgagagaacaagactttctaaggttgctccaagcacctgctctgggactggttaaaaggtgatggagcatatgtttaatatagactttctgactagactgatctcaccataggtgttcacggagactggatgggaacatgagagaaaataaggggagactgtagagtgttaggtccttaagggggacaagatatgtagaactgaagagaacaaaagatatggaatgcagatgaatgagaggtaagtaggaatgagaggtagtaggcaatgaacaaattattattaaaaatagggccctattttctggcccatattaagtaaactacatgtttttggaactttcaattttgttgattctttacaatactgtctctcaccttgttttctaaatattt

SEQ ID NO: 874195 - DNA, 594 bp, Homo sapiens
gttatttccacagttttgaatagtaactaaggacatacctggatggaggtataaatggccacctgagattgccatttgttgaatcaatgaacctgagtgggttgggtcagtggctgactcctagttagtattaattaagtctttaaacaaatggaaaacttagaaaacatgagagaagtagcagaatgagataactctctgagagaacaagactttctaaggttgctccaagcacctgctctgggactggttaaaaggtgatggagcatatgtttaatatagactttctgactagactgatctcaccataggtgktcacggagactggatgggaacatgagagaaaataaggggagactgtagagtgttaggtccttaagggggacaagatatgtagaactgaagagaacaaaagatatggaatgcagatgaatgagaggtaagtaggaatgagaggtagtaggcaatgaacaaattattattaaaaatagggccctattttctggcccatattaagtaaactacatgtttttggaactttcaattttgttgattctttacaatactgtctctcaccttgttttctaaatattt

SEQ ID NO: 874196 - DNA, 622 bp, Homo sapiens
tttccctcttaacactgccttggctgcatccagagattatggtagattgtatctttgttctcagtagtttcaaagaacttctttatttctgccttaatttcattatttacctaggagtcattcaggagcaggttgttcaatttccacataggcgtgtgggtttgagtgaattacttaatcttgagttataatttgattgcactgtggtctgagagatggtttgttatgatttcagttcttttacatttgctgaggagagttttagttccgattatgtggtcagttttagagtaagagtcatgcagtgatgagaagaatgyatattctgttttttgggggtgaagagttctgtagatatctatcaggtccacctaatggagagctgagtttgggtcctgaatatctttgttaattttctgtctctgtgatctatctaataccgtcagtggggtgttaaagtctcccactactactgtgtgggagtctaaatctctttgaaggtctctaagaacttactttgtgaatctgagggctcctgtgttgggtgcatatatatttaggatagttagctcttcttgttaaattgaaccctttaccattatgtaatgcccttgcctttttt

SEQ ID NO: 874197 - DNA, 622 bp, Homo sapiens
tttccctcttaacactgccttggctgcatccagagattatggtagattgtatctttgttctcagtagtttcaaagaacttctttatttctgccttaatttcattatttacctaggagtcattcaggagcaggttgttcaatttccacataggcgtgtgggtttgagtgaattacttaatcttgagttataatttgattgcactgtggtctgagagatggtttgttatgatttcagttcttttacatttgctgaggagagttttagttccgattatgtggtcagttttagagtaagagtcatgcagtgatgagaagaatgtatattctgttttttgggggtgaagagttctgtagatatctatcaggtccacctaatggagagctgagtttgggtcctgaatatctttgttaattttctgtctctgtgatctatctaatacygtcagtggggtgttaaagtctcccactactactgtgtgggagtctaaatctctttgaaggtctctaagaacttactttgtgaatctgagggctcctgtgttgggtgcatatatatttaggatagttagctcttcttgttaaattgaaccctttaccattatgtaatgcccttgcctttttt

SEQ ID NO: 874198 - DNA, 517 bp, Homo sapiens
aaaaaaatagctcttattgttttgagatacgtcccatcaatacctaatttattgagagtttttagcatgaagggctgttgaattttgtcaaggccttttctgcatcgattgagataatcatgtggtttttgtctttgattctgtttatatgctggattacatttatygatttgcatatgttgaaccagccttgcatcccagggatgaagcccacttgatcatggtggataagctttttgatgtgctgctggattcggtttgccagtattttattgaaaaaatgatcatcatcactggccatcagagaaatgcaaatcaaaaccacaatgagatatcatctcacaccagttagaatggcgatcattaaaaactcagggaacagcaggtgctggagagcatgtggagaaataggaacacttttacactgtaggtgggactgtaaactagttcaactattatggaagacagtgtggcgattcctcagggatctagaactagaaataccatttgacccagc

SEQ ID NO: 874199 - DNA, 665 bp, Homo sapiens
tgccatgtcagtttaccattgccagggcaatccctgaaaattactgcccctttctacgcaacaacatgacaaacaggaagttaccactctcattccagaaatttttgcatacgccaccctttaatttgaaaataattaaaagtgggtataaatatgagtgcagcactgattctgagatgcagttctgtgaaaactgcgtatagggtagcctcctttcgcaaggagctgctgctgtatactgctacttcaatacaatttgctatttaacatcactggctcgctttagaattctttcacgggtgaagccaagaaccctctaggactaagccttgattttggagcctrcctgtcctgcatcaatatgaatataaataagacaaattctataagttatgagttttcctttttttttttttttttttttgagatggagactcactctgtcaccaggctggagtgcagtggtgccatctgggtacactgcaacttccacctcctgggttcaagctattctcctgcctcagcctcctgagtagctgggattacaggtgtgtgccaccatgcccagctaatttttatatttttagtagagacagggtttcaccatgctggccaggctggtcacgaactcttgacctcaagcgatccaaggtttcttaactgta

SEQ ID NO: 874200 - DNA, 659 bp, Homo sapiens
ttggaaaaattaatattgtaaaaatgacaatacaacctaaagcgatctgcagatgtaatgtaatccttgtcaaaatactggcaacattcttcgcacaaatagaaaaacaatcataagattcatatgaaacacaaaggactcaaaagccaaagcattcctgagtggaaaaaaacaaacttgagacatcacactattcaactcaaaatatggtacaaagctatggtaacaaaaacatcgtggtactgcaatgaaagcagacacacagaccaatggaaaggaatagagagctcagaaataaatccatacatttatagccaaatgatcttggacaaaggtgtcaagaacacacttggagaaaggacagtctgttcaataaatggtacttggaaaactggataatcacacacaaaagaatataactaaatccctrtttctcgctacttacaaaaaatttacctcaaaataaattaaagacttaaatgtaagaccccaaactatgaaactactcaaagaaaacataggggaaatgtttcaggatattggtctgggcaaggatttttttttattttttataaacatgttttatttattttgcttataccatcagagctgaaactactgtctgtcatttttgtgaaatggaaatcaatctaaaacac

SEQ ID NO: 874201 - DNA, 663 bp, Homo sapiens
ctagaaggaacccatcctatagggtaaagatgaaaatgaaaaaaaaaagaaagaaagcatgcgacaacacgtttggtttattgctgctttagtaacttcaaatccccacattttgaaaataggaagttaattcccaaatatctttaactacccttcccttcaagcttgagtattcagattaggagttcatgattttatttaggagaatagactccttaacaggatctctgtcgaggaatctactttctatacaaattatagtgttttgcagatgtgtattagttatacattgctgcatagcaagaacacracaaacttgtgacttaaaataacatacatttgttactgcatagtttctgtgggtttggagcccaagcatgattgactttggtctccaggtaatggtttacttagagtctcaaaaattttcagtcatatttttggctgtggctgtgatctgagcctctatcagggaacttatgcagttgttcgcaaaatgcatttccttgcaggttactaggtgaaagacttaattttcttgctgactgtaagctataggtgatccttagctgctagctgtgtggccctctccatatggcagtccacaatatttgagcctgcttctttaaagtgattcagggagagaaaatctccttgcaagat

SEQ ID NO: 874202 - DNA, 607 bp, Homo sapiens
ttctgcctgattgtaatatccaacatagctcagaccacattttctaagctatcagtgtctttttttttcctcagcagttttcatctcactgtgcttttgcttaataaacagaatatatattcttgtaccataattgaatcaatttgaaactctttgactctttgttagtcctttgkgtggtatattattagacatctttccaaacccacttatcaggcaacttccattaaagagagaagcagctgctccaaagaacattttcaggtcatcttcatatcattcagatttcacttttagttggttttactacctgaataccaactcttcttgcctttatcctgtgtgggtttttttttttttttttttttttggcactgacactgctttttagtacattacatctgactctttctcgtgggcttcttcttgaatttgcctcaccgacaagactctcttttaactagtgacctgggacccaatcaggagtttatctgtctcacaagattagctagatggaatgggagtactcacacaccaactaaacttttctccattatgttcacatgtattctttgtgctttatgtaagacaatgtctgcacaaagtt

SEQ ID NO: 874203 - DNA, 579 bp, Homo sapiens
ggaactgggaaacagtcagggtgtggaacagtttagagggctcagaagaagacaggaaaatgtgggaaagtttggaacttccaagagacttgttgaatggctttgcctaaaatgctgatagtgatatggacaataatgtccaggttgaggtggtctcagacagaaatgaggaacttgttgggaactagagsaaaggtgactcttgttatgttttagcaaggagactagtggcattttgtccctgcccaagagatttgtaactttgaacttgagggagatgatttagggtatctgccttaagaattttctaagcagcaaagcatttaacatgtgacttggttgctgttaaaagcatttagttttataagggaaggagagcataaacgttcaaaaaatttgcagtctgacaatgcgatagaaaagaaaatcctattttttgagaagaaattcaagctggctgcagaaatttgcataagtaacgaggagccaaatgtaaattccaaaggcaatggggaaaatgtcttcagggcatgtcagaggtcttcacagcagcccctcctatcgcaggtccagaggcct

SEQ ID NO: 874204 - DNA, 584 bp, Homo sapiens
gtgctaaaaacaaaccagaaaggagttacagtggtccccgctgctccacaagtttcacaacctgcaatgtatgcctgaaaccacagatagcaccaaacccaattgtcatcaatcagaacatgtttctgtttatgtcttccacacacaaatgtaatgttatcatgcactgtggttgtaattttgtacactgaggtgtgacagcaaaactagcacacatttctatttcctttttcacaatttcatagatagaagattcattctacactgtagatcttagcgacctcagcatatgattttttttttctttctttattcagttgagaacttgcaccrtttcacttaagagaagaattttactgctactctttggcatatatgaattgccacatcactactcttgtgctttgggaccaatattaagtaaaataagggatactaggacacaagaactgtgatagcttggccatgaattggataactgtgactgctactaagtgactcatgggtgggtagcgtagactgcatggatctgctggacaaagggataatttgtttcctgggggaggatggagcagaatggtgtg

SEQ ID NO: 874205 - DNA, 541 bp, Homo sapiens
ggtagatccactgacagctttcactgtgtgcttagaaaacccacagacactcaatgagagtttgtgaatgcagctgggagggaggctttaccctgaaaaatcatagtcctggagctgtccaagaccacggaaaccaacctcttacatcagtgtaatctggatgtgagacatgaagtcaaagaacatcattttggagctttaagttttgacttgaattttggattcrcctagggctgtatctcctttgtttttgccaatttctcacatttggaacacctgtatttacccaatgcctgtgtccccattgtatctagtaagtaactaacttgcttgtgattttacaggctcataggtggaagggacttgtcttgtctcagatgagattttgagctgtggacttttgagttaatgttggaatgagttaagactttgggggactgttgggaaagaatgattggttttgaaatgtgagtacatgacatttgggagggaccaagggcagaatgatatggtttgtctgtgttcccacccaaatctcatc

SEQ ID NO: 874206 - DNA, 579 bp, Homo sapiens
cctcagcctcccaaaatgctgggattacaggtgtgagccaccatgccttgcctaaatccattgtttctttgttgactttctgtcttgatgacctgtctagtgctgtcagtggagcattgaagcccccactattattatgttgctgtctatctcatttctttggtctactagaaattgtttcagggaaagaaaacaaaaagtgtttcattgcctagattagagtttattacagaattaccatgaaaaatatttgcaatattgtgcattttacttatyttttatgcattttaagcagatttgtaagactttctcaatcaatcctaaagatagttaataagcttgtaacttctaaccccccaacattgagtgtctcttatgaaagtatgagattattcagaagtcagagttatcacttttctttttgttaatgcatttgcacaattgttataattttatattttaattcattaaagtaagccttgtcactaaggtggcctcaaagctcaaaggatgggattctggttagctcctcatacaatttgcttctcatggcttgcagaggcctgattgtcctctgaa

SEQ ID NO: 874207 - DNA, 651 bp, Homo sapiens
ttaagagttatttgaacagagccaggtgcagtggctcatgcctgtaatcccagaactttgggaggccaaggtaggcagatcatttgaggtcaggagttcaagaccagcctgggcaacatggtgaaaccctgtctttactaaaaatacaaaaattagctgggcatagtggcaggcgcctgtaatcccagctactcaggaggctgaggcaggaaaatcacttgaacccaggaggytgaggttgcagtaagccaagatcgctctactgcactcaagcctgggcaacagagtgagactctgtctcaaagttattccaacaggaaagagaaagacgcaggcatagaggaggatggttactaaagtctgctttgttggagatggctttacaagaaaactacttatctatggaagattcatcaggccaatgggcttgcgtttcaagaaagcccatgtaacacatcctgaactgaaagccaccttttgcctaacaatacttggtgtaaagaagagtccctcattcccaatgtatataactttggatgttattaccaaaggtactgttactgaggtgaatgtgagttgggccttgtgacacaaggaggcaaggttatttggggaaaataggctgtggttaccaacaatcctgaaaatgat

SEQ ID NO: 874208 - DNA, 612 bp, Homo sapiens
acctcttgcatcagcatgacctggatgtgagacatgaagtcaaaggagatcattttggagctttaagatttgactgccctgctggattctggacttgcatgggacctgtatcccctttattttggccaatttttcccatttggaatggctgtatttacccaatgactgtacctccattgtatctaggaagcaagtaacttgcttttgattttacaagcttataggcagaagggacttgccttgtcccagatgagactttgtactgtagacttttgagttaattctgaaatgagttaagactttgggggactgttgggaaggcatgattcattttgaaatgtgaagataggagatttgggaggggctgggatggaatgatatggtttggctctgtgtccccacacaaatctcatcttgtagctcccataattcccaagtgttgtggragggacccagtgggaaatgactgaatcatgggggtgggcttttccccatgctgttttgtgatagtgattgggtctcacaagatctgatggttttaaaaacaggagtttccctgcacaagctctttctttgcctgctgccatccatgtaagatgtgacttgctcctt

SEQ ID NO: 874209 - DNA, 610 bp, Homo sapiens
acttaaagtaaaataaaaattaaaaaagacatacatgtggccaacaaatgtgaaaaaacactcaataccactgatcatgagagaggcaaatcaaaactacctgtgatagcgttgcatcctagtcaaaatggttattaaaaagttaaaatacaacagatgctggtgaggttgcagagaaaaggaacacctttacactgctagtggaagtgtaaattagtccaaccactgcggaagacagtgtgacaattcctcaaagatctagaaacagaaataccatgtgacgcagcaatctcattactgggtatatacccacaggaatataaatcatttataargatacctggacatgtatgttaattgcagcactatttacaatagcaaagacatggaatcaatctaaatgttcatcagtgatacaccggatgaggaaaatgtggtacatacacaccatggaatactatgcagctataaaaagaatgagatcatgtcctttgcagggacatggatgcagttggaagtcattgtccccagcaaactaacacaggaacagaaaaacaaacactgcacattctcacctataagtgggaggtgaatgatgagaacacatgga

SEQ ID NO: 874210 - DNA, 610 bp, Homo sapiens
acttaaagtaaaataaaaattaaaaaagacatacatgtggccaacaaatgtgaaaaaacactcaataccactgatcatgagagaggcaaatcaaaactacctgtgatagcgttgcatcctagtcaaaatggttattaaaaagttaaaatacaacagatgctggtgaggttgcagagaaaaggaacacctttacactgctagtggaagtgtaaattagtccaaccactgcggaagacagtgtgacaattcctcaaagatctagaaacagaaataccatgtgacgcagcaatctcattactgggtatatacccacaggaatataaatcatttataaggatacctggacatgtatgttaattgcagcactatttacaatagcaaagacatggaatcaatctaaatgytcatcagtgatacaccggatgaggaaaatgtggtacatacacaccatggaatactatgcagctataaaaagaatgagatcatgtcctttgcagggacatggatgcagttggaagtcattgtccccagcaaactaacacaggaacagaaaaacaaacactgcacattctcacctataagtgggaggtgaatgatgagaacacatgga

SEQ ID NO: 874211 - DNA, 561 bp, Homo sapiens
atgaagaatatcattggtattttgatagggattgcattgaaactgtgggtagtatgaacattttaacaatattgattcttctattccagaatcatggcatatatttccatatttttgatcctcttcaattttttgcatcagtattttatagttttcaatgtagagatcttctctcctttggttaactcctagctattgcattttatgtgtagctattgacagtggggttactttcttgatttctttctcagattgtttcttgctggcatacagaaatgctactgattttttgtatgttcattttgcatcctgcaactttactgaatttatcarttctgataggttttttgcagtgtcttggggttttttcaaatataatatcatgtaatctgcaaacaagaataatttcacttcttccttttcaatttgaatgccctttatttctttctcttgtctaattgctctaggtaggacatctggtactattttgaataacagtggtgaatgtgagcatctttgtcttgttccagatcttagagaaaaggctttcaggttttcaca

SEQ ID NO: 874212 - DNA, 706 bp, Homo sapiens
caaataggaatgtgaaattgaagagtcaaagttttcctttaatgaggaaaatctctccaccaaatctgaaaagaggtaaatagatgccaacagttttattatcaaagacacaagccaaccaagagccaggttatgtatatcggcaaatacttactttgaatgaccatagcagtcttggtagcataggaagttcctactggtgcattcagcatcaacacatcaggtcctactgagggtcttctacagtataaatttcctttgccaattatgcagtctgacaaaggaagggctatcatgttccattcaaaaggtgaaaaatatcaagtaattatgatctgggcttatgagcaatggcaaacactaatctcaaatcaagaaaaaaaaaagaatttattttgtagcttctctgacccatgggtaaaagttacctgggctttttaatctagtaaaagtaggaatttgaagagttcaacacttatggtgattctccctgggagatagaaggacaagacctcaacactarttttttaatgtgaaagggctcccactcagggaccaggatcagttttacaagatggtgctgaaagcagcaagagtttcctccatgtgctccacttcagtaccaccaatgtaaatgagattggtttgacaaagtctttagcttcatctcttggatgtactttcaaagattccgggatttgagggt

SEQ ID NO: 874213 - DNA, 621 bp, Homo sapiens
ttaaagatgttttccattgtcttttggtttttattatttccatgagaatccagccattattgggtggatcacgaggtcaggagttcgagaccagcttggccaacatagtgaaaccccgtctctactagagtacaaaaattagctaggtgtggtggtatgcacctgtattcccagctactcaaaaggttgaggcaggagaatcacttgaacctgggaggtggagattgcagtgagctgagaccacgccattgcactccaggcagggtgacagagtgagactccgtcmcaaaaaaaaaaaaaaaaaaaaaaaaaaaaagaatccagccattactattgttaatgttgttttcttaaatgttatatgtgctttttcttctgcatgcttttaaaactttcccttcatctttgattcttagcagtttgaatttgagatgattatgtttcttttttaatttttaaattcaatctattggattttgctgaaatttttggatctgtgagttgataacctttctcagattgaggtattcttggtctttatctcgtcaaacattgttacattctttcttatttttcttttttcagattccacttacttatccatatttgtagatagcgttt

SEQ ID NO: 874214 - DNA, 657 bp, Homo sapiens
tgcaaattctggctgaggcaatcaggcaagagaaagaaatcaagggcatccaaacaggaagagtggaagtcaaactctctttgtttgcagatgacatgatcctatatctagaaagccccattgtgtcatcccaaaagcttcttaagctgataagcaactttggaaaagtctcaagatacaaaatcaatgtgcaaaaattgctagcattcctatacatcaacaacaggcaagcagagagccaaatcatgaattaactcccsctcacaattgccacaaaaagaataaaatgcctaggaatacgtctaagaagggaagtaaaggacctcttcaaagagaactataaaccacttctcaaagaaattagagatgacatgaacaaatggagaaacatttcatgctcatgaataggaagaatcaatgtggtaaaaatggccatactacccaaagctatttatagattcattgctattcccattgatactattctcagaattagaagaaactattttaaaattcatatggaaccaaaaatcctgaatagccaagactatcctaagcaaaaagaacaaagctagaggcatcatgctacctgacttcaaactatactacaagtctaaagtaaccaaaacaggatggtactgatacaagaacaaacat

SEQ ID NO: 874215 - DNA, 635 bp, Homo sapiens
tttcagaaactctaaaatacttacttgaatccctggaatggattcatccaaccctgttcggttttcttccttccagtgtgctattctatagtagaaacagtgccaggccatgggatttagacatcagaggcatttccaggtttataaaaaggcraagactgtattaaagtatttgcttttaagtttgttggccagttcttctcactgaccctggataggtctaggctactctcagcttacctaccatgtctttgtaagatgtgtagtccatggtgcttgaatagcaccacaaagacgtggagaggtaaaagacataagatgatctcaattttgaataattctccttgaggggcaattatatatttttggaaagttcattcttatttattgggccttctttatctcagaattcaggaaggggcagagtgttttcttcccaagttactgactttcttagcatgcgaggctcaaatgacaatgattatttagaatctctgagcagctcagactcagttttttttgtaatgccagcatataggtcaaatgtgaattccttacaattttttctgaatgggaagtttagggaacgactccaatgttcctgtagtcgctctaagtcgtttaggtgtgctata

SEQ ID NO: 874216 - DNA, 628 bp, Homo sapiens
cttttctttttgagaccataattatatttaacaattattgactccttatcctgtgtggcacctttctcattgctttggacaatgtgtagcaaagtcctcactgaatcccaggagtctaataggtatttgtgaatgaggagtgagtgartgaatgaatgatttgactaattcttacctcactaagtcacccatggcccaggagggtactgtgtacctttatgttacaaatcatttaactttaattttgactggtaggtgaagtgtcccaagaatttgtaaagataaaactgtgcctttggggcttctcctactgctcccctcttccctaagagtcagcagctggaaaaggtttatttattttttttattttgtaactgtagaggaatcctgaatgggccctgcaaagtaatctcagagattgagccacacatagacaaagatggagaacacagctcacctgcagagtgctgtttctcatcactaactgtggtttctctcagtcctgactttttatgctgaggattctgggagaaatttcaccttctttacttcctacaggatatccagtttcctggtctgggagctgagagcagaattagccaattggaaggttaacgcataattgtag

SEQ ID NO: 874217 - DNA, 737 bp, Homo sapiens
ttgtgtatgtaaaacatacatatatacttataggttatatttgtatataaatatacttttatatattttataaatatacaaatatatttttctaatattttataaacatacaatatataaaatacatttataaatatacaaatatataaatatactgtatatttttaaatcaaataaaatgattatattatatgtaaatatatttgtatatcatatatactttatatattttataaatatagaaatatatttatatatatatatatatatatatatttttttttttttttttttttgagacagagtctcactctgtcacccaggctggagtgcagtggcgcgatctcggctcactgcaagctccgccctcctgggttcacgccattctcctgtctcagcctcccgagtaggtgggactacagcacccaccaccatgcgcagctaattttttgtatttatagtagagatggggtttcaccatgttaaccacgatggtctcgatctcctgacctcatgatccaccygcctccacctattatatataattaaacatataaaatatattttatattttatataaatatatttatatataaatttatgaatataaatataaattaatgtaatatataaataataaatttaatttataaattaaatttataaatttaaaatatatttatatagaactatatattatatattaaatctatataatatatttaaatgtatttaca

SEQ ID NO: 874218 - DNA, 595 bp, Homo sapiens
gcagaacatatggtggtattattagggcaccaggcaggagctgaagtaggggctcagaaagccaatcacaagaaccaggattcagggtgggcctgtggttttgaatggaagaaaggagaaaagagtaaacaaatgggctgggcacaatggctcacgcctgtaatcccagcactttgggaggctgaggtgggtggatcacgaggtcaggagttggagaccagcctggccaacatggtgaaactctgtctttactaaaaatacaaacattagccaggcaagtgcctgtaatcctagctactggggaggctgaggcaggagagtcacttgaactcgggaggcggaggttgcagtgagccaagatcgtaccactgcactccagcctgggcgacagtgccagactccatctsaaaaaaaaaaaaaaataataataaacaaatggatgcatgaacaagtgcataataggtagataaatacaccttaggagacagatcaaaatgcagacttgaatttaattggcacagacacttaattatgcatcttgacatctttgaccaaaaacaaaatgccaagaacaaaagcagcttcacgaccaagc

SEQ ID NO: 874219 - DNA, 595 bp, Homo sapiens
gcagaacatatggtggtattattagggcaccaggcaggagctgaagtaggggctcagaaagccaatcacaagaaccaggattcagggtgggcctgtggttttgaatggaagaaaggagaaaagagtaaacaaatgggctgggcacaatggctcacgcctgtaatcccagcactttgggaggctgaggtgggtggatcacgaggtcaggagttggagaccagcctggccaacatggtgaaactctgtctttactaaaaatacaaacattagccaggcaagtgcctgtaatcctagctactggggaggctgaggcaggagagtcacttgaactcgggaggcggaggttgcagtgagccaagatcgtaccactgcactccagcctgggcgacagtgccagactccatctcaaaaaaaaaaaaaaataataataaacaaatggatgcatgaacaagtgcatartaggtagataaatacaccttaggagacagatcaaaatgcagacttgaatttaattggcacagacacttaattatgcatcttgacatctttgaccaaaaacaaaatgccaagaacaaaagcagcttcacgaccaagc

SEQ ID NO: 874220 - DNA, 567 bp, Homo sapiens
agtggaagaaacacaactcaaatgggaagtgtgtttacttttaaagtaattaaaagtaatgcctaaaaagatgtggacttgatatccacctgcctgcccttcagaaacactgaatgaccccagacttttagggctcargtgtataaattctcactggggacctctgaagggattgagttaaatatgctaggtaggctatttgctcttctaagatatataattaaaagaaatactgtctcaaaacaaatgtttacatccttagacataggaacttcaacagctaaggaaagtacaagcagtcttgcaattgttttctgaaggtagaaatgaagcttcttgagcatttcaggaacaaacagggtaagggaaagggaactcttccttatttccagttagctgggaaatgctttccgccaggtgcaatttcaagagctcttagggtgacaagagtatttgaactggtggctttagtgcatggtatcttttattctagaaaaatagagatactaaaattttagattataggtacagaggtccttagaaaacaaaaattcaagaacactccac

SEQ ID NO: 874221 - DNA, 567 bp, Homo sapiens
agtggaagaaacacaactcaaatgggaagtgtgtttacttttaaagtaattaaaagtaatgcctaaaaagatgtggacttgatatccacctgcctgcccttcagaaacactgaatgaccccagacttttagggctcaggtgtataaattctcactggggacctctgaagggattgagttaaatatgctaggtaggctatttgctcttctaagatatataattaaaagaaatactgtctcaaaacaaatgtttacatccttagacataggaacttcaacagctaargaaagtacaagcagtcttgcaattgttttctgaaggtagaaatgaagcttcttgagcatttcaggaacaaacagggtaagggaaagggaactcttccttatttccagttagctgggaaatgctttccgccaggtgcaatttcaagagctcttagggtgacaagagtatttgaactggtggctttagtgcatggtatcttttattctagaaaaatagagatactaaaattttagattataggtacagaggtccttagaaaacaaaaattcaagaacactccac

SEQ ID NO: 874222 - DNA, 574 bp, Homo sapiens
gattcttctccagaatgaatctccatgctttaactgctgtaactttgtaaaagaatagaataagggacacaaaaagagaaagggcaaggaagttgtggttgcgaagacaaaataagaagtgagctacttgaaaatatcaagaaagtttaactcaattatttccgttcaatctggagtttattagcaattatacttgctaagtaaagtaacattttgagtattcactaaatgacaaacatttgtcactggtgattaggaagttttctcaaaatctatataaactgaacaatattattctcatgtgattaatgaagacatgaatctctgagaggttacagaactaataattagaagagttaagatttgaatccaggctgggcacagtgcytcatgcctgtaatcccagtactttgggaggccgaggcgggtggatcacctgaggtcaggagtttgagaccagcctgaccaagatggcaaaacctcatctctattaaaagtacaaacattagccaggtgatggtgggtgcctgtagtcccagctactcaggagcctgaggcaggagaatcgcttgaa

SEQ ID NO: 874223 - DNA, 570 bp, Homo sapiens
aggaactctgtgtgggggctccagccccacatttcccttatccactgtcctagcagaggttctccatgagggccccacccccacagcaaacttctgcctgggcatccaggagtttccatacatcttctgaaatctaggcggaggttcccaaaactcaattcctgacttctctgcaccctcaggctcaacaccaggtggaagctgccaagtcttggggctttcaccctctgaagccacagtctaagctgtatgttggcccctttcagccayggctggatcggctgggacacagggcaccaagtccctaggctgcacacagtatggggaacttgggcctggcccatgaaaccactttttcctcctgggcctccaggcctgtaatgggaggtgctgccatgaaggtctctgacttggcctggagacattttccccatggtcttggggattaacactaggctccttgttacttatgcagatttctggaactggcttgaatttctgcccagaaaatgggttttacttttctatcatatagtcaggcttcaaattttccaaacttttatactctac

SEQ ID NO: 874224 - DNA, 570 bp, Homo sapiens
aggaactctgtgtgggggctccagccccacatttcccttatccactgtcctagcagaggttctccatgagggccccacccccacagcaaacttctgcctgggcatccaggagtttccatacatcttctgaaatctaggcggaggttcccaaaactcaattcctgacttctctgcaccctcaggctcaacaccaggtggaagctgccaagtcttggggctttcaccctctgaagccacagtctaagctgtatgttggcccctttcagccacggctggatcggctgggacacagggcaccaagtccctaggctgcacacagtatggggamcttgggcctggcccatgaaaccactttttcctcctgggcctccaggcctgtaatgggaggtgctgccatgaaggtctctgacttggcctggagacattttccccatggtcttggggattaacactaggctccttgttacttatgcagatttctggaactggcttgaatttctgcccagaaaatgggttttacttttctatcatatagtcaggcttcaaattttccaaacttttatactctac

SEQ ID NO: 874225 - DNA, 635 bp, Homo sapiens
agccattcaacatgtctctaggaagctccaaactttcccacgttttcctgtcttcttctgagccctccaacctgttgcaacctttgtctactacccaattccaaagttgttttcacattttcaggtatcttttcagcagtgccccactctactggtaccaatttagtgtattagttcgttttcacactgctgataaacacatacttgagactggggaaaaaaaagacatttaattggacttacagttccacatggctggggaggcctcagaatcatggcaggargtgaaaggcacttcttacatggtggcagcaagagaaaatgaggaagaagcaaaagtggaaacccctgagaaacccatcagatcttgagacatattcaccctcatgagaatagcatgggaaagacccacccccatgattcaattatctccccctgggtccctcctatgacacgtggggattctgggggataccattcaagttgagatttgagtgggcacacagccaaaccatatcatcttctatgccacaggtactggaatataacttgaagagatcctggatcccaactcacattattttggggaagagaaacaagtagttgaataaacaaaataaaatccagtttatgaa

SEQ ID NO: 874226 - DNA, 573 bp, Homo sapiens
gaaaccaacccaaatatccagaatgatagactggattaagaaaatgtggcacatgtacaccatggaatattatgcagccataaaaaaggatgagttcatgtcctttgtagcaacatggatgaagctggaaaccatcattctgagcaaactatcgcaaggatagaaaaccaaacactgtatgttctcactcataggtgggaattgaacaatgagaacacttggatacagggtggggaacatcacacaccaaggcctgttgtggggtgggggaatgggggagggatagcattaggagaaacacctggtgtaaatgacgagttgatgggtgcagcaaaccaacatggcacatgtatacatatgtaacaaacctgcacrttgtgcacatgtaccctagaacttaaagtattaaaaaaaaaagttttaaaataaaaaaagaagaaatgggaaagagtttttaatagagcaaaagaaggaagaaagctaacatggaaagtcttactttcaaaaaataaaacaggctgggtgtaaaaatgtgtgagggactggtaatttcaatacaatattacataagct

SEQ ID NO: 874227 - DNA, 658 bp, Homo sapiens
ctataaatcactgaaaatattataactcgaaggtaaatttcaaaagaatagggagttctttaggactgctttgaagcaaaattgtttcacactgtgaaatcttttgcttaagcagacgaaagagtgggatcccaactaagagtgacttcaaaatttattcaaggattctcctttcaggtctgcctctcctcctatctttccctctttgagtagtcttatctcaatcccttagtttggtctatcttttcttctgtttcttggtatctgttaaggaataaattttgctctccaaaattcatatgctaacgttctaaccctcagtaccccagaatgtgactgtatttggagacagggtttttacagttaatgaaattaaagtgaggtcactgggatgggctcttatccagtactcaggtagtactatagggtmtggaggcagagaacctaaggctttacattattctttgtaatagtctacattgacttcctagaactaaataaaatataatcatgccccagtaacaagaggacagaggtttcccccattgcaccacccccctccaccttctgcattgcagatgagaaaaggaaagtatctctgattcatcccctcttgcaaccaattgctgatgacaggcgtagttttcatttgcataga

SEQ ID NO: 874228 - DNA, 606 bp, Homo sapiens
tatatgtcaaatttgtccacttatttttaaaaggccaagggcctggaaagagactcttgtgggcactccaacaatggtgaagttttgccttctacagggctggattgaacactagtatttggatctacaggcacactgaattactgaatgaagtgtgaagtcactcaatgtggctattcacarccatagtgcagctcagaatctgatctcagcccagaacccatgtgctcctgattctcatttgagactctttccagcatcacacttccttttttgggataagctttcaaatgtaaaggaaatgccttcaatcctaaatccaagtccaaatccctctccaacatactgagcaatgtctgatattcgtttcccaaaaaacctcacctttctttacacatgtataaaagtggcaaaaaaaaaaaaaaaatgcatggcagagtacaatgacttacaacctgggcctctaaggagaagtgaaaggcttatgtacaagaaagataaaggaaacaactagggatcctgggaagccgtagactcatttctgcctttttgcactgactgaggccgggccccaaggaagatgtgggttgaattgcttccagaact

SEQ ID NO: 874229 - DNA, 493 bp, Homo sapiens
ggttgctcttctcgagaagtatcttagtggtcttctctgtatttcctgaatttgaatgttggcctgtcttgcaaagttggggaagttctcctggataatatcctgaagagtattttccaatttggttccattctccccatcattttcaggtacaccaatcaaatgtaggtttggtcttttcacatagtcccatatttcttggaggctttgttcattcttttacattyctttttctctaatcttgtcttcacactttattttattgagttaacattcagtctctgacatcctttcttctgcttgatcaatttagttattgatacttgtgtatgtttcatatgtttcacaaagttctcatgatgtgtttttcagctccatcaggtcatttatgttctctaaactggttattctagttagcaattcctctaaccttttttcaaggttcttagctttcttgcattgggttagaatgtgctcctttagctcagaggag

SEQ ID NO: 874230 - DNA, 629 bp, Homo sapiens
gtctttttttatctttgttggtttaaagtctgttttgtcagagagtaggattgcaacccctgctctttttttgctttccatttgcttggtaaatatacctccatccctttacttttggcctatgtgtgtctttgcatgtgagatggttctcctgaatacagcaccctgatgggtcttgactctttttttttttttttttttgagacagagtctcactctgttgcccaggctggagtgcagtgccgcagtctcagctcactgcaacctctgcctcccagattcaagcaagtctcctgcctcagcctcctgagtagctgggactacaggcccctgccaccacacacggctaatttttttttgtatttttagtagagacagggtttcaccatgttggccaggctggtcttgaactcctgatctcaggtgatctgctcgyctcccaaagtgctgggtttacaggcgtgagacaccgcacccaggcttgactctttatctaatttgtcagtctgtgtcttttaattgggggcatttagcccattttacatttaaggttaatattgctatgtgtgaaattgatcctgtcatcatgatgctgtctgattattttgcacactagttgatgtagtttc

SEQ ID NO: 874231 - DNA, 607 bp, Homo sapiens; identical to SEQ ID NO: 867414

SEQ ID NO: 874232 - DNA, 607 bp, Homo sapiens; identical to SEQ ID NO: 867415

SEQ ID NO: 874233 - DNA, 593 bp, Homo sapiens
ttgcacatgaatgtacatttaaaaaataataatgaagaaaaatgaaacttgaactccaagtctctgctgcgccccaagcccagcttcctgaaagcctgctccctctcagaggaactcattgagttcctacagttggtctgaagccttctttacacttgggtctaagaaatgtcccagtccttcagttttctaaatcaagctcacctgtatccccatgccttccatcataccctctttacaagggccaatttctttcttcttcttggtttttttttttttttttttttttttttggagacaagtctcactctgtcgcccaggctggagtacagtggcatgatcttggctcactgcaacctccacctcccagtttcaagtgattctcctgcctcagcctcccaagtagmtgggattacaggcgtccaccaccatacctggctaatttttgtgtttttagtagagacggggtttcaccatgttggccaggctgatctcgaactcctgacctcaagtgatctgcccgcctcagcctcccaaagtgctagggttacaggcgtgagccaccgcgcccggcccacaagggccaatttcta

SEQ ID NO: 874234 - DNA, 619 bp, Homo sapiens
taagaccaagccttgaataattctgtagcttccccaggatgctaatgacagaaattagtagtgttatcagttttttcatgaaccatttccaccatatgtcagtgtttctcacttctgccatttgttttgctaaaagcacccaaataaactttgaccatctgaagtgatcaaaagccagcctatatcacttcattctactaagattattcaagtttagttagggaaatatgtcatcaggaccacctgtggcttgatctcttttacttgtggtttgccctgccccttggaaggtcaaatattaacttaaaataatctggtttagtcctggattcctggaactyttctttctaattcagtctctactggacattcagatacggacttatggaaaactgagatcttgtttataatattaactctttgggctagaaatctggatattatttaatagaagtggcttaaatatattagccagaggaaagaactctgtcagctcattttcattatgagctgctcttatgatctgcttcagaactcccttttctacagattttttttaaagcagggtgtggaaaaggaaaagtgatgattaattttattctgactttaagatatgagc

SEQ ID NO: 874235 - DNA, 619 bp, Homo sapiens
taagaccaagccttgaataattctgtagcttccccaggatgctaatgacagaaattagtagtgttatcagttttttcatgaaccatttccaccatatgtcagtgtttctcacttctgccatttgttttgctaaaagcacccaaataaactttgaccatctgaagtgatcaaaagccagcctatatcacttcattctactaagattattcaagtttagttagggaaatatgtcatcaggaccacctgtggcttgatctcttttacttgtggtttgccctgccccttggaaggtcaaatattaacttaaaataatctggtttagtcctggattcctggaactcttctttctaattcagtctctactggacattcagatacggacttatggaaaactgagatcttgtttataatattamctctttgggctagaaatctggatattatttaatagaagtggcttaaatatattagccagaggaaagaactctgtcagctcattttcattatgagctgctcttatgatctgcttcagaactcccttttctacagattttttttaaagcagggtgtggaaaaggaaaagtgatgattaattttattctgactttaagatatgagc

SEQ ID NO: 874236 - DNA, 662 bp, Homo sapiens
taaaggtatgtgagaggtttgaaagaatactcaatcattttaataaatttttccatatctttaaataagaaaataaacacgaaagcaaaaatctgacttagtgtagtgagtgagtctccagctcattcctgtgggcgaacactctgtagtcaacctactaccaaaatatgctgtggttgcctactacctccagaatgaatgaacaaactaatgatgaatgtacaaaggkggaagggccctctcctaaaatagtaacaacttgatactcattggtttttgttttgatttggtttttcttagcttaaatgaaatattaagttgttgacactatgttgtaaatatttgaccaaaacaggcccatccagctttgtggagatatcctttgtgagactctttgctgaagattaagctaaggctgacacagggttaggtgatcttcgttacctcagaccttcccttacccccatcttggcaaagttctgaattcaatcaatttctaaatgcttgtgattcctgggtgccttttccaatccactaagttatccttggttgttggctaatgataaattatttcatttttaagaagcagccacccatcactacatattatagaactatgtgaaaattattttcaatgtcaacttgccataccaacatgtgat

SEQ ID NO: 874237 - DNA, 582 bp, Homo sapiens
aaacatgggaagacaaataatgattggtctataatacaatgaagttgagtccctaaaatctgagttcatatttcagctcttttgattgctatatggcttttgagaagctacacattctcctcaagtctcagttttgtcatctatatatacaatgagtttgcttatatatatatatttatatatatatatgtatataaaagattaagataatgtacataaagcattcgttaaagttccyggcatacaaaaggcactcagtcatgctagataatatacacttatcaggacccacaattcaatcatttgttcattcttaccccaaccctctgctaattggaatatcataaaagataaccagaaactatggtacctatttatcaagagaatggcggattatctcttgggctctgttttcagcaagattcctaatgagatccattgctttccaaagttgctctggatcaggctattaccagcaaataaagagaggagagggcatggccataatatcctgtactattaggaaatcatttcataccatctgcagcccctgattctgtgcaaactttgttcctcaataat

SEQ ID NO: 874238 - DNA, 622 bp, Homo sapiens
gatattcacatggtctcaaaatattactccagaaattgcttaaaaaaatgataaaaggaaaaatgtacctttttataaggaaacatctagcagttacttccttagcgaagtgatcaacttggtttccaaaagtgagacaaactgatattaactgtttcctgacatgaagattatgtagtacttctaccaaaaatgtttaactcaacccaatcatgaggaagcaatctgacaaatcctgattatggatgggacatcttacagcacaagtggactgggctmttaacattttttaagtgctaaagataagaactgttgaaccagagttctacatccagcaaaaataacctttaaaaatcaaagggaaatcaacacattctcaaaaggaaagctatgataatttttcatcagcagacctaccctaaaagaaaggctaaagaaatttctctaaacagaagtgacaaaataaagaatcttggtacttcaggaaggaagaatgaacacagtaagcaaaagtataggtaaatgtaatagactttccttttcctcttaagttttctacattatgtttgatgattgaaacaaaaattatagcatagcctgatgtggttttaaagaaaaaaga

SEQ ID NO: 874239 - DNA, 591 bp, Homo sapiens
cagcaccaaaccacagtacaaaagctgagacagaatgggtatcttctttctttaagaaaaaataaaatggaaagtttaatgaaatgcaatggaatttagcaccatgatgattctatagttactatgtttatgacaataaacctaaaggactaagacgttctcacgtatcttctaaatattaaaaggcatttgaaaacaatttaattataatatttagtgctttaaaatatttaaatgttttatctagaaatgttgtcatataaaatatttgactcacagcrtcctatttattcccttaccaaggctgacaaaagagtggaaaaagaaaaagaaaaaaaaatgagagagaatataagagacatcaatttgactgtatttttccaagctggctctacgcttcaggataatttgctgtaattatttttctattctcatgaaccatactagtgttacaactacatatagtcaagttcatttaaattacttggttaggaaaatttttgttccattacttatttttccacttggtaaaatcgtttttgaaacatgctcaaaatttctccctaaacgttttcatttataccttttact

SEQ ID NO: 874240 - DNA, 597 bp, Homo sapiens
ttaaatttttcccttgaatgtttgataatttgagtctataaaacaaactgattacatagattaaagggaaaagaggcctacgcatttttttttttttttttttttttgagacggagtctcgctctgtcgctcaggctggagtgcagtggcacgatctcagctcactgcaacctccacttcccgggtcacgcgattctcctgcctcagcctcctgagtagctgggactgcaggtgcacgtcgccatgcctggctaattttttttttttttttttttggtatttctagtagagacagagtttcgccatgttaggcaggctggtcttgaactcytgacctcaggtgatccgcccgcctcggcctcccaaagtgctgggattacaggtgtgagccactgggtccggtctcctacaaattttatttgatgcacgcatgtgtgtgggagtcatacaaaatataaaaactcaaagaaatgcccaatggttgcttttataccaccttgaggttacagaaagaatgagagcttgcatctgggcaaaacaggttatggtggcaagacaggttatgggagggggagaagaagaggcctggccagcaaa

SEQ ID NO: 874241 - DNA, 614 bp, Homo sapiens
gaacagcctggggcaaagtgaccgttgagcctaaacatctcctgcagagtggcttccatgtggtttcattccagcatggcacatgtatacatatgtaactaacctgcacaatgtgcacatgtaccctaaaacttagagtataataaaaaaaaaaaaaaaccattaaaaataaaaaaaaaaaaaaaaaaaaaggaaatttgaaggttgtggraggatggggtgagacttaaatactgaagcattcagcataactccttcctttaagtcgagacttggattttcagaaccattgaagcccatttcgttggcctccattctaagtttttattgttgttgttggtttgttaaatttgtagacaaccatgcctaaaataagcttaacctaccaggtagtaagcttgaaataatgctactccataatgaaagtcattgctaatggacaagcagagggttggctcttaaattgcagagttttcaaggactttctatggactccagatgtaattccaaactggtttttcagtaagtcagaaaagacttaaaatggcctatttcccctgttctttgtagcaatttactctaagtactgattattttgtcaagccttttgagct

SEQ ID NO: 874242 - DNA, 554 bp, Homo sapiens
tcagactgtatagccgctatgctccatctggttggctaaaagagaagagaccaaacaatccattgatacatatatatatatcatatatatatataataactctcacctcatatatatatatatatatatatatatatatacgtcaccatatttttttagaaaaacaacaaaagacaaatttttaaaaggaagttttagccaatttatattatatatataaatatatatatacacacatatattktgtatatatatgtgtatatatatatatacacacatatatatatatggtgtgtgtgtgtgtgtgtgtgtgtttggattgttcatatgtgtcttagtctgttttccattcctataacagaatagcagtgggtaatttataaggaatttctttttgtacagttttggaggctagaaagtccaagagcacgcgtatcactatcatcttgtgaggactttcttgcttcataataacatggcagagggtatcacaggatgagaaggcaaggcaagttggccagggagagcttgctttcataataaagccactcaca

SEQ ID NO: 874243 - DNA, 685 bp, Homo sapiens
gtcaccataataagaatgcacagctgtatgtaatttcataagcatattaccctgattaaattttatactagtgaaaggcatcactatatttcacagatctatcttcaggctttaaaccccaagcacacattactagatactatgaatacttaaatgatgttcattacatcaaaaatacccattgacctataaggacttatttttctgaccatgtggcataaagaacaggaatgaagggtagcgaaggttcaggtgaagaaaacagcctttaagccttcttggcactttcaatgccattatttcctgttctaaagctgcagtcaagtttcagcctaccatagcatatagttttaataatttaaaaacacttycttatatttttatcttattttgtcattacaaaaggggaacactgcataatagtgtacatgatataattcttaactccagtgtgattgagagtcttagaaattcatccaaagaaaacttggaaatccacacatacataactagatgctatttataaggaggaccaataacacaggtgagaaagcagcaaactttcatgttccctattcatacagtatcagggcaaaagacagacagcctcatcaaggcatctactgcatagaacttttctttattcttgcttttgttccagcaattgtttaagaaattttctact

SEQ ID NO: 874244 - DNA, 532 bp, Homo sapiens
aaaaaataaatacaatcaattatagaaaaaatgtaatccttgcacatctgatttctgtactgtgattttatccaaagttgctcctaatatctgcaattttaaaaatcttagggccatgtgtgaagtggagatgattgattttttgctkctctaaaccctatattcttaacctcagacttacagtgtcaaagaagaagttacgcaaaacctaggaggaatgacatctagtgcagttgaagaaagtaaaactgcatttggatttgcctcttcccctaagatgatcctatattcttaaactctgaagagacctcccatagactttaagatatattttactttatagaaagtattatagctccaattaagcagctattttgccaaaagccgaacagactcagtaggaactcattgatgcactagctagtcatcagatatttatgtgtgctgggtcaaattaggttgtatgatactgtggccccaatctgaaaatttgagttcaagttccacatttgccactaatgagctatgtgac

SEQ ID NO: 874245 - DNA, 596 bp, Homo sapiens
tatccctgtcttgtgccagttttcaaagggaatgcttccagtttttgccattcaatatgatattgtctgtgggtttgtcataaatagctcttattattttgaaatatggtccatcaatacctagtttattgagagtttttagsatgaagggctgttcaattttgttgaaggccttttctgcatctattgagataatcatgtggtttttgtctttggttctgtttatgtgatgtattacctttattgatttgtgtatattgaaccaggcttgcatcccagggatgaagccaagttgatcatgatggataagctttttgatgtgctgctggattcggtttgccagtattttattgaggattttcgcattgatgttcatcagggaaattggtctaaaattctcttttttggttgtgtctctgccaggctttggtatcaggatgatgctggcctcataaaatgagttagggaggattccctctttttctattgattggaatagtttcagaaggaatggtaccagctcctttttgtacctctggtagaattcagctgtgaatccatctggtcctagacattttttggtttgtaggctctta

SEQ ID NO: 874246 - DNA, 666 bp, Homo sapiens
acattgtttattgaattagaaaaaaactactttaaatttcaaatggaatcaaagaagactccgtatagccaagacaatcctaagcaaaagaacaaagctggaggcatcacactacctgacttcaaactgtgctacagggctacagtaaccaaaacaacgtggtagtgatatcaaaacagacaacccaaacatcatggtactggtaccaaaacagatacatagaccaacgtaacagaaaagagacctcagaaataacacaacacatctacaatcatctgatcttcaacaaatctgacataaacaggcaatggggaaaggatctcctagtcaataaatggtgctaggaaaactggctagccatatgcagaaaaytaatactggaacccttccttacaccttatacaaaaattaactcaagatggattaaagacttaaatgtaaaacccaaaaccatacaaaccctagaagaaaacctaggcaataccattcaggatatagacgcgggcaaagacttaatgacaaaaatgccaaaagaaattgcaacaaaagccaaaattgacaaatgggatctaattaaactaaagagcttctgcatagcaaaagaaactatcattagagtgaacaggcaaaatacagtatgggagaaaatttttgcaatctacgcat

SEQ ID NO: 874247 - DNA, 714 bp, Homo sapiens
atcgtattttgcaagcacataacttgtttaatttcactggttcacagatggagataaattttacctcaggataaattgtacctggagtctcacccatatcttttttagacaatattttgatgagactggacttcagactttgagttgataagagaacgaattaagaattttagggctattaggatggaataaaagtattttacctatgagaggaatatgaagttgggggacccaggggcagaatgcaatggactgaatattttcatgtctctaaaatccgtatattgaaatctcaacctccactgtgaagtatgagaaggtggggcttttggtagagaattaggacttgaggttgaagccctaatgagtaggataaatgcccttatgaaacagaatgcagagagctctcttctgccatgtgaagatacagtgagaagctggctgtctgcaacctggaggagctccctcaaccagaacccaatcctgctggcactctgacctcagacttctaatttccaaattgtgagacataaatrtctgttgtttataagccatccagtctctgatactttgtttcagcaaagtctcttctaagaattcagatttgtcacagtaaaatgctagctttgaagttccaagattaaacaggaagaaaaactgcagagaaactatccaagaggtaagtaaacccaatgtgtttgtcttgtctccatt

SEQ ID NO: 874248 - DNA, 588 bp, Homo sapiens
ttaaaattcaatctttctggacttctgtggctgaagtccacttgcaatttgaaatgccaccagcacctctctttttttcataattgatctgcttccagattcaaaattttgtttcagccataccagcgtctggtgggggacacacaccctaaatcatagcatgcctgtcatctgaccctttctccgccagtctgctggaaatcccgtgcaagcttctttccctaacctgggatcagacagtgtttcccacccaaatttgattaaacgtgccctcccttgctgttgtccatatggcaccaaaatgcgggctgcctttctcatttttccagactgtggggtcagacggtgcccagacaggcaaataatagtcaaattatacaggaagttgtcaaaggagtccgaacacagacagaggaaayctctgaccccacgacaggtcaaaggtctggttcaagctgtctccttcttaatctgtcaccacagccaaattaaaagcagccctttgaatgaaaccatttatggagtctgctttttttttttttttttttgaaagtttttcttttattacaagctgaactttttttttaa

SEQ ID NO: 874249 - DNA, 591 bp, Homo sapiens
cttcatgggaaaaaaatagagaagactctgggatgttatggagtgaactccaaactaaccaggattaccttttctactactggacagaatgcggcctctagatacgaactaaattcatttatagaaaaataaagttaactccatttgttcctttgtgagtttacagtctgaaatgtcatacctactaaacctttgcaataaagtttttcccagtatacagatgagcctcaaggcactctgcaataggacacacctatggattagataataattccctgggaaacagggccagatttctgccatgattatatctcaagtgcatgacatagtaatgtaggatgctgtgatagaggacatacttgctgaacaatgaatgagtaattggatgyctgttctctagctccaaaggaatcccatagcagagtaaaatgaaacttactacatataagagggcatgtaaggcaatgacaaatgaagctagtcggtaccattaaccttctcaaagaagtagccaagactctggagttttgtatatactggctcaaagagtaataaaatgcccctcaacatttctgagccctaattttctca

SEQ ID NO: 874250 - DNA, 644 bp, Homo sapiens
tgagtcgcatgagatctgatggttgtataagcatctggcatttcccctgcttgcactctttctctctgctgccaccctgtgaagaggtgccttctgccatgattgtaagtttcctgatgcctccccagccatgcggaattgtgagtcaattaaaactcttttctttataaattgcccagtcttgagtatttcttcatagtagcatgagaactgactaatatggtaaattggttccacagatggtagggtgctgcttttttaccccaaaatgtggaagctactttggaacttgggaacaggcagaggttggaacagtttggagggcccagaagaagacaggaagatatgggaaagtttggaacttcctagatacttgttgaatggctytgatctaatgctgatggtgatatgaacaatgaaatccaggctgaggtgttctcagatagagatgaggaatggatggaaactggaataaaagtgactcttgctatgctttagcatagagactggtggtgttttgcccttgccctagagatctgtgggacttggaacttgagagagatgatctgaatttatatcttatgtttaaaaaggaagcagagcataaaagtttggaaaatttgtagcctgacactataaaaaag

SEQ ID NO: 874251 - DNA, 589 bp, Homo sapiens
tctagtaactggtgtccccgttttccctaataaggagtggaatagtacaatatgcactgagggctatctctacccagattgcaaagagatgtaacatagcatgtgacattttgagagagttatttgatagaaaactctgtgaagggagagataagatcagaatgtatgtgtgtatgtttgtgtgtgtgtgtgtgtgtgtgtgwgagagtgagagagagagagagagagtgcttatgcaatgggagaagtagtggttgggacagaagtgctccagatggtaagtaagcggagagtaaactcaagagattattctgagttgtgtgatttagcattatcctattgtccttgaggcatctttggcttaaagcctttcacaaacttttcaagttttaagaagccaaactaccaatccctaattcttgtactgttcgcagagcagagggactcttggataccaaaggaagtgtggttggtagtcaccaatacatctgcataagaaccagagattataattgatactaggagatggcaaatgcagtttagaaaattagaataaaaggcacgcttctttagataccagctttgttgg

SEQ ID NO: 874252 - DNA, 589 bp, Homo sapiens
tctagtaactggtgtccccgttttccctaataaggagtggaatagtacaatatgcactgagggctatctctacccagattgcaaagagatgtaacatagcatgtgacattttgagagagttatttgatagaaaactctgtgaagggagagataagatcagaatgtatgtgtgtatgtttgtgtgtgtgtgtgtgtgtgtgtgagagagtgagagagagagagagagagtgcttatgcaatgggagaagtagtggttgggacagaagtgctccagatggtaagtaagcggagagtaaactcaagagattattctgagttgtgtgatttagcatkatcctattgtccttgaggcatctttggcttaaagcctttcacaaacttttcaagttttaagaagccaaactaccaatccctaattcttgtactgttcgcagagcagagggactcttggataccaaaggaagtgtggttggtagtcaccaatacatctgcataagaaccagagattataattgatactaggagatggcaaatgcagtttagaaaattagaataaaaggcacgcttctttagataccagctttgttgg

SEQ ID NO: 874253 - DNA, 587 bp, Homo sapiens
aggtagagatgagaactgaatcctccactacatttcacatggctgatgtgggaagcatttgtacagactaacttctgtttccatacatttcaaactttgtttctcattgactatccacatgcttccagtaccaattgccataagagatgttcatttcttgaactggctctgtccttacaacttcaggatgccaggtgagttgacacagtggggggtagaagtattcctggaagccgtttctacactggaacagttagcaatgactttactatacacggaaacgactgtgaaccacagaartatagcccactcaactcaaactgaaaatgtccccatgtcacctttcacttttgctattttccaaaagtgcctgtggttactccagcatcagcggacataggggaagtcagagtggaaagggacagaggactgaataaattgtggctaaaatagcctgcttttgaagatctcataaaaacatgactatctgaatatattgctagggccctcccagagttctggaaggggccgtacaagttagggcagggggtgctctgcatcttagccatttatgcctagtgttccat

SEQ ID NO: 874254 - DNA, 611 bp, Homo sapiens
tgagagagttatcttacctttttctacacaatacctttttctatttcttgctgtagtttttttcaaactttcagcattttctttgagtcttttatgtcacccaggcatttctttattaaaagatgatggttagtggttagggtaggctcaaccrtcataactgaaaggcctgaaaatagatacaagctcaagcacaagtttaatttttgcttatatcatggtctttgttggtggatcactttcctttcaatgattcaggcactctggattcttccattttatgactcagcaattccttagggctttcttttcaactacagccagccagtggatggtgaaagggaaaggcaggaagcatatctactttctaaacacacacttattttttttgagatgagtctcgctctgttgcccaggttgagtgcagtgggacgatctcagctcactgcaacctctgcctcctgggcttgagcgattctcctgcctcagcctcccaagtagctgggattataggcatgtgccaccatgcccggctaatatttgtatttttagtagagatggggttttgccatgttgaccaggctggtctcgaactcctgacctcaggcagt

SEQ ID NO: 874255 - DNA, 615 bp, Homo sapiens
aatgctttctctaacttaatcatagcttttcatggttcattaaatctaatataatatatatcaatatcctgctgtagcttataagttggaaataatgaattatcttggtatttttatactgctataaaaataagtatgttataatatgatttttcataacacacaaataatcacttgtggaattaaaattatcattaaatgccttaaaaatatattaacatatactttaaatgagataccatctcacaccagttagaatgacaatcattaaaaagtcaggaaatgacagatgctgaagagtatgtggagaaataggaaygctttcacactgttggtgggagtgtaaagtaattcaaccattgtgaaagacagtgtcgtgattcctcaaggatctagaaccagaaataccatttgacccagcaaacccattattgagtatacacccaaaggattattaatcattctactataaagacacatgtacacatatgtttattgcagtaatattcacaatagcaaagacttggaaccaacccaaatgcccatcaatgttagactgggtacagaaaatgtggcacatatacaccatggaatactatgcagccataaaaaagg

SEQ ID NO: 874256 - DNA, 612 bp, Homo sapiens
acctctccctgatttaatactttcctacttttttccagctttctggaacaatgtcaaaagtcattcatttggggggaactcattctctacaagcaaactacaaaggtaagtgtacatgctcagttcctatatccaaagtaaaaaaagcttcccaaagaaagaagaagaagaatgtagaaaacaccagtcaaaaaggaaaatgtattagggcgctgggctaaagagttaaaattatctgaatatatttctgttcaaaaaatgtgcatttctacatgttttcttgtcaatagataagagaccaytgtgaatcaagtgcatgagagacaggcagcatgaccactctttagccatgacaataggcacaatccactggctttgaagaaaaggccagccataaccatggctcttttatattcatgattcaactctaggaatactgtatatagacagtcaaattgctcacctattctcaaatacattcagattacagcccccagtgtgaagttactaagaaatccagatgaaaatgactgttagtcatcagtggagccttcacacttcattcagagtccaagtggaacatgatttatgaatcgcagtatattgtaaagc

SEQ ID NO: 874257 - DNA, 593 bp, Homo sapiens
ttttcaagagcatataaaaagatattgctccttaatatactgactcctctttttcctgttgagagttacagaatatttccagagaaattcctctgatataattttttttttctccagctattggttcctattcacagtatgttgtttccctacaggttttctgggttttaatgtgagctactcattttcccttgaacttcaattgtcggaattctttaaggcctgaatgaacttgaacttcttgagagaaaatgtgcatttatttctgccaattttctaactacattataatcagaaaatattttaaattacacatgtattttgatgttttcaaagaatatatacaggttgtataaattaacagtgacaacaagagaaaaaaactctgaaaaccaatttgtgagtactcagttaaagaaaatctccatgctatgttattctaatgtcayggcaatcatttttgctctttatttctctgtagcaaagtttttcttgttcagcttcttcctaggtgtgtgactgtttctttcttgggatgaccttaggttttatctcctatcccttataacttgtttgtgagtagaaaaattcaa

SEQ ID NO: 874258 - DNA, 661 bp, Homo sapiens
tattcactagaaaaaaaggccttcaccagatctacccttttgacctgggactttctaacttcctgaaatgtgagaaaaaaaatcattttctttataaattatccagtttctagtatcctgttataattaatgggaaatgacaaagacaaaatgcctacatcataaaagaaaaaaattgtataaacaatgtaatggtgttcctcaaggaactagaaaaaataagaacaaactaratgccaaattattagaagtaataaagtaataaagatcagagcagaaatgaatgcaattggagactaaaataatgatgaaaaaaaatcaaggaaacaaagagatggtgttttgaaaagacaaaattgacaaacttttagctatactaagacaaaaagagggaagactcatataggtaaaatcagaaataaaaagaagactttttcatctaatacctcagcagcatgaaagaaccaaagagaatatgatgaacaattaaacaccagcaaattgaataatctagaagaaattgatgattttgttaacacataatgtaccaagattgaattacaaagcagtaaggaatctgaacagaacaataatagcacttaatcagtaataaaaattatctcatcaaagaaaaatccacaatgagatggattcacgtctg

SEQ ID NO: 874259 - DNA, 608 bp, Homo sapiens
aatgcccacaagagaaagcaggaaagatctaaaatcgacaccctaacatcacaattaaagaactagagaagcaagagcaaacacattcaaaagctagaagaagggaagaaataagtaagatcagaacacagctgaaggagatagagacacaaaaaaacccttcaaaaaatcaatgaatccaggaggtggttttttgaaaagattaacaaaaytgatagaccactagcaagactaataaagaagaaaagagagaagaatcaaatagacacaataaaaaatgataaaggggatatcattaccgatcccacagaaatacaaactaccatcagagaatactataaacacatctatgcaaataaactagaaaatctagaagaaatggataaattcctggacacttataccctcccaagactaaaccaggaaaaagttgaattgctgaatagaccaataacagactctgaaattgagtcaataatcaatagcctaccaaccaaaaaatgtccaggaccagatggattcacagctgaattctaccagaggtacaaagaggagctggtaccattccttctgaaactatttcaatcaatagaaaaagagggaatctt

SEQ ID NO: 874260 - DNA, 658 bp, Homo sapiens
tcgcagtgggtggagaaagaataattattgaatctatatggcgaagagttgagtttttaagttgagtgttgaatccacagcttataacaatgatttagtcagaaatattctgagttatgtgtgcttagaggaataatgaatagaactgatggcatttaactaggccatgcagatccactcagttctctcacagcaacatttgtgttggagaaatcctagattcactgaagctggacatgggtgaggaaagatattataagaatgacagcgtttcaggttcttgaaactatyttggtgctagtaaaaagtttcaagaaagacagctgctttatacattgctgtgtcactagtaccttacatatagtaagtgtttgatgaatactatttaaatgagtataaaaggaactttcagaaggctcgtttaccatcagtccctcttcttacgctctactattatattaagacttttagacaatcgaactacataagtactgttatataccattctaaacctcaattctaaactaatgccaaattaaaatatgaaacataaaacttacatttatactgaagttcaaaaaagaacatttatctttatatttctcactgcaaaattctaggtaagataatcaaagcttatattttaccgaagttggtg

SEQ ID NO: 874261 - DNA, 449 bp, Homo sapiens
gagatgggtttcctgaatacagcacactgatgggtcttgactctttatccaatttgccagtctgtgtcttttaattggagcatttagcccatttacatttaaggttaatattgttatgtgtaaatttgatcctgtcattatgatgttagctggttattttgctcgttagytgatgcagttttttcctagcctcgatggtctttacaatgtggcatatttttgcagtggctggtactggttgttcctttccatgtttagtgcttccttcaggagctcttgtagggcaggcctggtagtgacaaaatctctcagcatttgcttgtctgtaaaggattttatttcttcttcacttatgaagcttagtttggctggatatgaaattctgggtcaaaaattcttttcttcaagaatgttaaatattggcccccactctcttctggcttgtagag

SEQ ID NO: 874262 - DNA, 449 bp, Homo sapiens
gagatgggtttcctgaatacagcacactgatgggtcttgactctttatccaatttgccagtctgtgtcttttaattggagcatttagcccatttacatttaaggttaatattgttatgtgtaaatttgatcctgtcattatgatgttagctggttattttgctcgttagttgatgcagttttttcctagcctcgatggtctttacaatgtggcatatttttgcagtggctggtactggttgttcctttccatgtttagtgcttccttcaggagctcttgtagggcaggcctggtrgtgacaaaatctctcagcatttgcttgtctgtaaaggattttatttcttcttcacttatgaagcttagtttggctggatatgaaattctgggtcaaaaattcttttcttcaagaatgttaaatattggcccccactctcttctggcttgtagag

SEQ ID NO: 874263 - DNA, 574 bp, Homo sapiens
ttaataaaacaagtttaaatgatattttccaatattgacgatacagtactcttaatagcctgaattttgaactcacaggtttaacctctaaggctcttcatgtaaataaattaccttcatgctttcaaggcacagaaggaaatttgtgttcacgatactggggtctactgtcgcccctgcatgtcaaaggaattattgggattattagacaaatgtttgttctttgtgtttcccaaagataccctgtacagtgtataaacttgtgytatttctcacttcattttatgatattattcagaaatttacaagatgatgcaatggagttcactcaattattgagttttgtacatagtctaactataagtaaacctcaactcctcatttaacaacaatttcagaaattatacacttacagatagagtgaaaataaattagaggagcccaataataccttttatatccctgcttttctcttttttgtaataaatttattttaaaggtaatgtggcttagtaaaaaatgcatatgcttaggagtgaaaaacactcatttataatccttgctgtagcccttg

SEQ ID NO: 874264 - DNA, 501 bp, Homo sapiens
agaactcactcactgtcatgaaaacagcaaaggagaaatccacccccatgatccaattacctccgaccaagtccctcttctgacacatgggaattgcaatttgacatgagattttggtggggacacagagccaaatcttatcaatcaagaatgttatcaagatactggcccggatttggccctgatctcactaaagttggtgaaactaagagcatgtaaaaggcagcaaccaatactcagtttcctaaagttgaatgtgtacaggatccacattagttggtctcctgtgtttctggattacagagcagcacctcagaagtttcctccagttgrggtcctagaccatgtggtgacctatcaaaggatcagcagtcaagttggcagttttggaggaaaaagcatagcaaagaattgcttgtattttttaaatgtaaatgtaaaattaaattttattttttatagaaataccatgaagttatttataatatttatagttctaaa

SEQ ID NO: 874265 - DNA, 574 bp, Homo sapiens
ttaataaaacaagtttaaatgatattttccaatattgacgatacagtactcttaatagcctgaattttgaactcacaggtttaacctctaaggctcttcatgtaaataaattaccttcatgctttcaaggcacagaaggaaatttgtgttcacgatactggggtctactgtcgcccctgcatgtcaaaggaattattgggattattagwcaaatgtttgttctttgtgtttcccaaagataccctgtacagtgtataaacttgtgctatttctcacttcattttatgatattattcagaaatttacaagatgatgcaatggagttcactcaattattgagttttgtacatagtctaactataagtaaacctcaactcctcatttaacaacaatttcagaaattatacacttacagatagagtgaaaataaattagaggagcccaataataccttttatatccctgcttttctcttttttgtaataaatttattttaaaggtaatgtggcttagtaaaaaatgcatatgcttaggagtgaaaaacactcatttataatccttgctgtagcccttg

SEQ ID NO: 874266 - DNA, 633 bp, Homo sapiens
ataaataagaacatgtggtgtttggtcttctgttcctgtgttagtttgctgagaataatggtttctagctccagccatatgcatgcaaagagcatgatcttgttgtgttttatggctgcatagtattccatggtgtatatgtacattttctttatccagtctatcattgatgggcatttgggttgattccatgtctttgctattgtaaatagtgctgcaatgaacatgcgtgcatgtatctttttttttgggaggggtgcgggggacagagtcttgctctgtcggctaggctggagtgcaatggcatgatctcaactcactgcaacctccatctcccgggctcaagcaattcttctgcctcagcctcccragtagctgagattacagtcgtgtgccaccatacccggctaatttttgtatttttagtagagatggggtttcaccatgttggccaggctggtctcgaactcctgagctcaggtaatccacctgcctaggcctcccaaattgctgggattgtaggcatgagccactgctcccggccgtgtgcatgtatctttataacagaatgatttgtattcctttgggtatatatccagtaatgggattgccgagtcaaattgtattgctgag

SEQ ID NO: 874267 - DNA, 616 bp, Homo sapiens
ccctacaaatcagaagggattgggggcctatactcaacattctaatatctagaaaaccccatagtcttggccctaaagctccttaaaagtttcaggatacaaaatcagtgtacaaaaatcattaggatttctatataccaaaaacagcaaagcytagatccaaatcagaaaggcaagcctattcacaactaccaccaaaaaaataaatacataaaataaaataccttggaatacagctaaccatagaggtgaatgatctctacaatgagaattacaaaacactactcaacaatctctacaaggagaattacaaaacactattcaaagaaatcatagaagacacaaacaaatggaaaaacatcccacactcatggataggaagaatcaatatcattaaaatagctatactgcccaaagcaatttacagattcagtgctatttccatccaactaccaacacattcttcacagaactagaaaaaaactattttaaaattcatatagaacaaaaaaaaaagagcccaaatagccaaggcaatcctaagcaaaaagaacaaaggtggaggcattatgttacccaacttcaaactatacaggttacagtactgaaatagcat

SEQ ID NO: 874268 - DNA, 577 bp, Homo sapiens
ggatacagtaagcaaaacagcatggtaccggtataaaaacagacacctagaacaaagaaacagaagacagaaaccagaataaagccacatatctacagctatctaatctatgataaagtcgacaaaaatcagcaatggggaaaggactccctattcaataaatggtgctgggctagctggctagctatatgcagaataataaaactagatcactggccaggcatggtggctcacgcctgtaataccagcactttgggaggccgaggtgggcagatcactaggtcaggagktcgagaccagcctggccaacttggtgaaaccccgtcactactaaaaatacaaaaattaactaggcatggtggtgggcacctgtaatcccaactactcaggaggctgaggcaggagaatcatttgaacccaggaggcggaggttgcagtgagccgagatcatgccattgcactccagcctgggagacagggtgagactttgtctcaaaaaaaaaaaaaaaaaagaaaccccaaaaaactagatcgctaggttttaccatagccaaattttgcctcacaatggatgaaa

SEQ ID NO: 874269 - DNA, 552 bp, Homo sapiens
gtcctgcctttcacatgtggggattattacaattcaaggtgagatttaggtggggatacaaacacagagccaaatcatatcactccgtctccaaaaaaaaaaaaaaaaaaaaaaaccagaaggaggtggaggaggaggagaaattcctgtcatgacaacatggatgaacctgggaggaaatcatgttaagtgaaataagccaggcacagaatgacaaatactgcataatttgactcaygtgaaatctatcatagttatcttacggaggtagagggtagaatggtggttaccagggactgggttggttgagagcagagaaggtgttggtcaaatgatacaaaatttcaatgagataggaggaataagcttaagagttctattgtacaaccttgtgactatagtttcaaaatattgtaattttgtaaaaagctaagatagtggaaataaagttctcactaaaaaaaataataattatgtgagataatgaatattgctactaagtagatttagtcattccacagtgtacatatacctcaaaataataagttgtgc

SEQ ID NO: 874270 - DNA, 600 bp, Homo sapiens
cattgatggaaatggttctcataatctggtgaaatcatttaagtggaatttacatagacattctgtagttgctctttcttaagaaatttgaaataggtacttttggacttcaaaacctttagccaaatagttaaaggtgtgataaaaacaattttacattttttctatgtcatctgtatatggtgctttatttataacactgatatcaaattgcccattcattgcttattgttctataccaggaatagcatacacctagattaaatgctaccacttcctctccaacctaaaactctacttcagcatccttttcaaaatcagctagaccactgaccctgcgaagccaccctggctgtcctcccaggtcctgatgggtgggaaactgccctgaggaggctgggaggggagggcatgatgctgaacttctgtgcagcccccaactgcaagcggaggagcatgtggytggacctggccttcttcaagttcctgcagtatcgggccagagcccagaagtgagtgaagaattgttggagagcagacttagaagataaaatgcctgaccaactaaataaaccttattgatcatgtgccaaatacttt

SEQ ID NO: 874271 - DNA, 657 bp, Homo sapiens
gggagagaaaaagtcccacatattgagcctagaaagtaattctagaatctgctccgggaggttggggggaagcagatgaataataaagttctgcaacagaagtttttagaaatttcagaggtattaattagaaccttgactctagtcttttcaaagtctgagaaatggcaatgagggacagcctagtgaagaaattaaaacattttaccccccaaatatatttctttgwtatattttgaaatggctgcttcttggccagtaggtagaaatggcctcacaaagctgtcttaagtggggaaaatttgcatctctagagaatctccattaatccagccatgcccccttccctttctgttccttttcccagatccagcagaaattgagagtctgaaacctttaaaagtctgaaaagaaatatttatcatatgttctctctgaggaagttttcatctacatagcaaggccacctttgctagcaatccttttctctcgcttcaaataacttgttttaccagcatctaagcccccattctttctataacctaaaaatggtatatacatttctgtaactcattgggaagttgggtcttcgttctaaagctcctgtgtatgcaccttaaataaatttgtatacctcttctcctattactcaatctg

SEQ ID NO: 874272 - DNA, 647 bp, Homo sapiens
catttgtcaattttgtcttttgttgccattgctctgggtgttttagtcatcaagtctttgcccatgcctatgtcctgaggggtattgcctaggttttcttctagggtttttatggttttaggttttatatttaagtctttaatccatcttgagttaatttttgtataaggtgtaaggaaggggtctattttcagtttcctgcatatggctcaccagttttcccaataccatttattaaatagaaaattttttccccattgcttgtttttgtcatgtttttcraagatcagatggctgtagatgtgtggcactatttctgaggcctattttctgttccattggtctatatatctgttttggtaccagtatcatgctgttttgattactgtagccttgtagtatagtttgaagtcaggtagcatgatgcctccagctttgttctttttacttatgattgtcttggctatacgggctcttttttttgtttcgtatgaaatttacagtagttttttctaattctgtgaagaaagtcaatggtggcttgatcgggataccactgaatttataaattactttgggcagtatggccattttcacaatattgattcttcctatccatgagcatggaaagtttttccatttgtttg

SEQ ID NO: 874273 - DNA, 621 bp, Homo sapiens
ctttgttgcttttgatctttgttggtttaaagtctgttttatcagagactaggattgcaacccctgcctttttttgttttccatttgcttagaagaccttcttccatccctgtattttgagcctatgtgtgtctctgcacatgagatgggtttcctgaatagattacactgatgggtcttgactctttatccaatttgccaatctgtgtctcttaattggagcatttagcccatttacatttaatgttaatattgttttgtgtgaatttgatcctgtcattatgatgttagctggttattttgcttgttagttgatgcagtttcttcctagtctcaatggtctttacaatttggcatgttttggcagtggttggtaccattttttcctttccatgtttagtgcttcctttaggagctcttgtagggcaggcctggtggtgacaaaatgtctcagcatttgyttgtctgtaaactatttatttctccttcacttatgaagcttagtttggctggatatgaaattctgggttgaaaattcttttctttaagaatgttgaatattggcccccactctcttctggcttgtagagtttctgccaggagatcagctgttagtctgat

SEQ ID NO: 874274 - DNA, 629 bp, Homo sapiens
cacatttcaggtacttgtcagaataccacttcatactttttcccatataccagactcttgtgagaatataatcaatatatttaaaatgtcttgggtgatattaatggaaacataaattctgagtaagaaattcagtggttaagtgtaaaatgtttattttagtgaaatacaagaaggtgagcaatttccaatttccgtttaacttgacttattaaaaataagtctcattcacattcttctagtattattgtatactgctataaaatttaaaccagaaaagtgcttctccttgtcagtagctatctgcccaaaaaaatgaatatgacaattccagatctcatctgccatctctaagaaagccacttggaaatgttagrtaggtcccatgggtcctgatccagggatctgtccctgggtccccatcaggctcggctgcaggcagttgcctaaggcgtcttccgccttcagccacgctgcaatccttgctccaggcactgcggcaggttctctccatgcccccaggaagactctccaaacccgaccagctcatttctccagccccggaggatccagacgccctggcagctcctgggctccagaaccgagaagaggatgctgcctccaatccc

SEQ ID NO: 874275 - DNA, 648 bp, Homo sapiens
ctttcttttatcctcttccattcttttttattatttttttttaatttttatttatttattttttattatactttaagtttctagggtacatgtgcacaacatgcaggtttgttacatatgtatacatgtgccatgttggtgtgctgcayccattaactcgtcatttacattaggtatataacagtatcttcaagacaaggggaggaagggaagacacactgcaatatacatctggacatattttaaagatattcacgatagaagaaagcacaaattaatgaataaacaattggatagatgacgtgccttgtttgatgtgagaacacttaataaaaggttaaaattaatgagctaagggaagaaaacatggctaaaagggctggtagctctgtaagggtggggacagggcggggaacagagtcagggagacaaacaggatgctgggaggtgagaaataagggtggggagtagtgggcaatctcaagaggaactaacaaggccgttgcttatagttacccagaaaacctacgaacaataacagacaagcagatgcagctcagaaagaaacagcggcgagctagaagcccctcctgctgagacaacgcaccagacacgttaatggtgtttgggggctgcaggtcatctctc

SEQ ID NO: 874276 - DNA, 594 bp, Homo sapiens
attcattttataatgatggtgggtttgttacgcaacctttatatacagaagagaatatattacttgaaagtgtacatagtcttggtttttgggaaacaaataatttttgcatcattctggactgcagaaagcattaarggttagccagaaaaatctgggtttagaaaatggttctgctaatacattgactgagagaacttcacgtcaccaaataggagtctttagaagaagaataataatacattccttgaggaacagttgtgagaagataacctaagtgtaataacattataaaataactatctcagggaaagaaagccttaacattttcatgtaattagttttgtgtaatattgctaaatagaaaaattgctaccttcaaaatatagaaaaatacctctcttaggaagatgtaataaagacataataaaaaactttaatgaatgtgaaacacaatatagcacaaaaagcaaatatatagtgtttggactatataaaagaaagtgagaattctaggttatgtcagcaggtaaagtccctgtattttatgctcatacctgcaggttgcattcccctcccagctggcatggaagg

SEQ ID NO: 874277 - DNA, 704 bp, Homo sapiens
aacactattttctggatattttagctcctatatgtcactggagataaaaggcaggtcgataaaattcaagcagaagttaggttgagatttctgccaatagacctacagacatagccttagtaattttttctccaaactttcaatgtttattctgtacatttaagataaaaagcaggaagaagttcatcctaaaaatgtaattaatattaaagcaagaagaaattcatgctatatgttaaatttaacttaaatcaatttgaaagaattggaaaccwaatgaaaataacacattaagaagctggactaatacaggatcccaaagtctctctaattgcttagtatattttcaaataataataaattaattacatttaaatttctgtgaacttcgtttgataattgatacagttgagtccagaaacgaatcattttgtccacctcaattgcattatatttttgttcttgatggttgtcagcagttacagctttgtgaagaaagtgcatcttgttttactttaactgtgtgtatgcagtttgtatagactgataatataattgatgtctatttcagcattgatgatggaacatcatcaaagtcatatccttttctttgtcactgtctttaaccataacactgtaagaaaaacacccctcttcttgtcttcctattatactgcatgccattaaaagtgaaagaaatgcta

SEQ ID NO: 874278 - DNA, 654 bp, Homo sapiens
cagaaaatgtgtttttgttttttatcacattgtcaggctgcaaattttccaaacctttatgttctgattcccttttaagcataagttccaattttagatcatctctctcaagttcaaggttcacacatcactagggcaggggtgaaatgtcacctgtctctttgctaaagcataacaaaaatgacctttgctccagttcctaataagtttctcatctccatctgggaccaccttggcctggacttcattgttcacatttctatcagcattttgktcaaaaccattcaacaagtctctaggaagctgcaaacatttccacatctttctgtcttctgctgtgccctccaaactgtcccaacctctgcctgttaccaagttccaaagtcacttccacattttttgatatctttatagcagtaccccactctctgtggtaccaatttactatgttagctggttttcacactgctataaagaactgcccaagactgggtaatttataaagaaaggaggtttaattaactcacagttctaaatggctgtgtaggtctcagaaaacttacaatcatggcagaaggcaaagaggaagcaatcttggatcttctcacatggtggcaggggagagaagagtgagtagcgaagggagaagaccct

SEQ ID NO: 874279 - DNA, 602 bp, Homo sapiens
gctttgtaccaagatgtttcaataagctcttctagtgcccatggacatcctaggattatgaacatgtatgctgaactgaaatcatatgatatttaatggcacctagaggaatctcagttcccaatgttgtcccccaagaacacctgaaattctrttaatgaattatcctgtaataagatacaatgcttcttcacttcctcttttaaagatgtcaggtctttattgtgttcagtcctttctctgagttacatttaagagacatctatacagtgggtaagaagtcaatcatgatggtaaggagactcaaagctatgtaggacagaatagagtaagagtttgtcaaccttagcaccactgacactcaggactagataattttttgttatgatagccatgcattattgaatatttagcagcatccttggcttctactcactagataccagtagctcccctttcccagttgtcccaaccaaaaatgtcttcaaacattgccaaatgcaccttgcagtgcaaaattcctcctgttgagaaaccgtggtaagcaaagattccaatattcacagaatcatctgaagaacttgtttgaaagtgctgactcc

SEQ ID NO: 874280 - DNA, 580 bp, Homo sapiens
gtgggataggcagggtctgttgcagtggaattattttcttattattaccttttattaggatgggaatggcatctttctttcatgagcctcatttccaggaatattggggaaaacccatatattctccttgagtccaaggtaaacttcaggccaaggccagaaaaaggatagcaattcagaggaagatatacaacccagatcaatggtcaaaaatggaactcctaagctgaaagctttattaggccacctacaacatccatttcagacacagttctcagccaagggaccagatcccagcctctgtgatttattagagakgaaaagaactgaaacaatgcagcaaaaggcaactggaaaagacagctcttttatcataagaataaattcatgttccgcaaatcatttaaacatatttttaagaattatccgccccttacctaatacaattaaagccttaattaattacctaagaggtaaacaaagagatgtactgcttcactgagactcaaaaggacatctagattcccctcctgcattaatactgcttaacaaatatccatgagttcaattgttttgattt

SEQ ID NO: 874281 - DNA, 599 bp, Homo sapiens
ttgcctcctctcttatttccttgagcagtggtttataaaataaacggtattcaaatagaaagagaggaagataaattgtctctgtttgcagatgacatgattgtatatttagaaaaccccatcgtctcagcctcaaatctccttaagctgataagcaacttcagcaaagtctgagtatacaaaatcaatgtgcaaaaatcacaagcattcctatccaccaattatagagagagagccaaatcatgaatgaactcccattcacaatggctacaaagagaataaaatacctaggaatacaacttagaaaggatgtgaaggacctcttcaaaagattactctttatrccttctgtacatcgtctctgtttttaaaaaatcagaaattggctttgcacactgaagccacactgatgacttcaattaccaggctcacatgtattttggaatcatgacactaatggaatggtggacattcttagggattatttggaagaaatgagtactaacaccaatattcacaagttgacttaaggtttatgtattcaactgtaggaaatgtagctgtgccctgggaaaactggatcattactaaggtaaaaa

SEQ ID NO: 874282 - DNA, 599 bp, Homo sapiens
ttgcctcctctcttatttccttgagcagtggtttataaaataaacggtattcaaatagaaagagaggaagataaattgtctctgtttgcagatgacatgattgtatatttagaaaaccccatcgtctcagcctcaaatctccttaagctgataagcaacttcagcaaagtctgagtatacaaaatcaatgtgcaaaaatcacaagcattcctatccaccaattatagagagagagccaaatcatgaatgaactcccattcacaatggctacaaagagaataaaatacctaggaatacaacttagaaaggatgtgaaggacctcttcaaaagattactctttatgccttctgtacatcrtctctgtttttaaaaaatcagaaattggctttgcacactgaagccacactgatgacttcaattaccaggctcacatgtattttggaatcatgacactaatggaatggtggacattcttagggattatttggaagaaatgagtactaacaccaatattcacaagttgacttaaggtttatgtattcaactgtaggaaatgtagctgtgccctgggaaaactggatcattactaaggtaaaaa

SEQ ID NO: 874283 - DNA, 599 bp, Homo sapiens
ttgcctcctctcttatttccttgagcagtggtttataaaataaacggtattcaaatagaaagagaggaagataaattgtctctgtttgcagatgacatgattgtatatttagaaaaccccatcgtctcagcctcaaatctccttaagctgataagcaacttcagcaaagtctgagtatacaaaatcaatgtgcaaaaatcacaagcattcctatccaccaattatagagagagagccaaatcatgaatgaactcccattcacaatggctacaaagagaataaaatacctaggaatacaacttagaaaggatgtgaaggacctcttcaaaagattactctttatgccttctgtacatcgtctctgtttttaaaaaatcagaaattggctttgcacactgaagccacactgatgacttcaattacyaggctcacatgtattttggaatcatgacactaatggaatggtggacattcttagggattatttggaagaaatgagtactaacaccaatattcacaagttgacttaaggtttatgtattcaactgtaggaaatgtagctgtgccctgggaaaactggatcattactaaggtaaaaa

SEQ ID NO: 874284 - DNA, 640 bp, Homo sapiens
atatggagattgcactgttgtattcaaagggaggaggtgagaggttctggtataccagaaaatgggagcctcccttctgagctctgtatgcagataggacagtgtatgccattaagtgtgtgggtcttctggaaagaaatagtttgggctttgttcgttctcttcctaagtggtctggtggaaagcctacttagaaggggctaccaatttcttctaacgtaagggatgacaaatggcgatgctggttcttaggggctgaagaacctcgacttcttcattcagggttagcaaggmtcttcaggattgaggtctttgcaggtctccaagcctgatgctttcagtatgtgtagtttgtatcactcacaggctgagaacatgggaaagggaaccaggcttagggaggctttctttgtatgttgtttacccttgtcacacaagtaggttcttattgttgttcattccctgagggttcagttcattatctcaggcattacaagttgttttgtttttagtccctttacattttatcacctggacagcctgtcttgaagttgttccagactccagagggttttggacatattaaattttctcatcaatttttttccctccccttcccttccctttctcgctttgttgc

SEQ ID NO: 874285 - DNA, 620 bp, Homo sapiens
attgcccatcataattaaaatgatgattaccagattttcagtttcaagacagtatatatttccagcatctctcatttcatttcatttcaagacagagtcttgctctgttgcccaggttggagtgtagtggcatgatcatggctctccatagcctcgatcttctaggcgcaagcgatcttcccacctcagcctcctgagtaactgggacracaggtgcacaccatcacacccagctaattttaaattttttgtggagacaggatctctctatggttcccaagttggcctcaaacttctgggctccagcaatcctcctgcctgggttccccaaagtgctgggacttcaggtatgagccactgcacccagcccaacctctctcatcttaaacatcacccaaacacttaaggaaaaaagaatcagaaatagaaagtcaaccttcatccgttttggagacagttttaactgtgaactaaatcataagatggcagaaagcaatagagaagtagatgggtcaccagagagaagccgggacacagctaagtgcttccaaagggaggcactgatgagaagtgaattggaaatgctcacagaatccagacaggctaggagcacaagtgcc

SEQ ID NO: 874286 - DNA, 639 bp, Homo sapiens
ctgtctcaaataaggacaatgatgttatgctgttatatataatcttttaagtatttcaattagtattttgtagtgggatcattttatttcacattagatcccttgctaactataaaaatgttataaatccaaagtgtatattaaagaaactcaaaggtctatgaaattaatgtctcattttatagcagcatgtaaaataattcatcagctcagaaakagctgcctacaaaatgatatcatcattatcttctaagttttcccatattattctcttccttcaggcctaaaattaggtaaattttataaactttaattttccaaaaattctcatgaaaaccacagttcattctgttagcaagtatccctgggaaatgatacctgtatcagccaagatctaagcaggaaatcaaaaaccactttaaatctaaaacagaaactttaacaacagagaattggtggcacaggcaatgcgagagctgctgagagccaaacaggaaagtgaggcagcccagacactagcagcagcagaaagccactacccacctccccaagctacaggcataaagggagatggcagacattcggatcacctggaggaagctgggggccctggcttctcccaacctccaaccttccaga

SEQ ID NO: 874287 - DNA, 639 bp, Homo sapiens
ctgtctcaaataaggacaatgatgttatgctgttatatataatcttttaagtatttcaattagtattttgtagtgggatcattttatttcacattagatcccttgctaactataaaaatgttataaatccaaagtgtatattaaagaaactcaaaggtctatgaaattaatgtctcattttatagcagcatgtaaaataattcatcagctcagaaagagctgcctacaaaatgatatcatcattatcttctaagttttcccatattattctcttccttcaggcctaaaattaggtaaaytttataaactttaattttccaaaaattctcatgaaaaccacagttcattctgttagcaagtatccctgggaaatgatacctgtatcagccaagatctaagcaggaaatcaaaaaccactttaaatctaaaacagaaactttaacaacagagaattggtggcacaggcaatgcgagagctgctgagagccaaacaggaaagtgaggcagcccagacactagcagcagcagaaagccactacccacctccccaagctacaggcataaagggagatggcagacattcggatcacctggaggaagctgggggccctggcttctcccaacctccaaccttccaga

SEQ ID NO: 874288 - DNA, 639 bp, Homo sapiens
ctgtctcaaataaggacaatgatgttatgctgttatatataatcttttaagtatttcaattagtattttgtagtgggatcattttatttcacattagatcccttgctaactataaaaatgttataaatccaaagtgtatattaaagaaactcaaaggtctatgaaattaatgtctcattttatagcagcatgtaaaataattcatcagctcagaaagagctgcctacaaaatgatatcatcattatcttctaagttttcccatattattctcttccttcaggcctaaaattaggtaaattttataaactttaattttccaaaaattctcatgaaaaccacagttcattctgttagcaagtatccctgggaaatgatacctgtatcagccaagrtctaagcaggaaatcaaaaaccactttaaatctaaaacagaaactttaacaacagagaattggtggcacaggcaatgcgagagctgctgagagccaaacaggaaagtgaggcagcccagacactagcagcagcagaaagccactacccacctccccaagctacaggcataaagggagatggcagacattcggatcacctggaggaagctgggggccctggcttctcccaacctccaaccttccaga

SEQ ID NO: 874289 - DNA, 629 bp, Homo sapiens
ctaataaccccatttgatgtgtgaaagtacatcatcatgttctttagaagcttcaaagatttttaaaaatacttgagagctaggagaatcactgaggaaatgatcataaaaagaaatctgcccaccaagatgaagagtggcccaggattaaggccagaggaagaaagccagaygccctggggtggataggactagaagcttcacagccctcgttgcagtcctgtgacttctttcccagtacaactctgtaaggaagatgagcacgttctctgtcctttctgagtaaaccaaagcacaacatccaaagggcatcccttgcagcaacagaagcagtgcttccttctgcatggaagcacaacgagggcatgcaaaacatttgcaaacctacacgatgcttcctctgagacacctcgcaacagcacttgtaacaactgagtcccaaatcacgttaagaggtaataagagaatacctccctcaaaacaccagatcaccttgaaaacactagagagcctcaagatctcttcctacctgaacaatcttgagatttccagagctaatgcacaatgacaggcgctgattcagcaaggagtgccacctttgttagacaccttctccttgctctaggtgc

SEQ ID NO: 874290 - DNA, 629 bp, Homo sapiens
ctaataaccccatttgatgtgtgaaagtacatcatcatgttctttagaagcttcaaagatttttaaaaatacttgagagctaggagaatcactgaggaaatgatcataaaaagaaatctgcccaccaagatgaagagtggcccaggattaaggccagaggaagaaagccagacgccctggggtggataggactagaagcttcacagccctcgttgcagtcctrtgacttctttcccagtacaactctgtaaggaagatgagcacgttctctgtcctttctgagtaaaccaaagcacaacatccaaagggcatcccttgcagcaacagaagcagtgcttccttctgcatggaagcacaacgagggcatgcaaaacatttgcaaacctacacgatgcttcctctgagacacctcgcaacagcacttgtaacaactgagtcccaaatcacgttaagaggtaataagagaatacctccctcaaaacaccagatcaccttgaaaacactagagagcctcaagatctcttcctacctgaacaatcttgagatttccagagctaatgcacaatgacaggcgctgattcagcaaggagtgccacctttgttagacaccttctccttgctctaggtgc

SEQ ID NO: 874291 - DNA, 645 bp, Homo sapiens
gcctgttactcagttccaaagttgcttacacatttttgagtatcttttcaacagcactcccagtaccaatttattgtattagtctgttgtcatgctgctgataaagacatacccaagactgggtaatttacaaaataaagaggtttaatggacttacagttccaygtggctgaggaggcctcaaatcatggcagaaggtgaaaggcacatctcacatgggggcagacaagagaagaaagagagcttgtgcagggaaactcccgttggtttttgctgttgttgttgttgattttttttttttttttttttgagacagagtctcactctgttgccaggctgaagtgcagtggtgcaatcctggctcactgcaacctctgcctcctgggttcaagtgattctcctgcctcagcctcccgagtagctgggactacagatgcataccaccacacccagctaaactttgtatttttagtagagacagggtttcaccatgttggccaggatggtctcgatcttttgaccttgtgatccacctgcctcagcctcccaagtgctgggattataggcatgagccaccacacctggctgaaactcgtgttttttaaaccatcagatcacgtgagacttattcactatcacaagaat

SEQ ID NO: 874292 - DNA, 645 bp, Homo sapiens
gcctgttactcagttccaaagttgcttacacatttttgagtatcttttcaacagcactcccagtaccaatttattgtattagtctgttgtcatgctgctgataaagacatacccaagactgggtaatttacaaaataaagaggtttaatggacttacagttccacgtggctgaggaggcctcaaatcatggcagaaggtgaaaggcacatctcacatgggggcagacaagagaagaaagagagcttgtgcagggaaactcccgttggtttttgctgttgttgttgttgattttttttttttttttttttgagacagagtctcactctgttgccaggctgaagtgcagtggtgcaatcctggctcactgcaacctctgcctcctgggttcaagtgattctcctgcctcagcctcccgagtagctgggactacagrtgcataccaccacacccagctaaactttgtatttttagtagagacagggtttcaccatgttggccaggatggtctcgatcttttgaccttgtgatccacctgcctcagcctcccaagtgctgggattataggcatgagccaccacacctggctgaaactcgtgttttttaaaccatcagatcacgtgagacttattcactatcacaagaat

SEQ ID NO: 874293 - DNA, 590 bp, Homo sapiens
tttccctacaatcactgtgctctccgttcctcaagtgcatgggttctctctccatgccatgaggctgttgccagaagatggaggagggctggtgatagtaattcaagactgtctttcctaccttcttcacagcatctttcagcaatataaagttaaaaccaggtacagttattgcacacataatttttgtttttttatgaagggttttttttgtgtgtaggtagttgttaaatttggtgttcctgcagggaggacgatcagtgaaagcwtctattcagccaccttgctccgcctccaccaaaagcttaacattttattggaatatcctgtgtatatttggtttagggcatgtgtataaagtggcattgtgtaaaagtagaaggaggtcctgtcatccatgattactaaaataacagcattgtgaaataaagtttgggggcttgatcaatcttcaggggaccacataacagaaaaacaggaagttgatcatgtaatccatccattctaaaagtttgcaaacattagaggtttgtttaaatgcagattgcaagttttcatcttagccaactagcaaagcaaagcaaagtgaa

SEQ ID NO: 874294 - DNA, 590 bp, Homo sapiens
tttccctacaatcactgtgctctccgttcctcaagtgcatgggttctctctccatgccatgaggctgttgccagaagatggaggagggctggtgatagtaattcaagactgtctttcctaccttcttcacagcatctttcagcaatataaagttaaaaccaggtacagttattgcacacataatttttgtttttttatgaagggttttttttgtgtgtaggtagttgttaaatttggtgttcctgcagggaggacgatcagtgaaagcttctattcagccaccttgctccgcctccaccaaaagcttaacattttattggaatatcctgtgtatatttggtttagggcatgtgtrtaaagtggcattgtgtaaaagtagaaggaggtcctgtcatccatgattactaaaataacagcattgtgaaataaagtttgggggcttgatcaatcttcaggggaccacataacagaaaaacaggaagttgatcatgtaatccatccattctaaaagtttgcaaacattagaggtttgtttaaatgcagattgcaagttttcatcttagccaactagcaaagcaaagcaaagtgaa

SEQ ID NO: 874295 - DNA, 669 bp, Homo sapiens
caacaaaatactagcaaaccaaatccaacagcacatcaaaaagataacacacctgggctgggtgtggtggctcacacctgtaatcccagcactttgggaggccaaggcaggcagatcacctgaggtcaggagttcaagaccagcctggtcaacatggtgaaaacccatctctactaaaaatacaaaaattarccaggtgtgatggtgggcgcctgtaatcccagctacttgggaggctgaggcagaagaattgcatgaaatcaggagatggaggttgcagtgagctgagatcacaccactgcactccagcctgggcgacagagtgagactccttctaaaaataataataataataataataataataataataataataataataacaaaaaccaaaaaaaaccccaccataatcaagtgggatttataaaaggggtgcaaggatggttcaatatatgtaaatcagtaaacatgatacaccatatcaacagaatgaaggacaaaaactgtatgatgaattcaatagaagtagaaaaagcatttgataaaattcaacatcccttcatgatagtctcaagaaattaggcaatgaaggaacatacctcaaattaacaaagggcatatacaacaaatccacagctaacatcatactgcatggagaaaagtgga

SEQ ID NO: 874296 - DNA, 583 bp, Homo sapiens
tattaatataatgacaccagtcatattggaataagggtccctccttctccagcatgatctcatctgaactaattccatctgcaagaccatctttccaaatatggtaacattttaaggtatttggggtcaggacttcaacgtatcattttggaagacaaaataaaaccattaacactaggcaggccaaaattttgaaaaaatcaacagtctccttctttagtgatagttttcagaggtagaggaactagattaagattgaaaagagaaaaaaataaagttttcctgtttgctaaagtaaggaagatttaagcacagtatttttatgattaacagacctttcaaaataacaaagatttcagttttacaaactaattaattgaatttttatttcattaaagttcattcttcatttcttaatamtttttttagttgtcttaagcatgttacattttattagtaccataaatgccttttccatctatattttcaaagtttttctttaccctaatcccacactgcacagggatgtaaaaagggctttagactttcaagattccataggacttaaatagataaccaataa

SEQ ID NO: 874297 - DNA, 603 bp, Homo sapiens
agtggctgctatccaggatgactgtgttgctgcagtctttgagtggttggagcgctgtaatgtctatgttaatagctgggaaatcgcagtagcagcaaccagaccactccaatggaacaatccaagttggggtaagtttgattgagcaaaaaagtcatgctgactgtgtgatgaagaggcagaactggtaacagtgacaggccctgcagtcagcagctgtggattttatgtgcagggcagactgatytggaaaatgggaagagctgactgccaataacaccttggggggaggtttgttcagtgcatctccctactccttgtatacctctgatgacatgcagaagcttaggaaataaaacacacttgtaacatcacagggtgcaagtaagtacatgtggatgccagtgtagagagaagcgaaagctagttttcattgcaagaatccaaacagagtaacagggctttgtccactgtctccagtccatggttccctggtgttcctagagtcctttttaaaaaaaaaaaaaaaaaaaaaacacgggctggaccatagttaaactgctgcagcagagcatagatcatccatcagttagctattaattt

SEQ ID NO: 874298 - DNA, 699 bp, Homo sapiens
tacttaacctctctgagcctcagttttctgatcagtaaaatggaatcatagtagccacctcactgatgtcctctgagaactgaattttaagcacttagtgggtgctgtttgaattctctttaggcttgtggctccaggctttcctactggtctttctcagttcctacctggctatatgggttgttctctgtttgcccctccagatccattgtcttagacttttctgccctgccctgtaccattagaggctgaaagctatgaacagcattactcagaggctccttcgtcctctctctggctttcagttgggttcaaccaataaggagagacagtaggagattagacagtgagaaaagagaggttgagatattcctatccccagcttcttcctcctgtgacagtgcctgggtttgtcccatgaagttcctgcacgaagcactgttccatatcactataattcacttccctgtctccgcctccttgggccagggccatcactgtttgccactgttgcttgttcctggctggcttccttgactgygcctccatcttcatcaaaagccccttcattaagttctctttgaggtgtgccagctgttcctgcctgaaccccgactgatgtgggtgttcgcatatactgtttgctatgcctgaaacctttatacctcacaccactccccagcccttttacccccaatt

SEQ ID NO: 874299 - DNA, 576 bp, Homo sapiens
ttactctcctcattgtcctttgaggtagtgtcaagttagtggattatctctgttttcaaatgggcaaatatgggcacgcaagataaagttaattaagcaagagcacatactgaatcgtaagatgcttggaactagactttggaattcttcacctttgactccctttaaaaatttaatgattatttacatattgatcaacaaaaacaattttattgagagttcgttaggaataagatgggctgctgytgttaggtgtttctttccttaaaggcttgagggaacactatttcctttttgagaagggtcactttgtatgtttttgtttgtttgtttgtttgttttttgagatggagtttcgctctcattgcccaggctggagtggaatggtgcaatcttggctgactgcaacctccgcctcccaggttcaaatgattctcctgcctcagcctcactagtagttgggattacaggcatccgccaaccacgcctggctaattttttgtatttttagtagagatgggattttaccacgttggttaggctagtctcaaactcctgacctcaggcgatccacca

SEQ ID NO: 874300 - DNA, 578 bp, Homo sapiens
tgggcttctgggtcaggtggggacttgaagaacttttctgtctagctaaaggattgtaaacacaccagtcagcactcagtttctagctaaaggtttgtaaacacaccaatcagcactctataaaaacgcaccaatcagtgctctgtgtctagctaagggtttgtaaatggaccaatcagcactctgtaaaatggaccaatcagcaggatgtgggtggggccaaataagggaataaaagttggccacctgagccagcagtggcaacccgccagggtccccttccacactgtggaagctttgttcttttgctcttcacagtaaatcttgctgstgctcactctttgggtccacactacctttaagagctgtaacactcactgcaaaggtctgcggcttcactcctgaagtcagcaagaccacgaacccactggaaggaagaaactctggacacatctgaacatctgaaggaacaaactccagacacaccatctttaagaactgtaacactcaccgtgggagtccacggcttcattcttgaagtcagcgagaccgagaacccactggaagaaaccaattcc

SEQ ID NO: 874301 - DNA, 590 bp, Homo sapiens
tggcatctgggagtgttgtctgccttaactgaaaattttctttgatttatgtttttttttaaaatagattgcttcactttattccatactatctgttagtttaaatggaaatttgtttttggtttgttttcccaggtcttcaatgttcctggcagcttaaagtaccaactgggacacttgtcactagtttgagaagtgcagccataggtgagttctctccaccccaactttcttagtcatcctgccctgaacaaatcagctcaagccagtcccccgccagtgccactttccacttgtctccattgaaaccttcaccctccttcaaggcccaccaccagcccttcgcagatgcccacctccccagcctytacagccctttgtttccatcagtccctctccctggctcagtctctgctttcataaggagccggctctctgttcacccagatttaacttgctcagaggcagaaacttaggcttctttgtatgctcccaatgcttagttccatactgggaacaaagtaggtgtccggtatttttttactggtttccctttaaaaaaaaaaaaaaaaaaaaaaaagaggggactg

SEQ ID NO: 874302 - DNA, 663 bp, Homo sapiens
tgaatttatttttgtcaattaacagctgcatatgctgctgagatcctttggctaatatactgcattactttcatattgcagcatccaatacagatcacaccaggccactgctgtcttgcagagaataattttattgtagtcattattgtgatcatggaatatttcctttagcttttgattcttgcacttcactcatggtagccaaataaatagctagataggtaggtaggtagatgatagatagataggtagrtagatagatagatagatagatagatagatagatagatagatagtacctgtgagtgattcatgccagatacttttggcaattgagctatattgaaagttccctagtgataaaatttattaaaatgaatgtatataaaccagaaaaagtatatattagaattggagaagaacatggagtcccgatttaatgatttaagtccattcttgtctatgccttaactacttttcctttctaattctttgtccatcacaactattattaagacaaataaaattcagaaaggagatttagacttgttaaaagatgtgggacagggtctaccacttaacattttattattttatggcaataatttaattctttttagcttcagattcctcccctgtaaaaatgagattgctaaatttctg

SEQ ID NO: 874303 - DNA, 627 bp, Homo sapiens
cctgatacctccaggcttgttctttctgcttaggattgtcttggctatgtaggctttttttgggttccatatgaattttaaagtagtttttttttctaattctctgaagaatatcaatggtagattgatgggaatagcattgaatctatacattactttgggcagtatggccgttttcacaatattgattcttcctatccacgaggatggaatgtttttccatttgtttttgtcacctkttatttccttgagcagtggtgtgtagttctccttgaagaggtccttcatgtcccttgttattgtatttttagatattttattcactttttggcaattgtgaatgggagttcattcatgatttggctctctgcttgcctattgttggtgtaaaggaatgtttgtgattttttcacattaattttgtgtcctgagactttgctgaagttgcttatcagcttaaggagtttttgggctgagatggtggggttttctaaatgtaggatcatgtcatctgcaaacagagacaacttgacttcctctcttcctattggaatatgcttgatttctttctcttacctgattgccttggccaggacttccaatactatgttgaatagaaatggtgag

SEQ ID NO: 874304 - DNA, 692 bp, Homo sapiens
attttttcacattaattttgtgtcctgagactttgctgaagttgcttatcagcttaaggagtttttgggctgagatggtggggttttctaaatgtaggatcatgtcatctgcaaacagagacaacttgacttcctctcttcctattggaatatgcttgatttctttctcttacctgattgccttggccaggacttccaatactatgttgaatagaaatggtgagagagggcatcttttcttgtgccagttttcaaaggaatgctttcagcttttgctcattaagtatgatattgrctgtgcatttgtgataaatagctcttattattttgagatatattccatcaatacctagtttattgagagtttttaacatgaagggtgttgaatgttatcaaaggccttttctgcatcttttgagataatcatgtggtttttgtcattggttctgtgatggattacatttactgatttccgtatgttgaaccagccttgcatcccagggatgaagccaacttgatcatggtggatttgttttttgttgtgctgctgaattcagtttgctggtattttgttgagtttttttacgtcgatgttcatcagggacattagcctgaaattttctttttttgttgtctctctgctaggttttggtatcaggatgatgctggcctcataaaatgagttagggagg

SEQ ID NO: 874305 - DNA, 692 bp, Homo sapiens
attttttcacattaattttgtgtcctgagactttgctgaagttgcttatcagcttaaggagtttttgggctgagatggtggggttttctaaatgtaggatcatgtcatctgcaaacagagacaacttgacttcctctcttcctattggaatatgcttgatttctttctcttacctgattgccttggccaggacttccaatactatgttgaatagaaatggtgagagagggcatcttttcttgtgccagttttcaaaggaatgctttcagcttttgctcattaagtatgatattgactgtgcatttgtgataaatagctcttattattttgagatatattccatcaatacctagtttattgagagtttttaacatgaagggtgttgaatgttatcaaaggccttttctgcatcttttgagataatcatgtggtttttgtcattggttctgtgatggattacatttactgatttccgtatgttgaaccagccttgcatcccagggatgaagccaacttgatcatggtggatttgttttttgwtgtgctgctgaattcagtttgctggtattttgttgagtttttttacgtcgatgttcatcagggacattagcctgaaattttctttttttgttgtctctctgctaggttttggtatcaggatgatgctggcctcataaaatgagttagggagg

SEQ ID NO: 874306 - DNA, 626 bp, Homo sapiens
caaaggtacagtaaccaaaacagcatggtattagtaccaaaacagacatatagaacaatggagcagaaaagagccctcagaaataacaacgcacatctacaaccatctgatctttgacaaatctcacaaaaacaagcaatggggaaaggatctgctattcagtaaatggtgctgggaaaactggctagccatatgcagaaaactaaaactggaccccttcctttcaccttatatgaaaattaactcaagatgaattaaagacttatatgtaaaacccaaaaccataaaaactctagaagataacctaggcaatacccttcagaacataggcatgggcaaagacttcatgacaaaaagtcaaagacttcatgacaaatgggatctaattaracgaaagtgcttctgtatggcaaaagaaattatcatcagagtgaacaggcaatctacagaatgggagaaaatttttgcaatctacccattttataaagatctaaaattcagaatttacaaggaaattaagcatatttacaagaaaaagaccaacaaccccatcaaaaagtggaagaaggatatgaacagacacttctcaaagaagacatttatgcagtcaacaaatgtgaaaaaag

SEQ ID NO: 874307 - DNA, 626 bp, Homo sapiens
caaaggtacagtaaccaaaacagcatggtattagtaccaaaacagacatatagaacaatggagcagaaaagagccctcagaaataacaacgcacatctacaaccatctgatctttgacaaatctcacaaaaacaagcaatggggaaaggatctgctattcagtaaatggtgctgggaaaactggctagccatatgcagaaaactaaaactggaccccttcctttcaccttatatgaaaattaactcaagatgaattaaagacttatatgtaaaacccaaaaccataaaaactctagaagataacctaggcaatacccttcagaacataggcatgggcaaagacttcatgacaaaaagtcaaagacttcatgacaaatgggatctaattaaacraaagtgcttctgtatggcaaaagaaattatcatcagagtgaacaggcaatctacagaatgggagaaaatttttgcaatctacccattttataaagatctaaaattcagaatttacaaggaaattaagcatatttacaagaaaaagaccaacaaccccatcaaaaagtggaagaaggatatgaacagacacttctcaaagaagacatttatgcagtcaacaaatgtgaaaaaag

SEQ ID NO: 874308 - DNA, 434 bp, Homo sapiens
ctgcggggccctgcaggacacctctcctggatgtgtctgggggccactccatggaggtacttcttgattttcccactctggtgtctgcagcaactgagaattagttctttttttttttttttttttttttgagatgggagtctcactctgtcacccaggctggagtgcastggcgtgatctcggctcactgcaagctctgcctcccggttcatgccattctcctgcttcagcctcccaagcagctgagactacagccacccaccaccacacctggctaatttcttgtatttttagtagagacggggtttcaccacgttagccaggatggtctcgatctcttgatctcgtgatccgcccgccctggcctcccaaagtgctgggattacaggcatgagccaccgcgcccggcctagtcactgcattccttgtcttt

SEQ ID NO: 874309 - DNA, 434 bp, Homo sapiens
ctgcggggccctgcaggacacctctcctggatgtgtctgggggccactccatggaggtacttcttgattttcccactctggtgtctgcagcaactgagaattagttctttttttttttttttttttttttgagatgggagtctcactctgtcacccaggctggagtgcactggcgtgatctcggctcactgcaagctctgcctcccggttcatgccattctcctgcttcagcctcccaagcagctgagactacagccacccrccaccacacctggctaatttcttgtatttttagtagagacggggtttcaccacgttagccaggatggtctcgatctcttgatctcgtgatccgcccgccctggcctcccaaagtgctgggattacaggcatgagccaccgcgcccggcctagtcactgcattccttgtcttt

SEQ ID NO: 874310 - DNA, 523 bp, Homo sapiens
agaacctgtctcaaaaaagaaagaaaaaagagggccgggcgtggtggctcacgtctgtaatcccagcactttgggaggctgaggtgggtggataacaaggtcaggagttcaagaccagcctggccaagatggtgaaaccctgtctctactaaaaatacaaaaattagctgggcgtggtggcgggtacctgtaatcctagctactcaagaggctgaggcagagaattgyttgaacccaggaggcagaggttgcagtgagccaagattgcaccactgcactccagcctgggcgacagagtgagactctgtctcaaaaaaaaaaaaaaaaaaaaaaagaaagaaagaaagaaagaaagaaaatctgaataatggtatataaattaaggaaatttaatttaaaaccttcccacaagaaaactttagttcttcccacaagagctttagttcatgtcatacattttggttttattttttgtttcagtctacattctggggaggtgaggttactggcaaagttataagta

SEQ ID NO: 874311 - DNA, 648 bp, Homo sapiens
caaaactgagagttttataaaacctcacatactataaaaggtagggacataaaataacttttatttttacctcttaagtatcttaaaataatagtggaagtagtattttaactaggctttacatatagattataaattttaaattaagtactaaaatcaaatacatagactttcagtttacagtctgggatataagaagctgggaaggtgctactccatcctaacaccaggtaaaaagctgacatacttaaaaaaatcaatgacacttggccaggcgcggtggctcacgcctgtaatcccagcactttgggaggacgagacgggcggatcacraggtcaggagatcgagaccatcctggctaacacggtgaaaccccatctctactaaaaatacaaaaaattagccgggcgtagtggagggtgactgtagtcccagctactcgggaggctgaggcagaagaatggcgtgaacccggaaggcggagcttgcagtgagctgagatcgtgccactacactcttgcctgggcgacagagcgagactctgtctcaaaaaaaaaaaaaaaaaaaaagtcaacgacacttcttagatctctaagaaaattgagggccaaggcaaactgttcacaaaattggaaagaatgaaaggc

SEQ ID NO: 874312 - DNA, 578 bp, Homo sapiens
atgttagcaaagtatgtgttttatatagtgttttctgtataaaaaactataatttctatttactaagttgaatctatatggaatagtccataaaataaaccttacataccaactagttggatgtagtagtgaaaatcattcatggatatttcactctagtttgatatataaatctcttggattttcaacatagagtggggaagaaatcctaattacagttctcttcccattttaatttctcctcttttttttttttttttttttttttttgctgtttttctcaactgtcagtggaattattgtcttcctgtctccatatttaggtagtgtcagtggctgagtatcaccgcaggatcgatgctctaaatactgaaraactgcgcacactctgcagacgcctccaggtgcccccttcagtagtttaaacccctccagagactaaatactccctgtttttagtgttctttgtcatggcaaatctcatttgaagaatttgctttgactgcagcactaaaattaaattcctttttgtattaaaggttatagtattgccgtgaagagctgtggattatcttttc

SEQ ID NO: 874313 - DNA, 645 bp, Homo sapiens
agatttcagtaaaattttttttgaataaatgaatagtgggcactcagtatttgtggaatgattagatgttctatttggttgatgaaagtgaaatttattctaagtgtttacagaagaaggttagggttctatagctgttttgtagtatggctagttcattgtagctccagtaatagagttaaatttataggcaggttggaatttcagaactttgttccctgatacatggtaggtgcttattaagtattgctaaatgaatgtcaaaagaagctaataaagtgagtggggttgggggaaacctagcttgctgtgagattctggcctaactggcatagccttttgggtgaggaagttgractaagatttcagagctctcttgctttctcactaagattcacctccagggactttgtgtttgtaagtatattcctttggaattcggaagttgtaaaaaagtgaattggatgaaacttgctgtaggattgcttttttggaatcaaaactgttgttgaatgttaattagcaccacagctttgtgtgaaggcttttagacttgagtgataatgagattcattattagagacagtgtgtgttaggtgttccaaggcttccacttttattcatccagcacttgagaccgactat

SEQ ID NO: 874314 - DNA, 602 bp, Homo sapiens
agaaaacattaaaaatgtggccaaggcagctaattaggatcatttggttacagcctataaccattgttttgaaagtaagcctttcaaaggtaccgaaagtaaaagtatttgaacaagtgagaagtgtgacgcttaatgaagagaaacccaaagagacaaatctgaagagactctggatgagggtcctccaaaatacataaaacctagctgggtgcggcggctcatgcctgtaatcccagcactttgggaggcyaaggcaggtggatcaatcacctgagatcaggagttcaagaccagcctggccaatatggtgaaaccccgtctccactaaaaatataaacattagccaggcattgtggcaggtgcctgtaggcccagctactcagaaggctgaggcaggagaatcgcttgaacccggtgggcagaggttgcagtgagctgagattgcaccattgcattccagcctgggcaacaaaatgagactccatcttaaaaaaaaaaaaaaaaagtatccactgtcctgaaaaagaaataataaacaaataaattaaaagggggcagcggctggacaccagtggctcacccctgtaatcccagtactt

SEQ ID NO: 874315 - DNA, 671 bp, Homo sapiens
agactggagaaataagttttagtgatctagtttagtgcatggtgaccacaattaataataatgtactgtatatttcaaagttgctgaaataatagatttttaacattctcaccacaaaataaatgagttggtgagataggaatattaattagctttactggatatttctataatgtgtgtatagaacaaaacatcaccttgtacctcataaatataaacagttgttatttttcaattaaaaataacattaaaaagaaaaacagtatggaatatttttaaaaattcttattgcttacttttttaaaataaaaagaagtttagcaaagccaatggaagcattattaattataatttttaaaatgtaattaaaaattattggctgatatttattttgaagagaaataaagaaaatgttggctaagtgccaggaaacagctatgaagccaaattgggtggcrtataatcagaatggccaaaaaccttatagacttttttggggaaaaggcttttatagggaagagacactttaaaaaggagatgatacaagttggtgacacatttataaacatataaatgaaaaacaaaacataaacttcttgcaatatatttcatcttacattttcatttattacagtactgttaaatactttacttttgtatcaccttctcta

SEQ ID NO: 874316 - DNA, 636 bp, Homo sapiens
ttgcttacttttttaaaataaaaagaagtttagcaaagccaatggaagcattattaattataatttttaaaatgtaattaaaaattattggctgatatttattttgaagagaaataaagaaaatgttggctaagtgccaggaaacagctatgaagccaaattgggtggcatataatcagaatggccaaaaaccttatagacttttttggggaaaaggcttttatagggaagagacactttaaaaaggagatgatacaagttggtgacacatttataaacatataaatgaaaaacaaaacataaacttcttgcaatatatttcatcttacattttcatttattacagtactgttaaatactttacttttgtatcaccttctytaaaacaagtagtgctgtaaaatttatttgagtatatcataatagattcaatttcaagaaggaaaataacatttttatcttaggtggaccaagaaacacaaggatgaattaaaaaaaaatgttgccttacacactgcacctacctccaagttttgtttcatacctgggcagcatttgcctattcctaggagttgggagaaaatgtataaaatgtacaatcatttctgacatgatagattgcaggaaatggttgtc

SEQ ID NO: 874317 - DNA, 580 bp, Homo sapiens
tggaataactgcctattgggtacaatgctcagtacctgagtaatgagatccataccctaaacctcagcatcatgcaatacatgtaacaaacatgcacatgtaccccatgtatcaaaagtaaaagttaaattttttttaagtaggaaagtggtttgtggcaatgagtggttagtactgggaagtggttggtaggtgggagcttasgcatggggtggataatgaatggcaagatgcagtgggtgaattgcaactgcagggcaaaagttcaactgtgacttccttttatttaccagagtagagaagagtagagaattaatatgtatcagtattgctactactataaatactttataatcattgttacattttgatgctcttaatttatgtaatttattcaaatttctgaaggtttttagtacagtctataaaataaaaggggcctttgtcatttttttttttcttctaggatttcaaagaaaaagatcatgtagctggaagtctaaagacagcatcttattccagaaccaggcctatggagagaccccagggatcaagggagtacttaggagtcagaaagaga

SEQ ID NO: 874318 - DNA, 580 bp, Homo sapiens
tggaataactgcctattgggtacaatgctcagtacctgagtaatgagatccataccctaaacctcagcatcatgcaatacatgtaacaaacatgcacatgtaccccatgtatcaaaagtaaaagttaaattttttttaagtaggaaagtggtttgtggcaatgagtggttagtactgggaagtggttggtaggtgggagcttaggcatggggtggataatgaatggcaagatgcagtgggtgaattgcaactgcagggcaaaagttcaactgtgacttccttttatttaccagagtagaraagagtagagaattaatatgtatcagtattgctactactataaatactttataatcattgttacattttgatgctcttaatttatgtaatttattcaaatttctgaaggtttttagtacagtctataaaataaaaggggcctttgtcatttttttttttcttctaggatttcaaagaaaaagatcatgtagctggaagtctaaagacagcatcttattccagaaccaggcctatggagagaccccagggatcaagggagtacttaggagtcagaaagaga

SEQ ID NO: 874319 - DNA, 627 bp, Homo sapiens
cttccctctctgcgacaccaggaggctctatgcccgtgttgacattagagtttcaaagtttatggccagagcattgcaatgtgttttgcaaccctggtctttgcatcatgctcatcacagaggatttcactgtgaacatctcactgttgagaaaagaaaaataactcagagcagtctgactctgtagggtacccaggtcagaaaagacatgagcataatctggtctcctttccgttgcctgggagcgattgtttaaaatcattttgttcccgattagcgaccttacccattatcttcatgttttggggatttgtgacacgaaaaacaayatatagccaatgaatagcttttgatattttaatgtaaattattggagaacaacttaggaactgccttttattttaatttaaaaacctacttattgctattgctaatcagagtgtatattcaggacaacttgaatctatgctccagggttgcaatcctcaagcttggcccaaataaactctctacctatattagttttgcttcaacttctttctttcagtttgacactgtttttgtattatctactgaaccttactctctcatggaactgtgcttcctcttaccctacttcccacgcct

SEQ ID NO: 874320 - DNA, 639 bp, Homo sapiens
aagcataataatgcttctcttctatcatttcacagatctaaaaatgaatggtagggtgagtgtctgaaaactggtttaataaaaaaaagtctcactgaaaattatggaggacttttaagtagtcttaattagtattttcatttttaatattaacttttccactcttcagtacgtaaattctagtcaatgtgctgaaagcctagtaaaaatctgaaggtcctatytgaagtcaggcctacagcatgtcaaggactgactatccatgtctcaatgttcaatgcttcccctgtggtagaagtagaagtattcattgcaataattctataaacacttaccaagcacttatgaagaagcagactcttgatttcgaagatgacctggtctccagaaccttacagttcaaaagagctgccacttattaagggcttactctgtgccaacctaattgctaagcactttacatgaatcactcatttaaacctcaaaactaccctagaaaagggattagaattgttaaataatttgagagaaatcacacatcttagaagtggtagaattggattcatgccaaggtctctgtgactcaaaagtgtgtgtcctattaattaccctttacagaaacccatacaggaaagatag

SEQ ID NO: 874321 - DNA, 636 bp, Homo sapiens
attttaaggagtaaaggagaaaagcttaccacacaccaaagtatatgacaatgtcagctgttacaggtattgatttacattaccatgtgcaaaataagtagaaagtgcaaactggtggaaacaaatcagtattataccctgaaaaaaagacatacagtaagcactagtgattttctcttgaggtatacagagttagttatataaacacttcccatagttaatagggaagagtactgtcttccaagaaattcttatctgagataaagaggaatctgccagaacctacgagaagctcaagctgcttccttcttttgctgattcatgagaaaatgagcaatagctcaggaaggaacttgaattacatctttagttactttgaaatctaaggttgaaggcaaaaggatttggggcagggaagttgcattgtayaggtgaagttatcatcccttgatctaactgaaaaatctacgttggagacaaagaagtatttggaattgagtcaatgcagatggtgtaaaaaaatgtgttttctgggatacaccccatcatttcagaatgatggatggctgaggagaaaaagagaacatctcacaatgaaaaaaaaaagagatctaaagatctaaagcacaggttttt

SEQ ID NO: 874322 - DNA, 636 bp, Homo sapiens
attttaaggagtaaaggagaaaagcttaccacacaccaaagtatatgacaatgtcagctgttacaggtattgatttacattaccatgtgcaaaataagtagaaagtgcaaactggtggaaacaaatcagtattataccctgaaaaaaagacatacagtaagcactagtgattttctcttgaggtatacagagttagttatataaacacttcccatagttaatagggaagagtactgtcttccaagaaattcttatctgagataaagaggaatctgccagaacctacgagaagctcaagctgcttccttcttttgctgattcatgagaaaatgagcaatagctcaggaaggaacttgaattacatctttagttactttgaaatctaaggttgaaggcaaaaggatttggggcagggaagttgcattgtacaggtgaagttatcatcccttgatctaaytgaaaaatctacgttggagacaaagaagtatttggaattgagtcaatgcagatggtgtaaaaaaatgtgttttctgggatacaccccatcatttcagaatgatggatggctgaggagaaaaagagaacatctcacaatgaaaaaaaaaagagatctaaagatctaaagcacaggttttt

SEQ ID NO: 874323 - DNA, 659 bp, Homo sapiens
taagaagttatcctttttattgtataaaattctgaggaaaaacattcctcaagaattgacaaataattttgtgctgttggaagattcattgtgcctaacatttatgctctttccaacttctgttggcttactagatttgtgtgggctatgaatcctccccactggataataaaatgtaatttatttttatttttattgagtagaatttattattttattcacccaaattggaattaaactgacatttacatgycaatataaaatgacttgtgtaggccaggtgtgatggctcacatctgtaatcccagcactttgtgaggccaaggtgggaggattgcttcagcccaggatttcaagaccaggcctagcattatagcaaaactctatctctaccaaaaaaaaaaataaataaataaaaattagccaggcatggtatcatgtgcctgtagtcccagctactcagaagactgaggtgggaggattgcttgagcctgggaggtcgaggctgcagtaagccaagttcacaccattgcccctcagcctgggaaacagagtgagacactgtctcaaaaaaacaaataaatgaataacttgtgcaaaccaatttcatacctagtataaagaatcttcttaaactactaaagggatcaaatgtttcc

SEQ ID NO: 874324 - DNA, 643 bp, Homo sapiens
gggtcgctcagggaccaactggaaaaaaacatgaaccacacaagttatatcaagcaaagaaaattagactcaaataattgattacaaagttggatataattaccaccccctctagggcttaaggaacaaaagagaagtgatggggttttcagagcctagaggaacagaggagagtcctcacagaactggggttcacaatgtaagcgtagttgctrctggtacctctgcagggacatgaggcagctagctctgagagtcctgaaagaagctaacatttcaaaccaaaaggccaggtggggcaggggaactgtccaagaaaacaagagctgatcagtagctaaatagataaaaacagattttatttgggaccattgcaacagggaaaataatctcaaggtagaactgggctcaattctgaatataacaagcaagataaagtggaaatttacagacagaaatggggtgaggagcagtggatagaacatcactaagaagaaacagcaggggtaaaaggagattctagctgtttggacctgacatagctcttgatgaagacaagccagggtgatctgacatcgcctgtgggatggtagggggtggggaaatttgtcagatattatattgaggatgatcagtcattgaa

SEQ ID NO: 874325 - DNA, 572 bp, Homo sapiens
gtgagccgaggttgtgccactgcactccagactgggcaacaagagtaaaactccatctaaaaacaaacaaacaaataaacaaacaaacaaacaaaaactgctcaactgtttccaagtggttgtaactttaggaaactagaatctgatgataggaatatacaatcatcagatttctggttttctatatccttgttgacacatggtatgctcagtctttaaattttagtcactctaatagtgtgcttttgaaaagaatgtgtcttctgctcttggtgacatttctataaatgtcaattagatcaagttggttgatagtgtttgatgtggtttggctgtgtccccactcaaatctcatctttaattgtaactcccacaattctcaygtgttgcgggaagaaccccatacgaggtgatggaattatgggggcgggtctttcctgctctgttctcatgatagtgaatgagtctcacaagatctgatggttttaaaaacaggagtttccatgcacaaactctccctttgcctgccatcatatatgtaagacgtgacttgctcctccttgcccttgcct

SEQ ID NO: 874326 - DNA, 635 bp, Homo sapiens
acaaaataatctgtacaacaaacccccatgacacaggtttacttatataacaaacttgcacatgtacctttgaacttaaaataaaagtaaaaaaaaaatgatattttgccttcatacttagaagatattatttcctggtagaatttttgattgataatttttttatttttgtttttaatttcagtacattaaasatgttgcttcagtgctgttttgctttcattgtttccttaccttcgtaactttttatgattcctatttttctctggctgtctttaagattttctctttatcactggctttgagcaaattaattatgatgtgccttggtgtagttttcatcatatttcttgtgcttaaatttcattgagcttcttggatatgtgtacttatagtgtccataaagtttggaaagattttggccattatttttaaaacttttttcttggctctacttcttctgttacgtgtatattagaacactttaaagcctcccacagctccctgatgatatttttatcgttttaagtattttttctctgtgaatatttaagtattttagatatttgctattgatagtgtccaagttcactatttttttctctcccaaaatctcattcactgttattcccatc

SEQ ID NO: 874327 - DNA, 635 bp, Homo sapiens
acaaaataatctgtacaacaaacccccatgacacaggtttacttatataacaaacttgcacatgtacctttgaacttaaaataaaagtaaaaaaaaaatgatattttgccttcatacttagaagatattatttcctggtagaatttttgattgataatttttttatttttgtttttaatttcagtacattaaagatgttgcttcagtgctgttttgctttcattgtttccttaccttygtaactttttatgattcctatttttctctggctgtctttaagattttctctttatcactggctttgagcaaattaattatgatgtgccttggtgtagttttcatcatatttcttgtgcttaaatttcattgagcttcttggatatgtgtacttatagtgtccataaagtttggaaagattttggccattatttttaaaacttttttcttggctctacttcttctgttacgtgtatattagaacactttaaagcctcccacagctccctgatgatatttttatcgttttaagtattttttctctgtgaatatttaagtattttagatatttgctattgatagtgtccaagttcactatttttttctctcccaaaatctcattcactgttattcccatc

SEQ ID NO: 874328 - DNA, 592 bp, Homo sapiens
aagcacatttgtagtcccataaaaattcttgagctttgttgtggtataaagtcgaattagttggaaagaggttattttttcttttgcttttcagataagatgagacaggatgagagttttgaactaaatagtcacattattcaggagagagatttctaagtactctttatagtgctccatgayttacgaggtttcgcagtctggctgatgagaaaagatgcgaatcattccccagcttctgctaattttctcactggcaaatgctgatgaatattttgctccctattcaagggaggcctctgcagatctttaggcttttctctgtgtgcagctctcttttccttgctactctgttctgtgattctagccaccttgatcttctcagactcttgccctgtctcctcatcccagggaatctgtaggtatctatttgacttccctatcctttcactggtctggaatctttttgaaaacagtaggcggggaccatggtagggcttattatatttgtttttcatctttacagggatcactatcctttctcgtttcatctccagtatcttgaaaactggcatttttttgtttttgtata

SEQ ID NO: 874329 - DNA, 592 bp, Homo sapiens
aagcacatttgtagtcccataaaaattcttgagctttgttgtggtataaagtcgaattagttggaaagaggttattttttcttttgcttttcagataagatgagacaggatgagagttttgaactaaatagtcacattattcaggagagagatttctaagtactctttatagtgctccatgatttacgaggtttcgcagtctggctgatgagaaaagatgcgaatcattccccagcttctgctaattttctcactggcaaatgctgatgaatattttgctccctattcaagggaggcctctgcagatcttyaggcttttctctgtgtgcagctctcttttccttgctactctgttctgtgattctagccaccttgatcttctcagactcttgccctgtctcctcatcccagggaatctgtaggtatctatttgacttccctatcctttcactggtctggaatctttttgaaaacagtaggcggggaccatggtagggcttattatatttgtttttcatctttacagggatcactatcctttctcgtttcatctccagtatcttgaaaactggcatttttttgtttttgtata

SEQ ID NO: 874330 - DNA, 619 bp, Homo sapiens
ccttgcccctcccaaatctcgtgtccttctcatacttcaaaatacaatcatgccttcccaatagtcccctaaagtcataactcattccagcattaactcaaaagcccaagatccaaagtctcatctgaaacaaagcaaatctcttccacctatgagcctgtaaaactaaaaaacaaaacaaaacaaaaaaacaaaaaacaaaaaagttagwtactttcaagatacaatgaggatataggcattgggtaaatattcccatttcaaatgggagaaattgctcaaaacaaagggggcagaggtaccatgcaagtccaaaacccagtgaggcaatcattaaatattaaagctctgaaatcatcttctttgattccatgtctcatatccagggcatgctgatgcaagtgttgggctcccaaggccttgggaaactccaccctgtggctctgcagggtacagccttggttgctgctttcatgggctggtattgagtccctgtggatattctaggtgtacagttgaagctgtcagtggatctacaattctggggtctgtaggatggttaccctcttctcccagctccaccaggcagtgccccagtggggactctgagtggggactc

SEQ ID NO: 874331 - DNA, 555 bp, Homo sapiens
cgtccctttgacaaagtcccatcattgtgtttgtgttgggtgcttcctaaccttctggcactacgtgatgctctgaagtcatcttgtatattttctgaccctgcaatcagccaactctccatttatatttggcttttgtgtctgtacttgcattttgtactcacattacatacgagcacatctaatgtttcgtgaattgacrttgaacaaaataatgagagcacaccgtgcagctctgactcagaatttgagccattgtcgagttttcccctcttctttaactttatttaacttgtcggtttgagccaaatccctgggagaaataaacagatttctcagagggccagactttttcaaacaagagtttggactaagcagacttacctatagcaaaaagagtgacattagaaaaacctgccaaaagaatgattaatttaacagggtagagataattgtcaatagaagaaaatgatctttaaataattgttaacagagagagaaacagtagtctcaaaatgtgcatttaaactcttaactaaatttgatacacttgaa

SEQ ID NO: 874332 - DNA, 492 bp, Homo sapiens
cctgcaccgttctcgtgatagtgaataagtctcacaagatctgatggttttaaaaagaggcattcccctgcacaagatctctgtttgcctgctgccatctatgttagatgtcacttgctttccttgccttctactgtgattgtgaggcctcctgagccatctggaactgttaagttcaataaagctttttcttttgtaaattgcccaatctcgagtatgtctttgtcagcagtgtgaaaacaaactaattcatcctaaaaatataacctgtcctaaagaggagaatatcagagctatctaattyttctaaggtttttatttaatacaaaacccataaaagcacaactgtgaagaataattaagaactgtttggtcctaaggaactcattgttgagacagcagtagctaaggcacagcaaaaatcttaggtggtagcctattgttatggccccccttatagtctaagatgctttaaaaagagagagagattgt

SEQ ID NO: 874333 - DNA, 631 bp, Homo sapiens
agtttctttatggttgatatggaataaaaatcattttgtatctatcattaacatttgacatattattattttcatactggctcagaacactcccttggcaaagaggcgttaagttattaaaaaaaaaaaaatctggaacatttaaagccaaaagaaccctgactgaaaggaaatctgctctctctgttaagtgytaactctcctttaagcattttttagtatgccaagcacaccatctgtgctcaattacttgttgttttgtaacctcaacatctgtttatgagaaaatatgtgcttgcatacattaaagacttactttccatacaagaatttgaaagttttttatgttaatccacatgtaatttattcttcatttttctttgtgttctcatctgaataatgaaagctaaagtattagaacatctgaaaagcaaagactaacaaacccatgtaacacaacatgaatggaaaatacaaatataaacttatataatcttcagtaattttattgtatatagacttaaattttatgcaagtagtctggaaatatcagagatcttttactacaaaattttatccccaactctgttgtatccataactcaataaaattacttatatgaatgtaagag

SEQ ID NO: 874334 - DNA, 631 bp, Homo sapiens
agtttctttatggttgatatggaataaaaatcattttgtatctatcattaacatttgacatattattattttcatactggctcagaacactcccttggcaaagaggcgttaagttattaaaaaaaaaaaaatctggaacatttaaagccaaaagaaccctgactgaaaggaaatctgctctctctgttaagtgctaactctcctttaagcattttttagtatgccaagcacaccatctgtgctcaattacttgttgttttgtaayctcaacatctgtttatgagaaaatatgtgcttgcatacattaaagacttactttccatacaagaatttgaaagttttttatgttaatccacatgtaatttattcttcatttttctttgtgttctcatctgaataatgaaagctaaagtattagaacatctgaaaagcaaagactaacaaacccatgtaacacaacatgaatggaaaatacaaatataaacttatataatcttcagtaattttattgtatatagacttaaattttatgcaagtagtctggaaatatcagagatcttttactacaaaattttatccccaactctgttgtatccataactcaataaaattacttatatgaatgtaagag

SEQ ID NO: 874335 - DNA, 631 bp, Homo sapiens
agtttctttatggttgatatggaataaaaatcattttgtatctatcattaacatttgacatattattattttcatactggctcagaacactcccttggcaaagaggcgttaagttattaaaaaaaaaaaaatctggaacatttaaagccaaaagaaccctgactgaaaggaaatctgctctctctgttaagtgctaactctcctttaagcattttttagtatgccaagcacaccatctgtgctcaattacttgttgttttgtaacctcaacatctgtttatgagaaaatatgtgcttgcatacattaaagacttrctttccatacaagaatttgaaagttttttatgttaatccacatgtaatttattcttcatttttctttgtgttctcatctgaataatgaaagctaaagtattagaacatctgaaaagcaaagactaacaaacccatgtaacacaacatgaatggaaaatacaaatataaacttatataatcttcagtaattttattgtatatagacttaaattttatgcaagtagtctggaaatatcagagatcttttactacaaaattttatccccaactctgttgtatccataactcaataaaattacttatatgaatgtaagag

SEQ ID NO: 874336 - DNA, 632 bp, Homo sapiens
gattataaagtcatgttgaaggatgtcaagacttttccgcagtagtgtacttgatctgatatcagacaaaaacaagcatggtataaacagaagaaaatgttatgacacattagaaaacaattcagacctatagagacacaaagcaagaacaataagatagcaacacaatgaataaaattattcagcctttyatcttaaagaactctggattttttttccaataacacaaaaaagtaggagtgatagaaccacactttggttatactcacttgtttattgcaatacataaattaactattggtcaagttgtatatggttcacatttacatgtaaaataataaggtctgaataccagaccttatttaaatttatgtgttttttttttttaaaactgctgactcaagagaactcctcatttataaaaacagacatttattataggctatactaatactcacataaatcatagctatcatttatttagcattccttatatgctagacacctaactaaaagttttacatacattatttagtttattacaaagttctagattttacctatgagaaaaataaggtttccagagagtaaggaacttaatgtcacagaactattaagtagaggagtcaaat

SEQ ID NO: 874337 - DNA, 616 bp, Homo sapiens
tacattttttgttgtagtttttgaaaacagaagaaggaaaaaatatatttactgtaatttctttgtgttagggtgggatccaaagttagcctatttatttaataaaagcactggcaaaaactgtcaaaataagttttttagaaacctaaaagttaaccaacagtttacaagaacctgaaagtatttatttaagacaaatggctaaatatagagaatagtaaactatattttgtttgtaattatccctattcccatctctctctcttcagctctgcactagccttagaaagcacagctccaccactatggtgaaaacaagcgtgctaatatcaactgaaggggacatcatgagattggagctcctccaaaacacccatctacttaaaatggtcatttacaagagactgaaggtatgtgccccttctcccatttatatgttgaagtcctaacttacaacgtgatagtgatggtattagkgggtagggcctttgacatgtaattaggtcatgaggctggatcccttataaatgagtagtgcccttatggaagagatcctggaaagctctctcatcttcttctgcatgtgaggatacaacaaaaagttggtaatctgcaa

SEQ ID NO: 874338 - DNA, 622 bp, Homo sapiens
atatctgagaaggccctagattctcacctctggcagactatgaggcactgggaaagaagaactgaaggttatgttacagttataaattgggtgcctgagcactgaacacacaccataacacacatttagcccattgagaaatccagagggacataattgttcatggaatgatgtggtttggctctgtgtccccacccaaatctcatcttgtagctcccataattcctatgtgttatgggagggaaccagtgaaagataattgaatcatgggggcagctctttcccgtgctattcttgtaatagcaagtaagtctcatgagatcttatagttttaaaaaggaaagtttgcctgcacaatctctcttctctcttgctgccaccatataggaagtgmctttcaccttcttctatgattgtgaggcttccccacccatgtacatctgtgagtccaataaaactgtttcttttgtaaattgcccagtcttgagtatgcctttatcagcagtgtgaaaacagactaacacagaaaattggtaccaatagagtgggcactgctgtagatacctcaaaatgtggaagcaactttggaactcagtagcaggcagagattggaacagtttgg

SEQ ID NO: 874339 - DNA, 621 bp, Homo sapiens
tccaataaacctctttcttttgtaaattgcccagtctcaggtttggctttatcagcaatgtgaaaattgacttaaacatgacatttaaggaaatctatgcactataaatagctagtcaccaaactaatcaagcagagacttcggtggctatacatgatgataaatattgacttacaaaattaattcaggaaagccattaggcaaataaaaagaaacaacaccaaaagcrataacaaatagcaataactataaacaatgagaaaaggatagaatcttatttctagagttgtcacattatatttttaaaatgtccaattttctacaaaatttatgacatgtaaaggatcatgaaagttagatacatatacaggaataacaaagaaatagacagaaattgcccatgaaaaagcacatctgtaggacttactagacaaagatgtaatcagttattttaaatatgctcaaagaactaaagaaaacattgtataaagaactacagtatgagaatactatttcaggaaatagagagtatcaacaatgagataagaatattttttaaaaagatatccagtagttgaagagcattttaagtaaatgaaaatgcactagaaaaactcaaca

SEQ ID NO: 874340 - DNA, 621 bp, Homo sapiens
tccaataaacctctttcttttgtaaattgcccagtctcaggtttggctttatcagcaatgtgaaaattgacttaaacatgacatttaaggaaatctatgcactataaatagctagtcaccaaactaatcaagcagagacttcggtggctatacatgatgataaatattgacttacaaaattaattcaggaaagccattaggcaaataaaaagaaacaacaccaaaagcgataacaaatagcaataactataaacaatgagaaaaggatagaatcttatttctagagttgtcacattatatttttaaaatgtccaattttctacaaaatttatgacatgtaaaggatcatgaaagttagatacatatacaggaataayaaagaaatagacagaaattgcccatgaaaaagcacatctgtaggacttactagacaaagatgtaatcagttattttaaatatgctcaaagaactaaagaaaacattgtataaagaactacagtatgagaatactatttcaggaaatagagagtatcaacaatgagataagaatattttttaaaaagatatccagtagttgaagagcattttaagtaaatgaaaatgcactagaaaaactcaaca

SEQ ID NO: 874341 - DNA, 615 bp, Homo sapiens
aactaaaagagtatacatgaaaatataatgtataaggatgtaatttttatggcaataaaaacagaaatataaggagacgatggaactatataggagcaaagtttttgtatatgatttaaagtagttggtattagtccaaactaaattgttatcagttttagttatagttctttgggaaatcactaagaaaacaatgcaaaaatgtggtaaaagaaatatcggcagaattaaatttgtatacttaaaaatacttatttcaccaaaaagtaggcaataaaaaatagagaaacaatgacatcataaagtaataagacagagagaaaataagtaacamaatagcagatacaaatccttcattatcaatagtaacattaaaggaaaatggattaaacattccaatcaaaaggcagaaattggacagaatagattaaacaacaataacaagatcccacttcaaaggtatatgtatatttaaaaggatggaaaaagatacacctttcaagcagtaactaaaagaaagctggagtggctatactagtattagacaaagtagactttaagataaaaatggttactaacaataatgaaaaaattccaaaatatatgaaacagaaa

SEQ ID NO: 874342 - DNA, 624 bp, Homo sapiens
aaactgcacagtactatataaatgctatttattttagctattactatttagtgacaattgtattatggtttagttaagttttaccatgttgtttctagtatattatcagcctaggaatgctgctaaaatgatgctaaaatcatctgaggttgtcctttctctttgtaatctatttcctgttaatatgtaaagggagtggcattggcaggtttagaattcttttcgtttctctttcccttgtttgagtagctacaaaattactaagtcctgtacaatctccctctctctctgtctacttaattcttaccccgsagatgagaaaccaagatcattagtcgttcttcaccttttcctgagcctcatctattgcctaggaatcttgaaactataagtgggttggaaaattgagccctgataaaaatgtttttgatattctttcttcacattttctcattaaacattatagagaagttcactgatgctgacagagtagttgattgtgcctggaagaaatattgtggtggcaagtacaaattagatcatggtggactagtttgtattttgctgtttcagcttctgtgaatgactacagcacaatattttttttattaatgtgagtaaata

SEQ ID NO: 874343 - DNA, 597 bp, Homo sapiens
cctactgaagcagaatatcatacttccctccagttccccccataaagctacagaacagtgcagatgggctggctgactttaaggcaagtcagagggccccagtactagcaatgtgttttctatctctcttaaaattctgctctgtgaagcggtgagtcatctctgacatggaatccagaagtctaagtcttcagtctacctaccccacctaccccaattcccctgggcaggttcctaaaagataactacacaaaggagcagccaacctagttaaaacttttaaatactttgagatatttccyacaaaactagtgttggcaactagtaaggtaggctgaacaatgtagagaaatgcttttgcctaggtcttgggaagatttcattaatccacagttatagcagcccatgagcctcccacttccattttctgaggacctgttcctgccttggactctgaggatgaaaaatgcccattcagggaaggccatgctgagatagttcaagccagtcaaagaaatcaatatctgttttaatgcttagcataaggcagagcaattttccagcagaagtagcactgacccctctcataacttgcaa

SEQ ID NO: 874344 - DNA, 593 bp, Homo sapiens
gtttgacccagcaatcccactactgggtatatacccaaaggattataaatcattctactataaagacacatgcacatgtatgtttattacagcactattcacaatagcaaagacttggaaccaacccagtcaatgcccatcaatgatagactggataaagaaaatgtggcacctatacaccatggaatactatgcagtcataaaaaagaatgagtttatgtcctttgcaggaacatggatgaagctggaaaccatcattctcagcaaactaacacaggaacagaaaaccaaacaccgcatgttctcactcataagtgggagttgaataatgagaacacatggacacagagaggggaacatcacacactagggcctgttggggggtgaggaggaaaaaggagggtgagcattaggacaaatacctaaygcataaggggcttaaaacctagatgatagattgatgggtgcagcaaaccaccattgcacatgtatacctatgtaacaaacctgcatgttctgcatatgtatgaacttaaagtataaaataaaaaataaaataaaataaaacattggctctcagaattatttctaga

SEQ ID NO: 874345 - DNA, 659 bp, Homo sapiens
aggctttatatgagatccccttccctacaccacagactgatgaagccctttcaaagatgtaagcaggggccatggcagtcctatcaccatcatcttttcctcatctttcagggatcactcttttgtagtttgatgcacagagttctgaaaaccatttttctatgtattttttctctttttgtttgttggtttgtttcaggtgtttcaagggttaaccagggtaaaccttgtyaatttatgttatctggaagcagaaggtacccttcccaatgtttcatttaatcttatcaaaagttaaccttatgccattttacaggagaggaaggtgaggctcacatatgcaacatgacttttaagctcaaatagcttataagagttacatcccagaattcatcttaagtttgtctcttggaaatagctgactatatgatttcctcttctctgaatttccttcacttaatctactctggaggacagggaatggaaagggattagggttgaaaataagaccgcaaactactctctggaggccaattccctgttcctttgggatgtgaaaattgaataagggtgggtatttgagcctatggtccagatacaggaatcacaccagtaagagtcattgttttctttcctcacaacaatcttagtatgtcaaa

SEQ ID NO: 874346 - DNA, 659 bp, Homo sapiens
aggctttatatgagatccccttccctacaccacagactgatgaagccctttcaaagatgtaagcaggggccatggcagtcctatcaccatcatcttttcctcatctttcagggatcactcttttgtagtttgatgcacagagttctgaaaaccatttttctatgtattttttctctttttgtttgttggtttgtttcaggtgtttcaagggttaaccagggtaaaccttgtcaatttatgttatctggaagcagaaggtacccttcccaatgtttcatttaatcttatcaaaagttaaccttatgccattttacaggagaggaaggtgaggytcacatatgcaacatgacttttaagctcaaatagcttataagagttacatcccagaattcatcttaagtttgtctcttggaaatagctgactatatgatttcctcttctctgaatttccttcacttaatctactctggaggacagggaatggaaagggattagggttgaaaataagaccgcaaactactctctggaggccaattccctgttcctttgggatgtgaaaattgaataagggtgggtatttgagcctatggtccagatacaggaatcacaccagtaagagtcattgttttctttcctcacaacaatcttagtatgtcaaa

SEQ ID NO: 874347 - DNA, 636 bp, Homo sapiens
gggcatcttcttgggaggtgttgggtctgtcctcaactaatcaaagaagactgtgatagctcagtgttatttgtagtggtagagacaagacagttgaactgtaggggccaggttgtttctttgccagagtggccagcagttcacaacttcgctactttaaacagtctcaaccaggcgtagtggctatgcctgtaatcccagcactttgggaggctgagacgggtggatcacttgaggtcaggagttcaagaccagcctggccagcatggtgaaaccccgtcttctacaaaaagtacaaaaattagtcggcatggtggcgggtgcctgtaatcccacctacttgggaggctgaggcacgagaatcatttgaacccgggrggcggaaattgcggcgagctgggagcacaccactgcactccaacctgggttacagagtgagactctgtctcaaaaaaaaacaaacaaatgaaaacccccaaaagctccatggagatctctaaaaatacagttgctcaagtaccatctctagagtttttttccccaaagttcaactttgctctctatctctaactgtatctgtaagataagctcccccaggacaaaaggagaagaatcttgcaataattgtctggttaa

SEQ ID NO: 874348 - DNA, 635 bp, Homo sapiens
atgtagaaagctgaaattggatcccttccttacaccttatacaaaaattaattcaaaatggattaaggacttaagtgttagacctaaagccataaaaaccctagaagaaaacctaggcaataccgttcaggacacaggcatgggcaaggacttcatgactaaaaaaccaaaagaaatggcaacaaaagccaaaattgacaaatgggatctaattaaactaaatagtttctgcatggcaaaacaaactaccatcagagtgaacaggcagcctacagaatgggagacaatttttgcaatctacccatctgacaaaggcctaatatccagaatctacaaggaacttaaacaaatttacaagaaaaaaacaaccccatcaaaaagtgggcaaaggatattaacagacacttctcaaaaaagacatttatgcagccaacagatacatgaaaaratgctcatcatcactgatcatgagagaaatgcaaattaaaaccacaatgagataccatctcatgccagttagaatgctgatcattaaaaagtcaggaaacaacagatattggagaggatgtggagaaataggaacgcttttacaccgtcagtgggagtgtaaattagttcaaccattgtggaagtca

SEQ ID NO: 874349 - DNA, 635 bp, Homo sapiens
atgtagaaagctgaaattggatcccttccttacaccttatacaaaaattaattcaaaatggattaaggacttaagtgttagacctaaagccataaaaaccctagaagaaaacctaggcaataccgttcaggacacaggcatgggcaaggacttcatgactaaaaaaccaaaagaaatggcaacaaaagccaaaattgacaaatgggatctaattaaactaaatagtttctgcatggcaaaacaaactaccatcagagtgaacaggcagcctacagaatgggagacaatttttgcaatctacccatctgacaaaggcctaatatccagaatctacaaggaacttaaacaaatttacaagaaaaaaacaaccccatcaaaaagtgggcaaaggatattaacagacacttctcaaaaaagacatttatgcagccaacagatacatgaaaagatgctcatcatcactgatcatgagagaaatgcaaatyaaaaccacaatgagataccatctcatgccagttagaatgctgatcattaaaaagtcaggaaacaacagatattggagaggatgtggagaaataggaacgcttttacaccgtcagtgggagtgtaaattagttcaaccattgtggaagtca

SEQ ID NO: 874350 - DNA, 565 bp, Homo sapiens
catgatacaagtaaacttgaagaaaccaattacattgggggatagtcttgttttctgttattctgtggacttgctttattaatatatggaatttagagtttcttatatttaaaaaatatgaaaatgcacataatcattcccaggctgctcctgatcctttagtgatgattcctacagaaaaaaaaaaagtgcttgggatggggaagaactttgyggccatcgattttttctttctttctttattatttttatttttttattatactttaagttttagggtacatgtgcacaacgtgcaggtttgttacatatgtatacatgtgccatgttggtgtgctgcacccattaactcatcatttaacattaggtatatctcctaatgctatcccttccccctcccaccaccccacaacaggccccagtgtgtgatgttccgcttcccgtgtccatgtgttctcattgttcaattcccacctatgagtgagaacatgtggtgtttggttttttgtccttgtgatagtttgctgagaatgatggtttccagcttcatccatatccctacaaa

SEQ ID NO: 874351 - DNA, 519 bp, Homo sapiens
ctgaccttgtctcaggttggccacccatggcacatcctgttgggggcaggggaaaggcttctcgtggcatgaatcaccatacaggctgccaagtcgcctcttatttagatttatgaatgtcatattctttattgactctcacaagagttcctaatcagaaagattccaaacaggtttcagccatctcattaggacacaggaaattggataaagaggataacctctgaaatcctcccttagtcattgatctttgggaaattagctctctatggcttagatcactctgaagattataaacatgtccagtaaatataacctccatctaraccagcccagcaatttcaacagcatttggcaggagagaaaatgcctgccaagatccaagcagctgtagcaggtgctgtaaatcaatgcaggatacttacatggttctgtattccactggggctcaaagccttccaagtagattatctgcatagatttcagggtggcaaagtggcattatgaacacacaactcc

SEQ ID NO: 874352 - DNA, 667 bp, Homo sapiens
cattcccaccaacattgtaaaagcattcctatttctccccaacttgccagcacctgtcatttcttgactttttaataatctccattctaattggcatgagatagtatctcattgtggttttgatttgcatttctctagtgatcagtgaggttgaacttttttcatatgtttgttagctgcatgaatgtcttcttttttttttcttttattttcttttttttgagacaaagtctcacagtgtcrttcaggctggagtggtgcagtggcaccatcttagctcaccgcaatctccaccttccagcttcaagcaattctcctgcctcagcctccgaagtagctgggattataggcacctgccactatgcccagatacttttttcgtatttttagtagagatggggtttcaccatattagctaggctgatctcaagctcctgacctcaggtgatccacctgcctcagcctcccaaagtgctggggttacaggcatgagctgcctcactcagccatgaatatcttcttttgagaagtgtctgttcatgtcctttgcccacaattgtattgttagtttttttcttgtgaatgtgtttaagttccttgtagattctgggtgttagacctttgtcagatggatagattgaaaaaattttctcccactgtgtaggtt

SEQ ID NO: 874353 - DNA, 613 bp, Homo sapiens
gagattgcttaattcatatttggccttcttattataagatgattaaatacaatgataattgagactcaagataggacaatattacaaactattaaatggatttaagtgaaagttgattctatttaaactttgaaatcttttaccaaaaaaataaaatctcttctaaaacatttagttctattatgcctaattgccaatgacaattatatatataatttgatctttcaggttaaaattgtatgtatgttattagaacactaagaatgtccacttgtgtatttttatgttgtatagactatggctcatataatattactcatgtaatggagcagattttgcatcatttttgaacaatggaatatgtatctcttcccttcaaatgtmaaataacattatcttgcagcacttttctttttaaaagttttccatataaagatagtttttctgtgtttcaggttgacttacgtatcatgagctactctagaattaatgagtttcatccttgggcagagttaggtcgagatactcgaaaactggtgaatagaggttatgatgttttatacatccatgttctccaaagatccagtacattatttttttccagagtaggtgc

SEQ ID NO: 874354 - DNA, 635 bp, Homo sapiens
tgaacccttagtatgcacagtaattgttcaaggtactgaattacaacagtgaacaaagaagatacaaaatttctgcccttctagactacattttattaaggagaggcaggaaatagacaagatagatcaggataagcgcaaaagagtaaaacaagttaaaaagaagggcaagaaatttaaggaaagagaattatctcccattttaaataggattgttaatgcatgtctcgtaaaggaagggccatggaagcaaaggttggaaggagaagaggcagtgagccrgatgaatacctggggaaaggacgttctatgaagagggcatctggcttaaaaggctctgcgtgctctggctctggctacaccaatcagaaccatgctcattacaataccagggacagcctttagcaatccaccgaagtcagtatttaagctataccatacttgattctccaagtttaaatagagcccagcaagcaatctggtctgataacatctcaaaagcccattttgttcgatattacaattagtaggtatttattaaatagttactatttgacaggcagtgtcattagtgctgagaacaactcagtgaattaaataggtgaggtcttctgttcataaagagctgacattcc

SEQ ID NO: 874355 - DNA, 647 bp, Homo sapiens
atcagatggataggttgcaaaaattttctcccattctgtaggttacctgttcactctgatgatagtttattttgctgtgcagaagctctttaattagatcccatttgtcaattttggcttttgttgccattgcttttggtgtcttagtcatgaagtctttgcccatgcctatgttttgaatggtattacctaggttttcttctagggtttttatggttttaggtttaagtctttaatccatcttgagttaatttttgtataaggtgtaaggaaggggtccagttttagttttctgcatatggctagccagttttcccagcaccatttattaagtagggaatcatttccccattgcttgtttttgtcaggtttgttgaagatcagatgattgtaaacgtgtggtgttttgtctgaggcctctgttctgtctcccctttcgtctatawgtctgttttggttcctgtaccatgttgttttggttactgtagtcttgtagtatagtttgaagtcaggtagcatgatgcctccagctttgttatttttgcttaggattgtcttggttatacaggctcctttggttccatatgaaatttaaagtagtttttcaaattctgcaaagaaaggcaatggtagcttgatgggaatag

SEQ ID NO: 874356 - DNA, 587 bp, Homo sapiens
catctcaatttcttgcttaagaaatagtcctatttacctatttcaccatcctctagtgttcactcagtggttatttctttgctacctcaaatgccgagtaatattcaccccaatccatagctggctgacacctattttcggtgatttctgtggtactgattggtgaagatccccttagcttgaaggaaattgaagaagcgactacatagcccataacatcccttttgaattccagcttgcaatttaaataacctggtccttcctagaagcataaaccttcaggattgctcaagtagaaatactgacttttattttgcctcttggtcagacagatctacaccctttgttaaggtatgctcccagaaacgcatgttcttgggctaaacatttacctcatgggagcytaaggagtttctgaatgtctccagaacagtagtttactgtaatggagaagcagtccagcctcattccctccacatctacacatggctttgataccgtaccctctttatttggtctaaaaatatttttaaagaaaaaaagtcacactacaaaggcgattgaggtagttggtttttaatcagtta

SEQ ID NO: 874357 - DNA, 612 bp, Homo sapiens
acaagccacaagctaatggagtaaaactgtcctgaatctggaattatttgagctgaaataagtaaatttcaaccattattatgtttttagttgataaaattttaagatacataaggatagactggtaatttttgtagatcaatcttaccatatgttaggaaccagtggtatttacaatttaaattaatcagccggaggtaaagatttcttaaatcatctttttcaggacatttttatctgsctaataagagcagggtttatgagtgaaaaaaaggttttttatagatgattcatcaatatgttattctaatttagtgtgtgcttctatttttaagatgtaatgactttctaaggcataattctaaatagagaatggaggatacaatatgatctattagttaaggggtatgtactcagatgtgtattgtttctgccattaatttttttagaaataccaatgtatatcaaaattaatgttaataaatattcataaaatctttgtatgtgttcagagccacaggccacataaaatcacatgaggagataaggcatatctatgaaaagcaaacagtgaaaaagaacagcatctgtttaagcattttaagtacaaat

SEQ ID NO: 874358 - DNA, 604 bp, Homo sapiens
aaaaatcaatatcctttcttagattcatagagaagtaaggtcacaggtcaaactgttgccccaacaaatacagagaatcacatcttacctgagcagaaactaatgaagaaaacctaaattatacttgatgaattgccagaagttccatgtggatgggtctgagagctaaaggcttctgggggactcagtcttaggaaagacctcatgcttttatgggttttacttcctggatctttatcaagttctcgcagtgattacaggagaaaaattccyttgtgcttctgacagaggaaagggaaggaacttttttgaaatacaccagtgcattctgttcttaataagttctgccctcaggagaaaccatttagctagttgctgaaaattaaaattgctagagttttatcagaaactaactgacctggggggaagaggtgtcccaaccctatctggtcttccatgtggaagaaggaaaacacccaacttcagctcactctagttatcttatcccatctaagttgaggggatgtgactgagaagcatgtgtgaagttcgcagcccagagacacaggcttactaaaagactgagacctattcataagactat

SEQ ID NO: 874359 - DNA, 604 bp, Homo sapiens
aaaaatcaatatcctttcttagattcatagagaagtaaggtcacaggtcaaactgttgccccaacaaatacagagaatcacatcttacctgagcagaaactaatgaagaaaacctaaattatacttgatgaattgccagaagttccatgtggatgggtctgagagctaaaggcttctgggggactcagtcttaggaaagacctcatgcttttatgggttttacttcctggatctttatcaagttctcgcagtgattacaggagaaaaattcctttgtgcttctgacagaggaaagggaaggaamttttttgaaatacaccagtgcattctgttcttaataagttctgccctcaggagaaaccatttagctagttgctgaaaattaaaattgctagagttttatcagaaactaactgacctggggggaagaggtgtcccaaccctatctggtcttccatgtggaagaaggaaaacacccaacttcagctcactctagttatcttatcccatctaagttgaggggatgtgactgagaagcatgtgtgaagttcgcagcccagagacacaggcttactaaaagactgagacctattcataagactat

SEQ ID NO: 874360 - DNA, 673 bp, Homo sapiens
taaccccccaggtgatcctgttgcacactcaaagaactactgagttagatcggagattttcatatctggctgtgcattaaaattaccgacactggggttgataaaggctttaaaaatcaccagtgtccaggtacagctctagactaattaggccagaaactctgtgtgcagctgaggactctctcggctctactgggctaaagggattaaggaagctgtgtcattacagaagacagatggcattcaaatttccagaatctttcccagatgcccacaaggacctgtccatggtccttaaagtcttagcaaggaacagaggggagggaagccacacctgtgttgtcatggccaagccggactttccacaggtctcccagatccagcgtctccaccgtgaagatttcaatgctgtccctctcaaacttatcgctgtttgtcttggaggacttcaggagggtcattcctgtggatcagatgaccccagcatgactggctggacctgaggyctttcaagcctagtcagacccaaacctttaatcccttttcaaaatgaccaaatttctgaacttccaccaaatttagactgtgcaattatcatccattggccacctttgcacagtgggcattttaaaaaattttttatttcaatagcttttggggtacaggtggtttt

SEQ ID NO: 874361 - DNA, 656 bp, Homo sapiens
ggagagagaaaccacatgaatttcaacaggagaaagttaatataaataatttttaattataacaagggattggagtatcaagagattgactagtaagtagagaaaacgctaaagaatataagaatagtagatgcagggaggagccattgtcactacagatgagagagactacctaagataaaggacycctgggctgagatccagaccttattggagaggatacagaatggagagaaaatgcaatcatgctgtgctcatgaaacttgctgaaaatctacattctaggatgctagggaaagttgttcataaggagatagctcaccagagaccctctgctataaaatcacccccaggaagctactggggggaagctgctggccactggatgctgctgactgccatgtactgcaggaactgggtattggagaagctgtacatgctgcagctaagcctgacaggcaagcacatcagaaccaggaaataaaatcctctctagtgactttagtgagaatagtgaattaagaaattccaagagcctgcccctccaccaaactaacaaataaacaggcacaaattgttagaatgaactttaatggaactggtcaaaggtctgcatcaatgaggtgaacacttgatcaaaaaaaagatgacaatct

SEQ ID NO: 874362 - DNA, 615 bp, Homo sapiens
acattgcaaacaatggttttcattttctgcccccaccaccaaactgtcagctacttgaaaataatggctatattttactttacttgacagagcaatggcttcatacagtgcttcagaaatgcttgttgctcaaataaatccatttgaaaaattaacctccttgctctgtagttttacctcacatgatctgacatacttgtcatctgcagttcaatgtcaacccaggagtaattttacaagaaagattgtgatagtgttgaccctcgacgctyatattagtttttcaacaataatctaaatgctggtagagaaagaaggctaatacacaaaacagtaacatgagctacggaagtgagccaggactttaacaagaaaacataactgaattagtcttcaaaatgacattggtaacttaaagaaatcatttatctcagaataaagaacttaagcaaatgtacacatgagctatttaggcccatattagagctatttctctatcaatgaaaaatacacccagaaaagcttactatgaagcacaattctcagtatgtaaatctattatcttgcattaaaaataccacacaaatagcctaccgcccagcaattcctttgagg

SEQ ID NO: 874363 - DNA, 544 bp, Homo sapiens
catcccattctggaaagaatcagaacacagcccagattgttctagacatttttttcttatctcaggatgttgcattctctgtatattctgcacaagattgcaagcaagaggggaaagagtggagttggccaagattatttgaagatttgtcctcctgtagatggagccagaattttgttctggaaggtcaggactataagaaacttaactgatttgcataatgcaaaaagttgttcttgttagagacaaaaagktgactgctctcttaatctattctatgtgctacaataaaatagcataaactaggtagcttataaatagcagaaatttatgtataacaattttggaggcttagcaaatcaaaaaccaaggtgccaatagattaggtatctggtgaggatcactttctcatagatggtgtctttttgctgtctcttcacatggtggaaggggcaaacaagctccctcaggtctcttttataagaacactaatcccattcattagggctccactctcattatgtaaactccttctaaaggcccc

SEQ ID NO: 874364 - DNA, 544 bp, Homo sapiens
catcccattctggaaagaatcagaacacagcccagattgttctagacatttttttcttatctcaggatgttgcattctctgtatattctgcacaagattgcaagcaagaggggaaagagtggagttggccaagattatttgaagatttgtcctcctgtagatggagccagaattttgttctggaaggtcaggactataagaaacttaactgatttgcataatgcaaaaagttgttcttgttagagacaaaaagttgactgctctcttaatctattctatgtgctacaataaaatagcataaactaggtagcttataaatagcagaaatttatgtataacaattttggaggcttagcaaatcaaaaaccaaggtgccaatagattaggtatctggtgaggatcactktctcatagatggtgtctttttgctgtctcttcacatggtggaaggggcaaacaagctccctcaggtctcttttataagaacactaatcccattcattagggctccactctcattatgtaaactccttctaaaggcccc

SEQ ID NO: 874365 - DNA, 688 bp, Homo sapiens
ggcacacagtttatattgcatgtatgtatctactctagacattagcgtgtcacacttagagttacaatatatgccattctgccgggcgtggtggctcacgcctgtaatcccagcactttgggacgctgaggctggtggaccacgaggtcaagaaattgagaacatcctggccaacatggtgaaacctcgtctctactaaaaatacaaaaattagatgggcatggtggcataggcctgtagtcccagctactcaggaggctgaggcaggagaatcacttgaacccgggaggcgcaagttgcagcgagccgagatcacgccattgcactccagcctgggcaacagagtaagactccatctcaaaaaaaaaaattatgccattcattgctagttcattaagcagtgaaggtgatgagcatgcattttatctacaatggtaacatcattcatccctcatgtctactgtcctttcagatatttatgctaccaccagtactccctytgagcccctcaaaaatcattagctcacacaaataaatccaaaaatatttttgaatatttcttttttgaaagggacaaattgtatattacacaacgcaagatattttaggataattttgagggatttttccaagtaatgtgaccaagaaattaaactcattagctaattatttttgcttatttaaccta

SEQ ID NO: 874366 - DNA, 617 bp, Homo sapiens
ccagtgggatttgagaccaaataagtacatttatgatggtgacagaatgacatccaaagttttagtctatctttcaactgagagtttgaccaaaagaagagagttgttaaattaagtttagcctaaaggtttttatatattttaaaggtttctctgtacatagtgaactgctccctgactggatgtgtgaacagactgtaacctactcttatgccaatcaccaagttttggccartgaagagcagccagctcttcaaaccatgttcaaataaggcaaatgccacactgtaaacaatccagttgtttctgtacctcacttctgtttttttgtgtgtcactttccttttcctgttcataaatcttctttgaccatgtggtagcaatggaacctccctaaacttctggtttggtgactgccaggttcgtgaattgttcttttctcaattaaactctgttgaatgtaatttgtgtaaggttttacttttaacaagattaatgggaagccgttgagaaagttaaattcagcataaatccctgagccagtttaggcagaaactggtttgatttgaaaccaattttgtgtaactttcctctgtccaaaacaagattgtttaaag

SEQ ID NO: 874367 - DNA, 638 bp, Homo sapiens
acaattttgtccagtgtgtgctatttggctggctgaattattcagttatgttcatatctttttgactgatctactttatacttcctaatattttaatcaaaaattaatttttgttacttaagccattttaactatctgtactatagaacaatctattatatataatgaataataaagatatttgcaaagtgtctgggtgtggtgcctcacacctgcaatcctagcattttgggaggccaaggagggtggatcacttgaggtcaggagttcgagaccagcctggctaacatggtgaaacccygtcactactaaaaatacaaaaacattagccgggtgcggtggcacatgcctgtagtcccagctacttgggaggttgaggcaggagaatcacttaaacctgggaggtggaggttgcagtgagctgagatcgtgccactgcactccagcctgggcaacagaccaagactccatctcaaaaaaaaaaaaacaaaaaacaaaaaacaaaaacgatatttgaggtgagatatttgcaatccctggctcattctcctaaataatctgaaacgttaatttttctttcagtttgtgatagcaaaacacttaaatagaaaaaatgttagtttagtaatattcatttc

SEQ ID NO: 874368 - DNA, 638 bp, Homo sapiens
acaattttgtccagtgtgtgctatttggctggctgaattattcagttatgttcatatctttttgactgatctactttatacttcctaatattttaatcaaaaattaatttttgttacttaagccattttaactatctgtactatagaacaatctattatatataatgaataataaagatatttgcaaagtgtctgggtgtggtgcctcacacctgcaatcctagcattttgggaggccaaggagggtggatcacttgaggtcaggagttcgagaccagcctggctaacatggtgaaaccccgtcactactaaaaatacaaaaacattagccgggtgyggtggcacatgcctgtagtcccagctacttgggaggttgaggcaggagaatcacttaaacctgggaggtggaggttgcagtgagctgagatcgtgccactgcactccagcctgggcaacagaccaagactccatctcaaaaaaaaaaaaacaaaaaacaaaaaacaaaaacgatatttgaggtgagatatttgcaatccctggctcattctcctaaataatctgaaacgttaatttttctttcagtttgtgatagcaaaacacttaaatagaaaaaatgttagtttagtaatattcatttc

SEQ ID NO: 874369 - DNA, 591 bp, Homo sapiens
cactgaactcagatcaaaaggaatattttttacccataaattcatcagacttaaaagtcaaatcttgtacaaaatagttcctttgaacatgatgttctttacttattttggattagtgtaaaaactagaactggctcctggtgatatgagatagttacttttgatcactgctgcctaaattgcaatgacattttctaaarttctaacaccaaggacactaacctgcaactgatgagttctgtctgagaaagcacaatatagggcatcaataaaagtaaacacacaggggctacttaatgcagagggtaatacagccgccttgacaccctaaggatctgggtttacaaccaactgagctcattgcttcaaggagtctaaggtcagtccctgtccattttctacgcattgaaaatcacccactattcagcataattgacaagttactttccaataggactgtgcattaaaacagaggttatttttcctgcattttcaaaagcaatgtccagacatacacaattctgatagttttggggggctgactgtataataaagttcccaaatttaatttcaggcttcacttggcttctg

SEQ ID NO: 874370 - DNA, 614 bp, Homo sapiens
ttagtggtattaattttaacttgagtagaataaccctagttgcatcatgtgttgtcttctgttgatgtgtttctgttaccaaaaaaggagcacttttattactgacttttttcttttctctctttttagtaattcaagggacacctttgcattcctctcaattcatagaccttgctcttcttgctcttcttcttatccacctcctatacttttttcttccttcctgacctccctctcaaagaattagaggcaaatatttgtgttctttttactcttagggttgctcattttgaatgtgcaacagtaggaggattctattattttttctactgcattgacttctataatcattcaacaggagtctgttacctggttaacagtaatacaacttgtggttgactattttattcataaaatattttaatattattaaattaaaaaatacattgatgaaaragtatatgtttattatcaaaaaagtactaactgcaattttctcttataactatagcctcctctttagtatttggaatacttcattggtaaaaatagagtttacatacaactcatttattatgcaatataagaatattccctagattagtttttgaata

SEQ ID NO: 874371 - DNA, 678 bp, Homo sapiens
taatccagtctatcattgttggacatttgggttgattgcaagtctttgctattgtgagcagtgctgcaataaatatacgtgtgcatgtgtctttatagcagcaggatttataatcctttgggtatatacccagtaatgggattgctgggtcaaatggtatttctagttctagatccctgacgaatttccacactgtcttccacaatggttgaaatagttcacagtcccaccaaccatgtaaaagtgttcctatttctccacatcctctccagcacctgttgtttcctgactttttaatgattgccattctaactggtgtgagatgatatctcattgtggttttgatttgcatttctctgatggccagtgatggtgagcattttttcatgtgtcttttggctgcataaatgtcttcttttgagaastgtctgttcatatccttcactcactttttgatggggatgtttgtttttttctttgtaaatttgtttgagttctttgtagattctaaatattagccctttgtcagatgagtaggttgcaaaaattttctcccattctgtaggttgcctgttcactctgatagtagtttgttttgctgtgcagaatctcttgagtttaattagatcccatttgtcaattttggcttttgttgtcattgcttttggtgttttagat

SEQ ID NO: 874372 - DNA, 678 bp, Homo sapiens
taatccagtctatcattgttggacatttgggttgattgcaagtctttgctattgtgagcagtgctgcaataaatatacgtgtgcatgtgtctttatagcagcaggatttataatcctttgggtatatacccagtaatgggattgctgggtcaaatggtatttctagttctagatccctgacgaatttccacactgtcttccacaatggttgaaatagttcacagtcccaccaaccatgtaaaagtgttcctatttctccacatcctctccagcacctgttgtttcctgactttttaatgattgccattctaactggtgtgagatgatatctcattgtggttttgatttgcatttctctgatggccagtgatggtgagcattttttcatgtgtcttttggctgcataaatgtcttcttttgagaactgtctgttcatatccttcactsactttttgatggggatgtttgtttttttctttgtaaatttgtttgagttctttgtagattctaaatattagccctttgtcagatgagtaggttgcaaaaattttctcccattctgtaggttgcctgttcactctgatagtagtttgttttgctgtgcagaatctcttgagtttaattagatcccatttgtcaattttggcttttgttgtcattgcttttggtgttttagat

SEQ ID NO: 874373 - DNA, 678 bp, Homo sapiens
taatccagtctatcattgttggacatttgggttgattgcaagtctttgctattgtgagcagtgctgcaataaatatacgtgtgcatgtgtctttatagcagcaggatttataatcctttgggtatatacccagtaatgggattgctgggtcaaatggtatttctagttctagatccctgacgaatttccacactgtcttccacaatggttgaaatagttcacagtcccaccaaccatgtaaaagtgttcctatttctccacatcctctccagcacctgttgtttcctgactttttaatgattgccattctaactggtgtgagatgatatctcattgtggttttgatttgcatttctctgatggccagtgatggtgagcattttttcatgtgtcttttggctgcataaatgtcttcttttgagaactgtctgttcatatccttcactcactttttgatggggwtgtttgtttttttctttgtaaatttgtttgagttctttgtagattctaaatattagccctttgtcagatgagtaggttgcaaaaattttctcccattctgtaggttgcctgttcactctgatagtagtttgttttgctgtgcagaatctcttgagtttaattagatcccatttgtcaattttggcttttgttgtcattgcttttggtgttttagat

SEQ ID NO: 874374 - DNA, 616 bp, Homo sapiens
gtagcccccaaagcaagtgaggcccctaaatgccacagagtaaaatatagcaggaaaaaaaaaaaaaaaaaaaggttactggacccagaccaaccctcctcatacagccaagtctggcatgggactctgaggtgtcttagaattctaaagtcaaacctgaccttccatgtcattacaaaagtcaggaatagatttttttttagcagcttgatttatatcttttaaatatttagataaatgtcaaactattctccatttgtactcttgctgatgttagggatgttaggggtgtacctggggaaattcatcmtcgccatcctccttttaatggcaaaagaaagaagctgcattatacagcatggatgctaatttctgaatcacttgaatatcctgtttgtagggcattgtctcattccagagttccaagagctccaaagcccagaacttcctctgtgttttgatcccatgtatctaccctgggcctctttctttagataggcttttatgtttgacaataaatagattggaaaatggttgatgaaacaccgtggtctatgcctgttaaagttttttttttcttttattataattttttttattattattatactttaag

SEQ ID NO: 874375 - DNA, 660 bp, Homo sapiens
agaaagcttacaagctagaagagaataggggccaatattcgacattcttaaagataagaattttcaacccagaatttcatgtccatccaagctaagcttcataagcgaaggagaaataaaatcctttatagacaaacaaatgttgacggattttgtcaccaccaggcctgccttacaagaactcctgaaggaagcactaaatatggaaaggaaaaactggtacagccactgcaaaaataaaccaagatgtaaaggccgttgacacggtgaagaaactgcatcaactaatggrcaaaataaccagttagcatcataatgacaggatcaaattcacacataacaatgttaaccttaaatataaacaggctaaataccccaattaaaaggcacagactggcaaatttgataaagagtcaagacccattggtgtgctgtattcaggagacccatctcatgtgcagagacacagaaaggctcaaaataaaatgatggaggaatatttaccaagcaaatggagagcaaaaaaaagcagggtttgcaattctagtctctgataaaacagacttcaaacaaacaaagatcaaaaaagacaagagcattacgtaaaggtaaagggatcaattcaacaggaagagctaactaacctaaatatatatgcac

SEQ ID NO: 874376 - DNA, 616 bp, Homo sapiens
ctggggaggtctcacaatcatggaagaaggaaaaaggcacgacttacatgggggcaaacaagagacaacttgtgcagggaatcttgcctttataaaactgtcagatctcacgagacttattcactatcttgagaacagcacatgaaggacctgtgcccatgattcaattacctcccaccaggtccctccaatgacacatgggaattgtgggagcaacaattcaaaagatgagatttggggacacagccaraccatatcattctgtccctgacccctcccaaatctcatgtcctcatatttaaaaaccaattatgccttccaaacagtcccccaaagtcttaactctttttagcattaactcaaaagtccacagtccaatgtctcatctgagacaaggcaagtcccttttgcctgtgagcctgtaaaatgaaaagcaagttagttaattcctagatacagtggggatacagggattggataaatacagccattctaaatgggagaaattggccaaagcaaagggctacaggccccatgcaagtccaaaatccagtggggcagtcaaatcttaaagctccaaaatgatcttttttgactccatgtctcacatccaagt

SEQ ID NO: 874377 - DNA, 616 bp, Homo sapiens
ctggggaggtctcacaatcatggaagaaggaaaaaggcacgacttacatgggggcaaacaagagacaacttgtgcagggaatcttgcctttataaaactgtcagatctcacgagacttattcactatcttgagaacagcacatgaaggacctgtgcccatgattcaattacctcccaccaggtccctccaatgacacatgggaattgtgggagcaacaattcaaaagatgagatttggggacacagccagaccatatcattctgtccctgacccctcccaaatctcatgtcctcatatttaaaaaccaattatgccttccaaacagtcccccaaagtcttaactctttttagcattaactcaaaagtccacagtccaatgtctcatctgagacaaggcaagtcccttttgcctgtgagcctgtaaaatgaaaagcaagttagttaattcctagatacagtggggatacagggattggrtaaatacagccattctaaatgggagaaattggccaaagcaaagggctacaggccccatgcaagtccaaaatccagtggggcagtcaaatcttaaagctccaaaatgatcttttttgactccatgtctcacatccaagt

SEQ ID NO: 874378 - DNA, 564 bp, Homo sapiens
gttaatgaaaaattttcctaaggctatacaagaaaaacgattacatcatccaaaaaccagtacatcatccaaaagactctagaacaggcttcatagaagatacaaactgatatcaaaatgtctctttttcaatgtaaacacrtattaaaatggcttaatgcacagttgaccatttttcctctttaggaaaatgtttttatatttttacacctgtatatatgttcacaatatttatattcaagtatttatataaagttcaaattttacaacccttttgtactgccactaactataaaaatgattcaaaacatggatttggtggtctgtattgattagaccttcaatcttcacatagaccttcaattagaccttcatatagcctagttatatgttggtaccaaattccttagaaagggcctaagtattaaactaactaaaatttagttaaacagatcaggagcattttaagagtcctgaaagtctgagaatctacttttagacctttagcaacttagatatttcaacactctttccaaatttatggcatttgtttttattttcttt

SEQ ID NO: 874379 - DNA, 654 bp, Homo sapiens
gaatttcatttcctacctgtccacaaaagctgagagttcatagactgtgacctccctatatgagtacataaacatttacttaatactttgtgaaaattgtagagtaggtcatcatacaaatataaaatcatttatttagtccgttttctgctaaaggaaattgagaagttactttttcctatttttaaaattataaatagtattataataaacattttgtttatatattcttggacatttataaaaatatgtctatggagtaaatttcttagaagtggaatttcttgctcatatagatttctgcatttttgatattgrgagattgccaaataaatatttttaagaaatttcaactctttctccaaccaataacctttacattgtttttctgcttacaataatagttgaattaaaaatattaatgcatcacatattaaaaagaaatacaatactttggttcttatattccataacaataattctaaacccatgtagaagtgtcaggaaacttgttggtaaaaatcttgaatgaattcaaaattgtatttgaagatttgtgaaaatttgagaattccttagggagtagtcaaatatgaatagggccctgattcttgttaggacaaggaagaacggagtgtaagccattctattgcc

SEQ ID NO: 874380 - DNA, 642 bp, Homo sapiens
aaaggtcgggttaccaacaaagggaagcccatcagactaacagtggatctgtctgcagaaactctaccagccagaagagaatgggggccaatattcaacattcttaaagaaaagaattttcatccatgtgtaactaacctgcacaatgtgcacatgtaccctaaaacttaaagtataattaaaaaaaaagaaaagaattttcaacccagaatttcatatccagccaaactaagcttcatacatgaaggagaaataaaatcctttacagacaaggaaatgctgagaaattttgtcaccaccaggcctaccttacaagagctccagaagtaagcactaaacatggaaaggaacaactggtactagccattgcaaaaacataccaaattgtaaagaccattgacgctatgaagaaactgcatcaactaacaggcaaaataaccagctagcatcataacgkcaggatcaaattcacacataacaacattaaccttaaatgtaagcaggttaaatgtcccgattaaaagacacagactggcaaattggatagagtcaagacccatgagtgtgctgtattcaggagactcatctgatttgcaaagacaaacataggttgaaaataaagggatggaggaatatttacca

SEQ ID NO: 874381 - DNA, 616 bp, Homo sapiens
catctgatttgcaaagacaaacataggttgaaaataaagggatggaggaatatttaccaagcaaacggaaagcaaaaaaaaaccaggggtcgcaatcctagcctctgataaaacagactttaaaccaacaaagatcaaaagagacaaagaagggcattacataatggtaaaggratcaatgcaacaagaagagctaactatcctaaatatatatacacccaatagaggagcacccagattcataaagcaagttcttagagacccacaaagagacttagactcccacacaataatagtgggagactttaacaccccattgtcaatattaaacagatcaaaaagacagtaaattaacaaggatatccagaacttgaattcagatctggaccaagcagacctaacagatatttacagaactctccacccaaaatgaacagaatgcagattcttctcagcaccacatcacacttattctaaaattgaccacataattggaagtaaaacactcctcagcaaatgcaaaagaatggaaatcgtaatagtctctcagaccacagtgcaatcaaattacaactcatgattaagaaactcaaaaccgaacaactacatagaaact

SEQ ID NO: 874382 - DNA, 594 bp, Homo sapiens
gtttatggattgatgtagggcttattaacttgatctgcttctacagttatttttatttttatttttttctttgatagagcttttatattatattttaagttctagggtacatgtccacaacatgcaggtttgttacatatgtatacatgtgccatgttcatgtgctgcacccattaactcaccatttacattaggtatttctcctaatgctatccctcccccatacccccagctcatgacaggccctggtgtgtgawgtccaccaccctgtgtccatgtgttctcattgttcaattcccacctatgagtgagaacatgtggtgttgggttttctgtccttgtgatagtttgcccagaatgatggtttccagcttcatccatgtccctgcaaaggacatgaactcatccttttttatggctgcatagtactccatggtgtatatgtgccacattttcttaatccagtctatcattgatggacatttgggttggttccaagtctttgctattgtgaatagtgctgcaataaacatacgtgtggatgtgtctttatagcagcatgatttataatcctttgggtatatacccactaat

SEQ ID NO: 874383 - DNA, 601 bp, Homo sapiens
ttacatggcagcaggagagagagagtgcccacagagaaaacctgccagtcttaaaaccctcagatctcctaagagctccttcattatcatgagaatactatgggggaaaccacacccgtgatccaattaccacccactaggtccctccctcaacacatggggattacaatttgagaggagatttggatggggacacagagcaaaaccctatcaaccaccaatcatgagttctgtaccctgcaaaattatccttcgaaagtgagagaaataaaaactttctcaaacaaaaattgagaatctcttgctagttgacctatttttcaggaaatgttaaaagttcttcagagaggccaggcgcagtsgctcacgcctgtaatcccagcactttgggaggccaaggcaggtagattacgaggtcaggagttcgagaccagcctggccaaaatagtgaaaccccgtgtccactaaaaatacaaaaattagctgggcatggtgtctcatgcctgtagtcctagctactcaggaggctgaggcaggagaatcacttcaacctgggaggcagaggttgtggtgggccaagatcgcgccactgcactccagc

SEQ ID NO: 874384 - DNA, 688 bp, Homo sapiens
caataaaagcccagaaccagagagactcacagctgaattctaccagaggcacaaagaagacctcctaccatttctactgaaattattcaaaaaaattgaaaagaagggactcctctctaacacatcttatgaggtcagcatcaccttaatgccaaaacctggcagagacacaacaaaaaataagaaaacttcagaccagtatctctgatgaacattgatgcaaaaatcctcaataaaatactggcaaactgaatccagcagcacatcaaaatgcttatccaccacagtgaatttggcttcatccctgggatgcaaggttggttcaacatacacaaatcaataactgtgattcaccgcataaacagaaataaagacataaaccataaaccacatgattatctcaatagatgcagaaaagtccttcaataaaattcaacatcccttcatgttaaaamctcttaataaactaggtattgaggaacataccacaaaataataggagccacatatgacaaacccacagcatatatcatactaattggacaaaagctggaagcactccccttgaaaaccaggacaagacaaggatgccctctctcaccactcctatttaatgtagtattggaagttctgtccagggcaatcaagcaagagaaagaaacaaactgtatctgaataggaagataaa

SEQ ID NO: 874385 - DNA, 614 bp, Homo sapiens
aaaagaaaaaaatatgggcattgcataaggataaagtgttaaattaaacaagaagatctaactatcctaagtatatatgcaccaaacacaggaacacccagattcataaagcaagtttatggagaccttcaaacagacttagactcccacacaatagtagtgggagactttaataccccrtgacaatattagacagatcattgagacaggaaattaacaaagatattcaagatctaactcagcactaaatcaaatggccctgatagatatctacaggactgtcctacttgaaaccatacaattacatggtaattgaatgacctgctcctgaatgacttttgggtaaataataaaattaaggcagaaatcaagaagttttttgaactaatgagaacaaagatacaacataccagaatctttgggacacagctaaggcagtgttaagagggaaatttatagcactaaatcccacatcaaaaagttagaaagagctcacgttaacaatctaacctcacaactacaggaactagagaactgagagcagaaaaacctgaaagctagcagaagacaagaaataaccaaaattagagctgaactgaaggagattgagacat

SEQ ID NO: 874386 - DNA, 605 bp, Homo sapiens
gtgaacaagtttgtatctaaagtatattccaatgctatgtttctggttggaatgagctaattaattaaaaaattactaagtggatattacctctagctattttggggggaagtaccctagcctggggatttagagtgggactctgggtgcagaataactggtttgaatcttgtctccaccacttttttctttctttttcttttcttgctttcttttttttttttttggagatggagtcccgctgtgtygcctagactggagtgcagtggcgcgatcttggctcactgcaacctccgactcctgggatcaagcaattctcttgcctcagcctcccgagtagctaggattacagtacccaccaccatgcccaggtaattttttttgtatttttagtagacatggggtttcaccatgttggccaggctggcctcgaactcctgacctcgtgatctgcccgcttcgtcctcccaaagtgctgggattacaggcatgagccaccacgcctggtcaccaccacttctctctgtgtggctttaagcaagttacttaaattccctgcacttcagttttccgtagagttcatgtacatcagttgtcaaagggca

SEQ ID NO: 874387 - DNA, 605 bp, Homo sapiens
gtgaacaagtttgtatctaaagtatattccaatgctatgtttctggttggaatgagctaattaattaaaaaattactaagtggatattacctctagctattttggggggaagtaccctagcctggggatttagagtgggactctgggtgcagaataactggtttgaatcttgtctccaccacttttttctttctttttcttttcttgctttcttttttttttttttggagatggagtcccgctgtgttgcctagactggagtgcagtggcgcgatcttggctcactgcaacctccgactcctgggatcaagcaattctcttgcctcagcctcccgagtagctaggattacagyacccaccaccatgcccaggtaattttttttgtatttttagtagacatggggtttcaccatgttggccaggctggcctcgaactcctgacctcgtgatctgcccgcttcgtcctcccaaagtgctgggattacaggcatgagccaccacgcctggtcaccaccacttctctctgtgtggctttaagcaagttacttaaattccctgcacttcagttttccgtagagttcatgtacatcagttgtcaaagggca

SEQ ID NO: 874388 - DNA, 575 bp, Homo sapiens
aatactgtatcagctactatagctaattatgttatcatccgagtatccccaggacatcattttttaatttcctttcttattttttatttttatttttattagactatgtcttgctactgctagagtgcagtagcatgatcatagctcactgcagccttgaactcctgaactcaagccattttcccagctcagcctcctgagtagttgggaatgcaggcatatgacaccagttaattaaaaaacaaattgtagagattggtcttgctgtgatgctcaggctgttttcaaactcatggattcaaggtatccctttgcctcaggctctcagaacactgagacyacaggcatgaaccacagtgctcagcctcacccttcattttctgattgtagctaccgtcccactgtcactttctcaaatatcactaaacaattcatggaagtttcaatatatagaaataacaatttcaaaatcctagccattcagttcctggaactctgttcctataaatgatttttttccatttccctacttcatccttgttattcacatgattatactatagacattacaattg

SEQ ID NO: 874389 - DNA, 621 bp, Homo sapiens
agaagcttttgtcatgtggcttaaccattttatacttctgtcatcagtacatgagaattgcaattgctttacttcctcaacaatatttgaagttgttagtctttttaattttagttgttctaatggttaagtcgtgggcctatgctatttctttttttttttttgagatggagtctgkctctgtctccaggctagagtgcactggcatgatctcggctcactgcaacctctgcctcctgggttcaagcaattcccttacctcagcctcccaagtagctgggactacaggcacgctccaccacgcccggctaattttttgcattttagtaaagacagggttttatcatgttggccaggatggtctcaatctcctgacctcgtgatccaccttccttggcctcctaaagtgctgggattacatgcgtaagccatcatgcccggctgggcctatgctatttctatggaggattgtctacagggaaaatattatcttcaaaatatgataatttatgataaagatgaaataattttctcactgagctgagttagaacctctaaaatgattcaatgagagtggatctacctgtattgataaagtccaaggggaatgtggtacttgac

SEQ ID NO: 874390 - DNA, 516 bp, Homo sapiens
ccaaatattttaccatcttctgccagcacggaattcaagcatgtagtatgggcatctgaaaagcaaaatctcaggaggccaagaaaaacatgagctaatcctttaggtttcccagttatttgcaaatttgcctttcaaagtaagaaacagctaggaagaaaagrgactgggctgatggtttccacaacagcctcaaaatgaaaacatatggcatttttgcttaagagtgacatttactcaatgatttttttttcctgacacaaagaaggaatttaattaaacttttttctttcctaataggaccaggttgttgagatttagtgccataggtctgttacagggctgagaaattattggacagtggctatataggtgcagagtagtaatgaagttctctcaagtctgtttcctgctggtctccccctcctctcctgttccttcactctaggcatattgtatgtattaatccattttcatactgctgtgaagaaatacctgagactgtataatttataa

SEQ ID NO: 874391 - DNA, 651 bp, Homo sapiens
agaaaggaatataaaagtgaaccggcaataaataattccaaaatgttataaacctatgaagaaacaaataataaggatgtgttttgagatggaacctagtgtaaatcatggagtgagagaaaatgtttcacaagaggtgaagtgtaagttgatatctaaagcaaatggtaaaaaataattgaatgtaagctgatattttatatctgagcaaaagkcaggtaaggtgaaaagtgttctaggaacaggggtctgtgcaaaggccctgtgataggagagagctggccattcccagaaactgaaagaaggattttgagaacaggagaaatattttaaaaggaaggcagaagtttataatttgggctatagaaaaaaaaatgcccctagatttagccaaagtaccttgaacagtcattgcagaattttaggaaggattctaacaagacctgatattcaagctcctttgattgttgtatctactgaagggaaaagacttaacagggaattgactagacagattgtgttgagagtgaacatactgagactagttgacaggctctactattttatcttccacataagagatcagaattgtttggctacattataaatatttttgaagatagaactcagaggactcaatcactaataatt

SEQ ID NO: 874392 - DNA, 583 bp, Homo sapiens
tttctcagtactttaaagatgctgttgaaatctggtttgcgttgtgcctgacaagaagttggctgtcattctcttccatatttttctacaaataaaattttccttgctctattcccagctgttttcaaaattttaaaaaatctggccaacatggtaaaaccccatctctactaaaaatacaaaaattagctgggtgtggtagcatgtgcctgtagtcccagctactcaggaggctgaggcaggagaattgcttgaatccaggaggtggaggctgcagtgagccaagatcgcgccattgcactccagcctggcaacagagtaagactccrtctcaaaaaaaaaaaaatgtatatatatatagtttttaatcatttttatatgatcgaccttcatgtagttttcttaatttttcttgtgttaagttccgttgtgccttatggctctgcaagtttgtagtttaaatttggaaaatttgagccattatttctttaaacatttttttctgttccctcatctcaccatcaaggattttaattacaagtgtcttaggccactttaggttgtctcataacccataactcac

SEQ ID NO: 874393 - DNA, 639 bp, Homo sapiens
attactctgttgccaaggcaattattctacctgcaatcttccaaaagtctttagatactttcattttagataatattaaaccttgagttgctagtttaacaatgtggggttgtggagtggccagcaattctgcatgtcctgtgttcccagctcaccaaatttgccaactgagtgtacgatcatgggaagtcacttaaattctctgggtctgtctttcctcatgggcagacattcccttgggctccactgagtctggctggagcctgcaagtggacagaggtgcaaagagagatgcagttttccaatttcacttgmttagttcaaggttgctcttttatcaatgacctctttcattcatcatgtcattttagatgtttggtttttagcccaagtgaagaaaaaaatgtattcttgaaaaggtgagtattatagggactggtatgagggtggtgactgcatgtcaatggatggtgatgaatagtacattcaatacaatcgatgacaaagttatggatcttattatttcataccttgcattcacttcactttctcagagtctccagaatatgaataatgacccttttatgggtttaagggtctaacctttacttggcaaatgagattgcatacagaatatta

SEQ ID NO: 874394 - DNA, 633 bp, Homo sapiens
gccaggcgtggtggcttacacctttaatctcagcactttgggaggctgagatgatctcagcctgaggtcaggagttcaagaccagcctggccaacatggcaaaaccccatctctactaaaaatacaaaaattagctaggaatggtggcatgcgcctgtaatcccagctacacaggaggctgaggcaggagaatcacttgaacctgggggatggaggttgcagtgarccaaaatcatgccattgcaatctagcctgggcgacagagcaagattccgtctcaaaaaaaaaaaaaaaaaaaaaaaaaaaaaagccaataaactagatattcatggaacatgtatcaaaataataagagctatttatgacaaacccacagccaatgtcatactgaatgggcaaaagctgaagcattccctttgaaaaccagcacaggacaagggtgccctctctcaccactcctcttcaacatagtattggaagttctggccagggcaatcaggcaagagaaagaaataaagcgtattcaaataggaagagaggaagtcaaattgtctctgcaggtgacatgattgtatatttagaaaaccccatcgtctcagcccaaaatttccttaagctggtaagcaacttcag

SEQ ID NO: 874395 - DNA, 654 bp, Homo sapiens
caacaaacacatcattcaccatgaactgcattaagactcctgaagcagaaatactggaggtgctcaagtatcacaatgtcagtaatttcacacaaatatactcaaatgatgtgctcctcaccattcattttccaaactaccrtgggttgtgtttggcaagcttataggcaagatatttagatggttattttcatcttttcctctctgaccgagttatgatagtaaaaagccctgttgataatctccttggctacaacttcttcttttgtgttggctcttaaatatctcaaaagttaaaaaattggggtgggaggaagaaatggctggaaaagtgaaacatggagccttaataagaactcagatttttaaactgttagaaaacagtttgatgataaagaattcaggaaaatgcaggacaaaaaaacaaaacaaaaaaaaaaacaagaaatacagacttcaagtttctaattagagtttaaaaccagcctcaaaacttgcgacataagctcagtcaggtacctgaccattttgctataacccctccatcttaacctctaaactctctaaactggggagtagttccgtatataaaagtgtttggtgggatgagcttgggatttgtagagaactccaggtttgaatccagtcaagaga

SEQ ID NO: 874396 - DNA, 654 bp, Homo sapiens
caacaaacacatcattcaccatgaactgcattaagactcctgaagcagaaatactggaggtgctcaagtatcacaatgtcagtaatttcacacaaatatactcaaatgatgtgctcctcaccattcattttccaaactaccgtgggttgtgtttggcaagcttataggcaagatatttagatggttattttcatcttttcctctctgaccgagttatgatagtaaaaagccctgttgataatctccttggctacaacttcttcttttgtgttggctcttaaatatctcaaaagttaaaaaattggggtgggaggaagaaatggctggaaaagtgaaacatggagccttaataagaactcagatttttaaactgttagaaaacagtttgatgataaagaattcaggaaaatgcaggacaaaaaaacaaaacaaaaaaaaaaacaagaaatacagacttcaagtttctaattagagtttaaaaccagcctcaaaacttgsgacataagctcagtcaggtacctgaccattttgctataacccctccatcttaacctctaaactctctaaactggggagtagttccgtatataaaagtgtttggtgggatgagcttgggatttgtagagaactccaggtttgaatccagtcaagaga

SEQ ID NO: 874397 - DNA, 661 bp, Homo sapiens
aagtgacagagaagctgaattcaactggctgaaacaataaggaatttagtatctcccataacaagaggtctgggttatgtctgccctatagttggttctttcagtttgttcaacagcatcatgaaagatccggatgcttttcatctttcctgttcccaagatcacaagatggtggcaacatttccaggtgttatatcctcacaatcatgagcagaggcagaaaaggcaggagggagtcttacccagaagcccctcagcagactttcccttttgtcttattggctagaattgtgaatcatgtgtcacgcctaagtcaaccaccacaggcaagagaagraagtcattgtaattgacctagaacaattttttttttttttttggagacggagtttcacttttgttgcccaggctggtgccatctcgccccagcctcccgagtggctggattacaggcacgcgccaccatgcctggctaattttgtatttttagtagagatggggtttctccatgttggtcaagctggtctcaaactcccaacctcaggtgatctgccagcctcggcctcccaaaatgctgggattacaggtgtgagccactgcgcccggctgaaccatcttttttttaaagggctctccttctgttgcccaggctggagtgcag

SEQ ID NO: 874398 - DNA, 606 bp, Homo sapiens
aaattttccacaataaacaagtatttgcattataaacagaaggaatttttttcttaaaaaaaattcaatgtaataaaatacttgcacaaataatctgtgaggtaatgtaaatattaatagaaaacacactgaaaaggccagctacagtggctaacacctctaatcccaacactttgggaggtaaaggtgggaggatcgcttcaggccaggagtttgagaccagcttgggcaatacagcgagaccctcacctctacaaaaaaaaatttttttaattagctgggtatggtttcacatgcctatagtcccagctactcaggaggctgaggtgggagggtcatttgagcccaggagtttgaggctgcagtgatctatgatcacaccactgcactccagcctgggygacagagcaagaccctgtctctaaaaacaaaaaaatgaaaaccaacactgaaaagaaactaaaataacacatgtaaataaacataaaatactacttttgtagttaaaaatctataaatgttacttttaaataacatgaaatttctaagcattctatttttttaaagccaggtaacattctcaaatcttcaatgaataaattctaa

SEQ ID NO: 874399 - DNA, 654 bp, Homo sapiens
gaaactggccaatacaaagggctacaggccctatgcaagtcataaatccagcagggcagtcaaatcttaaagtttcaaaatgacctcctttgactccatgtcttacatcctggtcacgctgatgcaagatgtaggtacccatggttttgggcagctctgtccctgtgcctttgcagggtacagcctccctcccagctgctttcatgggctggcattgtgtctgtggcttctgcaggtgcacagtgcaagctgtcagtggatctaccattctggggtctggaggatggtggccttgtcttccaggacaggtgtgtcccatttcctctgcatgattgtaggaagcactccttacaattttccctttctaagcatttattccatgacttaacccaccaccactacaactgccatcactcagatataccaaaacttgggtaaataattatctttcttgtttayattgatcttttccaagctcacatttatttccatttctactattggaagtgatttggggctgggcacagtggctcacgcatccatctgtggtaggggaccatctcaggtggatggtcccctagtagggactctgtgtgggagctctgaccccacatttcccttctgcactgccctagcagaggttctccatgagag

SEQ ID NO: 874400 - DNA, 676 bp, Homo sapiens
atgcttggcattcagtagaaattatgagacataaacaagcaagggggggaaaagtcccatcgttaagagataaagcaatcaacacagacagcttagagatgctgggattatcacaaagggacttaaaaataactaggattcmtatgttgaaggtgctaatagaaaaggttgactgcatgaatgaatagatggaaatggactatttcagtcaagggaaatgggattagcattattctttgaatagttatagatcatttcttgtggctggaggcggggccttcattctatcagcacaaactgcctcaattatcagagaaaaatatgagggttcggctaggaaggaaggacgagggaatgactattaggtaggcaaccagcagcagtattgtgagggtacacatagagcatggaaatcattgctctttacaggatacttttcgaagacctaaggaaaactctgttcttatcttaccttaaccagctaggagtatgtatgtgtcatggttagggtaacctaagaaaggctggccacaaggacatcaaagccacatcactgatttccctggaccaagtcagatttcatcatacaatagatggacaggacaggcctctatagactccaggaagaaacagagcaaggaagaaaaactcaaaaagaaaattaaatcaagtagaa

SEQ ID NO: 874401 - DNA, 676 bp, Homo sapiens
atgcttggcattcagtagaaattatgagacataaacaagcaagggggggaaaagtcccatcgttaagagataaagcaatcaacacagacagcttagagatgctgggattatcacaaagggacttaaaaataactaggattcctatgttgaaggtgctaatagaaaaggttgactgcatgaatgaatagatggaaatggactatttcagtcaagggaaatgggattagcattattctttgaatagttatagatcatttcttgtggctggaggcggggccttcattctatcagcacaaactgcctcaattatcagagaaaaatatgagggttcggctaggaaggaaggacragggaatgactattaggtaggcaaccagcagcagtattgtgagggtacacatagagcatggaaatcattgctctttacaggatacttttcgaagacctaaggaaaactctgttcttatcttaccttaaccagctaggagtatgtatgtgtcatggttagggtaacctaagaaaggctggccacaaggacatcaaagccacatcactgatttccctggaccaagtcagatttcatcatacaatagatggacaggacaggcctctatagactccaggaagaaacagagcaaggaagaaaaactcaaaaagaaaattaaatcaagtagaa

SEQ ID NO: 874402 - DNA, 676 bp, Homo sapiens
atgcttggcattcagtagaaattatgagacataaacaagcaagggggggaaaagtcccatcgttaagagataaagcaatcaacacagacagcttagagatgctgggattatcacaaagggacttaaaaataactaggattcctatgttgaaggtgctaatagaaaaggttgactgcatgaatgaatagatggaaatggactatttcagtcaagggaaatgggattagcattattctttgaatagttatagatcatttcttgtggctggaggcggggccttcattctatcagcacaaactgcctcaattatcagagaaaaatatgagggttcggctaggaaggaaggacgagggaatgactattaggtaggcaaccagcagcagtattgtgagggtacacatagagcatggaaatcattgctctttacaggatacttttcgaagacctaaggaaaactctgttcttatcttaccttaaccagctaggagtatgtatgtgtcatggttagggtaacctmagaaaggctggccacaaggacatcaaagccacatcactgatttccctggaccaagtcagatttcatcatacaatagatggacaggacaggcctctatagactccaggaagaaacagagcaaggaagaaaaactcaaaaagaaaattaaatcaagtagaa

SEQ ID NO: 874403 - DNA, 620 bp, Homo sapiens
tgcactatcctctttggtcccccatgcacaataactttcttagtctctattctctttctcttctcctttttatatcttcctcatattattgcttcttcccaggatttcttcatctcattttttacagtgtttttcacttcttctggccatgataaactaagaaaaatgcatgacaatactcagaaatactgatccttgttccgtgggctatggccagggaagctgccatgagtttatcagtttttgccagctaggcagagttaggttgggttcatttttgtaaacaagactcagggggctggtttgtggcttttcctgaactagtgtttagccagggaaggctatgctattttcctcacgagatgaaaataaaggccattaaaaatggattaggctagtgtttgacatgagcgccctcatccatcttcctcctctgggccaagtggtggcccagaagagagstgattgccacagtcaggcactaagatgagagtttacagcctcagccacaaaccagctgtgggactttggggagattgcataaccttcttagggccgtgtttctgcatcaccagaaaagcccgacagtgaaatgtgtgccagctacttcacaaagggtc

SEQ ID NO: 874404 - DNA, 530 bp, Homo sapiens
atttattgccaggcgcgatggctcacacctgtaatccgagcactttgggaggctgaggtgagaggatcacttgagggcaggagttcaagaccagcctgggcaacaaagcgagaatcaaattctacaaaacatttaaaaatgcaccgagcagccgggcacagtggctcacgcctgtaatcccagcactttgggaggccgaggcaggtggagcacgagrtcaggagatcgagaccatcctggctaagaccatgaaacctcgtctctactaaaaatacaaaaaatcagctgggcgtggtggcaggcacctgtagtcccagctactcgagaggctgaggcaggagaatggcatgaacctgggaggcggagcttgcactgagccaagatcgcgccactgcactccagcctgggcgacagagcagagactgtctcaaaaaaaaaaaatgcaccgagcatagtggcacatgcctgtagtcccagctactcaggaggctgaggcagaggatcccttgggctgggaagtttgaggttag

SEQ ID NO: 874405 - DNA, 530 bp, Homo sapiens
atttattgccaggcgcgatggctcacacctgtaatccgagcactttgggaggctgaggtgagaggatcacttgagggcaggagttcaagaccagcctgggcaacaaagcgagaatcaaattctacaaaacatttaaaaatgcaccgagcagccgggcacagtggctcacgcctgtaatcccagcactttgggaggccgaggcaggtggagcacgaggtcaggagatcgagaccatcctggctaagaccatgaaacctcgtctctactaaaaatacaaaaaatcagctgggcgtggtggcagrcacctgtagtcccagctactcgagaggctgaggcaggagaatggcatgaacctgggaggcggagcttgcactgagccaagatcgcgccactgcactccagcctgggcgacagagcagagactgtctcaaaaaaaaaaaatgcaccgagcatagtggcacatgcctgtagtcccagctactcaggaggctgaggcagaggatcccttgggctgggaagtttgaggttag

SEQ ID NO: 874406 - DNA, 652 bp, Homo sapiens
aattttaaaaatctaaataaataatatagcccctgccttcaaagatctagaaataaacattccctagaccaggatacaatgttaaggatagctcaccagaaaaacagaaagaccctgttcttggcagagccaccataccagccctagaatgtaaacctccagacaacacatggaaaaataaaactagaaaataaaatagtagaaaagtaaaactactaattgatttgagtcatttttggagggtttttgttattcatagctgaatacaatttctaacacatatggatcactaattaatatggaccccaaaagagggtatcttccctccttcatttctgggcagaagaaaatgcagaggaaagatgctatgatgaaaacatgataagaagctgagaaacagtatggaagttcatcaaaataggtctacaacataaytcagaaattccactactggatataaatctaaaggaaatgaatgaaaccattatatcaaaaatacgtctgcactcccatgtttattgagttattcacaatggccaagacatggaaacaagctaagtgtccaacaatgaatgagttgattaagaacatgtggcatatatacactggagtactatttaaccttaactaaaaaggaaatcttgtcatttgc

SEQ ID NO: 874407 - DNA, 652 bp, Homo sapiens
aattttaaaaatctaaataaataatatagcccctgccttcaaagatctagaaataaacattccctagaccaggatacaatgttaaggatagctcaccagaaaaacagaaagaccctgttcttggcagagccaccataccagccctagaatgtaaacctccagacaacacatggaaaaataaaactagaaaataaaatagtagaaaagtaaaactactaattgatttgagtcatttttggagggtttttgttattcatagctgaatacaatttctaacacatatggatcactaattaatatggaccccaaaagagggtatcttccctccttcatttctgggcagaagaaaatgcagaggaaagatgctatgatgaaaacatgataagaagctgagaaacagtatggaagttcatcaaaataggtctacaacataactcagaaattccactactggatataaatctaaaggaaatgaatgaaaccattatatcaaaaatacgtctgcaytcccatgtttattgagttattcacaatggccaagacatggaaacaagctaagtgtccaacaatgaatgagttgattaagaacatgtggcatatatacactggagtactatttaaccttaactaaaaaggaaatcttgtcatttgc

SEQ ID NO: 874408 - DNA, 546 bp, Homo sapiens
tagatattggcctggagggactgaggggtggcggaggcagatcttgagaacagaatagcattatgaggccctgtctcagtgtagatcctcacatggtcaccacgtaagaggctgctatcctccagcaagaggaaggtgactgggtcttctggtagtggaaattcaagggaatttgcagatttaagattctcaggctcctgactttttaatgatcaccattctaactggtgtgagayggtatctcattgtggttttgatttgcatttctctgatggccagtgatgatgagcattttttcatgtgttttttggctgcataaatgttttcttttgagaattgtctgttcagaggatgtggagaaataggaacacttttacactgttggtgggactgtaaactagttcaaccattgtggaagtcagtgtggcgattcctcagggatctagaactagaaataccatttgacccagtcatcccattactgggtatatacccaaaggattataaatcatgctgctataaagacacatgcacacttatgtttat

SEQ ID NO: 874409 - DNA, 573 bp, Homo sapiens
gtattggtaggatcatcagatggacagctctagagaaggagctttctggctcctctcctataacattacttaatgtgttacaagataacttacttgtctgctctactttccacttaacccagttggaaggaacacttaatttttttctcatgtttaataagggcctggaaggaaggtgtggccctcttcaaactgtttcacattaaactccaaacagaaaagaagccattagtcatagatgcatttggacatctaagacttagcaagtcgggggtggtcgggaaagtaacactctgagttataattcccctgaggagatgactggatgggtagaggctctagggcttcatcatctggtttgccaacccatttttcatatgcttcttaacatctgtgaatcrttcagtgttccaagcaaagagtcattaaatcggttttgtttatgattgatccagaagtctctgatcctgtataaattcaaaaggcaaccagaaattttctcatgtgcttggtccagggagttatattaaatatttttacaacagatttcatatctgtaattgttgatgatgt

SEQ ID NO: 874410 - DNA, 664 bp, Homo sapiens
caaatgccaatttcaccagttggcagagttgaaatatatacataataccctgtggtggcaaacgtgagggggaaatgtcgttcttaaccaccattagtgggattgtaagttaagtttttgagaaataattcgtctgtatttaatgcaattaagcatgcataaacctttgactcaacaatcctacccctggaaattaaactgggatgttttcacagaatgtctaaaaacatacgagaaatgggtgctatggggaatatgttcccaactatttttacygataaaaggaaaagcgaatttaagtagcaacttagggcaactgggaagagacacagagagcgattgtctcgatatatcaatattgatcctactctgtagacatttccacattatatttaataactccttttggaaaaaataaattgataggtactggagttttctaatctgttcaaaatgcatgcatgaaaggcatacattacttctaaactaaccaattaagtcttacttcaggttaagaggcttgtgaagccttctctgcagctcatggaaatgctacagaagaggcctggggtggggtgggaaggggccaggatcaccagactgaaggaagggctggttctctatgcccagcctcgggctctggatttgtttgtaatctaactct

SEQ ID NO: 874411 - DNA, 656 bp, Homo sapiens
ttgtctccctcactattcattctctggacattagccctgccatagaacacttagaagtggaacttctaaattgtgccatattcatggtaatttctatagcaagagtaagaggtgtttggtgtagatttagtgtcagcaataayacaaatctctcccatagcactcacgagtagaactagttgatgatatggagaatttatgacttgggagaccattcatttcaaataaaatcagaaaactcaggcactactttgggattttgaaaatctttactgttctattcccaaagctgaaatattcgaaatacagaaaatgtcactttaccaaggagcagtggattaatctgtacccctggattagagccaggggaaagaatactgaaaacagagaagtcactcttggggactatcaaacctaggtttcttgctcctagaataaggacacactcacctagatagactcacaaggcaacttagtcatcttttgatgtcatcgttttctagcctgcgatagagatatataataatgatagatatcattaattgagggtttaccactttgtgctaagggctatactttgttttatgctacactgattttctctagtcttcactatcattttatcaggtggtacaattcctcctttaaagtgagaa

SEQ ID NO: 874412 - DNA, 656 bp, Homo sapiens
ttgtctccctcactattcattctctggacattagccctgccatagaacacttagaagtggaacttctaaattgtgccatattcatggtaatttctatagcaagagtaagaggtgtttggtgtagatttagtgtcagcaataatacaaatctctcccatagcactcacgagtagaactagttgatgatatggagaatttatgacttgggagaccattcatttcaaataaaatcagaaaactcaggcactactttgggattttgaaaatctttactgttctattcccaaagctgaaatattcgaaatacagaaartgtcactttaccaaggagcagtggattaatctgtacccctggattagagccaggggaaagaatactgaaaacagagaagtcactcttggggactatcaaacctaggtttcttgctcctagaataaggacacactcacctagatagactcacaaggcaacttagtcatcttttgatgtcatcgttttctagcctgcgatagagatatataataatgatagatatcattaattgagggtttaccactttgtgctaagggctatactttgttttatgctacactgattttctctagtcttcactatcattttatcaggtggtacaattcctcctttaaagtgagaa

SEQ ID NO: 874413 - DNA, 582 bp, Homo sapiens
aaatgtggcacatagacaccatggaatactatgcagccataaaaaaaagttgagtttacgtcctttgcagggacatggatgaagctggaaaccatcattctcagcaaactaacagaggaacagaaaaccaaacaccgcatgttctcactcataagtgggagttgaacaatgagaacacatggacacagggagcggaacatcacacaccggcacctgttggggggttgggggctaggggaaaggatagcattaggagaaatgcytaatgtagaagacaggttgatgggtgcagcaaaccaccatggcacatgtatacctatgtaacaaacttgcattttctgcacatatatcccagaacttaaagtattaaaaaaaaaattagcctttcctcatttaattgacttaatgcctccacttactttaaaaacaattacgcatgtttcctgatggatgacagctgtcagagttaattattgataaaatataattagactatattgtggatgtcagtctcatctcatatcatctgcattaggaaaaaatgtgaatgtgtgttctttagtttaaaacatcacgtggtag

SEQ ID NO: 874414 - DNA, 582 bp, Homo sapiens
aaatgtggcacatagacaccatggaatactatgcagccataaaaaaaagttgagtttacgtcctttgcagggacatggatgaagctggaaaccatcattctcagcaaactaacagaggaacagaaaaccaaacaccgcatgttctcactcataagtgggagttgaacaatgagaacacatggacacagggagcggaacatcacacaccggcacctgttggggggttgggggctaggggaaaggatagcattaggagaaatgcctaatgtagaagacaggttgatgggtgcagcaaaccaccatggcacatgtatacctatgtaacaaacttgcattttctgcacatatatcccagaacttaaagtattaaaaaaaaaattagcctttcctcatttaattgacttaatgcctccacttactttaaaaacaattacgcatgtttcytgatggatgacagctgtcagagttaattattgataaaatataattagactatattgtggatgtcagtctcatctcatatcatctgcattaggaaaaaatgtgaatgtgtgttctttagtttaaaacatcacgtggtag

SEQ ID NO: 874415 - DNA, 662 bp, Homo sapiens
atattattaaaatggccatattgcccaaagcaattagtagattaaaatgtcattcctatcaaactaccaatgatattcttgacatgactagataaaactattttataatttctatgaagccacaaaggagctcaaatagctaaggcaatcctcagcaaraagtacaaagctggaggcatcacattacctgacttcaaactatactacggggctcccataaccaaaatggcacggtactggtacacaaacagacaaatagacaaatggaatggaatagagagcccagaaataatgtcacacacctacaactatcagatcattgacaaacctagcaaaaagaagcaatggggaatgaactctattcacttaatggtactgggatagctggctagccatatgcagaagattgaaactagaaccctactttacaccacacacaaaaatcaaatcaaaatggatcaaagacttcaatgtaaaatccaaaactataaaaatcctggaagataacctaggcaatcgcattctggacataggaccaggcaaagatttcatgaccaaagataccaaaagcaattgcaacagaaacaaaaattgacaattctagttaaactaaatagcatctacagagcaaaaggaactatcaacagagtaaacagacaacc

SEQ ID NO: 874416 - DNA, 606 bp, Homo sapiens
ggcaattatcacattgcctctctaaaagtgataaattggcagccagtaccagggagaggtcatttcctgatggtccacacctgttgcactgaagtgtcaattgaatgcagatgccagagagatgcaacttccctgtcatgtgcattaagagacataatggcagagaacgaccttccaagggcacaccactggaaaagggaaraaagcctcagatgggcatttgtgcaacttcctaaacacactgtgtgtgctcacctgtcaatggcaaggagggcactgcgcatgaaggcatcccaccctaaaggaagaatcatggaaaaggggccagcgtataaagtcctaggatcacggttaaacaccacacttgttcttcaagttactcacttgggtctcttccaagagtatcttttcttttctgttctaaagccttttaaaataaaactccactcctactctaaagtttgcctcggtctctttttctgccttatgcccctttgtcaaattatttcttctgaggaggcaagaattgagactgctagagacctgtatggattcactgctggtaacttggataccttccaccagtaacaatcatgattgaattat

SEQ ID NO: 874417 - DNA, 658 bp, Homo sapiens
atctagacaaataaaaagtcaacctatatttctttgctgttgatatgattttatacccagaaaacataaaatactttactaaaaggctcctggaactgagacacgacttcagtaattttttaggatacaaaatcattgtataaaaatcaatagcatttctatacaccaataacattcaagttgagaaccaaatcaagaactcaactccatttacaatagctgcaaataaataaataaataaaacacctaggcatgcatctaaccaaggaagtgaaagatctctacaaggagaactatacaacactgctgaaagaaatcatagatgacacaaacaaatggaaaaatcatttcaatttcatcaactggaagaatgaatatcgttaaaatggccatgctgctcaaagcaatctacagattcaatgctattcctatcaagcaaccaacgtcatttttcacagaactagaaaaagaactattytaaaattcatatgaaaccaagaaatatcttgaatagacaagcaatcctaagggggaaaaaaaaaaaaaaaaaagaagccagaggcatcatattacttgacttcaaactacactataaggctacagtaacacacacagcatgatactggcacaaaaacagatacacaggctgatgggacag

SEQ ID NO: 874418 - DNA, 564 bp, Homo sapiens
tgcaaaccaactctccgataagcttctagtgtttttcttttttttaggtttgccactaatcctcccagcatttctgcagattgtaactgaagctcagcttttctaggaggaaaatacctgttatggtcaacaacctaagagtcactcttgattcctctccattttcaactaaacagctgctctgtctgtgacgcctccagcatgtgctcacaccccaayggcctcggacctctcccaaggcagcatcctctcagttgagacctaagaaaactgcctcccaaatattttccttgcttttgtctttccctgaactctattctccacatcacagtcattatttgctaatggctttattgagttctagtttctacaccatacaattcacccatttgaggtttaaaattcaatgggacaatcaattttaaaacactttcatcacctcaaaaagaagccctgtagccttcagctatcaacccccaatctccccacaagcaaggagtcagtaatctattctctgactctatatatttgcctattcttgacattttacacaagtgaagtcat

SEQ ID NO: 874419 - DNA, 650 bp, Homo sapiens
cttttgggcttgaatgcaaaatcagccctctcctgagtttctaccctgctggccctctgaagatatggggctcatcagcctccataatcacatgaaccaatttattaaaatgcatctctttatatatatatgtacaaaatgcatcctttatatatatatgtacatgcatacatacatatgtgtatatacatataatcatatatattatatgatctatatcatgatcatgatatatattatattatgatatatatattatatattatgatatataatataatatataatatataacatatatattatatataatcatatgtatttatataatcatcctattagtaatgtttctctggggaatcctgatgaatacacctctttatctggataaaatgatttctaagaatttttaagaaatttttccacaacaatctgttacatttgaggtggtattaagactaaacataaatgcttgtctcrgaaataagtatggaagtggcatatattgaacttgaattgaatttatgtattgaattgagtgaacttatgtcaaatccatagaaatttccctaattttaaagggactataaagccaaagattatgccatccttgactataattttaaaaagcttcttggtcttgaaattac

SEQ ID NO: 874420 - DNA, 589 bp, Homo sapiens
atgaagctatgtttattatataggcttggaatggaagaactctggcttctaattctgactgattgaaaccttaaggctggattttctataacttcagacccaaccagatgacatttttttctatacctctacacgtcatagagagatatgtattaggaatcacagacttatataatgtcttcgctcctacttccttccctgcaatatgttggcaaagcctaggggcagttctggagcccggctgctcgcattcaaattccatctctggcatttaccacttgtgaggccttcagttatgaagatattttctccatgcctcaatgcctgcatctgtaaaatattaacagtatatacctcataggatttacttaaatgagttaagaaaagaatttagaacaggctttgaaatgatatgacaataaataaattataactatttttatcttyctcacaggtgatctagatatttgaattagatagtgtgagtgaacgtgaattgaaagtactcatactatttatattaatctatatctatatctatacttcatataacacaacacactgaaacttcaacagttacgcaaagtgc

SEQ ID NO: 874421 - DNA, 627 bp, Homo sapiens
atactatgcagccataaaaaatgaatgagttcatgtcctttgccagggacatggatgaagctggaaaccagcatccttacaaactaacacaggaacagaaaaccaaacagcgcatattctcactcataagtaggagttgaacaatgagaacacatggacatagggaggggaacattacaaaatggggcctgttgtggggtgggaggaaaggggatggagagcattaggacaaatacctaatgtatgtggggctaaaacctagatgatgggttgataggtgcagcaaaccaccatggcacatctatactatgtaacaaacctgcacattcagcacgtgtatcctagaacttaaataaaaaaatataaatcattctaccaaagaacacattcatttttcatatgttcattgcagcactattcacaatagcaaagacayagaatcaacctagtgcccaacaatggtagactggataaagaaaatgtatgcacatacatcatggacaactacacagccataactgaaggaaatcatgtcctttgcagcatcatggatgtagctccaggccattatcctaagtgaattacacaggaatagaaagctaactaccacatattctcacttataaa

SEQ ID NO: 874422 - DNA, 569 bp, Homo sapiens
catctttgtcttgtgctggttttcaaagggaatgtttttagctttttcccattcagcataatgttgtctgcgggattgtcatagatggctcttattgttttgaggtatgttccttcagtgcctagtttattgagagttttgaacgtgaagagatatttaattttatccaaaggcttttcagcatctattgagatcatgtagtttttgtctcttgttctatttatatgatgaatcayagttattgatttgcatatgttgaaccaaccttgaatcttagggataaagcctacttgaatgtgatggatacgctttttgatgtgctgctggatttggtttgacagtattttgttgaggatttttgcttcaatattcatcatggatattggtctgttttttttttttttttttttttttctgttttgtctctgccaggttttggtatcaggatgacgctggcctcatagaatgagttagggaggggtccttcctttcaatttttggaaatagtttcagtaggaatggtatcaactctcaactcttctcctttgtatatctgatagagttcaact

SEQ ID NO: 874423 - DNA, 569 bp, Homo sapiens
catctttgtcttgtgctggttttcaaagggaatgtttttagctttttcccattcagcataatgttgtctgcgggattgtcatagatggctcttattgttttgaggtatgttccttcagtgcctagtttattgagagttttgaacgtgaagagatatttaattttatccaaaggcttttcagcatctattgagatcatgtagtttttgtctcttgttctatttatatgatgaatcacagttattgatttgcatatgttgaaccaaccttgaatcttagggataaagcctacttgaatgtgatggataygctttttgatgtgctgctggatttggtttgacagtattttgttgaggatttttgcttcaatattcatcatggatattggtctgttttttttttttttttttttttttctgttttgtctctgccaggttttggtatcaggatgacgctggcctcatagaatgagttagggaggggtccttcctttcaatttttggaaatagtttcagtaggaatggtatcaactctcaactcttctcctttgtatatctgatagagttcaact

SEQ ID NO: 874424 - DNA, 709 bp, Homo sapiens
caacaaacatattttaaaaagctcatcatcactggtcattagagacatgcaaaccaaaaccacaatgagataccatctcacaccagttagaatggtgattattaagaagtcaggaaacaacagatagagaaacaggagcgcttttacactgttggtgggggtgtaaattagttcaaccattgtggaagaagacagtgtggtgattcctcaatgatctagaaccagaaataccatttgacccagcaatctcattactgggtatatacccaaaggattataaatcattctactataaagacacctgcacacatatgtttattgcagcactatttacaatagcaaagatttggaacccacccaaatgcccatcaatgatagactggagaaagaaaatgtgggacatataaacmgtgggatactatgcagccataaaaaaggatgagttcacgtcctttacagggaaatggatgaagctggaaaccatcattctcagcaaactaacacaggaacagaaaaccaaacaccacatgttgtcattcataagtgggagttgaacaatgagaacacatggacacagggagggtaatatcacacaccaggctctgtcagggggtaggggtaaggggaagaagagcattagaacaaatacctaatgtatgcgggacttaaaacctagataatgggttgataggtgcagcaaaccaccatg

SEQ ID NO: 874425 - DNA, 650 bp, Homo sapiens
agccacatgtatgtcttcttttgaaagtgtctgttcatgctttttgcccactttttaatgggattgtttatttttttcttgtgtttaagttctttatagatgctggatattagacctttgtcaaatacatagtttgtgaatattttctccctttatgtaggttgtctgtttactctgttgatagtttcttttgctatgcagaagctagraagtttaattggagcccattggtcaatttttgcttttgttgtgattcctcttggtgtctttgttatgaaatctttgcccaatccgtatgtccagaatgatattgcctaggttgccttccagggtttttatagcttcaggttttaaattttagtctttaatctatcttgagtttatttttgtatatggtgtaaggaaggggtcccgtttcaaccttctgcatattgctagtcagttataccagcactgtttattgactagggagttctttccccatcgtttgtttttgtcagctttgttgaaaatcagatggttgtatttgtgcatgtggccttatttttgggctttctattctgttccattggtctatgtgtctgtttttgtaccagtaccatgctgttttggttacttcagctttgcagtatagtttgaagttgggtaac

SEQ ID NO: 874426 - DNA, 621 bp, Homo sapiens
tttgattagaatagcattgaatctgtaaattgctttgggcagtatgaccattttaatggtattgattcttcctatccatgagcataaaatgtttttctatgtgtgtcatctctgatttctttgagcagtgttttgcaattctcactgtagagatctttcatctcccttattggctgtgtttctagatattttattctttcttttcttatcttttctttttttttttttttttttttgagatggagtctcactgtgtcgcccaggctggagtgcaatggcgcgatcttggctcactgcaacctccgcctcccaggttcaagtgattctcctgcctcagtctcccragtagctgggactacaggcgtgtgccaccatgcccggctaatttttgttgtatttttagtagagacggggtttcaccgtgttagccaggatggtctggatctcctgactttgtgatccacccgcctcagcctcccaaagtgctgggattacaggcgtgagccactgtgcccagcaggtattttattctttttgtggcaatcgtgagtgggattgtgttcccgatttggctcttggcttggctgttgctggtgtataggaaagctcgtgattttagtg

SEQ ID NO: 874427 - DNA, 516 bp, Homo sapiens
atgattttttaactgagaaaaaatctgtgaaataatttttatgtatattccttcatctcaaagttatatttttgacacccaaacatgatacaacttgaaaagtacatttttttttttttgagacagtctccctctattgcccaggctggaatgcagtggcacaatctcagctcactgtaacctccacctctggggttcaagcaattctcctgcctcagcctytaagatgtgaaaacatgttaaagtgaatttaaagtgttttatgatttaaaatataattaactcaattttagactttgagattttactgaaaaaaaaaaatggtgtctctggaaatgatgatgcttcatgaaaaaaaaaaagtgcttggttaaatgacaagataaataaatgagcagtgactagagctgacctatgatagaaccctgacagatttctgtagcatcagaatggacagcccattaaataccaagctacttggtgatgtgtaagacaactgggtgagaccaagagaag

SEQ ID NO: 874428 - DNA, 758 bp, Homo sapiens
tgttgaaaaaaacatactgaaggatcacactaacaacatgtccatcattcctcccaattctaagattcttggcatatgctatggtctgaatgtttgtgtctgcctccctccccacattcatatgttgaagtcctaacccccaaggtgattatattaggaggtggagtttggggcagctgattaggacatgaaggtggatttagtgtactcataaaagagaccccagggtctcttttccccttccaccataggaggatacagcgagaaggcaccatctacgaaccaggaaataggacctcgacagacaccgaatctgccagcaccttaatcttggacttccygacctcaagaactgtaggaaataaatttctgttgtttataagccacccagtttatgatattttgttatagcagccgaagcagactaagacagcatatgtagaaataatcactttgattcatacagtaggaaagtcagaaacaaggaggttcctgaagattaaaacagataattattatgcctccctttgatataatgaattacttacatcaaaccctctgacttttgcaaacaagacctgaaggtaatcctcactggtgccctggtgtaattccactgatgtcagtaatactctctttgtagctatgcaaacattgcatcaagaagtcttccagcagaccttcataaaagacaggcacagttgaaaacctcaaataagtttccaggcatgtattgttttctgtgttgtaagtcagta

SEQ ID NO: 874429 - DNA, 599 bp, Homo sapiens
acccattggatttgaatgttatggagtataaaacgatattggcagggtttcagacttcacgctgcaattagcctttaagaaactgtcactggtccaatctggtatagtatcaaagacaaatatccacaattttctgaaaagccttttgatattaatatatccattttctaactacatatatgtgtgagactgggttttctttatatacttcaatcaaaacaacacatttgtagcagactaaatgcagaaatagatatgagaatccaactgctttcctattatgccagacattarttagcaaaagtgtaacacaaccacaaaaaagtaacacatgtcactttttccttctttttttttttttggttttgttttgtttgagaaattatagggtttgtttttgtttttgtttttgtttcttgagacagagtcttactctgtcgcccaagctggagtgcagtgatgcgatctcggctcactgcaaccgctgcctcccaagttcaagcgattctcctgcctcagcctcccgagtagctgggactatagtcacccgccatcgtgcctggctaatttttgtatttttagtagagacggagtttcgc

SEQ ID NO: 874430 - DNA, 650 bp, Homo sapiens
gtgagtggttgaaaacagatgttttgcagaaaagtggaggagagtggagggaagcctacgggggctgggtagagggaggtgaggctgggaagggcagtggttgggagtaccatggagtggaaaaacagctcacttcagaattgtactaatattctttcctatctaaaaaatttgaggagcagagaatttgaatatctcatttggtatagcccaaagatttggtcaaaatgaataaatacatgaatacaaaaataaaagctactctagaaaacctggaaagtcctaaatcatgagatgctaaatcatgagctgtggttccatatcragatatttggcacattgttctccagagccagggtttcccagacactgatcttcagaatcctgctgcagaatcatctggagtgtttgttaaatatgcagaatcccaggacccacccagacctttcaatgctgaatttctagggtgggtacgagactgtgtgttttcaagcagcttcttaagtgactcatgcacactccactctgagaatcactgtaggacaagattaaggagttcctactgatcaagcagagatttccaataggcattgttgcccttattgcctgtcccttttagtacaggaataatgaaggattttccccagagt

SEQ ID NO: 874431 - DNA, 607 bp, Homo sapiens
tctcgaactcctgatctcatgatccacccacctcagcctcccaaagtgctgggattacaggcatgagccactgcacccggcctgcagcttggtactttttaatagcagataaaagagcacattgcatggcttgtcttacaatgcaaatttgccaagttcgtggcctcagcctccaggaaatctattgtttcagaaaaacctttctcagctcttgagaatgatagtgacttcatgtgttgcatccagatatctctcttggtcaccctgcagcttcctggtccctggctcaaccctgtctttggccatcactcctcctgtccgcaaatcagccttaaacaaataaagctctacttttgaaggatattgcaggaaaaatctaccaagttgctttatgaggaaaatgccagcgaataatgatttagataaatttcttaaaacgggattgtcgacaatttkgcactcaaaaatgttagggaaagaaggggaataggggccaaggggaagatctctaggaaaggattttcactgaccaacccctccaggacctctgcgattaaacgaacacccagctcaagctgtcatgcggaccccctccctcaacactcct

SEQ ID NO: 874432 - DNA, 685 bp, Homo sapiens
ttttagggtttttaaattttaggtattacatttaagtctttaagtcatcttgagttaatttttgtataaggtgtaaggaaagggtccagtttcagttttctgcacatggctagccagttttcccaacaccatttattaaataaggaatcctttccccattgcttatttttgtcaggtttgtcaaagatcagatggttgtagatgtgtggcattatttctgaggcctctgtcctgttccattkgtctgcatatctgttttggtaccagtaccatgctgttttggttactgtagccttgtagtatagtttgaagtcaggtagcgtgaggcctccagctttgttctttttgcttagaattgtcttggctatacaggctctttttttttttttgtcccatatgaaatttaaagtagttttttctaattctgtgaagaaagtcaatggtagtttgatggggatagcattgaatctataaattactttggccaatgtggccactttcatgatattgattcttcctatccatgagcatagaatgtttttccatttctttgtgtcctctcttatttccttgagcagtggttagtagttctccttgaagaggtccttcacatcccttgtaagttggattcctaggtattttattctctttgtagcaattgttactgggagttcactcatgattt

SEQ ID NO: 874433 - DNA, 628 bp, Homo sapiens
tgactcattagctcaaagagagacaaatagacaaatgaaagagaattaagagtccgaacatggatctacatctctggggacctaatttatgacacttcagtatgtgaaattatttttccctttttcaacaaaaggaactaggtcaatcatgtccatatggaactaacagctacatcacagcttttaaaacagtcagttcccaatagaatgctcactaaaagtgtaaaacaaaactataaacctcctagaagtcatctaagaaaaatcattcatgatattgcagttaagatttttctaaacaggatatcaagcattaaccgtaaagtaaaaatatttataaaaagtattttattaaacctatgaatttctgttcatgagaagaaagacattgtcaacagaatgaaaaggcaaataatagcgtgaagaatgcattaagcgtgcatatatccactgaggattcataaagtcacaaactgacaagaaaaasttaaccacatgatttttcaataacatgctaaaaacttgaagatgtacttcatgaaagacaatatgcacaccggcaataatcacatggatagttcttacattatatgttactaaggaagtgcaaattaaaactgcaatggaa

SEQ ID NO: 874434 - DNA, 683 bp, Homo sapiens
acatttgggttggttccaagtctttgctattgttaatagtgccacaataaacatgcgtgtgcatgtgtctttatagcagcatgatttataatcttttgggtatatacccagtaatgggatggctgggtcaaatggtatgtctagttctagatgctcgaggaatcgccacactgtcttccacaatggttgaactagtttacagtcccaccaacagtgtaaaagtgtttatttctccacatcctctccagcacctgttgtctcctgactttttaawgatcgccattctaactggtgtgagatggtatctcattgttgttttgatttgcatttctctgatgatcagtgatgatgagcattttttcatgtgtctgttggctgcatcaatgtcttcttttgagaagtgtctggaatctccttaagctgataagcaactgcagtaaagtctcaggatacaaaatcaatgtgcaaaagtttcatgatattttcataagtaatggatgactaatagagtaataagtgagtcaaatcagagcaattattttacctctgaagaaaataaattctcctctttttttctatcctcaggtctatttcattccattatcaacctcagtcttatcactctaaccaaattatgtttttttcccacttttctttgaatttttttattctactttacatat

SEQ ID NO: 874435 - DNA, 631 bp, Homo sapiens
ataaaaagctgtctatttttataaactgctacagctcagaaatgactgctgaaaaaagttaccctgcgcttctcagatttatttcacagattttgtccctttagaagaattgtaaagttgtttcaggcattttttcagatatattacatatatatttattttttgacccggaggatgyttagtctggaggatgtaagagactcttttaaagctgataaaacacctgttttcaagttcaaaagccaaaggattccatttttcctctctaaaaacatttggagacaataacaaggtcttgatgacttgttcttcaatttctagtgggttttattcattctatcaggtttctgaaagttacagaaagaataaagttgggtagatgggattagtggtgaaaacaacccaaaactgtggataaaatagaagcagaagaaataggtaaatggtttcatttgcttaggcagaaaaaagctgcttcacagttagtattttaagtaactcactaccatctacacacatgacagataagggtactctagtagaggcaaggggcacggaggggaaggaatcatcttgaaaaagaattctgaggttaaatggatatgatgtaatataaatgtaatagcattta

SEQ ID NO: 874436 - DNA, 606 bp, Homo sapiens
attaaaaaggtattagatcaacagggctgtttccttggcaagataagattaattccttgatgtattgattcaatagtcgatctcagccaaagatgcagaattaaaaagagtgtagaaatgattgttttgtttcgttttgttttgtttgagacagagtctcactctgtcgcccaggctggagtgcagtgatgtgatcctggctcactgcaacatccacctcccagattcaagtgattctcatgcctcagcctcccaaatagctgggactacaggcacacgccaccatgcccagctacttttggtatttttagtagagatgagctttcgccatgttggtcaggctggtctcaaattcctgacctcaggtgatccacccacctcagcctcccaaagtgctgggattacaagcatgagccactacacccagcctgagaggatctttactgtctcttttggraaacagcatacccagacttttataaaaaatgaaatggaaagaaaatcacaattcattatagtctaattttttatattcctttatattaattaaaagattaagaactatgaatgatctgggttcaaagagacagctatttgtcattgtta

SEQ ID NO: 874437 - DNA, 641 bp, Homo sapiens
agtggggaaaaactgaaagcctttcctctgagatctggaacacaacaatgatgccaattttcaccactgttattcaccatagtactggaagtactagctagagccatcagaccagagaaagatttgagcatccaaattgaaaacgaacaagtcaaattatccttgtttgcagattatatgatcttatactaagaaaaacctcaagattccccccaaaatgattagaactgataaatttatggaatttgcaggacacaaaatcaacatacgaaattcagtagcatttctatatgccaacagtgaacaatstgaaaaagaaataaaattcatcccatttacaatagcacacataaaattaattacctaggaattaaccaatggagtgaaaaatgtcagtgatggaaactataaaacactggtgaaagaaattgaaaggaacgccaaaaaatgaaaataaatagttcatgtatatggatcggaagaatcaatgttgttaaaaagttcataccacccaaagctatctacagactcagtgcaatccctatcaaaataccagtgactttcttcataggaaaaaaaaaaaaaacacaatcctaaactttatatgaaaccacaagaaaatccaggatagctaaagttat

SEQ ID NO: 874438 - DNA, 641 bp, Homo sapiens
gattacaggcgtgagccactgcacccagcccaattatttctaatttatttaaaaaaatatttatttgtggtcactatttgccaaagattgttctttacagcaaccagttagataactgcatcataactaaatgcctrgaccattgcaataatcataacggcttttactgtattcagtattttgcaagccagtcaaagaccattcttgattgcatttggcaagactctgcattggaaatgagagaaacccacttcaagctatattattagcaacaacaacaaatagctgggagattcttgtttcccaaagggaatgtgctagtaatccatttatcgtctttcatctctaaatccatgattttgcctgcctccctaaaaatggaccctgaccctttcaaaagtttttccttgccagctggcatgatgctttgtcagtagagggcgctggagggacactgcaggagtaaaggtgttttgcttgcaggactcctgtgtctgctttctgtgctcctgggctgtgcagtcatcccagtgtccgggtactgcagatgggtgtctcctccactcatgaactctacagcccatgaagcttctctgccttcaggttgccgcagcacccaggcgctaccagtttcccctgac

SEQ ID NO: 874439 - DNA, 597 bp, Homo sapiens
cccaccccattcaacatagtattggaagatctggctagggcagtcaggaaaaagaaagaaataaagagttttcaattaagaatacaggaaggcaaattgtctctgtttgcagatgacatgattgtatatttagaaaaccccatcatctcaacccaaaatctccttaagctgataagcaacttcagcaaagtctcaggttacaaaatcaatgtgcaaaaatcacaagcataattatacaccaataacagacaaacagggagtcaaatcatgagtcaactcccactcacaagtgctacaaagagaatgaaatacgtaggaataaaacttacaagggatgtgaagcacctcttcaaggagaactacaagccactgctcagggaaataagagaggacacaaacaaatggaaaaacattccatgctcatggataagaaraaacattatcgtgaaaatggccatactacccaaagtaatttatagattcaatgctatccccatcaagctgccattgacattcttcacagaattggaaaaaactactttaaacttcatatggaagcaaaaaagagcctgcatagccaagacaatcctaagcaaa

SEQ ID NO: 874440 - DNA, 597 bp, Homo sapiens
cccagcagatctcatgagacttattcattatcacaagaatagcatgggaaggactggcccccatgattcagttacctccccttgggtccctcccacaacatgtgggaattctgggagatacaattcaagttgagatttgggtggggacacagccaaacyatgtcattcccctcctggcctctccaaatatcacgtcctcacatttcaaaacaaatcatgccttcccaacagttcccccaaagtgttaactcatttcagcattaacacaaaagtccacagtccaaagtctcatctgagacaaggcaagtcccttccacctgtgagcctgtaaaatcaaaagcaagctagttacttcctggatacaatgggggtacaggtgttggataaatacagccattctaaatgggagaaattggagaaaacaaaggggttacagagtccatgcaagtccaaaatccagtggggcagtcaaattttaaagctgtaaaatgatctccttgactccaggtctcacatccaggtcacgctgatgccagaggtgggttcccatagtgttgggcatctccactcctgtggctttgcatggtacatcctccc

SEQ ID NO: 874441 - DNA, 622 bp, Homo sapiens; identical to SEQ ID NO: 871094

SEQ ID NO: 874442 - DNA, 625 bp, Homo sapiens
catgcagatttgttacatgggtatacacgtgccatggtggtttgctacacccatcaacctgtcacctacgttaggtatttctcctaatgctatccctcccctatcccccaaacccctgacaggccccagtgtgtgatgttcccctccctgtgtccatgtgttctcattgttcaactcccacttaygagtgagaatatgcagtgtttggttttctgttcctgtgttactttgctgagtatgatggtttccaacttcatccatgtccctgcagaggacacgaactcatccttttttatggctgcatagtattccatggtgtgtatgtgccacattttctttatccagtgtatcattgataggcatctgggttggttcctttgatattgtgaacagtgctgcaataaacatacatatgcatgtatctttatagtataatgatttataatcctttgggtatacacccagtaatgggattgctgggtcaaatggtatttctggttctagatctttgaggaattgccacactgtcttccacaatggttgaactaatttacacccccaccaacaatgtaaaaatgttcctgtttctccatatcctctccagcatctgttgtttcctaaagca

SEQ ID NO: 874443 - DNA, 647 bp, Homo sapiens
gtcactatctacgtaactggcaaaaggttaactcttttatcattcatcaatttaataaaattctgtaagaaaaagaaaactcaacaggaaacaggcaaagatgtaaataggcaaatcagaaaaaaatatatagatgacagatatacatgtggakaaatttgtaaactaggcaatataaacttaaaaattagattctcatttttagccatcacgtaatgtcctgagccagcaaagagcattggaaaaaaatatttttatatgtttactggagtttacactggaacaatcttaagtgaggaggacaatttggctggatttataaaaatgcaaccaccttttggcccaggaattctactaatcataatctgtcttctataaatgtacctgtgcacagaaatatacatacaatgatgttcacaacagtttgtagtggccaaatgtctatggaccactttaataggtatagtatatccatcccatgaaatgaaacccagccatcaaaaagaataggagacatttaggcatactgatctggaaagagatccaagacatattgtaaacagtgaaaaaaaaatcacagaaaaatacattttgatcccatttgtgtggaaaaaatggtttgtgaatgtatatacataaatggctcc

SEQ ID NO: 874444 - DNA, 598 bp, Homo sapiens
ttcctttttggcacttgagataattattggtgagctgaataatcttaattgaattaaataataaaaatataaatgattttcattcaattctcaaatccttatatttgagggccaaatataagcaagccacaaggcacccaatggtagcccataagtatgtgaaggtaaccaactaaaatgacttcaagatcaggcaactagagagaaagtcttccaaccacagccatctctacgttataaatttgttggattgaccttgaatatattctgtacatcttccatgaatccattatcaatgttgctagtgtaatacacaagaaaacccaatgagagaaattcaaatattaagaaacaagcttttgttgattgagctttaaatggccacacaccattataatatctaagatgcttgtgctccccaataaccaatttttgcctccartgaggatgcaagtcctaacttctatgctcccgaatttatcatactagcacctaaaaaacacaaattaaaaaatcaatttagccaagaaaacctccatcccacagctaccatgggagcttctctaccattatcattcattccttgggtacttttaaa

SEQ ID NO: 874445 - DNA, 648 bp, Homo sapiens
aaccttgcccacagaaaaaataaagtgtactgaactgacacagaaaaaggtaggaaaaggcataatgagatgacctaccagcaagcctggagcctaggctgcaggtttgaagagatgttttaggtttctccatttttgtttcttcccagcctcagagaaaggaatatcagaaatgaaacagagaccaaaacatattattttgctgggcatggtggctcatgcctataatcccagcactttgggaggccaaggtgggcagatcacctgaggtcaggagttcaagaccagcctggccaacatggtgaaaccctgtctcttctaaaaatacaaaaattagctgggtgtgatggcaggtgcctgtaatctcagctattcgggaggttgagacaggagaatggctggagcctgggaggcggaggttgcagtgagccatgatcacagcactgcactccagcctgggtgactgagtgagactctgtctcgaaaaaaaaaaaaaaamatatatatatatatatgtatatatatatatatcgtgtaagtagccacacaaaattggtacccattttctaaagactatcaatccctgtacactaaaaacatggcattccttcaaaaacagtggctgtttgtgaaaagcagggcagtggt

SEQ ID NO: 874446 - DNA, 656 bp, Homo sapiens
attctggctaaaggtgcacacaatagataacattaccgtcttctactaatgttagagaggatctatttttgatcctgaagttcatttagggcctttcccttgttattttttttttctttccccctgcttttctcttgttttatcccttggcctagaagggataagacaaattaatttcagtcattattgtatatatgactgtcttccttggatacccagtcactgcccatgtctacagcttgcttgtgcttttagatggtgtccagagggcaggactgcagcaaagtttccggctgctatagcaccagtgggggaaatgaaaatagcttgctctggaaatgacagcgagtttcttggcaaatccctttggtacagttttaaagtctgcactaagaagacytagacaccctagaattttgttgctcggcattcattttgccccaacttcaagaccagcctggagaaaaaaaaatgggatagtgatgtgtcaccaagatggctgagccctcccaccccctgccagaaaacaagctctctgttagatattgatagctagaccatcgctatgaggcctgcaacgttcctgtgagaactatgtcattttcataggtgaaaagttcagagaaattagtgacttgcccaagattttatgcatg

SEQ ID NO: 874447 - DNA, 599 bp, Homo sapiens
aatgaaatctggaaaccatacactgggaaaagcatgtgatggaactgcaacactgaacctaaagaaaatgttgagagtagtgtccaaatattcaatttgctatttggaacagggattatgaagtttatgacttcaaaaaatagaactagatctatytatccagcagttatatattgagcacctactaagttcacatgctgttttaggcccccaagacaaatatactagctaactagacagtgaaaggaggtttcagaaaggtgacttccaagtcaataaaaaagacttccttaaaaattagaagctatctgaggccaggagtggtggctgtcacctgtaatcccagcactttgtggaggcaaagtgggaagatcgcttgagcccaggagttacagtttgtactgagctaatatcacacacggcactccagcctggatgacagagcgagaccctgtctgtgaaggaaaaaaacaagctatctgaaggtagactggtctatctcatgaggcgatgaattctcagccattggggttgtacaaaaacagtctagcacatagaataaactggcctggggcattttagaggagaatgtgtatggg

SEQ ID NO: 874448 - DNA, 649 bp, Homo sapiens
tggtccctgggggaagaggcttactttcaagtatggttacatcactaactacagcataacctgcccttcatatcccattctccacaaatgaacttccattggtatataggttaaggtcaggattagctaaggagacttctaagagatcatctcaggcggcataagtctggactataatttgttggcagtcatgctcaattggttccccatcttctgggagaaaagtggcagggttgagggccacrcacttatgtatttgaagcaatggtccctcaaggagtagcacctggtatctaagtaggtggttgtctgatagccataaacttcctttggcatctagtatgccatttacatcatgagtagtccagacagtgagatcctttccttatattgttttgatagcctctgacaccaagacagccaccgctgcagctacccttaaacagtgaggccagccttttgctactacatcaatttccttacttaggtatgccactggttgtgaggttgtcccacaagtctgagtaaggactccaagagctatccctgctctctctgtgacatataaagagaagttttgtcctgtgggaaggcttaaagctggagcttgtactagggcctgctttaagattttgaaggctgtttctgc

SEQ ID NO: 874449 - DNA, 599 bp, Homo sapiens
gaaaacgaaatccaggctgatttggtctcagatggagaggaggaacttgttgggacctggagcaaaggtgactcttattatgttttagcaaagagactagtggcattttgcccctgccctagagatttgtggaaccttcagcttgagagagatgatgtaaggtatctggtggaagaaatttytaagcagcaaagcattcacgaggtgacttgtgtgcagttaaaggcattcagttttataagggaagcagagcataaaagttcagaaaatttgcagccgaacaatgtgatagaaaaaaaaaaaaaccattctctgaggagaaattcaagccagctgcagaaatttacctaagtaaggaggagctgaatgttaactccaagacaatggggaaaatgtctccagggcatgtcagcggtcttcaaggcagcccctcccttcataggcccagatgcctagcagaaaatggttttgtggactaggcccagggtcccctgctgtgtgcagcctagggacttggtaccctctgtcccagccactctgaaccatggctgaaaagggccaacttggagcttgggctgtggcttcagagggtggaagcc

SEQ ID NO: 874450 - DNA, 675 bp, Homo sapiens
ctgttttgtatgccacaaacaaccaaacttctttgtaattgctgattatagagaaattatatcaaactttttaccatggctattgtaagtctctgtcatccacaattttgatttttctgaaaaagtacatgacatcagattaatggaaaagactctgaggactcttaagtagaggtttctgatagttttatgatcaatggaatcaataaaaattttccagaaygctggtaaagaaactcattgatacataaaactgttaatcaagataaaataaaatgaaacctaattacatgagattgaatgactgatgaagataatgtttttgtgacttttatttgaaatatcatggattctttatttaaatattttgtgtccagatcttagaaagttttatttcttaaactatctatagtttatagcagtttggtaaagtgtacttttgtaaataaatgtagaaacatttactttttctcactacttgatacctccaaaatttaaaaagtattaatgaccatttgtctttttattgcaatgtggttatttaagtttaatgacaatttgtgctctcttcataatatgctgcaatcgaaaacgttgattatattaccaagatttttgctgaaataccatatttgaaaatgtgcatagaatgcttgggttcaagggctccaagcc

SEQ ID NO: 874451 - DNA, 589 bp, Homo sapiens
caggttgccttccttatcactacctacaaaaattaactgcagatggattaaagacttaaatgtaaaacccaaaactataaaaaaagaaaaaaaaaaaaaccctgggagacagccttgacaataccattctggacataggaatgggcaatgatttcccatgacgaagatgccaaaagcagttgcaacaaaaacaaaaattgacaaaaggaatctaattaaactaaagagcttctgtgcagcaaaagaaactatcaacagagtaaacaggcaacctacagaatgagagrccatttttgcaaactatgcatctgacacaggtctaatatccagcatctgtaagaaactcaaacacatttacaaacaaaacaaccccattaaaaagtgagtggacatcaacagtcacttttcaaaagaagacatacatgcagccaacaggcatatgaaaaaaagctcaacatcacttatcattaaagaaatgcaaatcaaaaccacaatgagatagcatataagaccagtcagaatggtgattattaaaaagtcaaaaaataacaggtgctggtgaagttatggaaaaaaaggaacacataca

SEQ ID NO: 874452 - DNA, 671 bp, Homo sapiens
catagtttgggggacgaagagtgaatataaataaggagtcagttttaaaagcatttgatttctagccaaacacagggtccagctacctattgacaattcctcttacatatttaataaatatctcaaatttaacctataccttcaaacaaacctaatcctaaattatatgattctccctataatatggaagactaatttcaaaatcagagaaaccttttgaaatttaacatatttaattgtattaaaaataaaacaacagaccaggcatcatgtctcatacctttaatcccagtactttgagtggctgaggtgggaggatcacttgaggcccagggttytagaccaccctggacaatataatgagactccatctctataaaaaaaaaaaaaaagtcaagtgtggtggtgtgtgtctgcagtcccagctactcaggaggctgaggtaggaggattgcttgaacccaggagtttgaggctgcagtgagctatgattgtaccactgcactccagcctgggcaacagagagagactgtctctaaaaaataaaacaaaacatcttttattttttggtctttctaattttatgacaagcaggtaaaaactttatcataactcgtatcattaactttgggaatcactaaattaatccattcttagtatttactatggaa

SEQ ID NO: 874453 - DNA, 610 bp, Homo sapiens
tgctttatttcattaatttgatcttcaatcactgaaaccctttcttctacttgatcgaatccgctattgaagcttgtgcatgcgtcacgaagttctcatgccatagttttcagctctatcaggtcatttaaggtcttctctacactgtttattctagttagccattcatctaaccttttttcaaggtttttagcttccttgcaatgggttcgaacatacatttttagctcggagaagtttgttattactgaccttctgaaacctacttctgtcaactcatcaaagtcattctctgtccagctttgttcagttgctggcaaggaactgcaatcctttgaagaagaggcactctggtttttagaattttcagcttttctgctctgttttctccccatctttgtgtttttatctatctttggtctttgatgttggtgacctacakatagggttttggtgtagatgtcctttttgttgatgttgatgctatttctttctgtttgttagttttccttctaacagtcaggtccctcagctgcaggtctgttggagtttgctggaggtccactccagaccttgtttgcctgggtatcaccagcagaggctgcagaat

SEQ ID NO: 874454 - DNA, 704 bp, Homo sapiens
aggttgattccatgtctttgccattgtgaatagtgctgcaataaacatacacgtgtgtgtatctttatgatagattgatttctattcctttgagtatatacccagtaataggactgctggattgaatagtagttctgtttttagtctttgaggaattgccacactgtcttccacaatggttgaactaatttacactcccaccaacagcatgtaagcatttctttttctccacaacctcaccagcaagttactttttgactttttaataatagccattctgactggtgtgagatggtatctcattgcagttttcgtttgcatttctccactgatcagtgaggttgagcttttttcatatgattgttggccacatgtatgtcttcttttgaaaagtgtctgttcatgtacttttcccactttttaatggggttgtgggatttttcctataaatttgtttaagttccttatagatgcttgatattagacctttgtcagatgcatagtttgcaaatgttttctcctattttataggttgtctgtttactctgtcratggtttcttttgctgtgcagaaactcttcagtttcattaaatcccatttgtcaacttttgcttttatcgtgattgcttttggcattttcatcatgaaatcttggcctattcctatgtccagaatggtattgcctacattgtcttccaggttt

SEQ ID NO: 874455 - DNA, 651 bp, Homo sapiens
ttcaatcaaacaaatttttggatttttcactcacgttttcttgagctccaccaagctttctctggtgccagttttttcaaataaattatttaattttcaggttatttggagtcaatgctaatagacatttagacaaaaaatagtatgaaagatcacacaaaaactaaacactctatcgcattgtacctacaacatytaaataacacttggaaacttccgtgggtgttattttttgtcactgtggttttatagaaataaatcttggaaaagaactatgaaacatatgttgtatatttgaaaatattcttgttttacagaccttaaagtaaggaatacaatttagttcaactcagttcttttgctcaaaatgtatctaattatctctatattaaatattttaccatctggtgccagatcactcacaatgagtacttcaaaaaaagtcacaatatgattcaacaatcttagaaaggtgtttgggccacagtcacaccattgggtggtccacaatgactggtgtggaattaatagcataaatatctattggctaattacaccaaacactagacaggaatttgctcttttttaaacaactgcctgccttaacaatagtccctgatatgaccaagagagtattcttgcccctctatt

SEQ ID NO: 874456 - DNA, 634 bp, Homo sapiens
agaaagcctacaagccagaagagagtgagggccggtattcaacaatcttaaagaaaagatttttcaacccagaatttcatatccagccaaattgaacttcctaagttaaggagaaataaagtcctttacagacaagccaatgctgagggattttgtctccaccaggtctgccttacaagagctcctgaaggaagcagtaaatatggaaaggaaaaactggtaccagccagtgcaaaagcataccaaattgtaaagatcattgacactatgaagaaactgcatcaactaacaggcaaaataacaagctatcatcatmattacaggatcaaattcacacgtaataatattaaccttaaatgtaaatgagctaaatgccccagttgaaagacacagactggcaaattggataaagggtcaagacccattggtatgctgtattcaggagatccatctcatgcgcaaagacacacattggctcaaaataaagggatggaggaagaataaccaagcaaaaggaaaggaaaaaaaaaagcaggggttgcaattctagtctctgataaaacagagtttaaatcaacagagatcaaaaaagacaaagaagggcattgcataatggtaaagggatcaatgcaac

SEQ ID NO: 874457 - DNA, 633 bp, Homo sapiens
ggaaaactgtgtgtgccctagcacagtttggacaacgagttctgttaaaaaaaaaaagaagtaaaataaaagtaagtttgaggtgcttttccttcttccaagagcccaagggctattcctttaccctggacaccaaaataaagacatttgagcagggtcacaagctaagagctctctttgacccagagctggcacattggcaaagtagagcatgtaacaagaattagagctgtgttctcgtaatctactgagatttgggggtgtcctcactgcagtataacctagagaaaactggaagatacagaaatatgctgctgcaataatgacaaacaaacacttaacatatgtggcattatgtctgggttcaagtgacagatgctgaaaaaaagtgacatgtccacctctaagcagaagcttgamgttcactgcctgagtccatcattgctcttcttcctccaccacaagaccaagttgaggttgcctctcagcctagatcccagactgaagaagacatgagcccaggccacagagatggccacaacacagactcagtgcatcctcatccatcatcatacccaacaccaaatggttttaagcatgcctgccctcaaaaaagtttgaaatgatacattt

SEQ ID NO: 874458 - DNA, 581 bp, Homo sapiens
tagattgctctaattacctacatctttttggctggagcagtttcaacttttctcaattcctacttatatctttctaatgaaataacaagaatacagcagctgaaaaatcatgtcttttaataaccccatctcataattttttatttcttaattcagtatgtttggtatcaaaaactatttctaagttgttcttttcccattgtgatttctctcctagttttatgtgtgtgtgtgtgtgtgtgtgtgtgtgtgtgtgtaagaaaaagtcatagctttgatatcatagtacaaaaggaagtggaaatcttcacaaagcaattcagcatctgtggctatgcaggggaaatactatagataattgaagatattatctagatagcttgcaatsaaaatgtatgttcacctgaaattgctttgcacttaatggcactattctggcacttatgctactgaacatctatgttccagttctcttcttatagtcatgaaaatgttataagtagagccacaagttgaatttcatacgtcctagccagctcatttcttagccattatagctggactgtgaaaatatgctggtg

SEQ ID NO: 874459 - DNA, 581 bp, Homo sapiens
tagattgctctaattacctacatctttttggctggagcagtttcaacttttctcaattcctacttatatctttctaatgaaataacaagaatacagcagctgaaaaatcatgtcttttaataaccccatctcataattttttatttcttaattcagtatgtttggtatcaaaaactatttctaagttgttcttttcccattgtgatttctctcctagttttatgtgtgtgtgtgtgtgtgtgtgtgtgtgtgtgtgtaagaaaaagtcatagctttgatatcatagtacaaaaggaagtggaaatcttcacaaagcaattcagcatctgtggctatgcaggggaaatactatagataattgaagatattatctagatagcttgcaatcaaaatgtatgttcacytgaaattgctttgcacttaatggcactattctggcacttatgctactgaacatctatgttccagttctcttcttatagtcatgaaaatgttataagtagagccacaagttgaatttcatacgtcctagccagctcatttcttagccattatagctggactgtgaaaatatgctggtg

SEQ ID NO: 874460 - DNA, 647 bp, Homo sapiens
atacactctcaaatttctgatggcattataaattggcaaaatgtttttggaaatcaatttggcctcaaaaatattcatatgtttgactccattgactatttctcataaaacaatttacaataaagacagagtttatatacaaaaatgttaatttcaacattattcattataaggaaaaatcctggaagcaacctaattgtctatagatagaggagggactaaataaattatggcacatccaagtaatagagatctatcagctggtcatggtggctcacgcctgtaatcccagcactttgggaggccgaggcaggcagatcacctgaggtcgggagatcgagaccatcctggctaacacagtgaaaccccatctctacaaaaaaaaaatacaaaaaaaatagctaggcatggtgkcaggcacctgtagtcccagctacttgggaggctgaagcaggagaatggcatgaacccgggaggtggagcttgtagtgagctgagatcgtgccactgcactccagcctggatgacagagtgagactgcatctcaaaaaaaaaaaaaaaaaaagaaatctatgaagacattaaaatgatgcttactaagaatctttaatttaatggagaaattctttttataaaaaataaaccca

SEQ ID NO: 874461 - DNA, 670 bp, Homo sapiens
ggagaaataaaatcctttacagacaagcaaatgctgagagattttgtcaccacctggtggtggtgtaaggctcttgccttacaagagctcctgaaggaaacactaaacttggaaaggaacaaccggtaccagccactgcaaaaacataccaaattgtaaagaacatcaacactaygaagaaactgcatcaactaatggacaaaataaccagccagcatcataatgacaggatcaaattcacatataacaatattaactttaaatgttaatgggctaaatgccccaattaaaagacacagactggcaaattggataaacagtcaagacccatcggtgtgctgtattcaggagacccatctcacatgcattgacacacataggctcaaaataaagggacagaggaatattcagcaagcaaatggaaagcaaaaaagagcaggagttgcaatcctaatctcagataaaaacagactttaaagcaacaaagatcaaaagagacaaaaaaggacattatataatggtaaagggatcaattcaaaaagaagagctaactatcttaaatatatatgtacccaatacaggagcacccacattcataaagcaagttcttagagacctacagacttagactcccacacaatgatagtgggagactttaacatcccactgt

SEQ ID NO: 874462 - DNA, 670 bp, Homo sapiens
ggagaaataaaatcctttacagacaagcaaatgctgagagattttgtcaccacctggtggtggtgtaaggctcttgccttacaagagctcctgaaggaaacactaaacttggaaaggaacaaccggtaccagccactgcaaaaacataccaaattgtaaagaacatcaacactacgaagaaactgcatcaactaatggacaaaataaccagccagcatcataatgacaggatcaaattcacatataacaatattaactttaaatgttaatgggctaaatgccccaattaaaagacacagactggcaaattggataaacagtcaagacccatcggtgtgctgtattcaggagacccatctcacatgcattgacacacataggctcaaaataaagggacagaggaatattyagcaagcaaatggaaagcaaaaaagagcaggagttgcaatcctaatctcagataaaaacagactttaaagcaacaaagatcaaaagagacaaaaaaggacattatataatggtaaagggatcaattcaaaaagaagagctaactatcttaaatatatatgtacccaatacaggagcacccacattcataaagcaagttcttagagacctacagacttagactcccacacaatgatagtgggagactttaacatcccactgt

SEQ ID NO: 874463 - DNA, 603 bp, Homo sapiens
agatggcatcttattttggttttgatttgcatttctttaatgatcagagatgttgagctttttttcatatatttggccccatgaatgtcctcttttgggagatgtctgttcatatcctttgcctactttttaatggggttgtttttttcttgtaattttgtgtaagttccctgtagaccttggatattagacctttgtcagatggatagattacacaaattttcttccaaaagtcttttgcctactttttaatgggattgtttttttcttgtaattttttgtaagttccttgtagacctcggatattagacctttgtcagatgcatagattacaygaattttctcccattatgtaggtggtctgttcactctgatgatagtttcttttgattgcagaaactctagtttaattagatcccatttgtcaattttttctttggttgcaattgcttttgtcatttttgtcatgaaatctttacccatgcctatgtccagagtggtattacctagattttcttctatggtttttatagttttgggttctatatttaagtcttcaatccatcttcatttttgtatactatgtaaggagggagtccagtt

SEQ ID NO: 874464 - DNA, 603 bp, Homo sapiens
agatggcatcttattttggttttgatttgcatttctttaatgatcagagatgttgagctttttttcatatatttggccccatgaatgtcctcttttgggagatgtctgttcatatcctttgcctactttttaatggggttgtttttttcttgtaattttgtgtaagttccctgtagaccttggatattagacctttgtcagatggatagattacacaaattttcttccaaaagtcttttgcctactttttaatgggattgtttttttcttgtaattttttgtaagttccttgtagacctcggatattagacctttgtcagatgcatagattacacgaattttctcccattatgtaggtggtctgttcactctgatgatagtttcttttgattgcagaaactctagtttaattagatccmatttgtcaattttttctttggttgcaattgcttttgtcatttttgtcatgaaatctttacccatgcctatgtccagagtggtattacctagattttcttctatggtttttatagttttgggttctatatttaagtcttcaatccatcttcatttttgtatactatgtaaggagggagtccagtt

SEQ ID NO: 874465 - DNA, 648 bp, Homo sapiens
gagttcctgaagaaagcactaaatatggaaataaaagaccattacctgccactataaaaacatattaaaatacacaaaccagtgacactataaagcaaccacataagcaagtctacaaaacaatcagctaacatcatgatgacaggatcaaatccacacatatcaatattaacattaaacaaaaatgggctaaatgccccaattaaaagacacagagtgtcaagctggataaagaaccaatactcattggcacgttgtcttcaaaagagctatctcacatggaatgacacacatagactcacaataaagggatggagaaaaatctaacaarcaaatggaaaataggttaaagcatggattgcaatcctagttttggacaaatcagactttaaacccacaaagaacataaaagacaaagaagggcattacataattgtaaagagttcaattcaacaaaaacatctaactattctaaatatatgtgcatccaacacaggagcactcatattaataaagcaaggctcttagagaccttcaaggagacttagactgccacacaataatagtggaagactttaataccaccactgacactattagacagatcattaagacagaatgttaacaaagatattcaggacctgaact

SEQ ID NO: 874466 - DNA, 562 bp, Homo sapiens
atagaccaatgaaataaaatagagaacccagaaataagaccccacacctaaaactatctattctatgacaaacctgacaaaaacaagcaatggtgaaaggattccctccctattcagtaaatcatacggggataactggtggtcatatgcagaagattgaaactgaaacttttccttacaccatatacaaaaatttactcaagatggattaaaggcctaaaataaaaccccatattataaaaactctgggagacaaccttgacagtatcattcaggacataggtatgggcaaagattcatgaagataatgccaaaatcaatggcaacaaaaccaaaaatttacaaatggaatcaatttaaaccaaagagcttctgcacagcaaaagaaactatcaacagagtaaacagacagcmtacatgatgggagaaaaattttgcaaagtatgcatctgataaatgtctaatatccacagcatgtaaagaacttaaatgtacaaaaagaaaacaaacactcaaattaaaaagttagcaagggacatgaacagacacttttcaaaagaag

SEQ ID NO: 874467 - DNA, 628 bp, Homo sapiens
aattctttacagcagtgtgaaaatggattaatacagtgaattagtactgaggtagtggggtactgtataaaagataacctgaaaatgtgaaagcaactttggaactaggtaactggcagatgttggaacagtttggagggctcagaagaagacaggaagatgtaggaaagattggaacttccttgaaacttgttgaatggttttgaccaaaatgctgwtaatgatgtggacaatgaagtccaggctgaggtggtctcagatggagatgagaaacttcttgggaactggagcaaagatcactcttgctatgctttagcaaagtgaagggtggcattttgccttgacctagagatctgtggaactctgaatttgagagagataatctgaaattagaacatatgtttaaaagggaagcagagcaccaaagttaggaaaattttcagcctgataatacaacagaaaagaaaaagttcattttggggggaaaatttctagctagctgcagaaatttgcataagtaaccaggatcaaatgttaatcaccaagacaatggggaaaatgtatccaggggatgtcagagatctaggtggcagcccgtcctatcacatcccataggcctaagaagaaa

SEQ ID NO: 874468 - DNA, 538 bp, Homo sapiens
aacacctaaatatataaagccagcattgacataactgaaggcagaaatagacaataataaataatagaagattttaataccccattttcagtaacaaataaatatgagacagaaaatcaataagaaagcaacagacttgaacaataccatagattgaaaaggcataaacaaaacatttcacccaatagcagcagaatagacattcttcttaagtgcatgtggatcttcctccagaatataaatcactgttaagccccaaaacaagtattaacaaatataaaaagattgaaatcataacaagtatcttttctgaccacagtggaaagaaactagaaatcaacagcagaaggaaacctgaaaaattcacaagtatrtgtaaattaaacatctaacccatgaacaaccaatgagtcaaagaagaaatcagatattagcaaatttcttgagacaaacaaaaacacaacataataaaagtcatgaaatgtagtaacaaaagcaattctaagaggaaagtgtatagttataaatgctaacattt

SEQ ID NO: 874469 - DNA, 626 bp, Homo sapiens
ttgcacgacttgaattagaaggaaaagatattgaattattccaggcttttaaaaaaatctgttgtcataatattgataccagaaaagcagaccccaagccaaaacattggtgacaaatctagatgctgcataaccacagggctcaaattaccaggaagagagaacaattataatcatacatgcaacaataacacagccttaaaatatacgaatgatcagccgggtgctgtggctcacgcctataatcccagcactttgggaggccgaggtgggcggatcacgaggtcaggagatctaraccagcctggctaacatggtaaaaccccgtctctactaaaaataccaaaaaataaaaaataataaattagctgggcgtggtggcaggcacctgtaatcccagctactcgggaggctgaggcaggagaattgcttgaacccgggaggcaaagcttgcagtgagctgagatggcaccactgcattccagcctgggcaacagagcaagactcttctcaaaaagaaaaaagaaaatatgtatatacacacacacacacacacacacatacacatatgtctatacacacacacccccgacaatggtcagcaccataaggagaattaggtaagt

SEQ ID NO: 874470 - DNA, 603 bp, Homo sapiens
ctatctatcaatctatctatctatctatctatctatctatctatctatctatctatctatctagattcccagtggaaaagcaaccaaaattaacatggaaaactcaattacaacttttaatatattaagactcaggatactgattaagaccaaataagtctcaaatgatgtaagtatagtagctggtgttttaaactcaatytcccctataaaataatggaactgaaataaatgtaaaaggtaagatgtcaccacctagcaaaagagaaccaaaatatctcgtatatttataattgttgtgctaaaatcatatctgcatggtacctgcttgcgctattttaaaatctaaactaatgggataattgtgtggtttacgggtaattggggagagagaaagaatagctgtttactggtataacatttaataagtttatatttataccagtaaactttgtttactgctatacatttaataaaatccattttatcggtattctgagctattacatatattttcatgctatatcaaacgtgtattttctcaagcatctcagttatttaacatgctgtgatttaaattacagatatcaaatttacataggt

SEQ ID NO: 874471 - DNA, 629 bp, Homo sapiens
tcctgaaaggtccatatccacataaagacccttgggaagaagcttactagactagccattctaaaaccaaatggtataaaactagttttgtttttctgtttcagacttttggtgtgctccatctataccaactgaattcgttaaaccacatcctcagcaattacccaaaaatggcctatatataaaatataaaacacactcatgtacatatacacacacacatacatacatgtgcataaaaaatacaaaagatgtctgggctccttgctttgtatcagcaaaattaaacagttgtttttatctaatggaattgttacgtggccacagcactaagatgagtatatatatttaagggtaaagaagagggagaggaaagaaatactaaaattccctcatarcatccttgtcactatatgtaataagaagcatcttaccagtgttatatgacaatgtataacataagttacaataatgtgattatataaaaagatgttgtttctctttattgcatgggccaaatggtatataatatggtcttttgtcaataggatttaaattacaaatttctctgtggtaatgcatctgtgcacagaaaaaggaaataaagtgtaaaatgctcaaaaaatgaa

SEQ ID NO: 874472 - DNA, 688 bp, Homo sapiens
gtaaacaccacttccccttgtacaattggttatattgaagactactaactaggttactacatttcccccacactcactgtacagttaggtatttgtttttacattgatatatctactaggtgcaaagatttggtgagtggcattggctaaaatttaattgtagcctttttaaaaattacaatttcacattttaacagttactttccagcatttaagcaaatacagcaatatatagtggactaaaacaggcaggagtcagaaagagaaagccaatgttcagtgaacgtcgatgggaytgagtgctgtggagggtgagtgagacatgcatagtgccagatgaggaagtgggaacaggggaggggggcgggaaagtatttttccacttggcctgcgtcaaggctcagatctggggctggatgagtggggagacgtctgccatctgtgtgtgtacatccctaaatgtgaactcatcagccatttcccaatggaaaaaaaaaaaaaaggtgcttaaagaaaacagctaagactctgccctcagaaaattcagtgaaaggcaggtccattttcagtaagaaaaaaacaaaatcagtcaattcagagaaaaatccacacggtctgattggtgttatgtatatcaggcaacagatttttctactctgattgttgcttttcatctggcagttgtggc

SEQ ID NO: 874473 - DNA, 613 bp, Homo sapiens
ataagttgttaaatccaagtaaataaacacattaatattgaataacaactttcactgataatgccttctttaaaaattgtttagacattcgaataacatgtgggaagcagctgttatgaataattcctagagaagctatctttttaaaaaatagaaaaaatagaacatctattcagttgtaataatgacaatgtctcaacatattctgtgatgtgcatagagtcatagatgaatgattattaatttagcygatttatgttttaagtgtaattaagtctaaattggcaacaaaacaaaaacaaaaatcacactcttggattgcttttttgctaactaagtagttattcattgtgagttccacttaactcacagtgagttcctttattgacatatcaattggccttgttctgaagaggttctaaaaaagttttggtcttctcagtgctggattattgatcacaaaaatggaatagcagcaacgacaaggtgtcagatggttcaagaccactggaaaactgtaatccagccctcctattgctgcagtagctagaaaaaagtagaaaactgttggatacaagcagcaaatcagacaaaaatggaagatagctggaaa

SEQ ID NO: 874474 - DNA, 619 bp, Homo sapiens
ctaatttacactcccaccaacagtgtaaaataggtcctttttctccacaacctcgccagcatttgttattttttgacttcttaattttatccattctgattggtgtgagatggtatctcattgtggttttgatttgcgtttctctaataatcagtgatgttgaactttttctcatgattgttggccacatgtatgtcttcttttgaaaagtgcctgttcatatcctttgcccactttttaatggggttgtttgctttttcttgtaaatttgtttaagttccttagagatgctggaagttagaccttttttggatgcatagtttgcaaaaatgttctcccattctgtargttgtctgtttattctgttgatagtttcttttttagccatgtttatgtaacagttcttttaaattttttattttggatgccatagcagcaacatcagctcttcagacatgtatccaaataaaaatcttttaactgacagtcacttaatcagcagctgtaattatccagaaccaaggcaggaaccagaaacaaataaaagcattttaaatagatgaaaaatatataatcgaatctatcatacaacaacaatgtcataatagctcaagttttt

SEQ ID NO: 874475 - DNA, 597 bp, Homo sapiens
gccgctgggttcaactcatctctgatcctgagaaccagcatagggctttgaaatgtccgtgcccatgaatgggtggagaataaaagtatgtttgcatcccactagagtagccccttaaagtcactgtcctttagggtgagttgactcccgtcaacaaccaatccaaggcagcaggactggaccctgtctgtgcagccttgccaggagggttgagcagcttctctctctgtccccagcatggcatctccagtttctcctactggcaccaatacacacagcgtgaggactttgyggttgtggtgcagcctttcttccaaaacacactcaccccactgaacgaggtgagctgcaggtattttagggaggctcacgtatgggggccttatcacagacgatggatgtatttccttctctaagtgggctttttttttttttaaccatctctctccaagaggattcctgagggtggctttttccacattacctcctttttgtgggggctgggctgtgattggaactcagatgtactttgaaaggaaatcaatagtgactaagctcccaggcctggccctgatgttttctggattgggatagaat

SEQ ID NO: 874476 - DNA, 618 bp, Homo sapiens
ccctaactcattttatgaggccagcatcaggtgataccaaaacctggcagagaaacaacaaaaaaaagaaaatttcaggccaatatccctgatgaacatgggtgtgaaaatcctcaataaaatactggcaaactgaatccagcagcacatcaaaaagcttatccaccatgatcaagtcagcttcatccctgggatgcaaggctggttcaacatacgcaaatcaataaacctaatccatcacataaacagaaccaatgacaaaaaccacatgattatctcaatagatgcagaaaagtccttcaacaatattcaacacccctttatgctgaaaactctcaataaactaggtattgatggaacgtatctcaaaataataagagctatttatgacaaacccacacccaatatcatactgaatggacaaaaactggaagcttcccctttggaaaccggcacaagatgccctctgtcaccactcckattcaacataatgttggaagttctggccagagcaatcaggcaagaaaaagaaataaagggtattcaattagaaagagaggaagtcaaattgccctctttgcagatgacatgattgtgtattgagaaaaccccatcatc

SEQ ID NO: 874477 - DNA, 687 bp, Homo sapiens
gactttcaccatgaactataaatagcctttatgaaggaaggaatgctacagaaagaaatgtaagaatcagggagaagatggtcagacaacaagaggataggaaaggtaagctggtacaaccccactctcccccaaaaaaragtagaagtcaaaaataaaaccatcgtggatcccaagggttagagtcttcaaaaaacactgtaaaacaatgtttctcgtacctaaaatgtatgtgactcagctgggggttttgttaaaacacagattcaaattcagtaggtctgggatagggcctgagagtctacatttctaacaagctcccagctggcgtttatcagtggatgacactttgaagtagaaagggcttgtgggatatagaagaaaggaataagaaaccacattacttcaaaataaaggaagagttttttaaattacagataaaatgatagaagcagacgagcaaaacaaattcaacttacaaataacaaaaccaagaaaacactaaaacaaatatgggaattagagtcactaaattgggaccctaatacctaattgggaccctaattttatgggacacctgtgtcccaataaagtagaaaagataccaaaaaaaaaacctgaaaaatgggaaggaacagtgaaggggaagtgggaggtattataataaataatagtaataaatatctt

SEQ ID NO: 874478 - DNA, 608 bp, Homo sapiens
tctggggacctgtgcgatgctggtgaaagagacaggcatcacggtgtttggagtgtgcttggtttatgacctcttttccctttccaacaagcaagacaagtcgtaagtcattttacagttttgatatcaaatggcatgtcatgggcagagaaaaattacttaatagtttccaaacttccatttaaaaaatataacactttattaaatgtcatctcaccttagactgtcacrtaatcaacaaggcttatttcattaagataagcgcattatatatgttcaaatgcttcacacttttgtataaatcagtgaggactatgaagtttttgtgagccccagatttggaattgaaaagtatctgtgttaattgcaagtttatattgctggtttgttttggttgcatgctgctgagaaaatcttgattcataaaaatagtgattgcaaatggtaacagtttttcacagcttgctttgaatccctgcatttgcatgagtgttatccatcaaagagccccttttcctgctcttctaatgatgctgttacctaagagttttaggaggcacccattggaattccacaaagagccagtctacaccatacaggagtacgta

SEQ ID NO: 874479 - DNA, 714 bp, Homo sapiens
catatatatgtacatggatttccttaggttgtattcttacaaatgacatttttcaggtcatagggcatgtgtatcttcatcattattaattaggccctatttcttctcccaaactggttgtaacaatatataccacactcagcagagtttgcgtgttcatgatgctccaggctcctgccaacgctgatatrtcagactttaacattttcaaacttgtcgtgtatgaaatattttctaactgtgttgtaatttgtttttccctaattactaatgagattgatcacatagtcacatgattattattggccacttgggatttttttcctgcgaagcgccttttcaagtctcttgctgatttttcttagggtcgttaatgtagtagaatttgtcagtctgttcctccaagattcacactatattctggtcttctctatcttgaggtcatgaaaatgttcatattgttttctaaacatttctgaaaacatacttttgacttttaagtctaaggtcttcactttacctgagtcccccttctttacttttttccttccatcttttctttcttgttatccatatgaataaccaaatgtctcagtatgattcactgaagctccagttctttactactgatctacagggccaaaactgtcacagattaaatttctacttacacatatcagtttctggtttccttctctctctctctcgtttttt

SEQ ID NO: 874480 - DNA, 588 bp, Homo sapiens
atatatcagactttaacattttcaaacttgtcgtgtatgaaatattttctaactgtgttgtaatttgtttttccctaattactaatgagattgatcacatagtcacatgattattattggccacttgggatttttttcctgcgaagcgccttttcaagtctcttgctgatttttcttagggtcgttaatgtagtagaatttgtcagtctgttcctccaagattcacactatattctggtcttctctatcttgaggtcatgaaaatgttcatattgttttctaaacatttctgaaaacatacttttgacttttaagtctaargtcttcactttacctgagtcccccttctttacttttttccttccatcttttctttcttgttatccatatgaataaccaaatgtctcagtatgattcactgaagctccagttctttactactgatctacagggccaaaactgtcacagattaaatttctacttacacatatcagtttctggtttccttctctctctctctcgttttttccttacagacagtagagacagggtcttgctttgtttccctggcttgtagtggctccatct

SEQ ID NO: 874481 - DNA, 571 bp, Homo sapiens
ctatcattcatctgttcattcatacgttcattcattagtccttataggtgcatgacttgaaattgagccactttagtttttgatgatacaaagctggacttgcaataactttctattttattgtaattagtgtatcactattttcttgtcaaaataccatggtactactatgttttgaaaaccaagaatagatttacaaatatcaaagtagctattactgaagttggtaaaatctctgaaattattatttttagttcatatcaggtaccaatgataataactcaacctaagtgtatttgtacattttcatactgctatgaagaaatacccgggactgggtaatttataaagaaaaagaggttcaatggactcacagtttcacatggctggggaggtctcatgggaaaaacctgaccscatgattcagttacctcccattacatggggattatgggagctacaattcaagatgagatttgggtggggacacagccaaaccatatcactaagtaaagccagaagacttggaaaaagcaatagtaattttaactttgtttcccaagaggtgtta

SEQ ID NO: 874482 - DNA, 663 bp, Homo sapiens
atatgagctgtgaagatcaagtgctatgactatagttaataaatttacatataaaaatgagtgttagatcttttgaaatggataatctcatttataaacttactccattcattttgcaaattctccacattgtttaggaactcttattttggaatttccatttgcattagtcccagtttatgaaccaaacaaaaaaactgatctcattactttattgtcacacttcatatataaggtgctaaagcaatatgccttagtaattgagattgtaaataaattgagattcccatctcacatattgcctagtgcttggtttagcctgttttcagatgcgaatagcacattttccttccgtctcatctcataaggaaagcaatatgtttaaaacaaaggatgcactgattgccgcagtttcttcctctgagtctgttactctagttcactgaatttactaccaagcccttctaccatattttacagcaaattctycaaaaggctctgggatgagtcagtttttttgtgtgatgtagttacttttgcaaattatattatagcagggattggtttcaaaaggtatttgaactgagttccatttatttcattatctgattgggatgccaaacagagtcagcacagatacacctaagtgtgggcatggctgtt

SEQ ID NO: 874483 - DNA, 590 bp, Homo sapiens
agattgtaaataaattgagattcccatctcacatattgcctagtgcttggtttagcctgttttcagatgcgaatagcacattttccttccgtctcatctcataaggaaagcaatatgtttaaaacaaaggatgcactgattgccgcagtttcttcctctgagtctgttactctagttcactgaatttactaccaagcccttctaccatattttacagcaaattctccaaaaggctctgggatgagtcagtttttttgtgtgatgtagttacttttgcaaattatattayagcagggattggtttcaaaaggtatttgaactgagttccatttatttcattatctgattgggatgccaaacagagtcagcacagatacacctaagtgtgggcatggctgttgggggtacaatcttgtttaagtaacagggcttggtcaaatatgcaatgatctaccttgtaataatcaggaacacacagttgttataatgcaagagagacgtgaagatttaagcagcttagtcttacttactctgacaatgagtgaatgaatggcttctagaagagtggaatccttcacaggggatgagag

SEQ ID NO: 874484 - DNA, 642 bp, Homo sapiens
gttttgccatgttgtccaggctggtcttgaactcgttaactcaagtgttccgccagcctcggccttccaaagtgctgagattacagatgtgagccatcctgcccggccccattcttgttaaaagtattgattctcaacttacttttttctagttctctaaaaatattgtctgctccattagcagyatggtacacagaaggacacagtgtctgactctcaagtattgctcaaaaatttttttgaataagttaatacatgaataaattttgatgccgtgaattgacgctctgagagcttaaaaataaagtgtggaaatcttgccccttccgtccatcctcttttttccttacataaactcgttattaaatatatatgataatcagaggtgcttagccatatatcagaacttgaagaacagtgagatttctattttattatatcttccatttatctaacaacaaatacatttctgtaatggatttgtgtaatagttttctgaaagtaattgtctgaagtttcattttttattattttaacttccaaggtggctgggatcgttggcagagcggacgtgttagcgtgtctgctgtttctattggcctttctctcgtacaacaggtatgtgtagctaagaatgccctt

SEQ ID NO: 874485 - DNA, 641 bp, Homo sapiens
attttctaattttcctgtgctgttttttgttttttttttttccttttttaaccatgggtacttactagagaagtgcttaaaattcaaaatgctgaggttattctgggtattgttctgttgtttatgtctaatctaattccacagcggtgcaaaaacaaactatttctgatttcaatccttttaactccatgcgcattttttttctttttttttttttcttttttttttttgagacggagtcttactctgtcacccaggctggagtgcagtgtcgcaatctcagctcactggaacctctacctcccaggtttaagcgatcctcctgcctcagcctctcgagtagctaggattatagctaggattacaagcatgtaccaccatgtcyggctgatttttctgttgtatttttagtagagaaggggtttcaccatgttggccaggctgatctcaaactcctgcccacctcggcctctgggattacaggtgtgagccaccatgcccagcctcatatgcactttaaaaggatgtatatttggcagttgtttcatgcaatgttttagaaatatcaattgagtaaatatggttaataatgttattcaatgcttctacatttttctgattttctgcctgcttgttctact

SEQ ID NO: 874486 - DNA, 641 bp, Homo sapiens
attttctaattttcctgtgctgttttttgttttttttttttccttttttaaccatgggtacttactagagaagtgcttaaaattcaaaatgctgaggttattctgggtattgttctgttgtttatgtctaatctaattccacagcggtgcaaaaacaaactatttctgatttcaatccttttaactccatgcgcattttttttctttttttttttttcttttttttttttgagacggagtcttactctgtcacccaggctggagtgcagtgtcgcaatctcagctcactggaacctctacctcccaggtttaagcgatcctcctgcctcagcctctcgagtagctaggattatagctaggattacaagcatgtaccaccatgtccggctgatttttctgttgtatttttagtagagaaggggtttcaccatgttggccaggctgatctcaaactcytgcccacctcggcctctgggattacaggtgtgagccaccatgcccagcctcatatgcactttaaaaggatgtatatttggcagttgtttcatgcaatgttttagaaatatcaattgagtaaatatggttaataatgttattcaatgcttctacatttttctgattttctgcctgcttgttctact

SEQ ID NO: 874487 - DNA, 589 bp, Homo sapiens
gtcctaaaattttcatttgactcacccctcggctgatttgtcagtttactaagaagtatcaaatccattttaagatgcagttctctccctgctgagaagtggcttatcagacatggacttgagatattctcagaggataaagaggtggctaattagaaggttaagacccatagaagagaagggagaaattccttatgattattttaagcagaggcacgtcttactagttcagttgtggagcyttccctcagagagttgctgtctgtggactattctgatccggagaaatagccttgctaacactcctggggcacacccatggcgaatccagctactgaacggacggactctctcagttggtctgtctgccagttggtagatgcaattgagtggaaaatcaaatggcagttcatgttttttccttctcaacagagaccaccaaagggggggaaaagtcataaatctttcctgtgttaattgagaacactggatgccattattaaagcatttccctcagggtcacactactcatttgaatcccagtccaagtttgttgaaatcataatggtagtaggcattattatgtcac

SEQ ID NO: 874488 - DNA, 658 bp, Homo sapiens
tcaccatgttggccaggatggtctcgatcttttgaccccgtgatccgcctgcctcagcctcccaaagtgctgggattacaggcgtgagacactgcgcccgaccatcttattgtggttttgatttgcatttccctaatgaccagtgatggtgagctttttttcatatgtttgttggctgcataactgtcttcttttgagaagtgtctgttcatatcctttgcccactttttgatggggttgtttgttgttgttttgtaaatttgtttaagttccttgtagattctggatattagaccttcgtcagatggatagattgcaaacattttctccctttctgtaggttgcctgttcactccgatgatggtttcctttgctgtgcagaagctctttagtttaattagatcccrtttgtcattttggcttttgttgccattgcttttggtgttttagtcatgaagtctttgcccatgcctgggtcctgaatggtactgcctaggttttcttctagaatttttatggttttaggtcttacatttaagtctttaatccatcttaagttaatttttgtataaggtgtaaggaaggggtccagtttcagtgttctgcatatggctagacagttttcccaacaccatttattaaatagggaattcttttc

SEQ ID NO: 874489 - DNA, 598 bp, Homo sapiens
attagtatccactcaaacatatcttctcacataatgtatgagtccatgaaaaataatactgcaggtgtaaaaacaatggaaaagtatcctaagtgattccacaaacgtgttaaagatggacatgtcccaaacaaaatcttaatgtttatgagacaatcttattttgggcattgacacctaagtgtatgaattttggaggctgcttcagttggaattcttgctttatcatgtactaactctggatattgggtagcaaacttattctctcttgcctttaatttttgatctgtacaatgagaagatgacagctcttattaaatagtgattttgtgaggatgaaataagatactgcctgtaaattacgtataacagggcctgataacatacttaatamatgttagagaaattcaaataataaccaaaaaataaaattttgcttgaagaaaaattgataagggtgtgtcttaagagaaaatgattttggtattaaaatattaatcaaggctgctaggaaaattgatgaagcccttgaatgtttttgtactcatgacccttataatgatgttgctgcaaaagtcaaaagaaaagtaaactaagt

SEQ ID NO: 874490 - DNA, 636 bp, Homo sapiens
gcttttcattttacatttaagtctttagtccatcttgatttaatttttgtataaggtttaaggaagatgtccagttttaattcattttatgaagccagtatcatcgtgatacaaaaccaggaagagacacaacaaaaaaagaaaatttcaggccaatatccctgatgaacatcaatgcggaaatccttaataaaatactgggaaatcgagaacagcagcacatcaaaaaacttatccagcacgatcaagttggcttcaacccttgggtgcaaggctggttcaacmtatacaaatcaataaacgtaattcatcacataaacagaaacaaagacaaaaactcatgattatctcaatagattcagaaaagcctttgataaaattaaacatcctttcatgttaaaaactctcaataaactaggtattgatgaaacatatctcaaaataataagagctatttatgacaaatgcacagccaatatcatattgaatgggaaaaagctgaaagcattccctttgaaaaccagtacaagacaaggaccaccactcctattcaacatagtattggaagttctggccagggcaatcaggcaagagaaagaaataaagcgtattcaaataggaagagaggaagtaaag

SEQ ID NO: 874491 - DNA, 518 bp, Homo sapiens
tacagaatgggagaaaatttttgcaatctacccatctgccaaagggctaatatccagaatctacaaagaactcaaataaatttacaagaaaaaaatcaaacaaccccatcaaaaagtgggcaaaggatatgaacagacacttctcaaaagaagatatttatgcagccaacagacacatgaaaaaatgctcatcatcactggtcatcagagagatgcaaatcaaaaccacaatgagataccatctcacaccagtttgaatggtgatcattaaaacrtcaggaaacaacaggtgctggagaggatgtagagaaataggaatgttttacgctgttagtgagagtgtaaactagttcaaccattgtggaagtcagtgtggctattcctcagggatctagaactagaaataccatttgacccagccatcccattactgggtgtatatacccaaggaatatatatcatgctactataaagacacatgcacatgtatgtttattgtggcactattcacatagcaa

SEQ ID NO: 874492 - DNA, 614 bp, Homo sapiens
aaaactctacaagaggattagaatattcaaatgcatatagcagagagtgaagtagcgcaaataaaagaagtggactctattgattataatgaaaaaaaaaaaaaaaaaggctaggcacggtggctcatgccagtaatcccaacaatttgggaagccgaggctgtgggtcacctgaggtcaggaattcgagaccaggctggccaacatggtgaaaccccgtctctactaaaaatacaaaaattagctgggcatggcagtaggcaactgtaatccccagctactcaggaggctgaggcaggagaatcacctgaacctgggaggcggagcttgcagtgagtcgagatcaagccattgcactcctgcctgggcaacaagagagaaactccatctcaaaaaaaagaaaaaagaaaaaaaaaagaatygtctttcagatttgggcatctatcgtcttctgctacttctgctatatattatgatgtattattatataggttcttaagatatataacaatatactatatattgtaagatatataatgtatatataactcttcaagaaatcatgtacctatgataatttctcaccatcttaggaagaaaaacaatggtttgca

SEQ ID NO: 874493 - DNA, 556 bp, Homo sapiens
ccagctcctggattcattgatttttttgaaaggtttttgtgtctctatatccttcagttctgctctcatcttagttatttattgtcttctgctagcttttgaatttgtttgctcttgcttctctagttcttttaattgtgatgttagagtgttgattttagatctttcctgctttckcctgtgggcattttgtgctataaatttccctctacacactgctttagctgtgtcccagagattctggtgcattgtgtccttgttctcattggtttcaaagaacttatttatttctgccttaattttgttatttacccagtagtcattcaggagcaagttgttcagtttccatgtggttgtgcagtttttggtgagtttcttaatccagatttctaatttgattgcactgtggtctgagagactgtttgttattatttccattcctttgcatttgctgaggaatgttttacttccaattatgtggtgaattttataataagtgcaatgtggtgctgagaagaatgtatattctgtttatttggagtggagaattctgtag

SEQ ID NO: 874494 - DNA, 653 bp, Homo sapiens
gaaagaagaaatataaacaggatacaactgacaaatgtagagcactacacataatagcagaatacactttttttcaagaattcataggacattcactcaaacatccatgaaacactcaccaagaaagcccatatcctggatgctaaaacaaaccacagcacatttaaacaactgaaatcctgcagagtttgtcttctaacaataataggaccaaagtagaaattaataacagacaaaagaaagatctcaaaatattttgatactaaacaacaagtttctaaataattcattgtcaaaaataaatctcaaagacaattaataaaatacataaaaatgaaaacactccatatcaaaatctgtggcatgcagctaaagtagtgcagagatggaggttttatacactaaaaacttgctttagaaaaaaggaaaagtctcagtagaataytctaaacacctacctcaagaaactagaaaaaaatagaaaaataactcaaagtatgaaaaagaaagtaaatgaggtgaagagggccaggcatggtggttcacacctataatcccagcatgttgggaggctaaggtgggtgaatcatctgaggttaggagtttgagaccagcctgaccaacatggcaaaacaccgtctctactaaaaata

SEQ ID NO: 874495 - DNA, 627 bp, Homo sapiens
ttggtaggcactcattatgtagtgaataaatgaaatactgaatggctgcatcaagtgtaatacagggggagaaaagagtaccatgatcagacatggcaggctcatagcatagtctggggaaggtgtaaagacaaatacaaattaaaaataagaggctaaattctccctgttaaaaagaagggaagagattttctgtctctccttttttcctagtacctaggtgaggggttgataggtgcagcaaactactatggcaaatgttacctatgtaacaaacctgcacatcatgcacatgtttcctagacgagaacttaaaatgaaataaaataaaattaaaattaaaaagacaaaaaagtaaaatttctaatgataacactttctctttgaaatatataaaaattattttatcagcttcattaccaaggaatgtctttctcaaggacctgagagccatctctttgaactgcaagcatttttttwaaaaaaagggatttttcattttttgcttgttgatttaagttccatatagattctagatatgagacctttgttggatgcatagtttgcatctattttctcccattctgtaggttttctatatacacttctcaacagaagacagacaca

SEQ ID NO: 874496 - DNA, 588 bp, Homo sapiens
gtttgaatttatttcttcttttcataagtttattggcccatgatatttcttttatgagttgcctgttcatgtacattttttcccgattgggctatttgcctttaataacccagtaactcaaaacaaggtttgccttgtgaattgttttattgtttgcctttaaacaatacttatttatacatatatgctaatatggtatatattaatatcttaggtatattgatatatagtgataaagtgtaggccttactaagttatttgattcttagttttactgaaaatatcataaattatcttgatataaacaactttctgttatctggaggaaaaagaataggggaaagagaaaaaagaaatwgctccatgaaaatctaaaaaataaaatttggaagagtgttgctgtttctgtgcattgtctatactttctccttattggctctatttattttgcttatgttgtattttgccttgcagaactttctaattatctgaacatatgttttcataatttcttctagttcttatgtcatgcttataaatatctcctccattctaagcttataatatttaccatagtttcatttagtt

SEQ ID NO: 874497 - DNA, 650 bp, Homo sapiens
ccttaccacaaaattgtttttgaaacttgagtgtttacaatggctttttaccagttcttttatgttctaccagttcctctccaatttactatggactgaagtcacactaatttgttaagagcaaacaaaacaaaacaaaacagttattacctcattctagcctcaaagcatctgccttttcaatgcaatcaaaattaaatgcaatgaaaattaaatgcaatcaaaattaaatgcacaattctaattttgatgactttagtccctgcttatctgttatattaggctgttcttgtattgctatgaagaaatatctgagactggatattataaaaatgtttaattgactcacagtcctgcaggctgtacaggaagcacagtggcatcttcttctggagaggcctcagggagcttttactcatgacagaaggcaaagcaggagcaggcacttcacatggtgaaagcaggaacaagagagagagagtrtgttggggtaggtgcactaccatggagacagcaccaagtcacgaaggattcgacctcatgatccaaacacttcccaccaagctccaccttcagcactggggatctggtttcaacatgagatttgggcgggacatccaaactatatcagctgtctccctcatccaaga

SEQ ID NO: 874498 - DNA, 688 bp, Homo sapiens
aatcaacctaagtatccatcaagagatgaatgaataaagaaaatatagtacatatacaaaatggaataccattcagccataaaaaacaatgagttcctgtcatttgctacaatgtggatagaactggaggtcattatgttaagtgaaacaagccaggcgcagaaagacaaacttcggatgctctcacttatttgtgggagctaaggcttaaaacaattgaactcatggagataaacagtataaaggttaacaggctgagaagggtagtgagggttgggaggaaagcggggcacactaataggtacaaaaacatagttagaaagaatgaataagacctagcattgctagcacaacagggtgactatagtcaaaaataatttaatcgtacatttaaaaataactagaagagtataatcagattgttgtaacacaaaggataactgtgtgaagtgatggatattcaatttaccctgatgtgattattatgcatgtatcaaaacatctcatgtactccataaattttcaaaagaagtatgtatagcataaygcttaaaataatatactgtaatagtctacaacttggcaagaaattaagctttcgtttattttgtcacaacaggtatactacatgcagattaaaatatatattttatatatatatatataccatctatttcttaagggcatt

SEQ ID NO: 874499 - DNA, 630 bp, Homo sapiens
gcaactcaggaagtttaggaggcactgaccttgtcagggtaaatcaggaccttgagggatcttcagcagcgatctcaaactttaatgactatgacaatatctagattgcttgtgaaaaatacaggccagtgagtccacccccaaacttactaaattagaaactttggttgttgccaaggcaatattcatctagtaagtgacccaatttatgccttggataggtatttgggtattaaacttgtttatttattcattyttcattcagtaaatatttataaaatatctactctacatatttttctacattgggataaatcggtgaaaaatacaaacaggacacatacccttaaggatctacattctagcaggggagacaggtgacaaagagcataatgaataagttgactatgcaatagcctgggtaaagaaaataacaagtagagcagagaatgaggtaaatattgaggatggtaaatattaaggatggtaaatattgagttagggagtagagggttggtaacaaaaccaagtgaggtggtaaggattgggctccttgaaagttttgaagagggtgagggaactaagcagattccagggagatgggtccaaacagagcgagcagagtgaaag

SEQ ID NO: 874500 - DNA, 671 bp, Homo sapiens
attaatttagttaattattagtgtcttgaattctttgagcaccatcttaattagattttctttttgtaaaaccttacataccttcttaaatcatttaaaagctaatcctattacttggtttaatgaagttctatgaaatgtgtttgccagcagtgagaagtctttttctttcactagatgagtatttcttattaaatgaaaagaggaaatgaaaaatgacggctattgactccccaggaacaggttgcgaactagcggtacctggggattttctaccttcttatctacctaatggaggcaattggcacattttaatgaacaactgcagagcagatgagaagacaggaaggatgttttccctagaaacatgaattgaacatgctggttgtttgaagtaatcaatgactagattttaaatcatataaataaaatgctttacgttctattttctaaaaataactcttgggtgattaataatagaatagttcatgtttacataatggaatacctcacagaatagaattgtsattcctccatagcaaattctcccaaaacttgaaataatatttttccagtcaaaagctgtgtcacaaatgataaggatgtgacaatttgcagaaacgtgaagaatgaatcataaaagaaggaaaattcagccgctatttaagggc

SEQ ID NO: 874501 - DNA, 620 bp, Homo sapiens
atttaggctacaatctcagatataccagacatataactcttttattttgtaataattaaacaatatgtgtttttgaggtatcattatgctatggcaatattaaatttcagttgattaaggtctaagtttacttccttgtagttgcagtgaagatcctttggagtgatataatgacatagctttcattagttaatgggtatccgtaatgattggtcttcaggtatcaaaactaacattctttggatatacatcattttatcttgttctcagttacgaatccattcargaaactttgatattgttccttattgttttcaagggagattaaagtctggttctctctaccatttctgagcccctttctctattgcttcatggctaagaaaaacttgacagagttatctgtaaggcactttgccactttgtgctagtctagaaaaaggcaaaggcattctacttcaagaccatgacagagtgggtggaaactctgggatactgattcaggcaaacaggccatttctatattggactaagtaaggtactatgaggtacaactcatattctaggtttgatgtgagaaatggtgcacaagctttctctgctgttggatcccttaaact

SEQ ID NO: 874502 - DNA, 679 bp, Homo sapiens
acaggcatgagccgctgcatccagcctataatatctgtatctcacagatagagaagctgagcacagaatggttaggcactatacctaaggttgcagagcagccaggaattaaagaggtcagattccaatccaggcaactcagtgccagagtccaagcttccatcttctgctctgcttccagaagatcacagacctgtctatttatctgaaaactggaggtgtttaaccacactgcctccatccttaaggtttagtgagtccagcatgcagtgtcttaggtttcaggaaatactgcctgcacccggggtttattcccacgggcctgtgtccagcttgtgtttgtgtacacagagcacaggagcagagaaattatctctaattctctacaactctccagtctctcagcaaaattattcacctcctgttagaggccagaagtggatgcacaaatggcatrcatttgagcacagtggagagtcattgtagcattgagagaagacagagcactggatttgggggctaccatggagagatctctcatagaactttgtttttaaaatctgctcaattaattatcctatttactaaaactgtggttaaaggactggcaaaattgtatattccagatgacctgaaatcaatggcaacaaactatccctgaggcaagaagcaaacacaa

SEQ ID NO: 874503 - DNA, 653 bp, Homo sapiens
tgtaggagagctggcatttggggaagaaaaacttattgttttcatgtgtatttgttccgttaccgccttttcttcatctaccaccaactagatgatggcataatagaagacatgagccctgaataaaaattttccaacctaaaagtgcatatttttgagggtttatcccctctaagccctcagttgtttaataattattttataaacacatagttcgctggcataatttgccataatttcgtgattaaaatgatgtagaggtgccacacttttaaagaataactcattgcctttgctcgatctattatagccccctctcaaatttaaaaaatatatacaaatttgaaaaatcacttacctatgacccttaattttctttttttaaaaataagcattttaggttagataattgcaaagatcccttctatcccccatacttarttttgttattctataggatgggaaacaattgcagcacttataactttttatgatgccccaaattgcaaagcataatgaaatatggctcaccatccaccacgatgtgaaatttttcttatggtcaacaacttcattttttatttccaaatgatatagtgtgttttcaagaggctttttatatcaaatctatataagcagacgtcctgatgcat

SEQ ID NO: 874504 - DNA, 543 bp, Homo sapiens
tagactaaaaaggtctgagagaccacacgcaggtcttcagctttagggtagacagaaatggagaagaaggaatgagagccctgggaggaaaacttttcacttcagcatattttggatagtgatgtcaaggatgacagaaaatagaaattattattttatgtaaaaagttgtatcctagaactgagagtatgaccaaaagcctatgtttatttgccgtcaattaaaaamaaaaacaaaaaaaaaaaacctcttgctttggctcattgtagtaaagccaacattaaaaaaaatttatttttgggcatgttggtgcatgcctgcaatcccatcactttgggaggctgaggcgggaggatcacttgagcctaggagttggagaccagcagtttgagaccaggctaggcaacatagtgagatcttgtctttaccaaaaatttacaaaatagccaagtatgatggtgcatacctgtggtcgggagactgaggctggaggactgctagagccaaggagtgtctaggctatagtgagccatgattgtacca

SEQ ID NO: 874505 - DNA, 643 bp, Homo sapiens
tccaccagatatgctaaattatctctctcaagttgaaatttccacagtttcctagagaaggggatcaatgcctccaagttctttgctaaagcatagcaagagtgacttttgttccagttcccgataagtttttcatctctgttttaggccacctcagtctggacttcaatgtccacatcactatcagcattttgggcaaaattattcagcaagtctctaggaagttccaaactttcccatatctttctgtattcttttgagccctccaaactcttccaaaacctctgcctgatacccagttccaaagttgcttccacattttcaagtatctttatggcaatgccccactcctgataccagtttattgtattagtccattcacactgctataaagaaatactcaagactgggtaatgtatagaggaaaaaggtttaattgactcagagttctacgtggctgggaagatctcaggaaacttcaaatcatggcagaargtgaaggagaaacaagaatttttttcacatggtggcaggagggagaagtgcaagcaaaggaaatcccatatgcttataaaattatcagatctcatgagacctcactcactatcatgaaaacagcatgggggaaacaacccccatgatc

SEQ ID NO: 874506 - DNA, 628 bp, Homo sapiens
ataaatgtgcgtcaaatacataaatgaaatctgatcttccatgtctactaagagcgtctatattgactcttgctctatattttatacttcataaaatgattccatgtactttataagtaaattttgtactttaaaaaatgagatatatgtgcatagcaaaatatgtgaagaagaagacaggagccagactgtcacttcatatatgtctgctttagactttcttttaagcargaaatatattcattttgtaattgaaatgaaaaatataaaataaatctaataaaagttgttaacttaaacatttttttagctacaatctagcatttgggaatctatttattttcataaacgtgatacacatgattcccagtgaaataaaagaagatatttagccaacatcttcttttacccccaatcaaagcaatcgcttctctatatcactcagcactgcattcactctcttccttgccaagttagattttattttgccgtgtatgtattttggtcacatttaatcctttctggaacaagtcacgatgtgcataaatacatacataacactttggaaacagcacgtaaagatgttttggcagtcgaaaatctgtactgaatattttcaaatatatag

SEQ ID NO: 874507 - DNA, 632 bp, Homo sapiens
tgtaatctaaattctataactggatatttacattactttctcaatacctaaactgatgttcttttcaggaaatgataattgagcatttgatgaatttgagtaattttcacaatgaatgtgtatttaataaacatgtattagctaaaatgggcattcttaaaatgcatgaggcacacagaatatgaaagcattagctgattctcgggctgtacttacaaattaaacacacaggccaaaagacagaaaattatctcaattaaaacagaattctagctacagaagatgctttttttttctttgtggatgtagatattagtttttaggcaagatcaggacacaaggtctgtctgaaataagaaaatatttgagcattttcttatttctctctaatcttggcaggaagtggtcccccaattgcaaacytcaggcaacaatacactaactgtaaagaacatgtattcttagaacaaatagaagtttacctctcccatcctcaaacacacacaccttactacatagtctaagtattcattccaaacacagacaactccttaagaaatgaactccagaaaacatgtttttcttcttattggatatcgacccaccacttctaaacttgcctggcattttgg

SEQ ID NO: 874508 - DNA, 643 bp, Homo sapiens
cgtgttttagtcatgaagtccttgcgccatgcctatgtcctgaatgttattgcctatgttttcttctagagtttttatggtttgaggtctgacatttaagtctttaatccatcttgaattaatttttgtacaaggtgtaaggaagggatccagtttcagctttctacatatggctagccagttttcccaacaccatttattaaatagggaatcctttccccatttcttgtttttgtcaggtttgtcaaagatcagatggttgtagatgtgtggtattatttctgagggctctgttctgtttcgttggtctatatctgtgttttggtaccagtaccatgctgttttggttactgtagccttgtagtgtagtttgaagtcaggtagcgtgatgcctccacctctgttcttttggcttaggattgtcttggygatgcgggctatttttggttccatatgaactttaagtagttttttccagttctgagaagaaagtcattggtagcttgatggagataacattgaatctgtaaattaccttgggcagtatggccattttcacgatactgattcttcctatccataagcatggaatgttcttccatttgtttatgtcctcttttatttcgttgagcagtggtttgta

SEQ ID NO: 874509 - DNA, 679 bp, Homo sapiens
ccagtgctcattttcaggcaaaaacttggcattctcccaaaacactacaatccatgctgtgattctctaaatgggactcacccaagactctatacagaatctatcagtgccgctgatacttctaatactcttttatttgatggatcacaaagcaggacagcttgtaccacagcttgaacctgatgcagagaggtcttttgctccaagacccactcaacattggcagcyttatgggttacctgataaatgggttaagcagcatagccaattgtgatatacgtttcctccaaaatccaaggagacaaatcaagacttttgcatttttcaaaattgcagatggtacaggaagcctcttacttaaaaatgacacccattgacccttggaattcagatgtcttagataatcaactcacttctcaactctactatgacagagaaaggaaattgacgtagctctgcagcaggacaccaagcatgatcttagcctaacttaaattatcattcttttctaacttacagaaataagttgcataatagatgccaagattttcattatttcaataaagacgccacacctggagcataagccatgattagcatcaccacctacgaatggtatcatggtaattctttataattcatctgggtttagtgatgattaaaaggtgtaaatggagat

SEQ ID NO: 874510 - DNA, 592 bp, Homo sapiens
gcattacggaggctgccaagcaccaaacatattcaatatcacacctggcccgatggtcttgcaatctaaaacaaacaaacaaacaaacaaacaaacaaaaaaactcagtaattttctgtatttgtaagtggtcatcttatatgatggtgatgggatttctgtaggaaaaacatctattttcaaagttggaagacctttattattatatttgcacaagcttccttgtcttgttaattaactagttaagctagagtgctacctattgacattggaaaatattaccaggaatgtttttttctggtttccctcaytgattcaaaatcctactctcatgacatctgacattagatacaaagacaacaacaacaacaaaaatgactttctgacaagaattctcagctgtaccatgattacttcttttcatcctcctacctttgcgcaattactaactcatctatattttaagataatggtacattagggtccatttagaacgtctattagatcataatgtcacacaagcaatgatgtccttgttttgaaaatagcatccagagcagctactcctctaactcatttagtaaacggggct

SEQ ID NO: 874511 - DNA, 627 bp, Homo sapiens
gccttagtgcatcagagtagataacgttagataaaccagacccagaataatatgaagaaggataacctctggacaggattttagcataatgggttccaatttcatctttgccactgagtgaaaacaagcaggggcaagccactcaccctctctcatgatttgtttccacatctatccaataagagggttagactagatctctgaattccatttttgctctcaagttmttttgtcttgtctggttagatttagccaaagacatcatttggaaaaatctcaaggaaagcccaagtctgcagagatcatattatttggacacaaatctaatgttgccttgcttcatcaattactatttggacttttggaaagaaaatactcaaatcaatatcctgactattttgactgtgtccaagtctccctattatatgctgtaatagaatcattttgtttatagaaccagtttgtaattatgcttttatttttgtgattacttgctaacatctgcacacacccacctacctctagattatgagttgtatgaaggaagggaatgatttgattttattcaccattaactcctcagtgcttagtgcccagagtaggtgggcaatacatatatattgaatg

SEQ ID NO: 874512 - DNA, 589 bp, Homo sapiens
gggctttgggtgttatcaaccagatgaattcctaggaactgtggatatagcttgccacagtattttatcagctaattgcatccttggacgtgctgggagtcagcttgcataagttaagtccttgaggaaggggtgggtaaggggctgtaagtgtaggagccaagatggggtctgtctggctctctcagctaagggagagtcaattcaggttaaaacaaggttagctatcacacayatactttgtatcttcttccttgagatcccagtccttcattgcctcttgtccaatgcttgaaaattgtgttactgttttcatatattgcatctggttttcttcttgttgaaagcaagaaaaaattctggtcatttcattagatcatggtctgaggcagaaatcaggctcattcttaatttattaaatggcttataatcaattctattaatatttacttatattctcaagttctccaggaaggataccccaaaaattcatattcacacacgacatgcttcatttcttgattgagccaacaagatctgttcaatcaatcttggctttggaagagctcagagcaaaagttccaagcaa

SEQ ID NO: 874513 - DNA, 506 bp, Homo sapiens
gcattccagcctgggcaagactccatccaaaccaaaaaagaattgtggatgctgctaaatttgtagattaaaattcctatctcaggaaagaaatgtgtcaaatcaatgacagattcaacctaaaaaacttcaaaaaggacaactgaaactcaaaataagaaggaaataataaagatcagcaagaaattaatgatatggaaagcaaaataacaatggagaaaaaccagtgaaatcaataactgattttttraaaagatcaataaaagagatccacctttgtggatctagcatgaaataatgtgagaaaacacaaattatcaatgttaggtacaggtgaggtgacatcactagatactatagattttatttattcatttatttttacaccccacctggagtgcagtggcacgaccatggctcactgcatcctggaactcctgggctaaatcaatccactggcttcagcctccagagtagttgggcctacaggagtgggccaccacacc

SEQ ID NO: 874514 - DNA, 627 bp, Homo sapiens
ctttgctgcatctgttgacataatcatgtggtttttgtcattgtttctgtttatgtgatggattacatttattgatttgtgtatattgaaccagccttgcatcccagggatgaagctgacttgattatggtggataagcttttcaatgtgctgctggattgggtttgccartattttattgaggattttcacatcaatgtttatcacagatattgttctaaaattctctttttttgttgtgtctctgccaagctttggtatcaggatgatgctggcctcatacaatgagttagggaggcttccctctttttctattgattggaatagtttcagaaggaatggtatcatctcctctttgtacctctggtagaattctgctgtgaatccatctggtcctggactttttttggttgataggctgttaattattgcctcaatttcagatcctgttattggtctattcagagattcaacttcttcctggtttagtcttgggagggtgtatgtgtccaggaattcatccatttcttctatatttctagtttatttgcttagaggcatttataatattctctgatggtagtttatatttctgtgggataggtggtgatatccccttaatcattt

SEQ ID NO: 874515 - DNA, 627 bp, Homo sapiens
ctttgctgcatctgttgacataatcatgtggtttttgtcattgtttctgtttatgtgatggattacatttattgatttgtgtatattgaaccagccttgcatcccagggatgaagctgacttgattatggtggataagcttttcaatgtgctgctggattgggtttgccagtattttattgaggattttcacatcaatgtttatcacagatattgttctaaaattctctttttttgttgtgtctctgccaagctttggtatcaggatgatgctggcctcatacaatgagttagggaggcttccctctttttctattgattggaatagtttcagaaggaatggtatcatctcctctttgtacytctggtagaattctgctgtgaatccatctggtcctggactttttttggttgataggctgttaattattgcctcaatttcagatcctgttattggtctattcagagattcaacttcttcctggtttagtcttgggagggtgtatgtgtccaggaattcatccatttcttctatatttctagtttatttgcttagaggcatttataatattctctgatggtagtttatatttctgtgggataggtggtgatatccccttaatcattt

SEQ ID NO: 874516 - DNA, 627 bp, Homo sapiens
ctttgctgcatctgttgacataatcatgtggtttttgtcattgtttctgtttatgtgatggattacatttattgatttgtgtatattgaaccagccttgcatcccagggatgaagctgacttgattatggtggataagcttttcaatgtgctgctggattgggtttgccagtattttattgaggattttcacatcaatgtttatcacagatattgttctaaaattctctttttttgttgtgtctctgccaagctttggtatcaggatgatgctggcctcatacaatgagttagggaggcttccctctttttctattgattggaatagtttcagaaggaatggtatcatctcctctttgtacctctggtagaattctgctgtgaatccatctggtcctggactttttttggttgataggctrttaattattgcctcaatttcagatcctgttattggtctattcagagattcaacttcttcctggtttagtcttgggagggtgtatgtgtccaggaattcatccatttcttctatatttctagtttatttgcttagaggcatttataatattctctgatggtagtttatatttctgtgggataggtggtgatatccccttaatcattt

SEQ ID NO: 874517 - DNA, 546 bp, Homo sapiens
tgcataagaattgaaatttcctgtaagaccttagtgctgatataagctcatgatcttacccattgccctaagcctgagagtcaacatatcttctgttgtctgggtccaggtatgagagtcatccctgtgactgtgagctgggttcaaaaatgtgtcaacacctaacttgtggccagatccacatatgacattcataattccaactgtggaccgtgtttccactttagattctagacctcaccagtaggctctgttcctgtttgagggtgacaatcctaactgctggctgggtgtgtttaagagagccacaatctcacctgtgtgctgggtcctgctgtgacactctctgtgccacccaaggcctttatattataagcatgtgtagtaatcytctgtgaccttcgtacaagtaggggaaccaggaccttaccatttgccctaagcctagctatgtgaattaatatatctttttttttttttgctgattccagatacaagattcatcatcatgcctgtgagctgggtccaataatgaatcaccatcct

SEQ ID NO: 874518 - DNA, 628 bp, Homo sapiens
gctactaatttgctacaagatattttaagcaagactaagaaaatatgaacagtgtactgtacaccagggtgacactacattttgtcaaatagtttacagtgtttcatttacccagtatcaggttcttaaactattccttagcttgcatttttaatataaataactacattttagtaaaatttttggccaaattatcmaaatacatttaaaaacactgctttattatttctgcagaggacagtaacaacctctatagccatttacatgtattacaaaaaggtggaaaaatgtagctggtataataaagttcttttaacaatagtgggccatgttgttgttatttttttgtattgttaagacatcaaaagacaatgatgatatttaaagtggaaaagttttctgaatggcattctatatgttgtgtgacatgtgtctgatattcacattttatgttaatttcacatttacaactccaaaatacaaataatgctgattgtatggctcactgtggaatataccagagtatgcctttaagtctcttcacagatattttgtattctgctgttattccatttaatacatttttaaacgtttacatgccagggtgtccatgcttatgtttgagaaa

SEQ ID NO: 874519 - DNA, 594 bp, Homo sapiens
ctgcctcctgggttgaaccgattttcctgtctcagcctccggagtagttgacattacagacgcgcacaaccatgcccggctaatttttgtattttcgatacaaacgaggtttcactatattggctaggctggtctcgaacttctgacttcaagtgatctgactgcctcagcctctgaaagtgctgggattatagtcataagccacacttcctggcccaaaaaatattcatttctttactstttaaattttgagaaaatataatggaaaacaaaaaaaatcttccccccaatgagaaatcatcttcacgatgataatagtgaaagaaataaaaaccacattattaataagtaagccttaaaccagaatgtgatgggaaattgaggcaaacagctaagaggttgaaaagagacaaggaaacttcactgttctatacaacccattgagtacatgttttcaagataaacactaatcagtcctcagggaagaggacttgacaacactcttggtcacacatagttcatcctggctctatttggtaatggaggtgaccatctgtgtcagctaattagcttcatccagagggagggggaaaa

SEQ ID NO: 874520 - DNA, 568 bp, Homo sapiens
gcccagctccccactgctgcctagtgtgtgggggcttttctaggaggggagtgagatctgaagaccagggtcagatatacacttgtaggtcttcctgtggtagtttcttatctctgcatgatctctggtgcagtgggcagcagaggaccgtctttctacagggtgaggtctcccctgtctgtttttgccccaggaagggagtgagtcatttctaacatgaaagctcgtctttttttttttttttttgtggggaaaagaaagatcagaatgttactgtgtctttgtagaaaagggagacataagaaactccattttgatctgttctaggaaaaattcttctgctttgagatgctrttaatctgtaactttagccccaaccctgtgctcacagaaacatgtgctgtattgaatcaaggtttaatggatttagggctgtgcagggtgtgccttgttaacaatatgtttgcaggcagtatgcttggtaaaagtcatgccattctccattctcagttaaccagggacacaatgcactgcggaaagccgcagggacctctgccctagaaagcct

SEQ ID NO: 874521 - DNA, 646 bp, Homo sapiens
aaactgttctccataggggttgtactaatttacattcccactaacagtgtacgactgttcccttttccccatatcctatccagtgtttgttattgcgtgtcttttggataaaagtaattctaagtgaggtgagatggatgtctcactgtagtgttggtttgaatttctgatgattaataatgttgagtatcttttcgtatatctgtttgccatttgtatgtatattttaaagttttgaaacagatcctcaccctattacccaggttggagagtggcacaatcacagctcaccacagccttgacctcctgagcrcaggtaattttcccatccaggcctcccttgtagcaggaaccagaagcattttccatcagcagctaatgtgtcttcttttgagaaatgtttattcagatcttttgcccatttttaaatcagattattagtttttttcctacagagttgtttgcacttctcatatattctggtaattaatccagatagtttgcaaatatcttttcccagtctgtgggttgtctcttcactttgttgtttcctttgctgtgcataagctttttaacttgatgtgacttcatttgcccatttttgttttggctgcctgtgcttatggagtattaaaaaatctttttc

SEQ ID NO: 874522 - DNA, 647 bp, Homo sapiens
accatgcacagctgtgaggcagtcatgttctgggcagctaccactacccaaaagaatcaggctgatgttaagcaaggcaatttggtgtggaaaaatgaaactactaacaaaagcatgatgcaaaagaaaatgatataggccaaaagagccagcagtaactatgagaactgaaattcctcctggagtccttggagatactggaatttccatgcasctgggaaggggtataccatcttctatttggatgacagaagaagggattgactttaatagatatgtggattgtcttcttggaagatctttcaagatctttcaaaggatccgtatctcaaaaataagattcaagtgaaaaccagaaaaaaaatcaccatggttgttggcttcctgagtgattagatgtccttttgtatttggaacctgtagacttgatctttgagtctcaaaccagaaaagaccttgagtgttgggacagaaacagaggatgctcctccctgcccatgggacacaatctcggttgtgtgagtggctttgaaggattcctgaaccatggaagacaaacacctcacaggagctgaatgctggaccacagcagggatggtgagaaaaacctggcatttgtaaccctgaagagtgcagacaaagacttc

SEQ ID NO: 874523 - DNA, 647 bp, Homo sapiens
accatgcacagctgtgaggcagtcatgttctgggcagctaccactacccaaaagaatcaggctgatgttaagcaaggcaatttggtgtggaaaaatgaaactactaacaaaagcatgatgcaaaagaaaatgatataggccaaaagagccagcagtaactatgagaactgaaattcctcctggagtccttggagatactggaatttccatgcacctgggaaggggtataccatcttctatttggatgacagaagaagggattgactttaatagatatgtggattgtcttcttggaagatctttcaagatctttcaraggatccgtatctcaaaaataagattcaagtgaaaaccagaaaaaaaatcaccatggttgttggcttcctgagtgattagatgtccttttgtatttggaacctgtagacttgatctttgagtctcaaaccagaaaagaccttgagtgttgggacagaaacagaggatgctcctccctgcccatgggacacaatctcggttgtgtgagtggctttgaaggattcctgaaccatggaagacaaacacctcacaggagctgaatgctggaccacagcagggatggtgagaaaaacctggcatttgtaaccctgaagagtgcagacaaagacttc

SEQ ID NO: 874524 - DNA, 661 bp, Homo sapiens
gtcagtttatgtcttttgctaaattgtatgagttattagccattatttccttcagtatatcttcagcctttttctctttctcctctccatctggtaatccaatgacttgaatgttagatattttcttacatttccacaggtccctgaaggtttgttcacttttatttttcaatttggtatttctgttgttcgaattggttaattgtgttatatcttctagcccagtgattttttcctgtgtccccctcatgctgttgagcttattctttttttatttttttggctattgtctttttcacttctaaaattttcgtttggttcttctctacatcctctatttctatgctgagacttgtatttttaatttgttttaagtgtgcttataatggctctttgaagcatttttatgatgaatgcttaaagtctttgttagataattctaacatatctattatctcagtrtgtctacctattaatggcctttttcattcagtttgaataatttggatatgacaagtagttttctattaaagcctcaacatttgggtgttgtgtttttagattctaaaacatattaaaaccttctgttttagttgacttttcttgacatcactctggcaggggaaagggacctctattttattgctgcctatggggcaga

SEQ ID NO: 874525 - DNA, 606 bp, Homo sapiens
aataataatttactatttttattgttatctcagtactgctttcttaatctttaaatccattatgcagaactgttcatcccagctgctaaatgaaatcttgggcagaacagcaaaagaaactgtcatcagagtgaacaggcaacctacaggattggaggaattttttgcaatctactcatctgaaaaaggtctaatacccagaatatataaggaacttaaacatatttacaagaaaaaaacaaacaaccccatcaaaaagtaggcaaatgatatgaaaagacattcycaaaagaagacatttatgcagccataaatatctgaagaaaagctcaatatcactgatcatcagagaaatgcaaatcataaccacaatgagataccatctcataccagtcagaatggtgattattaaaaagtcaggaaacaatagatgctggcgaggctgtggagaaatagaaacacttttatgctgttggtgggaatgtaaattagttcaaccattgtggaaaacagtatggcaattcctcaaggatatagaaccaaaaatgccatttgacccagcaatcccattactgggtatatacccaaaggaatataaatcattct

SEQ ID NO: 874526 - DNA, 661 bp, Homo sapiens
tctcaggacaaatttttttctgaggtatcaaagactatacaaaaatataaggtaaaataataaggcaaaaagtatcttaggtctctgatcatgtcacttctctgctcaaaaccctataatggaagagaaaaatcaaagacctcccatggcctatatggyagattttattttttatggtggctgaaataacatgctctatccaatatcctcttctggaagcttcttactccctcaaaaagaaaggtctgcgttccatcctcttgaaactctgtttgactttgtgactgccttgatcaatggagtatggtagaaatgacactatgtgactttggagtctaggtcatacaaatgtcatgtacttctgcctagctctcttgggacactcactcttagaacccagccaccacattatgagaaagtccaagatgcccaaggagaagcatacagccttttctgagctcccagccaacagccaacaccaccttaccagttgtgtaaaagagctatctttaaagcagattctccaaccctggcatcaagcttctccagctgatgccatgtgcagcagcaataaccatccttgctgagcactgcccaaacgtaggattgctagaaaaataaagaatgttgttttcagccataaaatttggggatgatttgt

SEQ ID NO: 874527 - DNA, 450 bp, Homo sapiens
ggaaggatggaataatgaacctgttgtgaactgtattgatagattgtccttgctacaagacaggtaatactaacatttatcaatatctaagtctgcacaatccattatttagctactagatatatatggctattgagaacgtgaaataagactagtgtgaattaagatgttcagtaagcataatatatataccaggtttcaaaaacttgtcaaacaaaggaaaatatcaaattaataatttgtatcytgattactgtttgaaacgaccatatgttggatgtattgggttaaataaactatacttttaaacttctttttttaaaatttgtaatgtggctactagaaaatttaaaattaagtatttagcagacatatttctattagacatacttctgttgtttgtctaagtgcttcttttgtagaggtttctaaaatcattgcaaatcagag

SEQ ID NO: 874528 - DNA, 582 bp, Homo sapiens
gtaaccaacccaaatgtccaatggattaaaaaaatgtggcacatatacaccatggaatactatgcagctgtaaaaaatgatgagttcatgtcctttgtagggacatggatgaagctggaaaccatcattctcagctaactgtcgcaaggacaaaaaaccaaacaccgcatgttctcactcataggtgggaattgaacaatgagaacacatggacacaggaaggggaacatcacacaccagggcctgttgtggggtggggggagggagaagggatagcattaagagatatacctaatgttaaatgacaagttaatgggtgcagcacaccaacatggcacatgtatatatatgtaacaaacctgcacattgtgtacatgtaccctaaaacttaaagtgtataaaaaaaagaatcattatatcatgytctacctttatgtttgcctctactcagtaagaaatacatgcattctagatagtcctccccattcctgctctaaccccctatgccatgctctgtgcatcctcatgcattcctttctcaccctctcacactggcacacgcaaatccttctactggactct

SEQ ID NO: 874529 - DNA, 592 bp, Homo sapiens
tcaaattgtcagaagttagagacaaagaaatggtattaaaagcagcaagggagaagtgaattgtcacatagaggagaatcactgtaatactatcaacagtttttagcagaaattgtgcaagtcagaaaatttctttcttttaaaatttcatacctttaatattttggtcatatttcaaaaatatgttcccaactttgaggtagtrtcccactctttcagaaataaaaacataatgagtccatataatttggctgagtccatgacacattttttaaaaggtaaatcttagcaatttttctacccaaagcaagtggaaaccagtagaagaactaaaactatattgtcattgtggtgatttttgctgcaggataataatgcaatttgtatttttattaaaatcctatataaatttgtaagtatagtatgttgcatctaataatgaatttcttaaatgaaggaaaaactatctaaagacatttattctgtgttgaggtttacctgaaattaactttgcttttgtggctttaccttcagtatatagtctttggaattaagtttcaaatgaatttcaggaggatttgcacaacgtgtt

SEQ ID NO: 874530 - DNA, 642 bp, Homo sapiens
atcatggatgaccagtaatttattcatgcagagaaagatgtatatctgagttgcaaatatacctttttcccggtaacacttctgtttgtttgttttctggtgatataactaaatacctgagactgagtgatttataaagaaaataaatttttattttattgctctggaggctgggaaatccaaggtctagggtctgtgtcttgtgagggctttcttgctggtagggtttctctgcagagttctcttatggcccagagcatcacatggtgatgggggctcatgaaagaaagtcaaactgtccttttataacagatccactcttgtgatgaccaacccactcccacaataatccattaatctattaactcattaatccattaatccacaaaaggatkaatccatttatgaagggtgggccctcatgatgcaatcacctcttaaaggcccctatttttgtactgtttcattggagattaagtttcaacattaattttggatgagacagatattaaaaccatagtaacatctgagagcaacactattaagagacttctagacattcatttctgtgatattccatataatattatcaccactcaaagtgtatattatccatcattatggcaaagaagtaaagcaatg

SEQ ID NO: 874531 - DNA, 611 bp, Homo sapiens
aaaggatttctctgattactaaataagatgatgcaaagtgccaggatccgatgctcactaaggtctaatgcctcatccctgaatttttttattatgattatactttaagttctgggatacacgtgcagaacttgcaggtttgttacatatgtatacacatgccatrgtggtttgctgcagccatcaacccgtcatctacattaggtatttctcctaatgctttccctcccccagtcccccactccctgacaggccccagtgtgtgatgttcccatccctgtgtccatgcattcttattgttcaactcccacttatgagtgagaacattcacagtttgcttttctgtttctgtgttgttttgctgagaatgatggtttccagcttcatccgtggccctgcaaaggacatgaacccatccttttttatggctgcatagtattccatggtgtatatgtgccacattttctttatccaatctattattgatgggcatttgggttggttccaagtcttttctattgtgaacagtgttgcaataaacatacatgtgcatgtgtctttacagtagaatgatttataatcctttgggtatatacccagttatgggattg

SEQ ID NO: 874532 - DNA, 611 bp, Homo sapiens
aaaggatttctctgattactaaataagatgatgcaaagtgccaggatccgatgctcactaaggtctaatgcctcatccctgaatttttttattatgattatactttaagttctgggatacacgtgcagaacttgcaggtttgttacatatgtatacacatgccatggtggtttgctgcagccatcaacccgtcatctacattaggtatttctcctaatgctttccctcccccagtcccccactccctgacaggccccagtgtgtgatgttcccatccctgtgtccatgcattcttattgttcaactcccacttatgagtgagaacattcacagtttgcttttctgtttctgtgttgttttgctgagaatgatggtttccagcttcatccgtggccctgcaaaggacatgaacycatccttttttatggctgcatagtattccatggtgtatatgtgccacattttctttatccaatctattattgatgggcatttgggttggttccaagtcttttctattgtgaacagtgttgcaataaacatacatgtgcatgtgtctttacagtagaatgatttataatcctttgggtatatacccagttatgggattg

SEQ ID NO: 874533 - DNA, 611 bp, Homo sapiens
aaaggatttctctgattactaaataagatgatgcaaagtgccaggatccgatgctcactaaggtctaatgcctcatccctgaatttttttattatgattatactttaagttctgggatacacgtgcagaacttgcaggtttgttacatatgtatacacatgccatggtggtttgctgcagccatcaacccgtcatctacattaggtatttctcctaatgctttccctcccccagtcccccactccctgacaggccccagtgtgtgatgttcccatccctgtgtccatgcattcttattgttcaactcccacttatgagtgagaacattcacagtttgcttttctgtttctgtgttgttttgctgagaatgatggtttccagcttcatccgtggccctgcaaaggacatgaacccatccttttttatggctgcatagtattccatggtgtatatgtgccacattttctttatccartctattattgatgggcatttgggttggttccaagtcttttctattgtgaacagtgttgcaataaacatacatgtgcatgtgtctttacagtagaatgatttataatcctttgggtatatacccagttatgggattg

SEQ ID NO: 874534 - DNA, 492 bp, Homo sapiens
ccaatgggggcattttgacatatttctgcactgatcacccaggtgatgggactcttgtctaggctctgtgtatgggggctttgtgatatatctctgcactgatcacccaggtgatgtaaygcttgactaggctctgcctacggggcatattgacataccactgctttgatcaccgaggtgacgtaactcttgtccaggctctgcctatagggggccttttgacatatctctgcaatgatcatctaggtgatgtaactcttacttatgctctgccggtgggggcattgtgaaatatctctgcactgatcacccaggtgatgggactcttctccaggctctgcctactgtgggcattgtgacatatttctgcactgatcacccaggtgacggactcttgtcttggatttgcttatgggcacattgtgacatatctctgcactgatcacccaggtgatgtaacactgttctaagctctgcctaaaggggctctgt

SEQ ID NO: 874535 - DNA, 581 bp, Homo sapiens
acgcagctcctcaccagcaatggaacaaagctggatagagaatgactttgacgaagaaggcttcagtcaatcagtaatagcaaacttctccgagctaaaggaggatgttcgaacccatcacaaagaagctaaaaaccttgaaaaaagattagatgaatggctatctagaataaacagcatagagaagaccttaaatgacctgatggagctgaaaaccatggcacgagaactacgtgatgcatgcacaagcttcagtagccrattcaatcaagtggaagaaagggtatgagtgattgaagatcacatgaatgaaatgaagtgagaagagaagtttagagaaaaaggagtaaaaagaaatgaacaaagcctccaagaaatatgggactatgtgaaaagaccaaatctacgtctgattggtgtacctgaaagtgacggggagaatggaatcaagttgcaaaacactctttaggatattatccaggagaacttccccaacctagcaaagcacgccaacattcaaattcaggaaatacagagaacaccacaaagatactactcgagaagagaaactccaagacaca

SEQ ID NO: 874536 - DNA, 581 bp, Homo sapiens
acgcagctcctcaccagcaatggaacaaagctggatagagaatgactttgacgaagaaggcttcagtcaatcagtaatagcaaacttctccgagctaaaggaggatgttcgaacccatcacaaagaagctaaaaaccttgaaaaaagattagatgaatggctatctagaataaacagcatagagaagaccttaaatgacctgatggagctgaaaaccatggcacgagaactacgtgatgcatgcacaagcttcagtagccaattcaatcaagtggaagaaagggtatgagtgattgaagatcacatgaatgaaatgaagtgagaagagaagtttagagaaaaaggagtaaaaagaaatgaacaaakcctccaagaaatatgggactatgtgaaaagaccaaatctacgtctgattggtgtacctgaaagtgacggggagaatggaatcaagttgcaaaacactctttaggatattatccaggagaacttccccaacctagcaaagcacgccaacattcaaattcaggaaatacagagaacaccacaaagatactactcgagaagagaaactccaagacaca

SEQ ID NO: 874537 - DNA, 581 bp, Homo sapiens
acgcagctcctcaccagcaatggaacaaagctggatagagaatgactttgacgaagaaggcttcagtcaatcagtaatagcaaacttctccgagctaaaggaggatgttcgaacccatcacaaagaagctaaaaaccttgaaaaaagattagatgaatggctatctagaataaacagcatagagaagaccttaaatgacctgatggagctgaaaaccatggcacgagaactacgtgatgcatgcacaagcttcagtagccaattcaatcaagtggaagaaagggtatgagtgattgaagatcacatgaatgaaatgaagtgagaagagaagtttagagaaaaaggagtaaaaagaaatgaacaaagcctccaaraaatatgggactatgtgaaaagaccaaatctacgtctgattggtgtacctgaaagtgacggggagaatggaatcaagttgcaaaacactctttaggatattatccaggagaacttccccaacctagcaaagcacgccaacattcaaattcaggaaatacagagaacaccacaaagatactactcgagaagagaaactccaagacaca

SEQ ID NO: 874538 - DNA, 671 bp, Homo sapiens
catctctggttgaagagagtcaaggaatcctgagcccacctgcttgccccgagctaataaccctgaagcgactaacgaatctaccccattcctccagcccccaccaggattccaagaaacacaatctgaaatctaaattggcccaatactcttttaaaarattaagtttacaataaaaaccagtagtcaaggtggcaggacagacttctcgggaaaaagaaaaaagaagaaagaaaaagaagtcctaacagactcactcctctgctccccatagcccattgcctgccctagattcactgtcttttcccatcgtagcccaggctgtctatgctacacttcatctgacagcacagagctggtctgtcccagtgcacactgcaaggaagagacatttctcggcacctgtgtgtctgtaggtgcctccagccaaaccctgcatttgaaccattggaaatgcagctgaccttcccgtaggagctgacatccttcactcatagcactcattgggcaatcagacagcatcccagtgacattctccacagctgctggcaatggcctttaattcatctggtatttaaccagggtgaagcatcctctggctgtaacatgtttgttggtgtgagctgagcctggctcatcttccgctccctcaagttcagggtttcacacca

SEQ ID NO: 874539 - DNA, 611 bp, Homo sapiens
caagactgggagttagagctatctttccagtagcccctgcatggaatagtcacaggtacccacctgcttacatgaacatccaaaggaaaaacaattaaaaaatttgtatcagctctgaggttacccagatatacaaatggaagttgtagctgtcagtgctattaatgtgaagagttcatgatcaagagtgtaaaatactctctagttttayggtaacctgaagcctggaaacacaggcaaatgaatatccataataaatgggttattagtgttacattacaataagttatatagtcaaaagcattgtacaatgtcttcaatatgttcctcctttttagcaattcatagcttaatgctttgtacgaaattgcaatgagtgtggtgcattaatgcagaatttccatcagtccctatatatacatctggaatacaatgcctcaggaatttatgtctctaattttcactaaataaacctgtgcctttagcataccccagaataagtaagtgaaagggttcagatctaataagcatgcagcccacttcacaagactgtgtggttcaacccaatttacgaaattatcctccacccaggccctcaccactctggtgta

SEQ ID NO: 874540 - DNA, 611 bp, Homo sapiens
caagactgggagttagagctatctttccagtagcccctgcatggaatagtcacaggtacccacctgcttacatgaacatccaaaggaaaaacaattaaaaaatttgtatcagctctgaggttacccagatatacaaatggaagttgtagctgtcagtgctattaatgtgaagagttcatgatcaagagtgtaaaatactctctagttttacggtaacctgaagcctggaaacacaggcaaatgaatatccataataaatgggttattagtgttacattacaataagttatatagtcaaaagcattgtacaatgtcttcaatatgttcytcctttttagcaattcatagcttaatgctttgtacgaaattgcaatgagtgtggtgcattaatgcagaatttccatcagtccctatatatacatctggaatacaatgcctcaggaatttatgtctctaattttcactaaataaacctgtgcctttagcataccccagaataagtaagtgaaagggttcagatctaataagcatgcagcccacttcacaagactgtgtggttcaacccaatttacgaaattatcctccacccaggccctcaccactctggtgta

SEQ ID NO: 874541 - DNA, 541 bp, Homo sapiens
tgtccagaatggtattggctagattttcttctagggtttttatagttttgggttttacatttaagtctttaatccatcttgagtttatttttgtatatagtttaaggaatgggtgcagtttcaattttctgcatatagctagccrgttctcccagcaccatttattaaataggaaatcctttccccattgcttgtatttgtcaggtttgtcgaagatcagatagttgtaggtgtgcagttttatttctgggttctctattctgttccgttggtctatgtgtctgttttgtaccagtaccatgctgttttggttactgtagccctgtagtatagtttgaagtcaggtagtgtgatgcttagagggcacattttaaatagggtatttagagttatgatgtttcatttggtgctattgtcatgagaacattttctttaattgcatttcctaactgattattgcttgtacagaaaagctaaggtattcatgtgctaattttgtagccattcacattagtaaatgtcctggggaagtaccaatttg

SEQ ID NO: 874542 - DNA, 500 bp, Homo sapiens
gcctggctacccctatctacacttccacccttacatacaccacttcccctgggattacaggcattccctaccacacccagttaaattttgtattgtttgtagagacagggttttgccatgttgccaggctggtctcgaactcctgggctcaagagattggctgccttggcctcccaaagtgctgggattacaagcattaagccactgttcctggcccaatttgagtttttatgcctgatggccaacatcttcaraaatcacttcagggatagaaccagagcagtatgaggaaggggtctcctaggatcgtctgatccactctgtctccactcagcactgaccaaacagatgagaagcatcactgtattgcctgggctgacttagtctcaagctgtccctagcctgagatatgttccaaacaggcttagagcatgttctgaagctgggggaggccattacctcaaaactaggggctaacatcaccatgaccacagatgata

SEQ ID NO: 874543 - DNA, 500 bp, Homo sapiens
gcctggctacccctatctacacttccacccttacatacaccacttcccctgggattacaggcattccctaccacacccagttaaattttgtattgtttgtagagacagggttttgccatgttgccaggctggtctcgaactcctgggctcaagagattggctgccttggcctcccaaagtgctgggattacaagcattaagccactgttcctggcccaatttgagtttttatgcctgatggccaacatcttcagaaatcacttcagggayagaaccagagcagtatgaggaaggggtctcctaggatcgtctgatccactctgtctccactcagcactgaccaaacagatgagaagcatcactgtattgcctgggctgacttagtctcaagctgtccctagcctgagatatgttccaaacaggcttagagcatgttctgaagctgggggaggccattacctcaaaactaggggctaacatcaccatgaccacagatgata

SEQ ID NO: 874544 - DNA, 612 bp, Homo sapiens
tacggaattagctagggagaagaccttcctcctcaattttttggaatagtttcagtaggagcagtatcagctcttttttgtacatcctgtcgaagttggcagtgagtccatcaggtcctgtgcttttttttttttttttttttttttgggttggtaggctatttatcactgattcaattttggagttcattattggtgtgttcagggattcaatttcttccttgttcagtcttgggagggtgtttgtgtccaggaatttcttcatatcttctacattttctgggttgtgtgcatagacgtgttcataatactctctgacagttatttgtatttctgtggagtcactggtaatatcccttttgtcatttctaattgtgtttgtttggatcttctcacttttcttstttattagtctacctagtgatgtatttttctttcatttttttccaaaaaccaactcctatatttattgatcttttgattggttgtttgtgtctcaatctccttcagttctgctctgattttggttatttttttgtcttctgctagctttggggttgttttactcttggttctctagttcttttagttgtgatattatgttattaaatt

SEQ ID NO: 874545 - DNA, 668 bp, Homo sapiens
agcacattcgccattcctggagctcagaacgtgtctcttaacagaaatcctgggctgggcagctttcaaatatggactttggcagatggatgtggtggctcacacctgtaatctcagcactttgggaggccaaggtgggtggatttcttgaggccaggagtttgagaccagcctgggaaatgwaggaaaatctcatctctacagaaaatttaaacattagccaggtgtggtgatgcacacctataatctcagctgcttgggaggctgaattgggaggattttttgagcccaagagtttgaggctgcagtgagctatgatcatgctactgtaacccagcctggttgacagagagtaaccctgtcttaaacaaacaaacaaacaaacaaacaaacaaacaacaaaaccaataaagacttaggaaatctctccctgaggatggctgccagatgctgggtgccctcagaggtcacaaccgtacagccacacctgaccatcattctgctggaggctgcctccttccactgtgacctgggcttaagctgcttctctgcacaacacttctgtggctttagagccttctaaatcttcctgccgagtcttgctggagaacgcaacactaaagacattggatagagatgagcttaatgaaggagagggtggaaactcc

SEQ ID NO: 874546 - DNA, 585 bp, Homo sapiens
tgggtgctcccatgcaccccaagaacaagtacccattgtgctgttatgggctgctgtgggaccaaggtgcaagcaaattccactccccatagctacctgccttttggtccatccaaggagggtcctccctttcctggtggtaagcccacggccagaactattctgagagcctagccttcaaaggttgacattctgcaatggtgtctggactgccactgccattgccactgctgggccaacgaggaagaaggaaggctgggcacacttacatacacctagtagcaaaccccactgctgctgctgtaggctgctatgtgacaaatgcatgagtaaactgctctccccacagctacctgcttatacttctccagctaagaggggaaccaccttycccggtggcaggtatgcaccatatacactactgtgcacaccagagaattctgtcatgggctgtggaccaccatcccttgcttatcacagacaatatctgaatgtgccaccacggggcctgaggacacgtcttccacacagggcccctctacccagtacttgagcatgcgatccacaactatggaaaccttccag

SEQ ID NO: 874547 - DNA, 585 bp, Homo sapiens
tgggtgctcccatgcaccccaagaacaagtacccattgtgctgttatgggctgctgtgggaccaaggtgcaagcaaattccactccccatagctacctgccttttggtccatccaaggagggtcctccctttcctggtggtaagcccacggccagaactattctgagagcctagccttcaaaggttgacattctgcaatggtgtctggactgccactgccattgccactgctgggccaacgaggaagaaggaaggctgggcacacttacatacacctagtagcaaaccccactgctgctgctgtaggctgctatgtgacaaatgcatgagtaaactgctctccccacagctacctgcttatacttctccagctaagaggggaaccacctttcccggtggcaggtatgcaccatakacactactgtgcacaccagagaattctgtcatgggctgtggaccaccatcccttgcttatcacagacaatatctgaatgtgccaccacggggcctgaggacacgtcttccacacagggcccctctacccagtacttgagcatgcgatccacaactatggaaaccttccag

SEQ ID NO: 874548 - DNA, 604 bp, Homo sapiens
tgggatggtttggaacttcctagagacttgttgaatggctttgacgaaaatgctgataatgggccaggcacagtagcccacaccagtaatcttagcactttgggaggccaagacaggtggattgcctgagatcaggagttcaagacaaccgtggtcaacatggtgcaatactgtctctgctaaaatagaaaatatcagccaggtgtggtggtgggcacctgtagttccagctacttgggaggctaaggcataagaatcacttgagcctgggaggtggaggttgcagtgagcagagaccatgccaccgcattccagcctgggggacagagcaagactctgtctcaaaaaaacaaaaaacaaaaaacactgctgaagtgatatggaygatgaaatccaggcttaggtgttctcagatagagatgaggaatttgttgggaataggagtaaaggtgactcttgctcttgctatgttttagcaaacagactggtgccattttgcctctgccctggagattcatggaactttgaacttgagggagatgatttagagtatctggcagaaaaaatttctaagcagcaaagcattcaagagttgacttgggtg

SEQ ID NO: 874549 - DNA, 587 bp, Homo sapiens
acttaaagtgccaaaatatcagatataaaaataccttcaggaagcataattgtagtgaaaatttcaaatcttatttctttctttttttttttttttttgagacggagtctcactctgtcacgcaggctcacgtgcagtggcgccatctctgctcactgcaagctccgcctcccagctcactgcaagctccgcctcccaggttcacgccattctcctgsctcagcctacagagtagctgggactccaggcgcccgccaccacgcccggctaatttttttgtatttttagtagagacggggtttcaccatgttagccaggataggatggtctcgatctcctgacctcgtgatctgcccgcctcagcttcccaaagtgctggggctacaggcttgagccaccgcgcccggcctcaaatcttcttgtatgaaacacttatctgagtatctgacatgtagagtcagtccttccgtgagcttttcagtctgcctagacattggctatctttttttccaaattagaaaacaaaaacaaaaacaaaaaaactgtttcatttaaaaaagaaggaaaagaaaaaaaacaattctcta

SEQ ID NO: 874550 - DNA, 619 bp, Homo sapiens
gccagggccaatgctttaaggaaggctttgtgacatatctctgggcctatcacctaggtgatgtgacttcctgcttggccctgcccacatcgagcattgtgacataagggtggaacctgcacctaggtgatggaactctcttgcttggatccttttctaagggggactggtgaatatctctggacccaggaccaggtgatgtggctctgcagcctgggttctgccacatattaaatcgtgacatatacttaaagaagcacctatakgatatgactgtcttcttatgcctgagccctgcctactggtgacattggaccatatctctgagcccctgacctaatgtgatgggactctcttctgtctgggcctttacatatgggaagattgtgacatgttgatgaccccaccactcccgttttgcgactctccacttgttgctgaacaatgcccgtgaacaggacttttgtcgtattttacaaccaaccacccacttgatgtcactcttctgtataaacaggtcatgcataaagaggtaattatggcatattgcttggcccagccccctaatgatgtgactgtcctgcgtgtgccagagccacagaaggtattttggcatatc

SEQ ID NO: 874551 - DNA, 588 bp, Homo sapiens
tatgtgagtttaaaatagaatagtagaaaactagggccagcatgttagctcacgcctctaatcctcgcactttgcaaggcccaggtgggcgaattgcctaagcttaggagttcaagaccagcctgagttctagtgtgattgcattttggtctcagattgtggcaattcctcagatatctagaactagaaataccatttgacccagccatcccattactgggtatatacccaaaggattataaatcatgctgctataaagacacatgcacatgtatgtttattgcggcactattcacaatagcaaagacctggaacctacccaaatgtccaacaatcatagactggattaagaaaatgtggcacatatacaccatggaatattatgcagccataaaaaaggataagttcacgtcctttgtagggacatggatgaagstggaaaccatcattctcagcaaactatcgcaaggacaaaaaaccaaacattgcatgttctcactcataggtgggaagtgaacaatgagaacacatggacacaggaagggggacatcacacactggggcctgttgtggggttgggggagaggg

SEQ ID NO: 874552 - DNA, 648 bp, Homo sapiens
aggcatgaggcctgtcctcaagagactgacattccagtggcggaggtaacatacaacacaataaacacgttacaaaatgataacaaatactctaaaaactacctctggaatagataaacagggcactgaggttaaagactgagggactctgaggaggagggtagttactcaaaaygcatttggtcaagaaaagtatttctaaggtgacatttaaagtgagacctaaagaaaatgcaagaatgagtcaaagtaggagctgggcaaggagtgttttaggcaaaggaaagagccacgtcagagacccagtagcagaaaccaacttagtatgatccagcaactcccagaaggttaagagtgattaaaacacaggaggaggggagtagagggaccagggacacacatgtggcaggggatgcaaacagggtccacattccttaagtccctataggccaggtagggggtttgggttgtattttcattacaaattgaagttccttagtgttactgcagctgaaaagtttaaattgtttattttatcatgctgatgatgtatattcatattcaataaaatagtatgtaatgcacctccaaatacctacaatgcctccactgatacagaaaatagtataacaaggaaagtggtcagtg

SEQ ID NO: 874553 - DNA, 648 bp, Homo sapiens
aggcatgaggcctgtcctcaagagactgacattccagtggcggaggtaacatacaacacaataaacacgttacaaaatgataacaaatactctaaaaactacctctggaatagataaacagggcactgaggttaaagactgagggactctgaggaggagggtagttactcaaaacgcatttggtcaagaaaagtatttctaaggtgacatttaaagtgagacctaaagaaaatgcaagaatgagtcaaagtaggagctgggcaaggagtgttttaggcaaaggaaagagccacgtcagagacccagtagcagaaaccaacttagtatgatccagcaactcccagaaggttaagagtgattaaaacacaggaggaggggagtagagggaccagggacacwcatgtggcaggggatgcaaacagggtccacattccttaagtccctataggccaggtagggggtttgggttgtattttcattacaaattgaagttccttagtgttactgcagctgaaaagtttaaattgtttattttatcatgctgatgatgtatattcatattcaataaaatagtatgtaatgcacctccaaatacctacaatgcctccactgatacagaaaatagtataacaaggaaagtggtcagtg

SEQ ID NO: 874554 - DNA, 638 bp, Homo sapiens
gtgtaaatcctctgagttagccctgagaacagcattttttgctttgttttcctaagtcaattgtgcgtcacttcctagagattggctgtgactaggtttgtctgctcatcttgagtgttctgctaaagagaaagtttttcatttggcctctgatcttgaagtggcagctcttacctttgtatacctcttgtgtgactgcaaggttctaactaggcattactccttgaggaaggcatttacactgttggtgagaatgtaaattagttcagcccctggcgaaagcagcctggaggtttctcaaagggcttaaacagaactaccattcaacccagcaatcccatgactgggtatatgcccaaagaaaaataaatcgttctaccaaaaagacacacgcactcacatgttcactgcagctctattcaccatagcaaagacatgaaattaacctagatacccatyaatggcagataggataaagaaaatgtggtccatacacaacatggaatactatacagccataaaaaagaacaaaatcatgttcattgcagcaacgtgaatgcagctggaagccattaatctaagtgaattaatgcaggaacagaaaaccaaatatcacatattctcacttgtaagtggga

SEQ ID NO: 874555 - DNA, 611 bp, Homo sapiens
actctgcctgagctctgagggcaggtggggcaccctgctcctggcacaggcactatttccacctctcttcttcattgctatccggctttcccttgcttttatcccctccccttctcctgcttcccactggtcaactcttctcccagggcctcccagggcctaggtctgagcagtggagacctccatgagcaggcagagggcaaccaggcaggctccatccagaagagaacaggcctggaccagatgcagattctcccaggctctgcagggcctggcagggaaactgctgctcytgagctgccttcaggggagtcctcagaataaggggagctatcaacaggcagagcagtgtttacgaggacagttatgatcttgtcactgtcctcaaggagcttcaggtccaggaaagaaaaatgagccacctgtgaagcagaattgtgtaatcacctggcgagcagggaggagccccccagacaccacaaagacagggagcactgggagggagaagcggggccaggctggggagacctgcagaatggggcggggcttctggtttcaatgtttacttgctgagtggccttggacaagttatttcatctgcctgagcctta

SEQ ID NO: 874556 - DNA, 706 bp, Homo sapiens
gtaataacagagtgccaaactacatgaatcaaaacctgacaacgagaaaaggagaaatagacaactcaacaacagtagttgtgggcttcaatactcagctttcaaaatgtgtagaaaaactcaacaagatcaataaagaaacaaaagacttgaaaacattacaaaccaactagccctaacaaacaaatgtggagcattccacccagtagaccacctgttcttctccagtgcagttggaatattctctatggtggaccaaatggtgagctgcaaagcaagcctcaataattttaaaaacagcaaaatcatgctaagtatcttctctgaccataatgaaataaagttagagctcaataacagaagaaaaacaaatatttgcaaatwtgtggaaattaaacaacacagtcttaaacaaccaatggatcaaagaaaaaaaatcacaagaaaaattagaaaacaacttgaggtaaataaaaatgaatatgcaacgtaatagaacttatggtgtacagctggagcagtgtttagatagaaattaacagctgttaatctactctatttaaaaaagaaaaattatctcaaaccaataacctaatcatacaccttaatatattagtaaaaaaaacaaaaacaaaaacaaaaacaaaaacaaaaaaacagaaaaaaaaaacaaggaaatagtgaagtttagatggcaaataaatga

SEQ ID NO: 874557 - DNA, 574 bp, Homo sapiens
acactgtggtccataatggttgaactaatataaattcccagcaatagtgtaaaagcattccttttcctccacaacctcaccagcatctgttgttttgtgactttttaataatgaacattctgactggtgtgaaatggtatttcattgaggttttgatttgcatttctctaatgatcaatgatgttgagctttctaaaatacgttttttggccatgtgcatgccttctttagacaagtgtctgttcgtgtcctatgaccacatctaatttttgtttttgtaaatttaagtcccttatagaccctggatgttagacctttgtcatatgaatagattgmaaaattatcttccattctgtaggttatctgtacactctgatgatagtttattttgctgtgcagaagctctttaggttacatccaatttgtcaatttttttcttttgttgcaattgcttttggaatttttgtcatgaaatatttgcctgtgcctatgacctgaatagtattgcctagattttttttctagggtttttatagttttgggttttacatttaagcatttaatccatcttgtg

SEQ ID NO: 874558 - DNA, 574 bp, Homo sapiens
tgctattcttgtgatagtgaatatgtctcatgagatctgatgggtttatcaggggtttctgcctttccttcttcctcatttttctcttgccaccatgatgtaagaagtgcctttctcctctcatcatgattctgaggcctctgtagccatgtggaactgaaagtccaattaaacctctttttctttccagtctcsggtatgtctttatcagcagcatgaaaacagactaatggttccaatagaatggggcattgctgaaaagatacctgaaaatgtggaagcgactttggaactgggtaacaggcagaggttggaacagtttggagggctcagaagaagacaggaaaatgtgggaaagtttgggacctcctagacacttgctgaatggctttgacaaaaatgctgatagtggtatgaacaataaggtctaggctgaggtggtcttagttggagatgaggaacttgttgggaactggagcaaaggtgactctcgatatgttttagcaaagagactagcagcattttgtcccttcccaagagctttgtggaactttgaacttgaaagagatgattt

SEQ ID NO: 874559 - DNA, 574 bp, Homo sapiens
tgctattcttgtgatagtgaatatgtctcatgagatctgatgggtttatcaggggtttctgcctttccttcttcctcatttttctcttgccaccatgatgtaagaagtgcctttctcctctcatcatgattctgaggcctctgtagccatgtggaactgaaagtccaattaaacctctttttctttccagtctcgggtatgtctttatcagcagcatgaaaacagactaatggttccaatagaatggggcattgctgaaaagatacctgaaaatgtggaagcgactttggaactgggtaacaggcagaggttggaacagtttggagggctcagaagaagacaggaaaatgtgggaaagtttgggacctcctagacacttgctgaatggctttgacaaaaatgctgatagtgrtatgaacaataaggtctaggctgaggtggtcttagttggagatgaggaacttgttgggaactggagcaaaggtgactctcgatatgttttagcaaagagactagcagcattttgtcccttcccaagagctttgtggaactttgaacttgaaagagatgattt

SEQ ID NO: 874560 - DNA, 564 bp, Homo sapiens
taaattccactccagagctaacctctacgcttttgacgaaatgctaaatattccatcttctctgttgtagcaagtatataaatttagaaaaaatacattttttgctataatgtatttgtgtggcatttggtaaactacacattttaaaatatacatcaatcatcctgctaagcaacctatttaaagtgttaatatgtaataccaagtgatgcctgttggtggctaaatatgtacagatctttctacaatgcttgatcttataaactttgccccagatatataattgttaactttctaatagaacttagcttctattgcatggaaatgattccatgtctttggactttaaattatcaacctgtggatgttctctagtagtctctatttttgaagatgcagtaaccagccaagctgcggtactcaaagyatgtatgcagtgaatttatcttccttatatgagtaaaaattttcataaagagaagcaacatgattaagctgcaaattctgttacccatacaaagattatttttttaaaaaaattatcttctctgtaagtatcaaata

SEQ ID NO: 874561 - DNA, 557 bp, Homo sapiens
agtcccctgcaaacttgtgcttgtctcacattcacagcatctctcctcaagcatgcactctatgcattgttactttcagctctggggcttctccaacaccttgggaatttttggcctgcaggcaaatgcagcctggatgtggggtacattaattaccaggggtaagctcagcacttcaggctgaaatttctaggaggcattctgtatacttttcaggaggtctcaatggaactgagccctcatggcccaagtggcaacattatgaaagtacccttgcattggccattggctttttctccttccccgcctcactttccccatttcctcactcctgcttcatgggataacctcccctaataaactatctgcactggagtccttctctgaggctctgtttatttatttgtgatttcagggaccraaactgagacatattgtaatctcagatgatagaaagaaaaaacaaatagaggagatagagagataataatgctacaacagataaggtgaggaaagataactatgaagtgaggacttctgagcagaaacctgaactc

SEQ ID NO: 874562 - DNA, 583 bp, Homo sapiens
aaggcctgtaatcccagctggtcgggaggctgaggcatgagaattgcttgagcccgggaggcagaggctgcagtgagctgagatcatgccactgcactccaggctgggtgagagagtgagactccatctcaaaaaaaaaacaaaaaaaaaagggaaaaatcagaatataaattcaaaaatccttatatttgcacaaagaaacactgggagggtacacaggaaactaataaaggaagttactgcagggaggaatacgtcattttgatttttaagctacatgaataaaatgagacattttaaacatgataaaagaaggagtcaaaactacaataaaaggaaaagactgaaaaaagagaaatatttgaaaagggaatatgaaaaatagagtyattagaatgaaaaattgaattagtagattagacacagctgagaaccaacctaagaaaattacttataattcagcaaagagaaatgaatagatagaaaatacgtcaaagagattaggaaacatgaaggtgagaactgaaaggtccaacatacatctaataagagttccaaaaggtgaaattagagaaaatgaggt

SEQ ID NO: 874563 - DNA, 618 bp, Homo sapiens
acccataaatttatttccaaatttctattaattgtgaaaccatttaggaaacaaggaaattaatcatgtgccccatttgaattttggactgcccaggattaatgctgatctaaagtccaatctttgcaggccaaattgttaaagctaatctttgtacagtagtgtggttaaaagaatatacactatagataagcaagtatacctctgaccagacttagggtatagatgagggcacagggagastcctacaactccactaacatgattttttctacctttagtaaagagctactacagacttcgtagaaagtagagtagatataagttttccagatattttgaatcatcagctatagatcataataacaaaggtgaatagccatctatatatgtgctatgcaaatatacttttagaaacaatatttaggggggttacagaaaaacattgttttaatagaatttcctctccaagactaaagcttggaagctcccaacactggatttcttaaactgcagttgacaggagcagagagcaaaaacaatggtttctgccccaagggtccaaaatttggagagcttactactttcctattcccatttaagttgggttcacaaacg

SEQ ID NO: 874564 - DNA, 706 bp, Homo sapiens
actacaacattaaggcccccagagctctaagatatgatgaatgaaatccacaaaggatgactcctgggctggctggggtagcacagagagacagtagctaattcagggacatgaacccatctcaagaagtgtgcaatggaggcagggtgcagtggcttatgcctgtaatcccagcactttgggaggccgaggtgggcagatcatttgagctcaggagttagagactagagtggccaacatagggaaacccgtctctactaaaaatacaaaaatcttctgggtgaggtggcacacgcctgtgatctcagctactcgggaggctgaggcaggagaatctcttgaacccaggaggcagaggatatagtgagccgagatcgggccactgcactccagcctgggtgacagatmtagactctgtctcaaaaatagaacaaaataaaataaaataaaataaaataaaataaaataaaataaaataaaataaggagtgtgcagtggaaggtgagcagcagagaaaacctgggattcagagagacaatgttactatccaaggaggagcgactctggatagagggtcctcaatcctgccactagggagggacttcagccatggggtgggagattcttttcagggtccatgcttcttaagcagctgaacggttaaaaccttaccttctcagcacatcactaccaggaagtcgttatt

SEQ ID NO: 874565 - DNA, 663 bp, Homo sapiens
tgcaaaaacaaccaaacaccgcatattctcactcataggtgggaattgaacaatgagaacacatggacacaggaaggggaacatcacactctggggactgttgtggggtggggggaggcgggagggatagcattaggagatatacctaatgctaaatgacgagttaatgggtgcagcacaccagcatggcacccatatacatatgtaactaacctgcacattgtgcacatgtrtcctaaaacttaaagtataataataataataataaaaaaaagaaaaccctctcaccatctttgaatacgcagatatgtctgtgaaggataactacttaagattagatttatgaaaggcactttttacaatttagttgggttcttttgaaactgtaatgaaagaaatttctttggaattatgatttccatggtaatgtgcctttaaaactaaagcacaaatgtttggcaattaattcaatacatttttttccatatataggctcctccagatccatgtcactgttcctataaataaaatcataaaagattttatattaccatataacaaacttatattttattgcttaagcgttttaggaatttatctataacttcattttatagtcaccagggatataaggtatacataacatcaaaatataagcaattt

SEQ ID NO: 874566 - DNA, 663 bp, Homo sapiens
tgcaaaaacaaccaaacaccgcatattctcactcataggtgggaattgaacaatgagaacacatggacacaggaaggggaacatcacactctggggactgttgtggggtggggggaggcgggagggatagcattaggagatatacctaatgctaaatgacgagttaatgggtgcagcacaccagcatggcacccatatacatatgtaactaacctgcacattgtgcacatgtatcctaaaacttaaagtataataataataataataaaaaaaagaaaaccctctcaccatctttgaatacgcagatatgtctrtgaaggataactacttaagattagatttatgaaaggcactttttacaatttagttgggttcttttgaaactgtaatgaaagaaatttctttggaattatgatttccatggtaatgtgcctttaaaactaaagcacaaatgtttggcaattaattcaatacatttttttccatatataggctcctccagatccatgtcactgttcctataaataaaatcataaaagattttatattaccatataacaaacttatattttattgcttaagcgttttaggaatttatctataacttcattttatagtcaccagggatataaggtatacataacatcaaaatataagcaattt

SEQ ID NO: 874567 - DNA, 663 bp, Homo sapiens
tgcaaaaacaaccaaacaccgcatattctcactcataggtgggaattgaacaatgagaacacatggacacaggaaggggaacatcacactctggggactgttgtggggtggggggaggcgggagggatagcattaggagatatacctaatgctaaatgacgagttaatgggtgcagcacaccagcatggcacccatatacatatgtaactaacctgcacattgtgcacatgtatcctaaaacttaaagtataataataataataataaaaaaaagaaaaccctctcaccatctttgaatacgcagatatgtctgtgaaggataactacttaagattagatttatgaaaggcactttttacaatttagttgggttcttttgaaactgtaatgaaagaaatttctttggaattatgatttccatggtaatgtgcytttaaaactaaagcacaaatgtttggcaattaattcaatacatttttttccatatataggctcctccagatccatgtcactgttcctataaataaaatcataaaagattttatattaccatataacaaacttatattttattgcttaagcgttttaggaatttatctataacttcattttatagtcaccagggatataaggtatacataacatcaaaatataagcaattt

SEQ ID NO: 874568 - DNA, 563 bp, Homo sapiens
tctgtctcagtaaaaagaaatgcctgccaaatagcctttgttaatgtttcttctattttagggtaagttgaaatccatgaaaaacctttttttaattaaagaagttagtaatgacttgcacttactaaaatatttagttttagcaaaatataaatttttaatagttccttgtttatagcttagttaataaaattgtttaaataamtttttatcttaaggacacattaaatatattatcagctcttttaaccacagtataatgtgacctacagagataacttatcctcacagctagttctctagattattattttataattttcagtattttattttgaaaattattctgttcttaaaaggttttttttttttttaaatagttggtgattcatgttagcacctaagcttacgctgcataactgaaaaaaaaaaaaaaagacactctgaatcatttgagactttcaacatcttcacacttcccttctccctgggatcttggacctaaatctcttagctgctttcatagacccaaactctaatttttatgtctctattcacataga

SEQ ID NO: 874569 - DNA, 621 bp, Homo sapiens
gaatagataatcatacctcaaataggacatccagtagagaacatttgagtccaacagagaactcacaggaaaaaacctgtggcacagaagaagaaagaaagaagtggttagttcccatttagaggttgagatttcctcccattcaagaggttgttccttcaatctattggttgtttcttttgctgtggagaagttttctttagtttaatatagtcctgtttgtctatgtttttgtttcatttcctgtgcttttgaggtcttacccattaaatctttgcttaggctgatgtcctaaagagtttccctgttttcttccagtagttttaagatcagctggaagccctaaggagcttgtttttgtgggaaaagggtaagcaagagagcttcagtggttcacattttcaatgcgaactgtcgtgatccaaaccatggaaaagcatctctagcccaacaaaccctgacagtratgtggatgatgatttgaagacccagtgagagcactgcagaagacagggaactcatgctgggtcacaaaacacaaccccctctccccatggcaccaagacctgagaggctgtgccagtgtgatacttgggagtacagccatcataggactacatc

SEQ ID NO: 874570 - DNA, 662 bp, Homo sapiens
aaatgtctttctcaagaatggacctaagagtcatctctttgaaatgtagacatcaagggagaaagcaccctcatttcccagttcctgtgggagggtagcagcctaactttggtcgccatcttactccaagtgtcagaatcacctcctgtcgtaaagatatgagaagtttatttttcccctggataaagccaattagctaacacaatggtaatggtaacttggtgtcttagtctgtgctgttataatgaaataccacagactaggtaatttataaacaacagagatttatttctcatggttccagaatctggaaaatccaagatcaaggaatggacaggtttggtgtctggttgttactgsaaatgagtcccgatccagaccccaagagagggttcttggatctcgtgcaagaaagaatttgaggcaagtccatagggcaaagtgaaagtaagtttatgaagaaagtaaaggaataaaagaatggctacttcataggcagggcagccccgagggcactgcccatttttatggttatttcttgattatatgctaaacaagggggtaaattattcatgcctcccgtttttagaccatagagggtaacttcccgatgttgctttggcatttgtaaactgtcatggtgttggtgggtgtgtagcagt

SEQ ID NO: 874571 - DNA, 612 bp, Homo sapiens
gggcttctctgcctagtccaaagtccaaattcgtcaatatacagtctacttcgctgaagccccagcacacctttctggtctctttcccaccacactccaggtggcagtacggagtctttccaacaaggcaccttcacgtttagcacttaatacatcatgcctttaagtccagttaggtatgcacacatctgactctcatgtgaggttgtaaactctgccagacatatatcataaccacatcttcttcctctgtacgcacagtgcctagcmcactgcttcatacgtaagtggtctgatcttagatccagtaaacaaaaccactggacacagccatgaattgaaacttgcagcacagacaaagcatctccaaagttacataaactttgtaagaagtgaactctaaattatctctagaaactgaagattaccaataattaaatatcataaaccccataattatcaaataatatcattaaatatcagaaacctcttcaaaaagactgccttctaaagttctacattaaggtgatagtaggggtaggtggtgtttcttctatttgttttttagatatgagatctcaccttagttgcccaggctggtctcagattccg

SEQ ID NO: 874572 - DNA, 672 bp, Homo sapiens
ctccaagtaagatgagctaaaagagatccatactttgtcttttgaaagacaaagacaaagagaacattttaagagcagcaagagagaagtgactcatcacatatcagggattctcaatgagagtaacaggagaattctcaccagaaactttggaggcaagaaggcagtgggccagtacattcaaaatgctgagagatcgaaaaaaatcaatctgtgaactgawaattctacatctggcaaaatcatccttcaaaagtgaaggagaaattaagacattcctatataaacaaaagctgagcaagttcattaacactagaccttccctgaaagaaatgttcacaggagtcttgcatggtgaaataaaaagacactggacagtaaattgaagctgtatgaagaaataaagatctcaataaaggtaaatatatgggcaatcataaaagctagcattattataacaatggtttataactctatttttaactttctacattttttaagagactaatattatacaaaaattatattgacactttcgtttgtaactccacattttgttttatatgaaatttaaaagattaatgtattcaaaataattattggctagatggggtggctaacacctgtaatcccagcactttgggaggctgaggcgggcagatcacttgagct

SEQ ID NO: 874573 - DNA, 672 bp, Homo sapiens
ctccaagtaagatgagctaaaagagatccatactttgtcttttgaaagacaaagacaaagagaacattttaagagcagcaagagagaagtgactcatcacatatcagggattctcaatgagagtaacaggagaattctcaccagaaactttggaggcaagaaggcagtgggccagtacattcaaaatgctgagagatcgaaaaaaatcaatctgtgaactgataattctacatctggcaaaatcatccttcaaaagtgaaggagaaattaagacattcctatataaacaaaagctgagcaagttcattaacactagaccttccctgaaagaaatgttcacaggagtcttgcayggtgaaataaaaagacactggacagtaaattgaagctgtatgaagaaataaagatctcaataaaggtaaatatatgggcaatcataaaagctagcattattataacaatggtttataactctatttttaactttctacattttttaagagactaatattatacaaaaattatattgacactttcgtttgtaactccacattttgttttatatgaaatttaaaagattaatgtattcaaaataattattggctagatggggtggctaacacctgtaatcccagcactttgggaggctgaggcgggcagatcacttgagct

SEQ ID NO: 874574 - DNA, 493 bp, Homo sapiens
taacaatggtttataactctatttttaactttctacattttttaagagactaatattatacaaaaattatattgacactttcgtttgtaactccacattttgttttatatgaaatttaaaagattaatgtattcaaaataattattggctagatggggtggctaacacctgtaatcccagcactttgggaggctgaggcgggcagatcacttgagctcatgagtttgagaccagcctgggaaacatggcaaaacccygtctctacaaaaaaatacagaaattagctgggcatgtcagtgcacacctgtggtctcagctactcagaaggctgaggtgggagcatggcttgagtccaggaggcagaggtttcagtgaactgagattgtgccactgcacttcagcctgggtgatagagccagaccttgtcttaaaaaaaaattatcagtttatgttttgggcacacagtgtacacaatgcctaataaggatgtaat

SEQ ID NO: 874575 - DNA, 645 bp, Homo sapiens
tgagacttgcaccctctgaagcagtggcctgagtgtacattggctccttctgggtcccatggctgggacccagagcaccaagtccaaagactggacaagaaaaccattttttttcctcctaggcctctgggcctgtgatgggaggggctactgtggagacttctgacatgtccgggagacattttccccattgtctgggtgattaacatttggcttctcattacttacgcaagtttctgcagccatcttgaatttctcctcagaaaatgggtttttccttttttatcacatcatcagtctccaaattttcctaactttcatgctttgcttcccttttaaacataagttccaatttcaaaccatatctttgtgaattaataaaactkaatgctcttaagagcacccaagtcacttcttgaaagctttagtttgaaatttcttccaccagataccttaaattatgtctcttaagttcaaagttccactgatctctagtgcaggggcaaaatgctgccagtctttttactaaagcatagcaagaatcacctttgctccagttcccaataagttcctcatctccatctgagaacacctcagtctggactttattgtccatatcattatcagcattttggtcaaagccat

SEQ ID NO: 874576 - DNA, 625 bp, Homo sapiens
aaaggaaattaaaagtgagaacttgagcctgaatggtagcagtgtgaccaagaacatttactagaagcaggccacacattactagaggcaggccacacattactagaagcaggccaaacattactagaggcaggccacacatttggctctgtgctttttctaacaggaatcatttttgattamatcatttacatagtccttagaatgtaccaaatgaatcagcatctctgaggatgggacctggatgttggtattttaaaaaatatctccaggtagatcttgctgagaaccaatggcagaaccactgaaactgttgttctgaagaagcaaaaaaaaattccggatacttgagaacattcatatctcattaattcccacacatctttatttcaaatgttcagggagtgataaaataaatatttgtgtgaaatcttctttatcaactcgattttcctccagactttacagaacagaacaagcatctttcattctaatgagctgtagaaaaaagaatatattaatagaagaacaaaaggttagtaataaaatgctgtggacgtagacaatattttggtcactttgtagttttgcttactgatctttaagactcaacagtgacttattg

SEQ ID NO: 874577 - DNA, 625 bp, Homo sapiens
aaaggaaattaaaagtgagaacttgagcctgaatggtagcagtgtgaccaagaacatttactagaagcaggccacacattactagaggcaggccacacattactagaagcaggccaaacattactagaggcaggccacacatttggctctgtgctttttctaacaggaatcatttttgattaaatcatttacatagtccttagaatgtaccaaatgaatcagcatctctgaggrtgggacctggatgttggtattttaaaaaatatctccaggtagatcttgctgagaaccaatggcagaaccactgaaactgttgttctgaagaagcaaaaaaaaattccggatacttgagaacattcatatctcattaattcccacacatctttatttcaaatgttcagggagtgataaaataaatatttgtgtgaaatcttctttatcaactcgattttcctccagactttacagaacagaacaagcatctttcattctaatgagctgtagaaaaaagaatatattaatagaagaacaaaaggttagtaataaaatgctgtggacgtagacaatattttggtcactttgtagttttgcttactgatctttaagactcaacagtgacttattg

SEQ ID NO: 874578 - DNA, 625 bp, Homo sapiens
aaaggaaattaaaagtgagaacttgagcctgaatggtagcagtgtgaccaagaacatttactagaagcaggccacacattactagaggcaggccacacattactagaagcaggccaaacattactagaggcaggccacacatttggctctgtgctttttctaacaggaatcatttttgattaaatcatttacatagtccttagaatgtaccaaatgaatcagcatctctgaggatgggacctggatgttggtattttaaaaaatatctccaggtagatcttgctgagaaccaatggcagaaccactgaaactgttgttctgaagaagcaaaaaaraattccggatacttgagaacattcatatctcattaattcccacacatctttatttcaaatgttcagggagtgataaaataaatatttgtgtgaaatcttctttatcaactcgattttcctccagactttacagaacagaacaagcatctttcattctaatgagctgtagaaaaaagaatatattaatagaagaacaaaaggttagtaataaaatgctgtggacgtagacaatattttggtcactttgtagttttgcttactgatctttaagactcaacagtgacttattg

SEQ ID NO: 874579 - DNA, 620 bp, Homo sapiens
ataatctttctactcttatctctttctctaccttttctttaaggcaaatagctcttagatttgccctttagagactattttgtagatcgtgtaggtgcacttcacttttttttattctttttttcttttgtatcccttactgtgtattttcaaacagcctatcttcaagctcactaaatctctcttctgcttgataaattctgctattaagagattctgaggcattctttagtwtgtcattgcatttttttaactgtagaatttctgcttgattctttttatttatgtcaacctctttgtaaaattcatctaatagtgttctgcattttttctctgtattatcttgaatttctttgagtttcctcaaaatagccattttgaattctccatctgaaaagtcacatatctctctttctccaggattggtccctgctgccttgtttagttcctttggtgaggtcatgttttcctgtatgttctttatgcttgtcaatgtttgttgatgtctgggcattgaagagttaggcatttattgtagtcttcacagtctgggtttgtttgtgccatccttcttgagcaggctttccaggtattcaaaaggacttgggcccgcaagccca

SEQ ID NO: 874580 - DNA, 615 bp, Homo sapiens
ctgaataaccaataagtgagcatgaaagtaaaattttgaatgttcattatgtgtgactagcttacaactggccttttcaagacaatatgatagttttaaatctttatttttcttttatttacaaacttatttacttttcaggtgtatgaaatctgaagagaagtcccttggtgtgggattacatacattttgcacaagagtatttggtaaaaatagttattttttcccacatcctatcagaacaatattattmttattattttttattacactttaagttttagggtacatgtgcacaacgtgcaggtttgttacatatgtatacatgtgccatgttggtgtgctgcacccattaactcatcatttaacattaggtgaatctcctaatgctatccctccccccttcccccaccccacaacaggccctggtgtgtgatgttccccttcctgtgtccatgtgcagaacaatattaaatactagataaacaaggtaatattatttcagaaaagcagtctagcaaatgtcccttctgtatgtaaaaagcacgttataaatatgagaatgcagcacacaaagagatagagaatctcttttacttgaaaaggccctgtctg

SEQ ID NO: 874581 - DNA, 531 bp, Homo sapiens
gccttctaatggaaggagatgaccatcttctcagagccagcaaggagaagtcaatgcctgccttcaaagcttcaaagaacaagctgactatcttgctagaagctaatgcagctagtgacttgaagcagaagccactgctcatttacctgtcaggaaatcctagggctttaagaattatgctaaacctattctgcctgtactctgtaaatggaagaataaggcctggatcacagcacatctgtttacaacatggtttaccgaaaattttaagcccactrtaaagatctactgctcaggaaaaaaaaaaaaaaaagccctttttaaaatattactgtttgctgacaatgcacttgacacccaatcactccaatatctaaggatattaacattgtttacatgcctgctaacacaacattcattcctaatggatcaaagagtaattctgaatttcaagtcttattatttaacaaatacattttataaggctatagccgccacacatagggattcctgtaacagatctgggcaaag

SEQ ID NO: 874582 - DNA, 619 bp, Homo sapiens
ctgatagcaatggagatggggaaaagtgggttgactgcagataaccgtggaggtagagcccttaggatttgcagactgggagaatatagtcaccaggatgatgaccaccagggtttcagggttgagcaacatagtcaatgatgctgctgagtcattgagctggggaagaagtaggtctaagaggaaaaatcgagagcttggtcttggacatattaggtctgaagccctaagttgacacccaagtggcaccaagtgacaccaagtgaagatgtgatgcagacaggcaggcacatgactggagagcgtggtgcagagctatagccaacacaggkactcacaggtggtgaggggctaccggaggcatggctgcagggctctagaactctttactgtctcctccctgctctattccctttcaaatacactcacactcctctctgcccctagcgcctcgagcctgagcctgtgctggcccttaacttcccctgcaggtggctctggggccattgccagctctctgcacaaaatccacacataagtcctgggcccagaggccggcttcagttagctgacaaataggaaagcagccagtggactttctccaagggctgagccacac

SEQ ID NO: 874583 - DNA, 636 bp, Homo sapiens
aattgtactttttctttgccttgtgctctcttccttgccacgtgaggataatttacttcttcttcttctttttttttttttttttttttttgagacagagtttcactcttgttgcccaggctggactgcagtggcgtgatcttggctcactgcaacccccgcctcctgagttcaagcgattctcctgtctcagcctccagagtagctgggattacaggcatgcgccaccatgcctggctaattttgtatttttagtacagacagggtttcaccatttggtgaggctggtctcgaactcctgacctcaggtgatccacctgcctcggcctcccaaagtgmtgggattacaggcgtgagctgctgcactgggggaaaatttacttcttaaagcacactcatagggcaaatttccatgggtcaaaaaactattattaatttaataggaaaaaagtgcattcttgagctcctatattaaacctaatttgtattaaaattatactaaatctccctaaaatgaagtcagtaattaattaacatgtcatatgctcacctaaatgtattcccttcttcacttgttcttcagtttggttgttaacctgttctaccaaagcttgttcttaactatcacatagtata

SEQ ID NO: 874584 - DNA, 589 bp, Homo sapiens
tcattgcaaaatgaaaagggatacatgaatatacttattatgcaactcaaggagatagataaacatgagaagcacaaacataagcaaaaataagggaccaataaatctattgttagaagtcaattgaaaatagctataaaggtaataaaactaattacaatgacaggccaggcatggtggctcacacctgtaatcccagcagtttgggcagccgaggtgggtggattacctgaggtcaggagttcgagaccagcctggtcaacatggcgaatccctgtctctactaaaaatacamaaattagccaggtgtggtggcacacacctgtagttccagctactcgggatgctgaggcagaattgcttgaatccaggaggcggaggttgtagggagccaagatcatgccattgcactccagcctgggtgacagagcaaaactcagtctcaaaaacaaacaaacaaaaacacacacaaactctagaggcataacagggttaacagaaacttaaaaccttactatatatgaaaacacatgagattaatttgaaatttcagatactattccaggaaatgtatttaacaggtgaatac

SEQ ID NO: 874585 - DNA, 546 bp, Homo sapiens
tatctccgcctcccgggttcacgccattctcctgcctcagcctcctgagtagctgggactaccggcacccgccaccacgcccagctaatttttcacgtttttagtagagacggggtttcaccgtgttagccaggatggtcttgatctgaccttgcgattcgcccacctcggcctcccaaagtgctgggattacaggtgtgagccactgcgtccgaccctccttgagcttttcttcaattttatttccatcacctagcccagtacttgcccatagtagacactcagtacrcatttttaaatgaatgagtgagtgaaatgaattaatcttttgtattaggttggtgcaaaggtaattccggttattgccgttaacaatgatggcaaacacacacacacacaattacttttgcactaatctaatattcagaaaatactcaccaacttcatttatctgtgtatttatggtttattttggaagtggcttagtggaaaggttaaaagcataggttttggaaacaaaagctttgggttcaaatttcagatttg

SEQ ID NO: 874586 - DNA, 592 bp, Homo sapiens
gaatgccaggattttaaatctggcaatctaagaagccattattttgatagcatatactgcacaaggaaggtaatcagcctactgtataaaaattaaaatatagagtggggagcttccttcctttaaatggaataggtaacaaattagaaaccaaattaggtacatttaaagattgtaaaaaatttctgtagaccagggttggtttaaaaaaaacttcacacacacacacacaatgtatatrtatatagagagagagagagtaaaaattttaaaaaatctactttttagtttgtgtctgcccagatgatcagctgtaaattatcagatgtccatcagataccagataaagtattaccatattaaaatatatactaaattttcaggctgctgctatcttgatctcaaacttctgatataacaggtgttttaacctacgtaacaaaatgaaaactgttttccccacttcttatgccaaaggttttaattaaaacaacaacagtaacaacaacaacaacaaaacaccttcctcttctaacatgaccttcctatgatttcaaagtcccttccctatctaaatttataaaatctatac

SEQ ID NO: 874587 - DNA, 622 bp, Homo sapiens
tgatgggcagacaaaaggagtataagctggaaatcatttatgagctaccccagtgatcagtcttacaaatgtttctataaatgactcaccatatttttcaaagtgaaaaaagatttaatcacctaatttacagcataatatgacaaracaagttggaaataagtgtgagtgagagagaaattggataaagtttgaaaaggagcttcatttaccaatgaatatagttccagtagtatcacgtgacatcaatataataattggtaaaaaaactcacgggtgtcatctttaaaatgttttcataatattataagataggcattgagtactgtgcccacgtttttaaggtggcaaatcatgctcaggaaggttctatcaatagtaagtaatagaaatggggttcaactccagatctcatgccctccaaacttgtttgtgcaccattatattctgtggtctctgccttcctatgtaagcctgtaatatgcacatatggtcatatacacagtgatagcatcgatatttacatacattccttagaaatgttttatggctctgtgtgtgtatgtaggagatatgtgatattttcattgtgggaattatattattaataggattcaatgtg

SEQ ID NO: 874588 - DNA, 622 bp, Homo sapiens
tgatgggcagacaaaaggagtataagctggaaatcatttatgagctaccccagtgatcagtcttacaaatgtttctataaatgactcaccatatttttcaaagtgaaaaaagatttaatcacctaatttacagcataatatgacaagacaagttggaaataagtgtgagtgagagagaaattggataaagtttgaaaaggagcttcatttaccaatraatatagttccagtagtatcacgtgacatcaatataataattggtaaaaaaactcacgggtgtcatctttaaaatgttttcataatattataagataggcattgagtactgtgcccacgtttttaaggtggcaaatcatgctcaggaaggttctatcaatagtaagtaatagaaatggggttcaactccagatctcatgccctccaaacttgtttgtgcaccattatattctgtggtctctgccttcctatgtaagcctgtaatatgcacatatggtcatatacacagtgatagcatcgatatttacatacattccttagaaatgttttatggctctgtgtgtgtatgtaggagatatgtgatattttcattgtgggaattatattattaataggattcaatgtg

SEQ ID NO: 874589 - DNA, 630 bp, Homo sapiens
cagctgtgaaactcatattaaaaaattacctataccattgaggtaacagccagctactgccatccttgctaagtgaaagaaaacattaaaataaaaattcaagctctctttctctgcttattggagcagagggatgtactggctgcatcagtagctctgtgatatataacacatgwagatgcactgatttgctttagtatagaagaaaatatctggaaatacagaagcaactgaagtcaataattgtgtaatacactgaattccacaaagatacttctgtcttttttaccagccaatcaaaagggttaaatgagcgtgtaataggattgctagtctctgcatacagggtgactttgatggtggcagtaatctctgcagtccccttggccatgtcatgttggttttagtttacaattttgactgggagagggagcttcgggggtttccacttggacctcttaactcaatagccatttttttttttaagttctgggataaatgtgcaggtttgttacataggtatacatgtgccaggatggtttgctgcacctaccaacccatcatctaggttttaagttcctcttgcattaggtgtttgtcctaatactttacttccccttgatcacacct

SEQ ID NO: 874590 - DNA, 655 bp, Homo sapiens
cttgtgtccccccaaattcatatgttgaaattgtcacccccaaggtaatggtgttaaaaggtgggaactttgggggaatgatgaggtcatgaggctggagccctcatggtggagattagtgcccttatacaagaggccccaggaaacttgtttgcccttatctaccatgcgaggacattgtgagaggcgccatctatgaatragaaagtaagctctcacagacactaaatatgctggcattttgatcttggacttcccagcctccagaactatgagagataaatttctattgcttataagctactaaagctatgttttttttttgttgtcacaaaacagacttatataattattatgcacattttaaagatgagaaaactgaggcttagagagcttttgagccaattgtctacgataatagagcttacatgttgtggggcaaaggtttgaaccccaatctcttgactccagaattcatagttttaatcattacttgttatcaatattcctatccctatctcctcaaaaaaacttaatgtcctatcagctatcataaatgaagctggttatgtaaagctcctagactttgtctgccaatactcggtctctattaataccagtgtcccttcccctttccctattctcaacagtagat

SEQ ID NO: 874591 - DNA, 655 bp, Homo sapiens
cttgtgtccccccaaattcatatgttgaaattgtcacccccaaggtaatggtgttaaaaggtgggaactttgggggaatgatgaggtcatgaggctggagccctcatggtggagattagtgcccttatacaagaggccccaggaaacttgtttgcccttatctaccatgcgaggacattgtgagaggcgccatctatgaatgagaaagtaagctctcacagacactaaatatgctggcattttgatcttggacttcccagcctccagaactatgagagataaatttctattgcttataagctactaaagctatgttttttttttgttgtcacaaaacagacttatataattattatgcacattttaaagatgagaaaactgaggcttagagagcttttgagccaattgtctacgataatagagcttacatgttgtggggcaaaggtttgaaccccaatctcttgactccagaattcatagttttaatcattacttgttatcaatmttcctatccctatctcctcaaaaaaacttaatgtcctatcagctatcataaatgaagctggttatgtaaagctcctagactttgtctgccaatactcggtctctattaataccagtgtcccttcccctttccctattctcaacagtagat

SEQ ID NO: 874592 - DNA, 606 bp, Homo sapiens
atctgtgttgtgaactttctgattcattttagccctgtgtattattctattacgacatgatgattctcattatgcttccccaagcctatcaacagatagagcctagattctaattatctctatatttagtcaaaatagtcagrcttcatctgtttccagaacagttaatgtatttggctcattactctgaaatcactgagtacaatttagctcactgaaaacgcatccagcattagcttatgtaaggaccataaagggtccctgcgtgatgattttatactttctctattgcagtgagtcaggatataatagctactactgttgatcactatgtaccagacactatgctcaccttttatgtgcattatttatttagttcttacagcagcaagttattattctcactgtaccgatttagaagcttacctagagttacgcacctaggaagtgtcagagccaggacagtctgattttaaagcctgacattgtaaccactctgctgtaggacatacttaattacacagattcaaactttaagtctgatatttattcaaagtacagctttgtccctaaagagatggactctagtgcctcaaccctgacatg

SEQ ID NO: 874593 - DNA, 499 bp, Homo sapiens
atgtgtctttatagtagaatgatttataatcctctggatatatgcccagtaatgggattgctgggtcaaatgatatttctagttctagatccttgaggaatcgccacactgtcttccacaatggttgaactaatttacagtcccaccaacaatgtaaaagcgttcctatttttccacaacctctccagcatctgttgtttcctgactttaatgatcgccattctaactggcgtgagatggtatctcattgtagttttgatttgcatttctytaatgaccagtgatgataagcgttttttcataggtctgatggctgcataaatgtcttcttttgagaagtgtgttcatatcatttgaccattttttgatgaggttgtttgcttttttcttgtaaatttgtttaagttcttcgtagattctggatattagccctttgtcagatggatagattgcaaaaatagtctcccattatgtaggttgcctgttcgctctgatgata

SEQ ID NO: 874594 - DNA, 618 bp, Homo sapiens
taataatagaagggtggaatttaaggttaagcactgaaatgggataaagagggacaccatgtaatgatgggcacaattcataatgagagaacactcgaaatctgcatgctcccgacagcatcacagtaaatacaaaaagcaaaatctagtaaaagatgagatttatagagaaaattataaaraacactcaaaatctgcattctccccacatcatagtaaatataaaaagcaaaaactagtaaaagaagagatttatagagaaaatttgagtggaaggctaaatctctgttagaactacagtaaaagcctcctccccccaaggatacaaaagaagtgacagcttgaataaccaaaaacttgatttggtatatatgggaccttatatcccttaaatagaaaatatacattttttcaacgtctatgaaaatcttagaaaaatcatttgtttggccacaaataaattcataataaattttaaaagtggagagtttacacatttggagaaaatgaatgctttcctagtaaaatataaagtgcccctaatgaactagataatgagtagaaacttaattaccactgatgataaaaaaatctgccactgaaaaaagcaccaggtcc

SEQ ID NO: 874595 - DNA, 618 bp, Homo sapiens
taataatagaagggtggaatttaaggttaagcactgaaatgggataaagagggacaccatgtaatgatgggcacaattcataatgagagaacactcgaaatctgcatgctcccgacagcatcacagtaaatacaaaaagcaaaatctagtaaaagatgagatttatagagaaaattataaagaacactcaaaatctgcattctccccacatcatagtaaatataaaaagcaaaaactagtaaaagaagagatttatagagaaaatttgagtggaaggctaaatctctgttagaactacagtaaaagcctcctccccccaaggatacaaaagaagtgacagcttgaataaccaaaaacttgatttggtatatatgggaccttatatcccttaaatagaaaatatacattttttcaacgtctatgaaaatcttagaaaaatcatttrtttggccacaaataaattcataataaattttaaaagtggagagtttacacatttggagaaaatgaatgctttcctagtaaaatataaagtgcccctaatgaactagataatgagtagaaacttaattaccactgatgataaaaaaatctgccactgaaaaaagcaccaggtcc

SEQ ID NO: 874596 - DNA, 600 bp, Homo sapiens
tggatttgttcactgtgttaatacaatgcatttttacgtataagacctaccaacttccacaatttaaatatgcacagttaattgtaaaaaaagtatgagtaaatagaaaagaagccacaaagtcacttgacactgaataaatttttcaaaaaagttatcgtagaaaagggaaagtcttatatatgctgtaaaagttaaaggacatgccactagactagatgcataacgtgggaaggaggggagagcattytaggcaaaggaagcaaaggaagaataaagcattaatgccaaggagtgttgagaaggaagtgataacactgggatgaaaaactacaacagggtgaagaacagctgtgaacataacattggtagatagatttatcctctaagggatggcaatacggtaaaagatttccaaaaagttcacataaaaaaatgagtgtcagcgttagtgaaacaaaagtcctggcagagagtaagactggagggagaaaacattaagacaaacaagaatatgcaactttaaataagataaatataaatattttattgttataacaccttataccctattgaccttgtgaactttaaaaacatatg

SEQ ID NO: 874597 - DNA, 625 bp, Homo sapiens
tgctatgttgcccaggctggtcatgaacttttggcctcaagcaatcctcactgccccacctcccaaaatactgggattacagatgtgagccaccacacttggcttcaatgtatgtctaaatagtcatacaaacctttaagtaaaggaaatttttttaacttttttttttttttttaaagacagggtcttgctttgttgcctaggagtgcagtggctcttcacaggtgtgrtcacagtgcactctggcctagaactcctggcttcaagccatcctctcttcttgcctcagcctcctgagtagctgagaatacaggcaggtgctaccatacccagcttaagttaaggaaattttgagtcacctttgtcctggtttagccatagttcttaatgttaaaaaagaactttatttctggtgccaaagtatcaccacagtttttactgatttgttcttatatgctttcacctctggaatataaaataagttaggagcaaaatatatgtaatggaatgctgtacgtagggagaaaattgggttgaccataacccctgaaaaagaaaaataatgcatctctcatttgtagcagcagtaaattgaacaaatgctttgctttgtttcccacttaca

SEQ ID NO: 874598 - DNA, 656 bp, Homo sapiens
ttctaaaattgaccacataattggaagcaaaacacttctcagcaaatggaaaagaatggaaatcataacaaacagtctctcagaccacagtgcaatcaaattaaaactcaggattaagaaactcactcaaaaccacacaactacatggaaactgaacaacctgctgctgaatgactactgggtaaataacaaaatggaggcagaaataaataagttctttgaaaccaatgagaacaaagacacaatgtaccagaatctctgggacacagctgaaaccgtgtttagagggaaatttatagcactaaatgcccgcaagagaaaggaaraaagatctaaaattgacaccttaacatcacaatggagagaactagcagaactgaaggagatagagacacaaaaaacccttcaaaaaatcagcgaatccaggagctggttttttgaaaagataaacaaaattgatggaccgctagccagactaataaagaagaaaagagagaagaatcaaatagatgcaataaaaaatgataaaggggatatcaccactgatcccacagaaatacaaactaccatcagagaatactctaaacacctctatgcaaagaaactagaaaatctagaagaaatggataaattcccggatacatacaccctcccaa

SEQ ID NO: 874599 - DNA, 628 bp, Homo sapiens
agcaaaatggcagactaggtagctctaagttcttgttctcccatgaaaacattgaaaaaaaaaaaaaaaagactggactgggcttggaggctcatgcctgtaatcccagcactttgggaggctgaggcaggtggatcacaaagtgaggagatcaagaccatcctggccaacatggtgaaaccctgtctctactaaaaatacaaaaatagctgggtatggtggtgcgtgcctgtagtcccagctgcctgggaggctgaggcaggagaatcgcttgaacctgggaggcggaggttgcattgagccaagatcgcgccacwgcactccagcctgggtgatagagcaacactccatctcaaaaaaaaaaaaaaaaaaaaaaaaaggacagaaactggctgaactaaacttgtaggagctctggaaatcaacccaaggtttataaccattataaacaccaaatcaagacaaagtcaccttcaaagtggcaggaaaatagttttgtggctgtcttacttgcccttgccccaccctctccctgaaacatcagtggtcttggtttgaagaaggtggcatctcaggtcctatttcccttctaccaactaaagagaacagagcacacttacttatattc

SEQ ID NO: 874600 - DNA, 578 bp, Homo sapiens
aactcccttctctcagtcccagatgtagagctcttgttttcacaatacatcagacaaattgtgtgctagaactgcccagaagaattattttctgtcaaaatcaagaccttttaaactgtatataaatatgaacctaytgtatattgaagtaagaacaaaactcatcattttgtgataagtttactctttattcaagaaggtatactggccaggcgcattggctcacacctgtaatcccagcactttgggaggccgaggcgggaggatcacctgcggtcaggagttcgagaccagcctggccaacatggcaaaaccccatctctcctaaaaatacaaaaattagccgagcatggtggtgcacacctgtaatcccagctgctagagaggctgaggtggaagagttgtttggacccgggaggcagaagttgcagtgagccaagatcgtgccaatgcactccagcctgagtggcgacagagcaagactccatctcaaaaaaaaaaaaagaaagtatactgtgctgggaattttaacttttaacaatgtcatatccagtgcccaacagatttcagcaacatat

SEQ ID NO: 874601 - DNA, 578 bp, Homo sapiens
aactcccttctctcagtcccagatgtagagctcttgttttcacaatacatcagacaaattgtgtgctagaactgcccagaagaattattttctgtcaaaatcaagaccttttaaactgtatataaatatgaacctactgtatattgaagtaagaacaaaactcatcattttgtgataagtttactctttattcaagaaggtatactggccaggcgcattggctcacacctgtaatcccagcactttgggaggccgaggcgggaggatcacctgcggtcaggagttcgagaccagcctggccaacatggcaaaaccccrtctctcctaaaaatacaaaaattagccgagcatggtggtgcacacctgtaatcccagctgctagagaggctgaggtggaagagttgtttggacccgggaggcagaagttgcagtgagccaagatcgtgccaatgcactccagcctgagtggcgacagagcaagactccatctcaaaaaaaaaaaaagaaagtatactgtgctgggaattttaacttttaacaatgtcatatccagtgcccaacagatttcagcaacatat

SEQ ID NO: 874602 - DNA, 675 bp, Homo sapiens
aatcttatcgtcagggaagaaagacagtttgacttattttcctatttgaatgcctgttatttatttctgttcactaattgctctgactaggacttccaataatatgctgaataggagtggtgagagtgggcatccttgtcttgttccagttttcaagaagaatagctttttaaccaagtataatttaaaataattttggtgacacagtgggaaagctgtaaaaggttgactgttattttctatgaatgctgagagattatcaaatctgatcctgatatacagttcaaggaaaagttcagctgagctactggccatttgcaaacactatagtgacctaggatttcacctctaaatacagaaagccaagtattagagtgggctagagagacagaccaatcttaaaacagttcctaaggtctaartcattacagtaaaaattccactaaaaagtgttatatccataataaattcttatatcatgcacactcaagtttgagatccactaagtaaaggaaaggtgacaggaaagaagaaagtacacatatctaggcattctgccttacagacacagtcatgctgggctagctactcaggagactgaggagtttgaggctgtaatgcactatgatggttcttgtgaatagctgtgccttctagcctgggcaatgtagcaat

SEQ ID NO: 874603 - DNA, 675 bp, Homo sapiens
aatcttatcgtcagggaagaaagacagtttgacttattttcctatttgaatgcctgttatttatttctgttcactaattgctctgactaggacttccaataatatgctgaataggagtggtgagagtgggcatccttgtcttgttccagttttcaagaagaatagctttttaaccaagtataatttaaaataattttggtgacacagtgggaaagctgtaaaaggttgactgttattttctatgaatgctgagagattatcaaatctgatcctgatatacagttcaaggaaaagttcagctgagctactggccatttgcaaacactatagtgacctaggatttcacctctaaatacagaaagccaagtattagagtgggctagagagacagaccaatcttaaaacagttcctaaggtctaaawcattacagtaaaaattccactaaaaagtgttatatccataataaattcttatatcatgcacactcaagtttgagatccactaagtaaaggaaaggtgacaggaaagaagaaagtacacatatctaggcattctgccttacagacacagtcatgctgggctagctactcaggagactgaggagtttgaggctgtaatgcactatgatggttcttgtgaatagctgtgccttctagcctgggcaatgtagcaat

SEQ ID NO: 874604 - DNA, 700 bp, Homo sapiens
agagtggcatacaattcagagaaacataaaattcttctggaattaaaaaaaaaaactatgtgagtgtgtcagtgttagatgatataactaatatatccttgttatatttttaatggaatgtgtgtgcttatgtgtgtgtgtgtgtgtgttgtgatagactaaggaagctaagtatgctatgttagtaaacacttccaaattctctgtaaataaaagtcatgaaggtttcttcttgtgtgtcagcaggaggctccactgatcactgtcagtaaggaaacaaggctagttgagtagccagtatctccatcatcatgggttrctgtgccagaaagtaataatagctgtggagggtctacatgggcacacacatgcttctgcttgggaggaaggctcattgttcacagttcattgtgcggaattggtcacacagtcccacccaatcacagaatggacagtaaagaggaagggctgtttatttggaaatcagcataaatgatgtccagaacatttgaattatgttctttgctaaaacactaagtaatatcccttgaatatgttcaaccatagacactccttccaattaacaaactcttctgtaatagttttaaatctaaaagtgcttactttgcttatcctgaagtaaaaataagttagacttgacaggatggaagtagccatttcattctttaaaatccattta

SEQ ID NO: 874605 - DNA, 548 bp, Homo sapiens
cttaggctggagtgcaatggaatgatcatggctcactgcagcctcaaactcctgggttcaagtgatcctctcacctcagcctgccaactagctgggaccacaggtgtgcaccatcatgcccagttaatttatttttgtagagatggggcctcactctgttgcccaggccagtcttgaactcttgagctcaagtgatcctcctgccttggcctccccaaatgctgggattacaggcatgcaccaccatgccccgctagggccwcaccttttaatacagttacaatgacaatcaaatttcaacatgagttttgaatgaggatattcaaagcacaggattctacccctggcccccaaaacatgtcattctcacatacaaaatatattcattcactcccaatagttccaaaagtcctaacttgttccagcatcaactcaaaagtccaaagttcagagtctcatctaaataagatataggtgagactcaaggcacaattccttttgaggcaaattccctccagctgtaaattcaaaacaggtatctacttcca

SEQ ID NO: 874606 - DNA, 614 bp, Homo sapiens
ccactttcttctgcttgcttttgttctagccatgttggcagccagttggatggtgcccacccatattggggttgggtcttcatcttccagtccactgactcaaatgtcaatctcctcgggccacaccctcacagacaaacccacaaacagtactttaccagccatctaggcatccttcagtccaatcaagttgacacctaacattcacaagtstcctaaccagattgactacttccagtcttcttttaattgagagagaaacttttacagtgatgcgtcacataacaacattttctatcaacaactgtctgtatatacaattgtggtcccaataagatcacaatagaattgaaaaatttctatcatctagtgtttactatactatatttttattgttattttagagtgtactctgtgtgtgtgtgtgtgtatttaattataaaacagcctcagttgcgtttttcaggaggtactccagaagaaagcatttttatcataggaattgcagctccatgaaggtctccctgaagaccttccagtgggacaagatgtggaggtggaagacagttatactgatgatcctgaccctgtgtagagctaggctgatgtatgtc

SEQ ID NO: 874607 - DNA, 642 bp, Homo sapiens
gcttagtgaaaaatctattaaagtacaaaatcaagacaaaattatagtattacaagtatagatctttgattgctcagaattataaatatcaccaaaagctgtggttaaattaaatcaggcattaccaagcatttaggtcaatcacttcattttatagggaaaagacaagtgaaagctttgagttattgactgtagggaagatgtattacaataagaaatattttcacatattctgccaactgttggttgcttgctgtgatggttaatattgagtgtcaacttgattggatggaaggatgcaaagtattgttcctgggtgtgtctgtgagggtgttgccaaaggagattaacatttgagtcagtgggctgggaaaggcagacccaccctcaatgtgtgtgggcaccatctaatcagctgccagggcagctaggataaaagcaggcagaggaatgyggaaggattagactggctgaatcttctggcttccatctttctcccgtgctggatgtttcctgccctcgaacatcagactccaagttcttcaacttttggactcttagacctacaccagtggtttgccagggtctctcaggcgttcagccacagactgaaggctgcactgttggtttccctacttttga

SEQ ID NO: 874608 - DNA, 620 bp, Homo sapiens
atatctacccatcctctctcaggacagcattttttaagtgagagatttttgcatttttaattttttttaaatttattattgttatttatttattacatagtaattgtaggtacctatggggtccatgtgatactgtgatacaagtatacaacgtgtaacaatcaaatcagggtatttaggatatccattacctcaaatatttctcatagctttgagatagcacaattttttttttttttttttttgkgatgagtgtcgctctgtcgcccaggctggagtgcagtggcgcaatctctgctcactgcaagctccgcctctcaggttcacgccattctcctgcatcagcctccggagtagctgggactacaggcgcccgccactaagcccagctactttttgttgtatttttagtagagacggtgtttcaccgtgttagccaggatggtcgcgatctcctgacctcgtgatccgcccgccttggcctcccaaagtgctgggattacaggcgtgagccaccacgcctggcagagatagcacatttttaaatggaggaaaaaaatgaaaagaagagtggaagaattgtgctttttttcaggatgctctcaagcagcctgtatata

SEQ ID NO: 874609 - DNA, 606 bp, Homo sapiens
tttctttttgtcagcctggaagattcctacttagtctttaagctacagcataagtgtcacttcctctgtgttgccctttccctgttctctcctttagtatctactgtgccccataattatttatacgaaggaacctatatcattgaatggaaatcattcatttttttctctgtcatccctgataaactatcagatccttaagagtatagttctgagtttagtcattcgtatgtctccaaaacttaaaacaatgtcctgatcatgggtgctcaataaatacttatagagtaaataaagaaaaatataagtctttttcttatgcttctgattcatcaacttgaaccagaaatgataaggcagttaaagggagcttatcgtaagggatatcatctctttaaagggccaggttggggggaaattccaataaccagaacgtctcatagatagagagmtcatgaaatttgaaaattgatgccagtatcaaaatgtcaggaatactgattgtcaggcctctgagcccaagccaagccatcgcatcccctgtgacttgcacatatacatccagatggcctgaagtaactgaagatccacaaaagaagtaaaaat

SEQ ID NO: 874610 - DNA, 670 bp, Homo sapiens
atgatttttttctttaattcagggtctccttctgccccccagactagagtgcagtggcaggagcatagctcactgcagccttgacctcctgggctcaaccaatcctcccacctcagcctctcaagtagctgggactacacgtggctgccgccacacctgcctaatttttaaaaaggctgaggcagaattgcttgaacttgggaggcggaggttgcagtgagtagggatcatgccactgcactccagcctgggtgacagagtgagactacgtacgtctcaaaaaaaaawtttttttttttttgtagacggggtctcactgtgtgtcctggctgatcttgaactccttatttccagtgattttcccaagttggcctcccaaagtgctggtttacaggcacaagccacaaagccaggtccctattttttttaaaaacgagcagccataggtaatttttactatccttttcacataatgggaggtattgaggagagagccgctatgataaaagcataagcttctaagtaaaatttatctctgaaatatttttttttttactgtccatttctttctacaaagaccctaaaattttgctcctacttttaaaaaactttatgccacaaggaaggcattgccataggaaagagagataaaaggggcaatctatgagtt

SEQ ID NO: 874611 - DNA, 587 bp, Homo sapiens
ttatggggtacatgtgatattttgatacatgtgtacaatgtttaatcatcaattcagggtatttagaatatccatcacctggagcatatataatttgagtttggaacatttgaaatcatttctactagctcttttgaaatttacaatatgttattgtttataatagtcattctactgtgctatcaataattagaatttccttctatctaactgtatgcttgtatccagtgaactacctctcttcatctcacctctccccatacccacatatgcccttcctagtccctggtaagtatcattctactctctacctcccttagctytcatgtatgagtgagaacatccaatatttgtctttctaggcctggtttatttcacttaacataatgacctctagctccatccatgctgtgcaaatgcaagatgtcatcctttttatggctagatagtattccattgcgtatgtacaccacatttcctttatccattcatctcttgctagacacttaggttgattccataactttgctattgtgaatagcactgcagtagacgtggggatacaggttcccctttgatatgctgaa

SEQ ID NO: 874612 - DNA, 690 bp, Homo sapiens
actacagattaggaattactgaaaaaatagagaaatggaaaataaagatatgaaaaatactcagaaatcagtgtagaaacataagaaaaatgaaaaatgaagttaaaagtcatgaaagatacaaacttggaatatatgctcttaaaattaataaaagttacaatagagacagtaatacaaaaaggatatttgaaataactttctatgacagtttacagctatatattataatattcaataagtraaattaacttaaacaatataaataaaaataatatgacattttaaacataacaagaaaattgcacaatagaaaacataacaagaaaattgcacaataggaaaaaaaagatcttaaacccaaaatgaaaggagaaagattacctctaaaaagtaacaaagaaggcaataagacactacattaaaatatattatattatatagatttttaaatgatatataaaataaaataattttcaattgggaattctatatatttctaaattattgataatattgaggacaaaatcaagacctttacagataaactaggactcagatagtttatacacaaggtcttttaagagagcaatactatgtgatatattttagggaaaaagaaaatttaattcagaggaaatgatatgcaagaagaaattataggaatagattctgattcctcaaaatgga

SEQ ID NO: 874613 - DNA, 594 bp, Homo sapiens
tctttgtgcttcttgtatttggatgtctaggtctctatccaggccagggtagttttccttgattactcccctaaatatgttttccaaatgtatagatttttctttatcctcaggaatgcctattattcctaggtttggttgtttaacataatctcagacttcttggatgctttgttagtattttcttacacttttttctttgtctttgttggatttggttaattcaaagaccttgtcttcgagctctgaatttctttcttctacttgttcaattctattgctgagactttccagagcattttgcatttctataagtgtgttcattgttttctgaagttttgattgttttttgtctatgctatttcaytgaatatttctcccttcactttttgtatcattttcttgatttccttacattatgcttcacctttctctggtgcctccctgattagcttaataactaaccttctgaattctttttcaggaaaatcagggatttcttcttggtttggatccattgctggtgagctagtgtgatttttgggaggtattaaagagccttgttttgtcatattatcagagttggttttctga

SEQ ID NO: 874614 - DNA, 693 bp, Homo sapiens
ttataaaatcgaccacataattggaagtaaaacactcctcagcaaaggcaaaacaacacaaatcataacaaacagtctctcagactatacagtgccatcaaattagaactcagattaagaaactcattcaaaactgcacaactacatggaaactgaacaacctgctcctgaatgactactgggtaaataacgaaattaaggcagaaataaataagttctttgaaaccaatgagaacaaaaacatagcgtaccagtatctctgggacacagttgaagcagtgggaatttatagcactaaatggccacatccaacagggggaaaatctaaagtcgacaccctaacatcacaattaaaagaactagagaagcaagagcaaacaaattcaaaagctagcagaagacaagaaataactaagatcagaacagagttgaaggagctagagacataaaawcccttcaaaaagtcaaaaaatccaggaattgattttttgaaaagattaacaaaatggatagactgctagccagatgaacaaagaataaaagagagaagaatcaaatagacacaataaaagatgataaaggggagatcaccacttatcccacagaaatacaaactaccatcagagaatactataaacacctctaagcaaataaactagaaaatctagaagaaatggatgaactcctggatga

SEQ ID NO: 874615 - DNA, 676 bp, Homo sapiens
ttttattctttttgcagctattgtaaatgggactgcattcttgatttggccctcagcttgaacaatgttgatgtatagaaattctgcttgaagatcagctgtttgaaaatacacattcagcggagaaaaaagacaaaagaacaaaaaggaacaaagaytgcctataagatataaaagagtacctcaaaagaccaaatgtaagaattcctgtgtttaagagggagcagagcaagaacaagggataaataacttattcaaagaaataacaacagaaaactttccaaaacttgagaaagatataaatatccacgtacaggaaggtcttagaccaccaaacagattcaatctatacaagacatataataatcaaactcacaaaggtcaatgacaaagagaataccctaaaatcagctacagaaaagaagcaaataacatataaagaagccccaattcatctggaaacagacttctcaatgaaaccatgcaggcagaagggagtggaatggcattttcaaagtgcccaaagggaaaaaaaagccctgccatccaagtgttttgtatccagaaaaaattgttatttaaataagaagtagagataaagtctttcccagacaaatgaaagctgagacaattcatcactaccagatccaccttgcaaaaaatgctaaatggagtt

SEQ ID NO: 874616 - DNA, 627 bp, Homo sapiens
tgtattatataatatacataacgttcaaaaatatccccactaatccctagcattagatgtgatgacaatgattatctttggggaagagggatagataatttataactgggaagaaacactatagctttctagggtgctagtaaactgccatcacctcacttttggtggtggtaattcatttgtgagcttttctgcagatatatttcaataaaacytaaatatttacctaaaaatttgataagatgtagataacccaaataaaagtgagtagacccctgcttgttagtagaaggggcagacatatttttccctagctctttaattgtctaaggacaattaaaatcccttgacgttatgtataaaactgacataacaagactctaaaaggcagactgaagaaagtggagagaagaagaatgcactcatatgtgctttcaggacccaagggatgacacattggtgagttccctggattttctttttgccttatatatcccagacttggagatgaagaagcttgcaacccagaaatgccagtgggaacagacaaaaaaagcactagcaaaagcctgctctctttagccaatggaccaaaaaagggagcaggcaagcaagagagaaacttac

SEQ ID NO: 874617 - DNA, 627 bp, Homo sapiens
tgtattatataatatacataacgttcaaaaatatccccactaatccctagcattagatgtgatgacaatgattatctttggggaagagggatagataatttataactgggaagaaacactatagctttctagggtgctagtaaactgccatcacctcacttttggtggtggtaattcatttgtgagcttttctgcagatatatttcaataaaacctaaatatttacytaaaaatttgataagatgtagataacccaaataaaagtgagtagacccctgcttgttagtagaaggggcagacatatttttccctagctctttaattgtctaaggacaattaaaatcccttgacgttatgtataaaactgacataacaagactctaaaaggcagactgaagaaagtggagagaagaagaatgcactcatatgtgctttcaggacccaagggatgacacattggtgagttccctggattttctttttgccttatatatcccagacttggagatgaagaagcttgcaacccagaaatgccagtgggaacagacaaaaaaagcactagcaaaagcctgctctctttagccaatggaccaaaaaagggagcaggcaagcaagagagaaacttac

SEQ ID NO: 874618 - DNA, 622 bp, Homo sapiens
gaaacaactctatcagaatatggctatcaaatactaaaacaataaatttgtgctatagtaaaaattattcatttttattaacgtattaaataacagcagcaagtagggggtctaataactacaataatttcaaaatagtaatgagcacaaatgatatttctagatatttacagccataatgagatataaaattttgttatttttatcagtgacaaaaaatacaaagcatacagagctacttatgacaaggttacaggcacaggtattgtgtttctctcttgtctgcatttgtaatgaraagaaatgctgcatttcagttagaaggtaataaagagacagatttagttttttttttttcccattcacgttcatggactctgtgaaatctatccatggatccaagggttaaggacctttgcctggagaaagatgtgcatgtgtacatcagggtacacttcacaacattgtttgtaatagtaaaatattggaaagattatcaatcatattaaaagaaaaagtgaataagcaacagtgcattcatacaatgggaaattatttagcagcaaatttaacagtcttcagttttacgcagctacacaaaattaagcatacacagtatgta

SEQ ID NO: 874619 - DNA, 540 bp, Homo sapiens
taaaatgtcctagtggtgggaccctgcatagagtcagcatctctatgatccttccgggctcttttcactccctctagtggaatttggttcttcacatcagagttttgacagcaatagcaagcactgtgctattgtgtgcgatcttttgggtaccagagccagtttcatcaaatcttcaacytgatggctctatctgtgatcagagctatctcatgtacctacagttgcagtttctttaaataacaattagcgcaggagatcctgggctgctcttgaatgcagggagtatgctggtgaaactcagcaaggaggtggtcacttgtttttttgtcacgcagggtctttcataatgaatcaacaaagcattgacaatagttttcttgtaaactgaacaaaccttataaatggtgtgtggtctcccctcccccatgaattagttcctttgtcctgaaatgtgtggatagcccagatattcattccgctctgctgggagagtggcagagtctagggaggcccccagaatgtgcaagacaagtcgac

SEQ ID NO: 874620 - DNA, 619 bp, Homo sapiens
ggcaagacttttattgacatgtcacagccttatgattcactgccaattttcttagcttggattttttttttgccttttacctcttttaaagtgttatagtgacaaagacggtgggctggacaagaagatgacacacatgcttcctgatttagcccatcaaaacctcacagagccaacagtttttcagtgtgtggctgcctatgcaccagctccacctgactcctttcttacctggtgcacgacccttcagttgaaaattccagcagcgtgcaacttgtctttggcaaatgaattgtaagtatgccagctgccagatgtcttcatttttaaaacaccttcaaaactgcttctggcaamgttccataagcaaaacgtgctaagctgtaactgcagtttccacactgtgagcaaaaaaaaaggaaaaaaaaaggggccaatgggagcagatggaagcaatagaagaatgtattgccttcacatcttgaaaaggagtagaaaatgaaggtaaaaacagaatctggctacccttaccagttaggtatttggaagaagaggtatcagtgacctatgatatgttcaatatgcatgctaatagtcaccttcaacagtataataattt

SEQ ID NO: 874621 - DNA, 472 bp, Homo sapiens
cattttattttagcttccttagattgggtttcaatgtactcctgcatctcaatgatcttcatttctatccatattctgaattctatttctgtcatttcagccatctcagcctggttcagaacccttgctggagaagtgatgcagtcatttggagcaaagraggcactctggctttttgagttgtcagggttcttgagctggttctttctcatttttgtgggcttatgttccttcagtctttgaagtgctgacctttgaatggttatttcttttatcctatgtgatgacccggaaggtttgattgtggtataaggtagatttaaccaactggcttcatttctggaagattccagggggccaacgctcagctcccaactcctggactgcgagctctaactctgagggacttgtattgggccctgactttgttctctggctccgcaaggttagaaatccactgtcctgggggagc

SEQ ID NO: 874622 - DNA, 627 bp, Homo sapiens
caacactctgtatcatgtaagtggtggtggctacacggccaaatatcaagatttatcacttttttctcatgttcttgattaaatgtgtaaggaatgaagcccattttagagaaggcatatgaggaaggtagaaataggagacacactctaatacttacctaaatgagaatatgtacatcagtttgtgctaaatgtaacctcctctttcccagccctcccagtgactgaaccatgttatagccatatttactagcacctttatgacatccttagaaatcatgtcctgcatctgtaaggtaatgaacctccaagctggaacggcaggtcctagtcactttcatacccacaacatcaatacagagtcttgcacagaataggctgcaatcaatgcctgataaattgaattggctgyattgtgcaatcatcacctttcactttgaaaccagtccttactctttcaagtaggaaggaaagtcttatataactctccagtcttaacgagtcactacatttaaatttctgaaatgctagctttgtttttggcagatcccttaataggagttttggctgaatgacagtctagaaaagaccaagtctacacaatagatagggaagactgacgccaac

SEQ ID NO: 874623 - DNA, 627 bp, Homo sapiens
caacactctgtatcatgtaagtggtggtggctacacggccaaatatcaagatttatcacttttttctcatgttcttgattaaatgtgtaaggaatgaagcccattttagagaaggcatatgaggaaggtagaaataggagacacactctaatacttacctaaatgagaatatgtacatcagtttgtgctaaatgtaacctcctctttcccagccctcccagtgactgaaccatgttatagccatatttactagcacctttatgacatccttagaaatcatgtcctgcatctgtaaggtaatgaacctccaagctggaacggcaggtcctagtcactttcatacccacaacatcaatacagagtcttgcacagaataggctgcaatcaatgcctgataaattgaattggctgcrttgtgcaatcatcacctttcactttgaaaccagtccttactctttcaagtaggaaggaaagtcttatataactctccagtcttaacgagtcactacatttaaatttctgaaatgctagctttgtttttggcagatcccttaataggagttttggctgaatgacagtctagaaaagaccaagtctacacaatagatagggaagactgacgccaac

SEQ ID NO: 874624 - DNA, 616 bp, Homo sapiens
ctatcttttgctaagtaaggtcaagggaaacagaaacaagatgtgaagccaagattttccctgtagaattatcaactgaacaagtattcttcctcagaaacctaaggcataaattctgattcaaatatttcaccactatgaaacatcaagaatgatttcaaatgtcttttaaacatataatgcatgtcttctcactgatacatttataatatttgagagctattatgtatgatgtgctagagaatkttgtcattatttatgaaattattagctgttctcatgacccaacttccacttaggacttaaatgcagcattaacttgcaaatacactccggtgctctccagctggcaaataccatgcaaaagagggccatggatttaacaaacaaacaaaacaacctcacatgaaatgtcttccttttctcttaaatatatctcttcctctccatttcttatatagtccaaattttcatcatttcagattcaactcaaataaaaagcatttattctgtcagacacactctgctacatgtcttaaatacattatttcagttaaacttcgcagaagtctttggatacagttagtatcatttccatttactgatgagaatgctg

SEQ ID NO: 874625 - DNA, 585 bp, Homo sapiens
gaggcaaatcataattctgacattacactcttttataaaagtaagaataacaattatacttttgcagacatgaaactggctaaatatgtggcagaataagaagggattcagttctttctgacttatatgttcagattttatacttgaaatcctttccccagtctttccaatgcctcccttttttattcagcaatatgctaaagtattggtctcaaattaaatgacaattaggatgtatctttcaggaccctaagctatctggatgaaaaatgaatcatctcagtgtattgtctaaatkattcctaacacggaaatggttggaaacaaccctgatgtttggcgtcatagaaacaaaacaaccagttgatgattgaattgttcactttaagatgcgatgttttggcatagcaggaaccctcaagaattgtacctattgccactataatataaaactcactcactattgtatctatttctctctttctgtcctcctgagatacatacacacacaaatcatcacattcaatttttacctaacttaagagaagcagtcattatttgttggtttcagggatgcattgtggt

SEQ ID NO: 874626 - DNA, 655 bp, Homo sapiens
taccacaagcaaaggatcaggggcctgcagagacagcagagacagctgaaatttctgactttgtctcttccaaaatgaagaaattgtattttctcaagcttcattttctacatcattggatgaagtaaattatcatttagtgaggtcgttgagtgagttaagaatgaaaatatctctaagaatgacaggcactggtctacttcactactcttcccctagmagaaaggaatcacttagattctgatagatgtattgaaagatcctaataaatgaagggggtaacatggccaatcattttaatgaggaataagtaggaggagaattagagaaccaggcatgaaatttagagatgatgaaatccagaggttttcaaatattttgtttaagaaaacttaaaaaattaaacatgaaatattgtatgtatctcacatgatataaaacaaaggccttggagctgctgtgatgtacctagggtgaaggtcccacagtgccaacctctgggcttctctatgcagcactcaggctgtccattctgctgggaagcttctccactcagccttcagaaactgagaatccctaggattctttcactgatgtaacctcattctctgcttcccccagcccttcaccaataaattttgagagagaatgaatg

SEQ ID NO: 874627 - DNA, 666 bp, Homo sapiens
atcttacaaggtacatattgaaattatctccaatatataaatgcaaaaattgagttaaagagagatttagcaacttctccaagaccatattacctcataaggactgagccaaacattaaataaaatggcatttttggaagtttgaatgaagtgtgttgaagatgcttgttaattattgtaattgaaggttgactttaaaatttatgattttgtggggaggggcaagtttttatgcacatatagactttcagartttaagttaatatggccatcaacctttttgaaagaatataatgctaaaagtaaacatacgaacttttgtcaatgggtgaggcatgtcttagattccactggataagactattaaaagtgcattacaggccaggtgcagtggcttacctctgtaatgccagcactttgggaggctgagttgggtggatcgcttgaggccaggagttcaagaccagtctggctaacatggtgaaagtgtctctactaaaatacaaaaaactagctgggtgtggtggtgcacgcctataatcccagctactcaggaggctgaggtactcttgatctcagaaggtggaggttgccgtgagccaagattacagcactgcactctagcctgagcgacacagcgggactcggtctcaaaacaaacaaaca

SEQ ID NO: 874628 - DNA, 597 bp, Homo sapiens
tactcaagacgtgtagatgatgatgagaaactaagaacttacccccttgttagcccctggaatctcattcttctctagagcactaggatgacttcgggcctgtcatgttagtatctttcagagtagttatctactgttgtctcatttattatctatcttaatgtttctacttacattttattcttttatgttttgggttttttgttttaatttcctaggaaagagtctaaagctgaattaaagcaattaagagtgagattgaagcaaaataacatttccctrtgatgacttaaaagtattttttagctcaaaaaagtaatactgtttattgtaaaactttagagaatacagaaattataatgaagaaagtatttactataacattcacccacaaaaatatatattagcaatatataccctgcttccttaacatatgtatatgtaattgtgttttctacatttttacttgatagtatagcaagaatatcctttcctgcttcaacctcctgagtagcttgggactatatgtgtgccccaccacacctggctacttttttttgtagagataggatcttgctatgttgcccaggttggtct

SEQ ID NO: 874629 - DNA, 597 bp, Homo sapiens
tactcaagacgtgtagatgatgatgagaaactaagaacttacccccttgttagcccctggaatctcattcttctctagagcactaggatgacttcgggcctgtcatgttagtatctttcagagtagttatctactgttgtctcatttattatctatcttaatgtttctacttacattttattcttttatgttttgggttttttgttttaatttcctaggaaagagtctaaagctgaattaaagcaattaagagtgagattgaagcaaaataacatttccctatgatgacttaaaagtattttttagctcaaaaaagtaatactgtttattgtaaaactttagagaatacagaaattataatgaagaaagtatttactataacattcacccacaaaaatatatattagcaatatataycctgcttccttaacatatgtatatgtaattgtgttttctacatttttacttgatagtatagcaagaatatcctttcctgcttcaacctcctgagtagcttgggactatatgtgtgccccaccacacctggctacttttttttgtagagataggatcttgctatgttgcccaggttggtct

SEQ ID NO: 874630 - DNA, 617 bp, Homo sapiens
gttctgatatttgtcactgctatgaacaatgctcttggaagaagatatataagagcctgcgattacttaggctgtctaagaaggtgatcccaaggagccccagctagacataaaattttactgtactcataaaatctatgtcaaacttaatgyagttgagtggtgagaggactggatccaaagttaagatgctccgtttccctgtccttattttgccactgcccatctctgtaccactggcaaatccttcttgtgcctttcatttccttatttctaaaataaaaagatcaaactaggcttccttctagttgtaaggggctgtgaatcctacccaaaattgttttaagaatggtgccataatcatttactatgatgctatgaaaaagatgactttgaacataatgttctttttgagacatccacttcaagacaatagataggctgcaataaaaaaaataaactccagtcaaatgtttgtgcttagtacctggctaaacttgcttaaagctatttgtttctttacactaaaaaaaaaaaaaaaaaaaaaaaaaaaaagaccaaacttatacaaggcatgttggtatcatatgttgtttagttcacctgtcacttcatag

SEQ ID NO: 874631 - DNA, 617 bp, Homo sapiens
gttctgatatttgtcactgctatgaacaatgctcttggaagaagatatataagagcctgcgattacttaggctgtctaagaaggtgatcccaaggagccccagctagacataaaattttactgtactcataaaatctatgtcaaacttaatgtagttkagtggtgagaggactggatccaaagttaagatgctccgtttccctgtccttattttgccactgcccatctctgtaccactggcaaatccttcttgtgcctttcatttccttatttctaaaataaaaagatcaaactaggcttccttctagttgtaaggggctgtgaatcctacccaaaattgttttaagaatggtgccataatcatttactatgatgctatgaaaaagatgactttgaacataatgttctttttgagacatccacttcaagacaatagataggctgcaataaaaaaaataaactccagtcaaatgtttgtgcttagtacctggctaaacttgcttaaagctatttgtttctttacactaaaaaaaaaaaaaaaaaaaaaaaaaaaaagaccaaacttatacaaggcatgttggtatcatatgttgtttagttcacctgtcacttcatag

SEQ ID NO: 874632 - DNA, 629 bp, Homo sapiens
gctgacagtttctttatcctgaagtccattagcaccttcttgaattcttacctggctctaaatagaatctgcagagaggatggccctgggatcgttctttcccctgtgctttgttttccctatatgagccatcttaggttaggctccttggatgcagagcctgaggaaggtatttggacacatgtggctgatggagggagtgctttttagacaaacaaacaaaaactacmaggtttgtaagaaaataaaaactgcaaggagtgaagcaggatgaagaaagcaaaaacaaaacaaaacaatgggaatgtagtctcaggtaaagtcttgccttgctctaatcctctgggatctcagaagcacaaattccactgcagatttgcaccccttaagggaaagaggccaggattttgtgctgttattactctatcattgtctatggagtactccaggaagggctgcaaaacttccctccagctactgagggaaattctgtggaggggggcactaggagcccctgacagtcaacactcacagtggctggcagggcaccctaacaaggtccattctgtgagtcagttggcttttaaaaatataaattaaatcctgtcactcctctgtttaagcctttt

SEQ ID NO: 874633 - DNA, 629 bp, Homo sapiens
gctgacagtttctttatcctgaagtccattagcaccttcttgaattcttacctggctctaaatagaatctgcagagaggatggccctgggatcgttctttcccctgtgctttgttttccctatatgagccatcttaggttaggctccttggatgcagagcctgaggaaggtatttggacacatgtggctgatggagggagtgctttttagacaaacaaacaaaaactaccaggtttgtaagaaaataaaaactgcaaggagtgaagcaggatgaagamagcaaaaacaaaacaaaacaatgggaatgtagtctcaggtaaagtcttgccttgctctaatcctctgggatctcagaagcacaaattccactgcagatttgcaccccttaagggaaagaggccaggattttgtgctgttattactctatcattgtctatggagtactccaggaagggctgcaaaacttccctccagctactgagggaaattctgtggaggggggcactaggagcccctgacagtcaacactcacagtggctggcagggcaccctaacaaggtccattctgtgagtcagttggcttttaaaaatataaattaaatcctgtcactcctctgtttaagcctttt

SEQ ID NO: 874634 - DNA, 664 bp, Homo sapiens
cagtcaccctattcaaactctcatctccccctcttctgggcttcaggcatttctacatacaaactggcagatgaaatactctggtgccttctctcctatctgtggcagcagagcccttggtttctgagaccaccctaaagccacctgtgtcaggtgcctggtgaatgagtgtttctcctacttacaactgtaggacagtcaatcattacacatcagccaaccactgactctcctgcccttggttattccatggcacaaccttgtctgtgtaggaagggtgagtaagcatcaatgtttcagaagtgatgggctctgcacagacagttcctcctccttttcctagttgttatgccrtgctgagaaattcatgctgctttcctctttgggaccagcacctactgcccaagaactacaggcaccaggtgcagggctaggtagggctaaagggaggcaggtttgactcactcatgctcctcctctcagcccatctttgaggaaacaccgtcactggtgctttcaaaggcacagttctaaggctctgagttttcattctacttcgtaactttcccatggtgcctgccactcagtttacctctaacttaaaaccagaagtttgagataaactagaaaggtaggttcaagggcatcagttacaataagtcct

SEQ ID NO: 874635 - DNA, 664 bp, Homo sapiens
cagtcaccctattcaaactctcatctccccctcttctgggcttcaggcatttctacatacaaactggcagatgaaatactctggtgccttctctcctatctgtggcagcagagcccttggtttctgagaccaccctaaagccacctgtgtcaggtgcctggtgaatgagtgtttctcctacttacaactgtaggacagtcaatcattacacatcagccaaccactgactctcctgcccttggttattccatggcacaaccttgtctgtgtaggaagggtgagtaagcatcaatgtttcagaagtgatgggctctgcacagacagttcctcctccttttcctagttgttatgccgtgctgagaaaytcatgctgctttcctctttgggaccagcacctactgcccaagaactacaggcaccaggtgcagggctaggtagggctaaagggaggcaggtttgactcactcatgctcctcctctcagcccatctttgaggaaacaccgtcactggtgctttcaaaggcacagttctaaggctctgagttttcattctacttcgtaactttcccatggtgcctgccactcagtttacctctaacttaaaaccagaagtttgagataaactagaaaggtaggttcaagggcatcagttacaataagtcct

SEQ ID NO: 874636 - DNA, 664 bp, Homo sapiens
cagtcaccctattcaaactctcatctccccctcttctgggcttcaggcatttctacatacaaactggcagatgaaatactctggtgccttctctcctatctgtggcagcagagcccttggtttctgagaccaccctaaagccacctgtgtcaggtgcctggtgaatgagtgtttctcctacttacaactgtaggacagtcaatcattacacatcagccaaccactgactctcctgcccttggttattccatggcacaaccttgtctgtgtaggaagggtgagtaagcatcaatgtttcagaagtgatgggctctgcacagacagttcctcctccttttcctagttgttatgccgtgctgagaaattcatgctgctttcctctttgggaccagcacctactgcccaagaactacaggcaccaggtgcagggctaggtagggctaaagggaggcaggtttgactcactcatgctcctcctctcagcccatctttgaggaaacaccrtcactggtgctttcaaaggcacagttctaaggctctgagttttcattctacttcgtaactttcccatggtgcctgccactcagtttacctctaacttaaaaccagaagtttgagataaactagaaaggtaggttcaagggcatcagttacaataagtcct

SEQ ID NO: 874637 - DNA, 605 bp, Homo sapiens
tgagactagaagtgggtcactctaaagcatgtgagaccctaaatgaaaggccagaagactgtctgtagacagtgggtagcaaggggattgagtggaaaggcactttgttctaagggatctgaccgagatgaaggaagagcctgggtatactcttctagacaactgtgtctgcagggggaacatagactggggaagccctggactctcatttttctcagtggttgcagaaaggtgttttgtggacagcctgctagagggcaactatagacacactgtgacctgcatcattttgaagtgtgattgaaaactaataaaccaaacaggcaaacaacagccaaaccttagctgttttcaaattttcttccttctaaaatgctactctaatataagcatgctatctcgcagttcctttctgagctgacttttactctcagctctagtttcgtgtaagtcargtttcagcatggtagaagccattggttggctttgggtgactgccaaatagactcttacagggattatgtgtaataaacactctgtcgtatattcaacagtgatctctattgcaaaatacactgagcctaaacctttaacttctgcctagt

SEQ ID NO: 874638 - DNA, 571 bp, Homo sapiens
aatccttatagaaaatttgaaatacatagttacagtgaaaaaaaaacctcataatcttagcagctgagacgactgttacaatttgataaatttttttttgtattttttcactaagtatggtttgtttttcaatgagagatttttttttaaacataaaagcatgccagattttataacctcgtcttgtttttgctttttttttttttttttaatttgagatggagtcttgctctgtcgctcaggctggagcgcagtggcataatcttggctcactgcaacctccgcctcctgggtttaagcgattctcctgcctcagcctcctgagtagctgggactacaggcgcatgccaccacgcccagctaattttttgtattttcagtagaaacggggtttcactgtgttagccaggatggtctggatctcctggcytcatgatccgcctgcctcagcctctcaaagtgctgggattacaggcgtgagccaccgcacctggtctcctcctctctctttcaaacaattactcttaaactgcttatccaggctgttgcaagctcgttacagatgtgtttt

SEQ ID NO: 874639 - DNA, 513 bp, Homo sapiens
tttcatctgccaagcccttggaaatgagctaaatgctctacatggattaaataattaaattttaatacttattataaccctgtgaagtaggtaattatccatattttgctgataaagatattgtagcttagagaaattttaaactctacttggtctgcaaagctagtaaagagaggagtcaatactatttgaaccctggaagttagctccagaaccaatattgtgtaccattaaactgacagaaatctcagctctcattgggagccatgctaatttctttcagcataaatatagggacatttytaagtacttgaatgaggattcactttggaatgaacagaaataagtaaatattaaatatacagtgataattaatgtataaaaccttatagcatggtattcctacatggaattatgtgtgaaggaagtatgtcatatagtaggcactcatcaaataattttatttcaagtgtatacatttattaagaagtattgcttgagtatctcctacac

SEQ ID NO: 874640 - DNA, 613 bp, Homo sapiens
gaaatattaaagaagtaaaataaaataccaatcataatgatgagataacttttatatactccttattatgagtaaggattagacactatagcacatttttttgtgtttgtttctattgtggtgaaataatacataaaacttaccattttaactatttttaaatgtacatgtcagtggcatttagtacattaatgatgtgctaccatcccacagtatccatttccagaacttttttatcatcccaaacagaaactctgtgcccattaaacaatawctccccattttccctcccgtcaggccttctgctttctgtctctatgaatttgcctgttttatatttatcatataagcagaacgatacaatatttgtccttttgtatctagcttatttcacttagcataatacttttttttttttttttttttttttgagatggagtctctctctgtcacccaggctggagtacagtggtatgatcttggctcactgcaagctccacttcccgggttcatgccattctcctgcctcagcctcctgagtagctgggactacaggcacccgccaccaggcctggctaattttttgtatttttctggtagagatggggtttca

SEQ ID NO: 874641 - DNA, 632 bp, Homo sapiens
tctaaggtgtcttgagagttaataattttttctttctcttgaggaagtcaaatttgcttctaaactgtctcttattgtttattatttttatctagaattttaagccatctttaaaatacataagttttgctaatttatattttaagatcacttaaatttaccaaccatatttaccaaggtgtttttttagactaatagactttggtttttaaagaagtttcaggtttacagaaaaattgggcagcaggcagagtttccatatatactatccttttctcttgtagttttctctattattaacatcgtgcattcgcggtgcatttgttaccaatgatgaactagtaccgatatattattatcmacagaggctcatagcttgcgttagctttgtgaagttctatgggtctggataaatgcataatgttttgaatccaccgtcgactactatacagaagagttttaccacccgaaaaatcccctgttttcccttcttttcttctattttagtccctggaaaccacttacctttatgctgtctctatagttttccctttttcagtaggacttacagttggaggcatgtaatattagctttttcagattggctcctttcatttagaaatagaaattta

SEQ ID NO: 874642 - DNA, 578 bp, Homo sapiens
gttttgactgtaaaattattgagtaaatggattaacaggacaatgtactctaaagtttagaatagtaatactaggtgaaattgactaaatgtataaaagagaaaaataagatgaatgaaagcaatattactttagaagcagctggttaaattatggaactgacttgtacaaagtgtcatcttttcatttttcttctctttggttttcttttcccttgaggctgaacagtatcagcaaatctaacatgattttggagtataaggactagcctttgcatgacccagtccaaatatactagagaagtatttttgtggactcatagtaaaatggtactttattcccacttcaatactcttctctaaattacagawcccttgatacctggaaaactgaaagagtcaaatgtctggtcagactttggacttctttttctggtccctggccataacaagccacaggcttactcctaatactacagaaaaaaaatattcatttgaaatattttgattatttctttatataaaatcaaattttacctttttatacacactgagggtattctggggacatgcgtaact

SEQ ID NO: 874643 - DNA, 772 bp, Homo sapiens
aatgtaacactaaaaccataaaaaccctagaagaaaacttaggcaataccattcaggacataggatgggcaaagctttcatgactaaaacaccaaaagcaattgcaagaaaagccaaaattgacaaatgggacctaattaaactaaagagcttctgcacagcaaaagaaactatcatcagagtgaacaggcaacctacagaatgggagaaaatttttgcaatctatccatatgaaaaaggtctagtatccagagtttacaaggaaattaaacaaatttacaaaaacaaaataaaaacaaaaacaaaaacaaaccccatcaaaaagtgggcaaaggatatgaacagacactyctcaaaagcagacatttatgaggccaacaaatatatgaaaaaaagctcatcatcactggtcattagagaaatgctaatcaaaaccacaatgagataacatctgacaccagttagaatgcaatcattaaaaagtgaagaaacaacagatgctggagaggatgtggagaaataggaatgcttttacactgttggtgggagtgaaaattagttcaacccttgtggaagacagtatggtgattcctcaaggatctagaactagaaataccatttgacccagcaatcccattactggattctgcacatgtatcccagaacttaaggtataataaattttttaaaaaagaaaatattggttccagtgtttttctcaacctatcatggcttataggcctcaagagaattcagttcaccctatatattt

SEQ ID NO: 874644 - DNA, 632 bp, Homo sapiens
caatgttatgaagatttaaccttatgttttcttctaatagttttacagcttcaggtgttatgtttagctctttatccatttggagttgatttttgtatagataagggtccagtttcattcttctgtatgtagatattcagttttcctagcaccatttattgaaaagactatcctttccccattatgtagtttggcacccttgctaaaaattagttggctgtgtatgcatgggtttatttctgggtattctattctgttccattgttttatatgcytttctttatctaagtattgttttgttttgactagtgcagctttgtaatgtgttttgaactcagcaagtgtgagggctccagctttgttcatcttgctcaagattgttttaggtattcagggtccattgtggtttcatatgaattttaggatggttatatttatttctgcaaaaatgccctttggatttgatagggatagcattgaatcaagagattgctttgggtaatgctgttgtcttaatgttggtgcccccccaccaaatttatatgttaggacttaatacctgatatagtttggctgcgtccccacccaaatcttatcttgaattcccacgtgttgcaggagggacctggtgg

SEQ ID NO: 874645 - DNA, 632 bp, Homo sapiens
caatgttatgaagatttaaccttatgttttcttctaatagttttacagcttcaggtgttatgtttagctctttatccatttggagttgatttttgtatagataagggtccagtttcattcttctgtatgtagatattcagttttcctagcaccatttattgaaaagactatcctttccccattatgtagtttggcacccttgctaaaaattagttggctgtgtatgcatgggtttatttctgggtattctattctgttccattgttttatatgcttttctttatctaagtattgttttgttttgactagtgcagctttgtaatgtgttttgaactcagcaagtgtgagggctccagctttgttcatcttgctcaagattgttttaggtattcagggtccattgtggtttcatatgaattttaggatggttatatttatttctgcaaaaatgccctttggatttgatagggatagcattsaatcaagagattgctttgggtaatgctgttgtcttaatgttggtgcccccccaccaaatttatatgttaggacttaatacctgatatagtttggctgcgtccccacccaaatcttatcttgaattcccacgtgttgcaggagggacctggtgg

SEQ ID NO: 874646 - DNA, 629 bp, Homo sapiens
taaaaacggaaggccacttggggatagctcaagagagaattgctccatatttgaactagaccaatggcagtggaaatacagtgaattcagggcttctgtgcctttcaccacacattcattgaagaaatatgtatagaatatatattgtaggccaatattctctaatcgagggatataaaataaattttaaaaacatacaaaacattcttcttcatgaagtttacattttagaagaatgagcaggctagattttaaattcattcaccactttcatgtatttcttataacaaatcttggaggtggatatactggctctcactttatagatgagattaattaccatatgttccaaacccacataatagctataataataaagtgatatagcatggttatatctatattatatgtttatgtatagttacatatcacttaacgacagccatacatcccaaaatgcactgttggtgattttgttgtgtgaacrtcagggtgtacttacacacacctagaggatatagcctattatatatacttcttgctgtatgggatagcctatatctcctaggctacaaaccttgttactgtactgaatattataggcaattgaaacacaatggtatttgtgt

SEQ ID NO: 874647 - DNA, 600 bp, Homo sapiens
gcccaagagttccaggttagagtgagctatgatcatgtcactgcactctagcctgggcaacatagcaagaccctgtctctaaaacaaagcaaaaatttttctttaataatcaaccttagcttactgtaacttttttgctttataaactttttaatgtttttaacttttttattcatttgtaatactatttagcttgaatacaaacacattgtatagctataaaacaatattttccttctttatatctttataagcttttttctatttttaaaattttgcattttgtatttttacttttyaaactttgttgttaaaaactaagatacacacattagcctaggtgtatgcagggtcaggatcatcagtattttactgtcttccacctctacaacttgtcccactggaagatccttaggggcagttacatacatggagctgccatctcctgcaataacaatgtcctcttctggaataccccctaaaccacttgcctgaggctgttttagagttaacatctttcataataagtaaaagaagtatactctaaaacaatgacaaaaagtacatacataaaccagtaacagtcatttgtaatcatca

SEQ ID NO: 874648 - DNA, 484 bp, Homo sapiens
gaccttacctatcaataattactttattttttttattatactttaagttctagggtatgtgtccacaacgtgcaggtttgttagatatgtatacatgtgccatgttggtttgctgcacccattaactcgtcattgacattaggtatttctcctaacgctatccctcccctagctccccaccccacgacaggtcccagtgggtgatgttmccctccctgtgtccaagtgttctcattgttcaattcccacctatgagtgagaacatgcagtgtatggttttctgtctctgcgatagtttgctcagaatgatggtttccagcttcatccatgtccctacaaaggacatgaactcatccttttttatggttgcatagtctgcacagcaaaagaaactaccatcagagtgaacgggaaacctacagaatgggagaaaatttttgcaagctactcatctgacaaagggctaatatccagaatctacaaa

SEQ ID NO: 874649 - DNA, 345 bp, Homo sapiens
actgaataactgattgcccttgtgtaagtttctctcagagtcatggttttcttactttgaactaggatatttatacctatcacacagaattagagcaaaaattagatgacagatgtataagtcatcagaaaatatcaaaataaaatatgaattgccattagtactcttgtagttgggcagggtmctgccatcaacactatctaacacatgagaatcctgaggccagagtggtcatatggtatgcccaaagttaacaagtgttaaatattaaatagatcattgaaaaaaaaaccctatatcctcatatatcaggtatggtttatgcaaaatagacctgaagcaaaa

SEQ ID NO: 874650 - DNA, 632 bp, Homo sapiens
gtcagagagacccaaaacaaaatcctgacttctctagcaaaagatatatatgtaaagcttatcactggtctggggtgctgctcagtgaatatcagggccaaggctaaatcctgctctgtagactactactaagactagttcaatagtcttagcagaccatgctgcctgtaattaaaatctgaaaaytctaagaattggaccagaaaatttatgggagacagtattggttaagttcttttgctcaaatcagattgtctgtatttgaatcctggcctcatcatttacaatcaagtaatgttggacctctcatatagtatatatgtgcctcagtttgctgaactataactccatctattcatctatctatctatctatctatctatctatctatctacttgcctatctatctcttgtcagctaaagggcttgagaaaatgatgacccaagagtaaatacttcatatacataaagttaaatatattgtaccacatatggcaataacaaagatgtcctcaaatcatctatctttctagggtcagcttgttccattatatctgaattacttataaaatatataaaatatcttgaggaccttacctttactgatagaaaatagtgaatagcccttatgg

SEQ ID NO: 874651 - DNA, 632 bp, Homo sapiens
gtcagagagacccaaaacaaaatcctgacttctctagcaaaagatatatatgtaaagcttatcactggtctggggtgctgctcagtgaatatcagggccaaggctaaatcctgctctgtagactactactaagactagttcaatagtcttagcagaccatgctgcctgtaattaaaatctgaaaactctaagaattggaccagaaaatttatgggagacagtattggttaagytcttttgctcaaatcagattgtctgtatttgaatcctggcctcatcatttacaatcaagtaatgttggacctctcatatagtatatatgtgcctcagtttgctgaactataactccatctattcatctatctatctatctatctatctatctatctatctacttgcctatctatctcttgtcagctaaagggcttgagaaaatgatgacccaagagtaaatacttcatatacataaagttaaatatattgtaccacatatggcaataacaaagatgtcctcaaatcatctatctttctagggtcagcttgttccattatatctgaattacttataaaatatataaaatatcttgaggaccttacctttactgatagaaaatagtgaatagcccttatgg

SEQ ID NO: 874652 - DNA, 437 bp, Homo sapiens
ttttttctaggccactgaaacagtctctgaattattttctccacatcaattcttgtcttcctttaattcatttcctacactaaagtccaagtgacatttttaaaacacaaaaattgaccatgttactcttctcatttaaagacttcaaagataggtattcattgcacttaagacaaagaacaaattctttaaactactcataatcccatcagatctagtccctgcctacttcagctgttaattatacaccattctctctatctmcattttaggactctgtccatactggccatgtggcttttccagcttttcatgccatttgttctatctggagagcttcctgacacattactcagcctttaattaattgctactcaacttttatgtagaactcaactcaaattcacttccaaagggtaatattttttcatgctcct

SEQ ID NO: 874653 - DNA, 595 bp, Homo sapiens
cttctaaaaaaataacttttttggcaggtactgctcttagcactggggatacagtgagaaatcagacagaggtttctgcttgtaagaagctatcattgtatagataagtaaataagcaattcatgaagataatttcctatcttcaagtactattaccaaagaataaaatagataagcagataaagcaatgcagagtaacaggatggagygtcctattttaagtggagttgtaaggaaacatctctttgaataactgaattaggaacgcaaagtgagttaagcgagggagcccaccatgtaaagacctggatgatgagtgatgaacgttacaggcaatgttaagaaaatgtgcaaaaagcttgagtcaggaaagaatgtaatgtattaatgaaacaaaaaggaggcagtatggataaaacagagttgttaaagggaaaagcctttcaagatactatcatagaagtaagtaccctagagctatttgtataggaatcttgcatttaattttattctgagtgtatatcattgcaagaatttaagcagtgaaatgacattgttatatttacatgtttttattgatacataaaatttgttc

SEQ ID NO: 874654 - DNA, 648 bp, Homo sapiens
ttctagttctggattcttgaggaatttccacactgtcttccacaatggttgacctagtttacagtcccaccaacagtgtaaaagcattcctgtttctccaaatcctctccagcacctgttgtttcctgactttttaatgatcaccattctaacaggtgtgagatggtatctcactgtggttttgatttgcatttctctgatagccagtgatgatgagcattttttcatatgtcttttggctgcataaatgtcttcttttcagaattgtctattcatatcctttgcccactttttgatggggttgtttgattttttcttgtaaatttgtgtaagttctttgtagattctggatattagccttttgtcagatgagtagattgcaaaaattttctcccaattggtaggttgcctgttcactctgatggtagtttcttttgctgtgcwgaagctctttagtttaattagatcccatttgtcaattttggcttttgttgccattgcttttggtgttttagacatgaagtccttgcccatgcctatgtcctgaatggtattgcctaagttttcttctcaggtttttatggttttgggtctgacgtttaagtctttaatccatcttgaattaatttttgtataaggtgtaaggaa

SEQ ID NO: 874655 - DNA, 614 bp, Homo sapiens
atcaaatgggattaaaaaagtccaaaggtcagcaacttcaaaaattgaaggtaaataagcccacaaagatgagaaagaatcagcacaagaatgctgaaaactcaaaaatccacagtgccttctttcctccaatgactacatcacctccagcaagggtttggaaaaagacttagatggctgaaatgacagaaatagaattcagaatatggatagaaatgaaaatcattgagccacaggagttcattaaaatccaatgcaaggaagctaaaaatcatgatacaacaatgcaggagctgacagacaaaataaccaggatggagactacactgtatctgacctgatagagctgaaaaacacactacaagaatttcacaatgcaatcrcaaatgttaatagcagaataaaccaacaagtaaaagaatctcagagcttgaaaactggctttctgaaataagacagacaggcaagaatagagaaaaaagaatgaaaaaggaatgaacaaaacctccaataaatatgagattatgtaacaagaccaaatctacaactcaggggtgtccctgaaggacatgaggggaacaaaaccaacatgaaagacatatttcagaatatca

SEQ ID NO: 874656 - DNA, 582 bp, Homo sapiens; identical to SEQ ID NO: 867424

SEQ ID NO: 874657 - DNA, 665 bp, Homo sapiens
actcactacatgctgtagaatgactcaatgaatgaagtaccgcaaacatctgaattttaaataaggggcctagttccctacttcttctagcttctgtgtgcttgccatttttttccttttaacaataattttttaaaaatagtaaaaaataactgtgtcttttcttgcacctcttggaaatcacacaaaagctattagaagaatgagggataatgcaaatgtgtttgaaactgtgataacatgaaaagacaatctacaagaggaagggctgcctagtgtgtgaggtctaagggagtccgagaagattccaggaaaggacccctgtgacagcaaatcgtaggcgaggccagcagctttccaaagtagacagcgtgacttgaagggtgtgayccatggtcccttgtttggagaaacagaatgatgggtgcatgggctggaggtggaagctcccttccctggatgttgtatggctgaaggtgaagcagggagggcaaggctgtaaaagaagatatgcaggaactttcagacagcagttactgagaggcgggtggaagagactagctccacaccatcagcccctgtagatcaggaataagtgagccaaaaaaatctaatcatatacaaccctgatcaaagaaagaatttctactagcccagaacatggc

SEQ ID NO: 874658 - DNA, 665 bp, Homo sapiens
actcactacatgctgtagaatgactcaatgaatgaagtaccgcaaacatctgaattttaaataaggggcctagttccctacttcttctagcttctgtgtgcttgccatttttttccttttaacaataattttttaaaaatagtaaaaaataactgtgtcttttcttgcacctcttggaaatcacacaaaagctattagaagaatgagggataatgcaaatgtgtttgaaactgtgataacatgaaaagacaatctacaagaggaagggctgcctagtgtgtgaggtctaagggagtccgagaagattccaggaaaggacccctgtgacagcaaatcgtaggcgaggccagcagctttccaaagtagacagcgtgacttgaagggtgtgacccatggtcccttgtttggagaaacagaatgatgggtgcatgggctggaggtggaagctcccttccctggatgttgtatggctgaaggtgaagcagggaggrcaaggctgtaaaagaagatatgcaggaactttcagacagcagttactgagaggcgggtggaagagactagctccacaccatcagcccctgtagatcaggaataagtgagccaaaaaaatctaatcatatacaaccctgatcaaagaaagaatttctactagcccagaacatggc

SEQ ID NO: 874659 - DNA, 660 bp, Homo sapiens
cacagtttccatgtgattttattttaaactttcaattttttaataaaaattgtatatatttcttttgtaaaacatgatgttttgatatgcgtatgtattgtagaatggttaaatcaagccaactaacaaatgtattacctcacttattttattgtacagacagcacttaaaatctactctcttaacaattttcaagtgtacaatacattgttattaactatagttactaggatgcaaaattaatctcttgaacttgcttcttttgtgtaactgaaattttgggctgcaccactttrccttccaaccaacagcgcactagtgtttcaatttctccacatgctcaccaacacttgctattttttaggttttttgtctagtagccatcctaatgaacgtgaggtggtttattattttagttttcattttcatttccccaatgattagtgatgttcaccatctttttgtgtgtttattatttgtatattttctttgaaaacatatcgattcaagttctttacacacttttcaatcagatcatttgttttcttgtaggatttcagaaggtctttatatattctgcataacaatgcctgtttatagtgggaaaaagttatgttgagaaagtagataatcactttcaggtggctctctgattaatat

SEQ ID NO: 874660 - DNA, 660 bp, Homo sapiens
cacagtttccatgtgattttattttaaactttcaattttttaataaaaattgtatatatttcttttgtaaaacatgatgttttgatatgcgtatgtattgtagaatggttaaatcaagccaactaacaaatgtattacctcacttattttattgtacagacagcacttaaaatctactctcttaacaattttcaagtgtacaatacattgttattaactatagttactaggatgcaaaattaatctcttgaacttgcttcttttgtgtaactgaaattttgggctgcaccactttgccttccaaccaacagcgcactagtgtttcaatttctccacatgctcaccaacacttgctattttttargttttttgtctagtagccatcctaatgaacgtgaggtggtttattattttagttttcattttcatttccccaatgattagtgatgttcaccatctttttgtgtgtttattatttgtatattttctttgaaaacatatcgattcaagttctttacacacttttcaatcagatcatttgttttcttgtaggatttcagaaggtctttatatattctgcataacaatgcctgtttatagtgggaaaaagttatgttgagaaagtagataatcactttcaggtggctctctgattaatat

SEQ ID NO: 874661 - DNA, 687 bp, Homo sapiens
agaaaaagtccaggaccagatcaattcacagctgaatcctatcagacattaaaagaaaaattggggctaatcctattgacactattccacaagatagagaaagatagagactccttcctaaattattctatgaagccagcatcaccctaataccaaaaccagggaaggacakatctaaaagagaaaactacagaccaatatacctgatgaacatagatgcaaaaatcttcaataaaatactagcaaacctaatccaacagcatatcaaaaagataatccaccatgatatagtgggtttcatactggggatgcagggatggtttactatatatgtaagtcaataaatgtgacacaccacataaacagaattaaatcaaaaatcacatgatcatctcaatagatgcagaaaaagcatttggcagaatacagcacccctttatgatcaaaaccctcagcaagatccgcatagaagggacatatcttaaggtaataagagccatctacaacaaacccacagccaacgttatactgaattggtaaacgttgaaagcatgtcccctgaaaactggaacaagacaaggatgcccactttcaccacttctattcaacatagcattggaagtcctagccagagcaatcagacaagaggaagaagtaaagggcatccaaatcagtaaagaggaagtc

SEQ ID NO: 874662 - DNA, 650 bp, Homo sapiens
aacctgttcaccaatacagaactggttaaataattatggtaaaaacacaaatgcaataacgtgccaccatttgaaaagagattggtctcaatgcactgatttggaaagataaaactaataacatattctggcaagtgaaaaaggcaaggtacaaaagagcatgcatataatcattcgacttgtataatcaaaaggatacggaattttaaaagcctgggtaaccatagtaaaatgcccttacaggagcataaaaattttccaaaagaatacattaaaagttatagttaacctctagaaagtggaaataggaggcggagaaagatatgtttttacttttcattttaaactaattacatactgttcaaatgttttattatgtgcatgatttactttgttataataacaaaaatatattttaattaacccagattctgaaagatatgatcacaaaaattaaattatgttttattgccctaatcacttgggttaatttcttttatcttctaartattttgagataaaaataatttatattgtcagaacaaatatacagggaagccaaaaggactataatttaaaagttttgtgaagtgaattctcagttggtacaaaaagtatttcaaaaatcacatttgacaattgattcaagt

SEQ ID NO: 874663 - DNA, 634 bp, Homo sapiens
ttgtggaagatgaatcttgtgaaaggaattttatgtgtgattaagctagataaacttagaaaggaattatttataagtttttctaaaaatggagtattaacaccaaaagtacactgatatgaaactagaattttgagccttgtgttaaacaacagttttcttggaattttggtctgttcttaaaagaaaccgtgaagggattttctttatctctctttttttttttttttttttttttttgatggaatctcgctttgtcgccaggctggagtgcagtggtgtgatctctcactgcaacctctgcctcctgggttcaaacgattctcctacctcaccctcccgagtagctgagactacaggcatgcaccaccacacccagctaatttttgtatttttagtagagacagggtttcaccatgttggccaggatgatctcaatctcttgactgcatgatccgrctgcctgggcttcccaaagtactggcattacaggcgtgagcaaccatgcccagccttctttatcttttagttaaatggcctaggcgatagaaaacaatgattctgcgttttactaagataacttcttgcacttcagtgtttactaggtttttgttggcttaagaaaactgccttc

SEQ ID NO: 874664 - DNA, 723 bp, Homo sapiens
gagataaggatccagtttcattctcctacatgtggctagccagttatcccagcaccatttgttgaaaagggtgtcctttccccactttatgattttgtttgctttgtcaaatatcagttggcggttaagtatttgggttctctattctgttccattggtctgtgtgcctatttttataccagtaccatgctgttttggtgactatggccttatagtacagtttgaaatcaagtagtgtgatgcctccagatttgttctgtttgattagtcttgctttggctctgcgggctcttttttggttccatgtgaattttagaatttttttttttaattctgtgcagaatgatggtggtattttgatgggaattgcattgaatttgtagattgcttttggcagtatggtcattttcacaatattgattctatccatccatgagcatgagatgtatttccatttatttgtgttgtctrtgatttcttccagcagtgttttgtagttttccttgtagaggtcttttgattccttggttaggtatattcctaagtattttattttattttaatttttgcagctattgtaaaaggggtttagttcttgatttgattctctacttggttcctgttggcgtatagaagagctactgatttgtgtacattaatcttatatctggaaactttgctcaattattttatcagttctaggagctttctggaggagtcttt

SEQ ID NO: 874665 - DNA, 633 bp, Homo sapiens
tgcttgccactatttttactttattcatattcagttataaagctgctcaactttgttgatagaaatattctaaattttaaaccagttaagaaaatataaagttactttgcaaataatgaaatacacattttttggttttaaatttaaggtgtaaaaactgcagtactccatttcatatcaatggtgtgcttaaagaaaactatcaacaactaaccataataccagaagtaatatcagacaataacaccagaaatagaaactaactactttgttcattttttaataccattatctgtctaatttcccagggtgtctattttaggactggatgttaaaactatttcaggtaaaatttcattcagtascaatgcctaaactggaggtcccagactctaatcctgatggtaaaaagcttctctggagcctgttttactgttctggaaaaggagggtattaaaaagagtaaagatggcaataatggctaccttttagttctgagccacagacctctaggctgagtaaaggctcaaaaggagttgactgattagtgatgcccgcatgggtgtataatatgacattattagagtgcaaaccatgaatatgcatgccatccacacactgcaagattctgaa

SEQ ID NO: 874666 - DNA, 604 bp, Homo sapiens
tctccacaaagttagcagaatgatcttcctacggcgcatgtctgtcccagtcattcctcagattaaagcccttccacagctcttgtgctgcccgtgttatgtccagactccctggtatggtgtgtgtagctctttagatcacccgaccactctaagctcaccatctttctccataatccacgactcacctgccattccaacccccaggcccstggcaagtactcagacatgtttacatattcacactgccttgtttttagactcaaatcattcaatcaaatccagcaaaactttcttcctttcttagcactccaggtttctattgatcctctaacgttctcatctatcactaagctctcagtaagaactggccaggtttccttactcagagctgatagtttcctcttctgtgatcccaaggcccctttgtctatacttcagttgtcccacttatcccaaggctgtgtgcccaatcgtacacaggtttaaccaggactgacagttttagcttaggcagctgaatagatggtgagtgtcattgtgcattagtttgttgattgcattctcgtgtgacagctgggtctgcaggagcaaaataatttta

SEQ ID NO: 874667 - DNA, 621 bp, Homo sapiens
tgagatttaggatatttgaaaattaaaatacataaaaacatagcataaaactcaataaaaaataaagtgttctaaagtctttgccttacaaatactaaaaatatggtattaggtagacttcagtatgcaatggatagatgttatcatttttgaagtaataaatacaagaaacgtaaaagaagaaaacggggtcaatagaataataaaaattacttgataattctaaaggaaagcaataaaggatgaaaaagatcagaaaaaaatagacaaatagaaaacaaataatgccactgtagatataaaatcaaacatatcagaaatggcattaaatatcatgtactaaatacttcagcatattaatatgcaaagattatcacactggatartgtaacaaactccaagtatattctttttacaaatgacccattttaaacataaagatgaaaaaaattgtaagtaaaagattttttaaaaagttcatacaaacacaaatacacaaaagcatagctaatctaatatcattagactgtaaaaatgaatcactaaagatattaaagccatttcctaatgatatgttccatcctacctgaaaatataataattctaaacttacctgtactt

SEQ ID NO: 874668 - DNA, 639 bp, Homo sapiens
ctaacacatcaatttgaaatgaactaaactgttactaattctcttgattttaagaaggtttcaattaagactagcctcccctcacattttattacaataatgctattcctaagagttgcaatttccatagctctgtacaaaacatgtttcccataggattacagaataactaacacttctattttgtcacattcctgccacatggaaaagaatagatatcattagattaagactctcagtcagataattgaataaaagacacataaccaagtgaatctcttctaccttcttctctctgccagcaccttgctgtctccttcaacagtgctccagrtgatttgtgcctcagagaatatttcagaggttctggtccagtagaattgcaaaatggtttttgccaggagcattttttctcattcatttgaaaggaaattgcaaccacacatttctgactcatttctgcttaaatcatcaacattttggcttctgggagcagatgaccagctaggctaggttacctttaatgagcctttaaaataccttttccttaaaaaacagaaattacaaagtgctgaccgtctcatttattatgcaaaataagcgtacttcaaatgtgtagtaaaaattttaaattgtatt

SEQ ID NO: 874669 - DNA, 532 bp, Homo sapiens
ggcaacggtgaaggaagaataggatactatcagaaaagaaacatggaaagttcttaaattcttataaaaagcattgaaagtttttaaaaacgagaatacaatatttaatggaaggatagtaccatcactatgaggtcatattaaaagacagcaaacaaagagacgagacaaaaaaattaatgataaaaattgtggaaattatagggctagtgaagcaggtcatacacacagttgaaagacatttcaaaaawtttttttaaaaagagcaaaccaaacggatggaaatttatttttaaaaatacaaaaaaaaattcaagaattgaagaacacgtattccagatacaaagacccactggcttcttcgtactctgagttaaaagactttaaaaagtcttcctccaaacaacaacatccagaaatttcaagaaaaattggcaaattaaaaatattagaactattcagagagcattagtaaaaaggctgtcacattaaaaaaaactgagaaaataaaatggcataattgacttcacaa

SEQ ID NO: 874670 - DNA, 532 bp, Homo sapiens
ggcaacggtgaaggaagaataggatactatcagaaaagaaacatggaaagttcttaaattcttataaaaagcattgaaagtttttaaaaacgagaatacaatatttaatggaaggatagtaccatcactatgaggtcatattaaaagacagcaaacaaagagacgagacaaaaaaattaatgataaaaattgtggaaattatagggctagtgaagcaggtcatacacacagttgaaagacatttcaaaaattttttttaaaaagagcaaaccaaacggatggaaatttattttwaaaaatacaaaaaaaaattcaagaattgaagaacacgtattccagatacaaagacccactggcttcttcgtactctgagttaaaagactttaaaaagtcttcctccaaacaacaacatccagaaatttcaagaaaaattggcaaattaaaaatattagaactattcagagagcattagtaaaaaggctgtcacattaaaaaaaactgagaaaataaaatggcataattgacttcacaa

SEQ ID NO: 874671 - DNA, 623 bp, Homo sapiens
gtccccatgctgagatctttcagaaaggcaaaatatattaagtggcaaggcacttacatatctccctactaagtatcaggaaataattttgttttcatgttaagtgtatatgcctgtctatatctgtgtattgaatgtgtatgttgtgtctgtatgtgtagcaagtgtgtgtatgtaatatgtgtatgtgtgcaaatatacatgcatgcactcattcagcaaatagctacctatttatatatctaacaggtttcagatgtggagatagagaagtgagcatgtgtagacacagtgtttcttgttcrcttaaattggtgttattcttatcataatgaatgaaacaaatcttattttcctctaaatatcttaaagtaggcaagcatagacctttcttgacttagatcaaaacgttggtgccagaaacagaatttaaaggaaaacaacagaatgcaatctaaagttatgagtatcaagtttggctttctcatgatttgggggaagtctgacttttttgtagccttcatatgaaccaccactaatggtataagaaaatgcggtgtctctgagagaaataggacctatacaaagtgacctgaaagacacgggaaaagatgaattctaaa

SEQ ID NO: 874672 - DNA, 640 bp, Homo sapiens
gagcttgctgggtgtggtggctcatgcctgtaatcccagcattttgggaggccgaggcaggtggatcacctgaggtcaggagttcaagaccaacctggccaagatagtgaaaccccgttgctactaaaaatacaaaatattagcctggcgtggtggcgggtgcctgtaatctcagttactcaggaggctgaagcagagaattgcttgaacccaggaagcagaggttgcaatgagccgagattgcaccactgcactccagcctgggcgacagagcgagactcggtctaaaaaaaaaaaaaawagtgagcttgaggttatgttctttatttaacattagaagaatatttgctggttataaagtactacaagttttacaagatatcatcttttctaattgtaaatacaatacttgcttattgtggaaaacttggaaaatcattaactcactaactagaaaaagctgatctgaatagtttgctgaagatccagattataacttgcattatagtattacataatccattttttttgtttagcaatacattatgtacattatccatgttgttggatattttatgcagggttactgttctgctttgcaaagtatgaatatgccataacttacaatctctgattgttg

SEQ ID NO: 874673 - DNA, 603 bp, Homo sapiens
tggaataagatgaccaaataggagtcttcactgattgacttctccacaagagcaaatttaaaaactatcaaaaaaaaaaaagcaccttcataaggaacaaaaaaaataccataggtaccagcttggctataatgaggtagagcaccaagcaggcccttggggtccctgatggaggctttggtttgtggatagcatttctgggcctgccctgagccaaaggagagccaacttatctgaagggaatgtcccaggctgggcagcattcaagctgactgaaaagcccttattcttggagtgaacactggtggtagccaggtgatacttgctgtgggcctgagatggtggtagscatgagaaaagaaaggggaggaagagcagaaataattttgtcttgtggcttgggtgtctgctcagctgcagtggagtagggaaagaggtagattttgaagacttctgacttcagacccaggtttctggctggtatctctggacctgtctgtggccaaaatgaactcatggccctaaaaggaagtatacaagctaggctggctttgccacctgctgactgcagagcccaagggccttgagaaaacacaggtagta

SEQ ID NO: 874674 - DNA, 610 bp, Homo sapiens
catatcttttatagaaaaattaaaagatgaactgatcaaaaataataactataacaacttttcaagacatagatggtacaatcagatataaatagggacaacatgtgccatggtggcttgctgccagaacttaaagtaaaataaaaaaatagagaaaacaaaaatgtaaaagtgggagataaagttaatgtgtagagcttttattagttttctttttccatatttatttgtttatgcaatcaacgttaagctctcatcagtttaaaatattggtttatattatttgcaagcctcayagtaacctcaaatcaaaaaatatataatgaatacacaagaaataaaaagcaagaaattaaaacataccaccagaaaaatcaattcattaaaaggaggacagtaaggaaggaacaaaggaggataagatgacagaacaagcaggaaacaaatcacaaaatggcaggagtaagtattttcttattaataacaactttgaatgaagctgtactaaactctgcaatccgaagtcatacagtgtctccatgaatgaaaaaaatgaggcccagtgatttgttgcctgtaagaaacacttcacctataaagacccatacag

SEQ ID NO: 874675 - DNA, 580 bp, Homo sapiens
aaattattaaaaaataacaccttggccagatatggtggctcatgtgtgtaatctcagcactttgggaggccaaggtgggagaattgcttgagcctagttgagtccaggagttcaagactagcctgggcaacataatgagaccttatagtttcagctacttggaacgctgaggtgagaggattgcttgagcctaggatactgagacagcagtgagccatgattgtgcctctgcactctggcttgggctaaagagcagtaccctatttctaataataataataataaccatgtttataaagaacctcacatcagtaaaaataataataataaatgaaataatgcattttatcaaaggggaagaaactgagtacccaaattakaagagttattgaagatccccaatagatgtttatggaacaactgatttctcatttcatttcgtttcatttctttattgtagaggataggcatgttggtgtgcgtatgggaggcaggtggtaacttactaagttgtaagatatagaattcaagttgatatctttttattaggatgaataaatatacacagaaaagaattaca

SEQ ID NO: 874676 - DNA, 617 bp, Homo sapiens
aaaagattaacctttcccaaagaaatcctgccagcccactacctctggacttgaattacagcatcagttcttttccgggtctctagtttgcaggactactttctctctctctgtctgtatatgtgtgtgtgtgtgtgtgtgtgtctgtgtgtgtatagctgacccttgcacaacacaggtttcaacttcacaggtccacttatacgtggatttcttcaataaaagtaacaccaagtgtgcctgcttctcctaagccctcctccgcytccttcacttcttctacctctgccactcctgagacagcaagacagcctactcaatgtgaagaaacaggaataaagatctttatgatgatccacttccacttaatgaatagtaaatatattttctcttcattatgattttcttaataacattttcttttctctaattttgttgaatgaatacagtacataatacatacaacatacaaaatgcatgctaatcaaatgttaatggtactggtaaggattcctttcaacagcaggcaattagtacataagttgtggtgagtcaaaaattagatgtggattttcaactgtgaggttggcatttctaacactcacgtagttcaaggg

SEQ ID NO: 874677 - DNA, 617 bp, Homo sapiens
aaaagattaacctttcccaaagaaatcctgccagcccactacctctggacttgaattacagcatcagttcttttccgggtctctagtttgcaggactactttctctctctctgtctgtatatgtgtgtgtgtgtgtgtgtgtgtctgtgtgtgtatagctgacccttgcacaacacaggtttcaacttcacaggtccacttatacgtggatttcttcaataaaagtaacaccaagtgtgcctgcttctcctaagccctcctccgcctcyttcacttcttctacctctgccactcctgagacagcaagacagcctactcaatgtgaagaaacaggaataaagatctttatgatgatccacttccacttaatgaatagtaaatatattttctcttcattatgattttcttaataacattttcttttctctaattttgttgaatgaatacagtacataatacatacaacatacaaaatgcatgctaatcaaatgttaatggtactggtaaggattcctttcaacagcaggcaattagtacataagttgtggtgagtcaaaaattagatgtggattttcaactgtgaggttggcatttctaacactcacgtagttcaaggg

SEQ ID NO: 874678 - DNA, 576 bp, Homo sapiens
aatgtcaatgatctaaatccaccaattaaaagactgagtttgttaaaggattaaaaagaagaaacaaactatatgtagtctctaagagatctacttatagatgtatagattaaaagtaattagatggaggaagatatatcatgctgccactgataaaaaaataagtcaagttcttttcaagatggctgaccagggacatcaaattacagttctcctcagaaagaagatcaaagttactggtgaayaaagaagtaccaaataaaaaactgagaaagagagccaggaactgttatagtgcccataagaagcagctgtggtgtagtaaagaaaagcggtaaaagcctggtaataatcaacccccagagaaccctgtgaaaatttagctgaaagtgcttctctgctcccctcacatctctgataatctgctgaccaccaaattgttaggaatttcctctgccctcttgatgcagggtaatgctattggtggcaatttgggaactccccagggatagacaactaggtggccagcctgcacaggtacagctgcaccacctttctatctaaaggaaagatgtg

SEQ ID NO: 874679 - DNA, 601 bp, Homo sapiens
aaaaccatccctgatttgtaagtattataagtgagttgtggcctttcttcaacagaaatggagtatatacattcacacaagcgttgcatttttgaggatgagaaattcaatgtcatccagtgtaaacttctgtatagtcatgatctactatatatcattaataagtggatcaataaacaacttaagtggcattaaactaagtaccttargaagcaatttcctccacttttgaaaagttctcattgtttacacactgtttttgtaatgaactgaaatcatcttttcattctaatcagttttagttctattcaagagcatatggaataaattcaatattttttctgactatatattcttattttatccattcctaatagatacatacttaagatcctctttcttagggtcacacctacaaaaactgttcataatagagattatgtctacaattgtcctatttttacaacttcattatcctctctgttctgtttggatcacagtcaaccccgctccttataggtttagacaatctactattttttaaagatttgatttggtacagtagaaacatcatatacaaaatgaaaattattggtatagt

SEQ ID NO: 874680 - DNA, 651 bp, Homo sapiens
ataccagacctttggaggctacggaaaataaagaaggcagcttgaactagtatgtaagcattcccatagctcctggcccatagcttagggcagaatgaccaagttaaaaaaaattagaaacaaaaacttaactccagcttctctatggggagggaaatatttcgaccacaaacctaacatttcatcttttctgtgtccaactccagcagctggtcattgtcttgcctatcttggggctaggcatatgcttgcttccaatgggctacaaagagcacaaaaatggtggcttaaattagcacatgagcacttgctacagctcctccctgctcccagatctatgcagagtgaggaggtaaaaaagaaaagaaaaacaaacaaacaaacaaaaaacaaagaaaacacctcagttttcaaattctccttgggaaggaaaaaattggatagcatgtgaaatattcaaaattttctgggagttgaccaagtgacgggcttctctgtccactgtctaaaagtgcwcatgagaccctacatactctagattctgaaagttcctaacaaaaagatagcagtttaaaaaagaatcaaaatttgagaggcccacagacgctctgctggggttgaatgaagaaagttttctcctatacaatacca

SEQ ID NO: 874681 - DNA, 594 bp, Homo sapiens
catgaatgtaccaaggtcgctttacctattctcatattgaaggacaccttggttgcttctaacttatggcaattatcaataaggctgctataaacacctctttgtaggctgttgtgtagacatgctttccacttgatacttatttcagtaaataccaaggactacaaatgcttgattgtatggtaagcctatctttaaatttgtaagaaactattagaatattttccaaagtggctgcactattttgcattctcactggcagtaaataagagttcttgtcgctccacattcttgccagtatttggtatatttttgtgtttggaattttagtccttttaacaagtatayagtgacatagcttattgtttaatttacaattccctaatgacgggatgtggagcatttttccacatgctcatttgttgtctctatatcttcttcagtgaggcatctgttcagatatcatcctcattttatcattgggttatttttctaattattgagttttagatgttctttgcatacttttgaatatcagttctttattggatatatcatttcaatgtcttctggtctctgatgagaaatcagttg

SEQ ID NO: 874682 - DNA, 659 bp, Homo sapiens
tgccattctaaattatgtggtttactaagaaaatacttaacattatatgaataatgtataattaattataagtagtttttaaatcttcaagatttatctcatgagtgaaatggttgctttgttcttaaggagaaaattaatttatttcccacgtatccatgtacaataagtagtgctgttataaacatataagaaaatgagctatcatgataagtatacagcatagagttaagtttattagaataccctcatattctataatatacaaaattactaacgtgcagtgaaatcatatagaattctgaagtagtgaattgtttccttactgtttaacacattcttgcagtttgtctttttaaaattaaaatcaggaattctgggcagttagttgtttttgaagacaatgtcatttatctttgctttaagaaggaaacagtctacatttaacraacaattcattttctacatattaattgagcagtgaaaatatggttggcaggtctgaagaacagggaaaaagacagtgtagttagagtgtagttggagggtggcatacaaggagaaaagggataggaagtaagaagttactgaggtccagataatgtagggcctttaaaacacagtaaagatttgcatttcattctatgtatgataagagg

SEQ ID NO: 874683 - DNA, 584 bp, Homo sapiens
aatactgtcaaaatcaatggatctttcagatgtactattttgtaaacaaatgcctggatatccactcttcccaattttttttttggaattcctactgcccactctccatgtgcacttacagaaaaaacagatatcttttctcactgaaggctatgttagtcactatggtttattaaatatagcctggactcaatcccccattccccctcccaaaaaaaccttctgtaataagtcataatatagttatttaattatttaatagtcttacttttattatattgactattcttacaagttagatggtcattttcatggattttatcacattgttgctgaccaacagccttgtgctaaatgcgttgtaaacctcaggatgctttatcctgtctatctgtgccttgcattactgtacacactaaatccttcagggactattcgggtatayactgtgaaactgggaaggtgttaggagaggaacatcttcttatttctgcagtttcttggaaaaattagctagatggtttgtgaggctgttcttcctactgtgtcattttgtgccataaaaagccttctggtgttttgag

SEQ ID NO: 874684 - DNA, 602 bp, Homo sapiens
aaaccctcttctccccaactctacacatatttttttctgtgctctcccatttcccatctaaatgtaagtttcttatgaagagcagtttagctaactcctttggttcatttttttttctttcagtcaacgttttcagagccttactttccactcccatgtatcttatcaacatattgtcctaaacagaagcagttctttttctaaaggagctctattttcacctattaaaataatgcatttttcaattgcctgaaacaccaaatgtcacaattgttattacctagttttgtcttgttcatgtgagagttggtaagtgaaaactttcagaccacacaaaattgaagtgtacaaactctgggcatgcctagattagctacaatttaggtataaktaggatattgttagctatagtttaggtataattaggatattggttaataatctattattatatcttaatcattccctcaggttttacaaatgattttaaaatgatgacagaaaattacacctgcaaatctccttaaattttaactctgtttaggccgggcgcggtggctcacgcctgtaatcccagcactttgggaggccgaggccggcgg

SEQ ID NO: 874685 - DNA, 604 bp, Homo sapiens
tcagtgagggctatagcctattgggctatatttttattaagctccattggtgatttttatgtgcagcaaagttctcatcaggtatcactgatttaaatggtcacttacatgtcataagcttttcaccaggttgtaaaagacaattcaaaagacacttctcaaaagaagacatttatgcagccaaaagacacatgaaaaaaatgctcatcatcactggccatcagrgaaatgcaaatcaaaaccacaatgagataccatctcacaccagttagaatggctatcattaaaaagtcaggaaacaacaggtgctggagaggatgtggagaaataggaacacttttacactgttggtgggactgtaaactagttcaaccattgtggaagtcagtgcggtgattcctcagggatctggaactagaaataccatttgacccagccatcccattactgggtatatacccaaagaactataaatcatgctgctataaagacacatgcatacgtatgtttattgtggcactattcacaatagcaaagacttggaaccaacccaaatgtccaacaatgatagactggattaagaaaatgtggcacatatacacca

SEQ ID NO: 874686 - DNA, 608 bp, Homo sapiens
tcagtgagggctatagcctattgggctatatttttattaagctccattggtgatttttatgtgcagcaaagttctcatcaggtatcactgatttaaatggtcacttacatgtcataagcttttcaccaggttgtaaaagacaattcaaaagacacttctcaaaagaagacatttatgcagccaaaagacacatgaaaaaaatgctcatcatcactggccatcagrgaaatgcaaatcaaaaccacaatgagataccatctcacaccagttagaatggctatcattaaaaagtcaggaaacaacaggtgctggagaggatgtggagaaataggaacacttttacactgttggtgggactgtaaactagttcaaccattgtggaagtcagtgcggtgattcctcagggatctggaactagaaataccatttgacccagccatcccattactgggtatatacccaaagaactataaatcatgctgctataaagacacatgcatacgtatgtttattgtggcactattcacaatagcaaagacttggaaccaacccaaatgtccaacaatgatagactggattaagaaaatgtggcacatatacaccatgga

SEQ ID NO: 874687 - DNA, 615 bp, Homo sapiens
atgcccccataggcaaatccaagacaatagtccatcacgtgggtgatcaggacagacatgtgtgacaatgcccccagtaagcaaagcctagagaagggacacatcacctgggtgatcagtgcagagatatttcacaatgmccctgctggcagagcgtaaacaagagttacatcacgtagatcatcagtgcagagatatgtcacaaggccccctatacgcagagcctggacaagtgttacatcacctcagtgatcaatgcagtgatatgtcactataccccgtaggcagagcatagtcaagcgttacatcacctgggtgatcagtgcagagatatgtcacaaagcccccatacacagagcctagaaaagagtcccaacacctgggtcatcagtgcagaaatatgtcacaatgcccccataggcagatccaacacaagagttacatcacctgggtgatcagtgtagagatatgtcacaatggccccataggcagaaccttgacaaaagtcccatcacctgggtgatcagtgcagagatatgtcacaaagcccctgtaggcagagcctagagaagagttacataactttgttgatcagttcagagatatgtcatggtg

SEQ ID NO: 874688 - DNA, 614 bp, Homo sapiens
atgcccccataggcaaatccaagacaatagtccatcacgtgggtgatcaggacagacatgtgtgacaatgcccccagtaagcaaagcctagagaagggacacatcacctgggtgatcagtgcagagatatttcacaatgcccctgctggcagagcgtaaacaagagttacatcacgtagatcatcagtgcagagatatgtcacaaggccccctatacgcagagcctggacaagtgttacatcacctcrgtgatcaatgcagtgatatgtcactataccccgtaggcagagcatagtcaagcgttacatcacctgggtgatcagtgcagagatatgtcacaaagcccccatacacagagcctagaaaagagtcccaacacctgggtcatcagtgcagaaatatgtcacaatgcccccataggcagatccaacacaagagttacatcacctgggtgatcagtgtagagatatgtcacaatggccccataggcagaaccttgacaaaagtcccatcacctgggtgatcagtgcagagatatgtcacaaagcccctgtaggcagagcctagagaagagttacataactttgttgatcagttcagagatatgtcatggt

SEQ ID NO: 874689 - DNA, 614 bp, Homo sapiens
atgcccccataggcaaatccaagacaatagtccatcacgtgggtgatcaggacagacatgtgtgacaatgcccccagtaagcaaagcctagagaagggacacatcacctgggtgatcagtgcagagatatttcacaatgcccctgctggcagagcgtaaacaagagttacatcacgtagatcatcagtgcagagatatgtcacaaggccccctatacgcagagcctggacaagtgttacatcacctcagtgatcaatgcagtgatatgtcactataccccgtaggcagagcatagtcaagcgttacatcacctgggtgatcagtgcagagatatgtcacaaagcccccatacacagagcctagaaaagagtcccaacacctgggtcatcagtgcagaaatatgtcacaatgcccccataggcagatccaacacaagagttacmtcacctgggtgatcagtgtagagatatgtcacaatggccccataggcagaaccttgacaaaagtcccatcacctgggtgatcagtgcagagatatgtcacaaagcccctgtaggcagagcctagagaagagttacataactttgttgatcagttcagagatatgtcatggt

SEQ ID NO: 874690 - DNA, 638 bp, Homo sapiens
aggtgatccaactcttgcctggtctctgcctactggggacattgtgacatatctctgcactgatctcccaggtgctgtaactttagtctaggctctggatacacggcattgtgacatatcactgcactgagcacccaggtgatataactcttgtctaggctstgcctacaggaggcttatgacatatctctgcactgatcatccagttgatataactcttctctagcatctgcctacagggtgctttgtcacatatccctgcaatgatcaccctggggatataccaattgtccacgctctgcctacaggggcattgcgatgtatctctgcactgatcacctaggtcatgtaactcttgtttaggttctgcctacagtggcattgtgacatatctctggactgatcacccaggtgatgtaactcttttctaggatctgcctacaggtggctttgtgacatatccctgcaatgatcacccgggtgatgtaccacttgtcaaggctctgcctacagggacattgcaatgtatctctgcactgatcacctaggtcatgtaacccttgtctaggctctgcctgcagtggcattgtgacatatctctgcactgatcatccaagtgatgtaacacttgtctagga

SEQ ID NO: 874691 - DNA, 617 bp, Homo sapiens
agtctgaggaccactccctccaggcctcccttcttgctcaaatgtggctgaatggatttcaacactgactccttgtcaccagtcactccctccaatgtagaagcagaccagaccaaatcaagacaggtccatccttacactgagggaaaatcaaaacctaactgcaggatggttgatcagagaaagatcttgatcaaaagaggaatgtgaaagttaccagaaccaaaatggagtcacttgtgttgaaaactctgacaaataatacaggaaaaggccatgaaaggagggttcctaagcakgaaaacaatcacgatagactctgtgaacgatgcgagcctgcacaaaggcccactgcagcttacacaaaaggcacatctgcacagcaagtgcctgttcaaccctggactggccccctctttttattgatcccagtagccaaagagaattctctcaaaacaatgatataatccttctcatttttcctttaataactttgtcttccttcatccttcggaatacacacatagtttactatggcatgctattcccattgcagtgccctatccccgaataaatatcatttgcttttagagggcctctcactgtgtgctttttag

SEQ ID NO: 874692 - DNA, 617 bp, Homo sapiens
agtctgaggaccactccctccaggcctcccttcttgctcaaatgtggctgaatggatttcaacactgactccttgtcaccagtcactccctccaatgtagaagcagaccagaccaaatcaagacaggtccatccttacactgagggaaaatcaaaacctaactgcaggatggttgatcagagaaagatcttgatcaaaagaggaatgtgaaagttaccagaaccaaaatggagtcacttgtgttgaaaactctgacaaataatacaggaaaaggccatgaaaggagggttcctaagcatgaaaacaatcacgatagactctgtgaacgatgcgagcctgcacaaaggcccactgcascttacacaaaaggcacatctgcacagcaagtgcctgttcaaccctggactggccccctctttttattgatcccagtagccaaagagaattctctcaaaacaatgatataatccttctcatttttcctttaataactttgtcttccttcatccttcggaatacacacatagtttactatggcatgctattcccattgcagtgccctatccccgaataaatatcatttgcttttagagggcctctcactgtgtgctttttag

SEQ ID NO: 874693 - DNA, 557 bp, Homo sapiens
cttttacgggaagataattccttttccaccacaggcctcaaagccctccaaatgtccacttgcagattctggaaaaagagtgtttcaaagcttctctctcgaaaggaaagttcaactctgtgagttgaatgcaagcatcacaaagaagtttctgagaatgcttctgtttagctttcctgtgaagattctcccgtttccaacgaaatcttcaaaataggtccraatatccacttgcagattccacagaaagagtgattggaaactgctctttgaaaaggaaccttcaactctgtgagttgaatgcaatcatcacaaagaagtttctgacaatgcttctctccagtttttatgtgaccataattcgttttccaccacaggcctgaaagcgctccaaatgtccacttgtagacactacgaaaagcatgtttcagaactactctatgaaaagcaatgtgaaactctgggagttgaacacaaacatcacagagaagtttctgagaatgcttctgtttagtttttatgtgaagatattcccgtttccaaagacatcttcggag

SEQ ID NO: 874694 - DNA, 573 bp, Homo sapiens
aattcctcacagaggtccaaatatgcacttgcagattctgcagaaagtgtgtttctaaactgctacatcgcaaggaatgctcagctctgtgagttcaactcaatcatcccaaagaattttctgagaaagcttctgtcttctttttataggaagttatttcctttactacggtastcctcaaagagtgcaatgatccccttgcagtttctacaaaaagagtgtttcaaacctgaactatcaaagaaaggttccacactgtgagttgaatgcagacatcacgaagaaggttctgagaatgcttctgtttagttctgtgcagtttatcccgtttccaacgaaatgctcagagaggaccaaatatccacttgcagtttctacaaaaagagtgtttcaaagctgaactatcaaagaaaggttcagcactgtgagttgaatgcaaacatcacgaagagggttctgagaatgcttctgttttagttctgtgcgggttatcccgtttccaacgaaatcctcagagaggtccaaatatctacttgcagtttctacagaaagaccgtttcaaacctgtactat

SEQ ID NO: 874695 - DNA, 589 bp, Homo sapiens
atatgcacttgcagattctgcagaaagtgtgtttctaaactgctacatcgcaaggaatgctcagctctgtgagttcaactcaatcatcccaaagaattttctgagaaagcttctgtcttctttttataggaagttatttcctttactacggtackcctcaaagagtgcaatgatccccttgcagtttctacaaaaagagtgtttcaaacctgaactatcaaagaaaggttccacactgtgagttgaatgcagacatcacgaagaaggttctgagaatgcttctgtttagttctgtgcagtttatcccgtttccaacgaaatgctcagagaggaccaaatatccacttgcagtttctacaaaaagagtgtttcaaagctgaactatcaaagaaaggttcagcactgtgagttgaatgcaaacatcacgaagagggttctgagaatgcttctgttttagttctgtgcgggttatcccgtttccaacgaaatcctcagagaggtccaaatatctacttgcagtttctacagaaagaccgtttcaaacctgtactatcaaagaaaggttcaacactgtgtgttgaatgcaaac

SEQ ID NO: 874696 - DNA, 592 bp, Homo sapiens
tccttttccaccacaggcctcaaagccctccaaatgtccacttgcagattctggaaaaagagtgtttcaaagcttctctctcgaaaggaaagttcaactctgtgagttgaatgcaagcatcacaaagaagtttctgagaatgcttctgtttagctttcctgtgaagattctcccgtttccaacgaaatcttcaaaataggtccraatatccacttgcagattccacacaaagagtgattggaaactgctctttgaaaaggaaccttcaactctgtgagttgaatgcaatcatcccaaagaagtttctgacaatgcttctctccagtttttatgtgaccataattcgttttccaccacaggcctgaaagcgctccaaatgtccacttgtagacactacgaaaagcatgtttcagaactactctatgaaaagcaatgtgaaactctgggagttgaacacaaacatcacagagaagtttctgagaatgcttctgtttagtttttatgtgaagatattcccgtttccaaagacatcttcggagaggtccacatatccacttgcagattccacaaaaagagagtttcaacactgctc

SEQ ID NO: 874697 - DNA, 561 bp, Homo sapiens
cacttgcagattctggaaaaagagtgtttcaaagcttctctctcgaaaggaaagttcaactctgtgagttgaatgcaagcatcacaaagaagtttctgagaatgcttctgtttagctttcctgtgaagattctcccgtttccaacgaaatcttcaaaataggtcsaaatatccacttgcagattccacagaaagagtgattggaaactgctctttgaaaaggaaccttcaactctgtgagttgaatgcaatcatcccaaagaagtttctgacaatgcttctctccagtttttatgtgaccataattcgttttccaccacaggcctgaaagcgctccaaatgtccacttgtagacactacgaaaagcatgtttcagaactactctatgaaaagcaatgtgaaactctgggagttgaacacaaacatcacagagaagtttctgagaatgcttctgtttagtttttatgtgaagatattcccgtttccaaagacatcttcggagaggtccacatatccacttgcagattccacaaaaagagagtttcaacactgctctatccat

SEQ ID NO: 874698 - DNA, 615 bp, Homo sapiens
tcacaaagtagtttctgagaatgcttctatctagcttttacgggaagataattccttttccaccacaggcctcaaagccctccaaatgtccacttgcagattctggaaaaagagtgtttcaaagcttctctctcgaaaggaaagttcaactctgtgagttgaatgcaagcatcacaaagaagtttctgagaatgcttctgtttagctttcctgtgaagattctcccgtttccaacgaaatcttcaaaataggtccaaatatccacttgcagattccacagaaagagtgattggaaactgctctttgaaaaggaaccttcaactctgtragttgaatgcaatcatcccaaagaagtttctgacaatgcttctctccagtttttatgtgaccataattcgttttccaccacaggcctgaaagcgctccaaatgtccacttgtagacactacgaaaagcatgtttcagaactactctatgaaaagcaatgtgaaactctgggagttgaacacaaacatcacagagaagtttctgagaatgcttctgtttagtttttatgtgaagatattcccgtttccaaagacatcttcggagaggtccacatatccacttgcagat

SEQ ID NO: 874699 - DNA, 321 bp, Homo sapiens
ccgtttcgaacgaaggccacagagtggtccaaatakccacttgcagatcctacaaaaagagtgtttcaaacctgaactatcaaaggaaggttcaactctgggatttgaacgcaaacatcaccaagaagtttctgagaatgcttccgtttagttaggtgcagttatcccgtttccaacgaaatcctcagagaggtccaaatatccacttgtagattctacaaaaagtgtgtctcaaacctgctccatccaaaggaatgttcagctctgtgagttaaactcaatcatcacaaagtattttctgagaatgcttctgtctagttt

SEQ ID NO: 874700 - DNA, 650 bp, Homo sapiens
cttcctttgatagttcaggtttgaaacactctttttgtaggatctgcaagtggatatttggaccactctgtggccttcgttcgaaacgggtatatcttcgcataaaatctagacagaagcattctcagaaacttctctgtgatgattgcattcaactcacagagttgaaccctcctatggatagagcagtgttgaaactctctttttgtggaatctgcaagtggatatgtggacctctccgaagatgtctttggaaacgggaatatcttcacataaaaactaaacagaagcattctcagaaacttctctgtgatgtttgtgttcaactcccagagtttcacattgcttttcatagagtagttctgaaacatgcttttcgtagtgtctacaagtggacatttggagcgctttcaggcctgtggtggaaaacgaattatggtcacataaaaactggagagaagcattgtcagaaacttctttgtgatgwttgcattcaactcacagagttgaaggttccttttcaaagagcagtttccaatcactctttgtgtggaatctgcaagtggatatttggacctattttgaagatttcgttggaaacgggagaatcttcacaggaaagctaaacagaagcattctcagaaacttct

SEQ ID NO: 874701 - DNA, 558 bp, Homo sapiens
ctctccgaagatgtctttggaaacgggaatatcttcacataaaaactaaacagaagcattctcagaaacttctctgtgatgtttgtgttcaactcccagagtttcacattgcttttcatagagtagttctgaaacatgcttttcgtagtgtctacaagtggacatttggagcgctttcaggcctgtggtggaaaacgaattatggtcacataaaaactggagagaagcattgtcagaaacttctttgtgatgattgcattcaactcacagagttgaaggttccttttcaaagagcagtttccaatcactctttgtgtggaatctgcaagtggatattyggacctattttgaagatttcgttggaaacgggagaatcttcacaggaaagctaaacagaagcattctcagaaacttctttgtgatgcttgcattcaactcagagagttgaactttcctttcgagagagaagctttgaaacactctttttccagaatctgcaagtggacatttggagggctttgaggcctgtggtggaaagggaattatcttcccgttaaa

SEQ ID NO: 874702 - DNA, 516 bp, Homo sapiens
catttggagcgctttcaggcctgtggtggaaaacgaattatggtcacataaaaactggagagaagcattgtcagaaacttctttgtgatgattgcattcaactcacagagttgaaggttccttttcaaagagcagtttccaatcactctttgtgtggaatctgcaagtggatatttggacctattttgaagatttcgttggaaacgggagaatcttcacagraaagctaaacagaagcattctcagaaacttctttgtgatgcttgcattcaactcagagagttgaactttcctttcgagagagaagctttgaaacactctttttccagaatctgcaagtggacatttggagggctttgaggcctgtggtggaaagggaattatcttcccgttaaagctagatagaagcattctcagaaactactttgtgatgattgcattcaagtcacagagttgaacattccctttgacagagcagtttggaaactctctttgtgtagaatctgcaagtggaga

SEQ ID NO: 874703 - DNA, 586 bp, Homo sapiens
ctttatttcagaagcatcatataacgaatgttcatagtcaagagataaataaattattcattattctctctgagagaaaatcaaaggactgattttgaaatattagacatttgtagcagtagacatttgtatctagtgtccactatgataatctttctaatttattttcaacactacactcagaaatatagattcctgattatcagcaagtakcaaaatttcttcaggtcctggctgtttcttgtgttgtattgttggtttccagatttctaagtcaatctgaaggttttttctaagtaacacgacttgcatcgtaagtacttttttagtaaaaagttgtagtaaagagttactggtcttgcattagatataaccactttatattagttttggttatcccaagcaaactgcttgacttctgcctctctctctctgtctctctctcttttatttttttctttttgagacagtctcactctgttacccaggctggagagcagtggtgttatctcagttcacggtagcctaaacctcacagcctcaagcaatcctccctcctcagtctcccgagtaactgggattacag

SEQ ID NO: 874704 - DNA, 622 bp, Homo sapiens
atgccctgtcataaataaggccatgtgtttctatgaacatatatgattataagttcttcaagggtagggaccatgtctctgctttccccttggcactgaacacacaggatatttaataaatactccaatgtcttaagtgaaaaataagggggtgggggacagttgaagtgattgatttcaaggcagattcagactytaaattctgaggctattaaaaggaaatgataagcacttgtcttgtaatgctaaacagtatgatgaaaggccaggataaatatttagaagaactactctaaggccctggataaataacttcagctttttcaatctcagtttccttatccactgaatacaaaaaaggattgaattatatgattgttagggtatcttccagtactgacattctacggtttatgatttcatcaagactttaatctcagaaggcaaaaaaaaaaaaagcctgaaatatagttaaataaattatggctattaatatgaaacaccattaatataaaaaaaattaaaaagagcaaccagaatatttggagatgcttgtaactatatcttcattcacttagttgctcattcattcgttaaatgatatgtatttgaattcttttag

SEQ ID NO: 874705 - DNA, 622 bp, Homo sapiens
atgccctgtcataaataaggccatgtgtttctatgaacatatatgattataagttcttcaagggtagggaccatgtctctgctttccccttggcactgaacacacaggatatttaataaatactccaatgtcttaagtgaaaaataagggggtgggggacagttgaagtgattgatttcaaggcagattcagactctaaattctgaggctattaaaaggaaatgataagcacttgtcttgtaatgctaaacagtatgatgaaaggccaggataaatatttagaagaactactytaaggccctggataaataacttcagctttttcaatctcagtttccttatccactgaatacaaaaaaggattgaattatatgattgttagggtatcttccagtactgacattctacggtttatgatttcatcaagactttaatctcagaaggcaaaaaaaaaaaaagcctgaaatatagttaaataaattatggctattaatatgaaacaccattaatataaaaaaaattaaaaagagcaaccagaatatttggagatgcttgtaactatatcttcattcacttagttgctcattcattcgttaaatgatatgtatttgaattcttttag

SEQ ID NO: 874706 - DNA, 622 bp, Homo sapiens
atgccctgtcataaataaggccatgtgtttctatgaacatatatgattataagttcttcaagggtagggaccatgtctctgctttccccttggcactgaacacacaggatatttaataaatactccaatgtcttaagtgaaaaataagggggtgggggacagttgaagtgattgatttcaaggcagattcagactctaaattctgaggctattaaaaggaaatgataagcacttgtcttgtaatgctaaacagtatgatgaaaggccaggataaatatttagaagaactactctaaggccctggataaataacttcagctttttcaatytcagtttccttatccactgaatacaaaaaaggattgaattatatgattgttagggtatcttccagtactgacattctacggtttatgatttcatcaagactttaatctcagaaggcaaaaaaaaaaaaagcctgaaatatagttaaataaattatggctattaatatgaaacaccattaatataaaaaaaattaaaaagagcaaccagaatatttggagatgcttgtaactatatcttcattcacttagttgctcattcattcgttaaatgatatgtatttgaattcttttag

SEQ ID NO: 874707 - DNA, 622 bp, Homo sapiens
atgccctgtcataaataaggccatgtgtttctatgaacatatatgattataagttcttcaagggtagggaccatgtctctgctttccccttggcactgaacacacaggatatttaataaatactccaatgtcttaagtgaaaaataagggggtgggggacagttgaagtgattgatttcaaggcagattcagactctaaattctgaggctattaaaaggaaatgataagcacttgtcttgtaatgctaaacagtatgatgaaaggccaggataaatatttagaagaactactctaaggccctggataaataacttcagctttttcaatctcagtttccttatccactgaatacaaaaaaggattgaattatatgattgttagggtatcttccagtactgacattytacggtttatgatttcatcaagactttaatctcagaaggcaaaaaaaaaaaaagcctgaaatatagttaaataaattatggctattaatatgaaacaccattaatataaaaaaaattaaaaagagcaaccagaatatttggagatgcttgtaactatatcttcattcacttagttgctcattcattcgttaaatgatatgtatttgaattcttttag

SEQ ID NO: 874708 - DNA, 607 bp, Homo sapiens
actacagtctccatctcttggggttaaatgatcctcctgcctcagtctcctgagctggtggcactacaggtgtgctgccacacctggctggcaattttaaattttattaaacatcaggtatgccagaaactatgctttcttagtctactgaatccaacagaacaggtgcataagcaataattaaaatttctttgcggccctatccttcattttgcagagtcttggtggattgaaaagctgctgtggggtgcraggggtatgaaatggcatagtttaggttggtgcggatgtccacttaagtctccatggagacttaagtctgtctcaatgtgtataactgatcagccagaaattattcagatgtttgaaaaatcagtgtaatgagttgctctctgagttgggaaatttgggttcagcctatcattcaaaatgtatgtacacttggcaaagtcacttctgcagagtttcctcccaactggtaagatttcagccaatttaaagattctccatgctttgagatatgaactatgatgaaggtgtcaattaaaactagtacatgctattttgcagaacctccactaaactaattttaagctctaggtttgcc

SEQ ID NO: 874709 - DNA, 573 bp, Homo sapiens
acactgtggaaggccccagggtcctctgcctaggaaatccagagacctttgctcacttgtttatctgctgaccttccctccactattgtcctatgaccctgccaaatccccctctgtgagaaacacccaagaatgatcaataacaaaaaaaagaaaaaaaatgttattatattaagycctcttccttctaataaagtctatacaaatacacacatacaagcctgaaactactctaaataaaatatcaggtttttaaaatcccataaagaaacaagcaaacacaaaatcagccactttgattgaggagagagtgggatggagggggttaggaggctgcccgtatcacctccgggcggcatgtggaggagcagatggagtctaggaagaccctggggagtcacttgttctgactgggctttctcctagctcgacactttgctaaccatttcctgggaagagcttaggaaactcctgtgctctagtgaggcagagcctcccctcacagggtattggcaaggaggcattctgagactgtgattgagaagctagcacagtgcttgacaagtacctgtg

SEQ ID NO: 874710 - DNA, 566 bp, Homo sapiens
acttgtcaagcactgtgctagcttctcaatcacagtctcagaatgcctccttgccaataccctgtgaggggaggctctgcctcactagagcacaggagtttcctaagctcttcccaggaaatggttagcaaagtgtcgagctaggagaaagcccagtcagaacaagtgactccccaggggtcttcctagactccatctgctcctccacatgccgcccggaggtgatacgggcagcctcctaaccccctccatcccactctctcctcaatcaaagtggctgattttgtgtttgcttgtttctttatgggattttaaaaacctgatattttatttagagtagtttcaggcttgtatgtgtgtatttgtatagactttattagaaggaagaggrcttaatataataacattttttttcttttttttgttattgatcattcttgggtgtttctcacagagggggatttggcagggtcataggacaatagtggagggaaggtcagcagataaacaagtgagcaaaggtctctggatttcctaggcagaggacctggggccttccacagtgt

SEQ ID NO: 874711 - DNA, 591 bp, Homo sapiens
acatcaaagaccaaaggtagataaaaccacaagatggagagaaaccagaacagaaaagtggaaaattccaaaaaccagagcgtctcttctcctccaaaggatcacagctcctcaccagcaagggaacaaaactggatggagaatgagtttgatgaattgacagaagtaggcttcagaaggtcagtaataacaaactcctccgagctaaaggagcatgctctaacccatcacaaggaagctaaaaaccttgaaaaaaggttagacaaatggctaactagaataaccagtgtagagaagaccttaaatgacctgatggagctgaaatacacagcatgagaacttygtgacgcatgcacaagcttcagtagccgatttgatcaagtggaagaaagcatatcagtgattgaaaatcaaattaatgaaataaagcaagaagacaagatcagagaaaaaagagtgaaaagaaacaaacaaagcctccaagaaatatgggactatgtgaaaagaccaaatatacatttgattggtgtacctgaaagtgacggggggaatggaaccaagttggaaaacactcttcagaatattatgcag

SEQ ID NO: 874712 - DNA, 632 bp, Homo sapiens
cagcccaaataaactaagacagagctcattaatattaaaatagaaacattttctcttatactgtctatgttacacacattttcttcccagtggacaatggactttagcaatcttttaaatcttttaaatacattggttctcagctctatcaatgttttcctgcgtgggttttggctatggtgttccctgaaaggcctttcccaaactcttcacctcccactggtgcctcttccccactgagtaacagaggagattctccatttgttcacatctttatgtcctctgaaaaggtcttatagttctgttcacaaaagtcctgtatttaaattctgtgccacttattaatattgttttccaataacattttctaagcagttacttmtaatttatagaaactttggggctttttgatttcttttttaaccagtcttgattttcttgtgtttttcagcacaccaatgtactttttataactaatgattatttaccactaaaactttctgttatttgtgacttctcatattccttccagtcttgtagtaatacttattgcttacagaaaaatgtgaattacagagataatggcaaataatcttgcttcattagaaactttaataagaataacactacaa

SEQ ID NO: 874713 - DNA, 701 bp, Homo sapiens
tccattagatggagctggaccacacaatctaagctaacccaactggctaataatttaaaactttcctaaataggtaaaggcaagggagaacaaaggaaaggaggaagttgtttatgccagatagggaaggggcataggctgygagctggaacgtgcctgtgaacatgtccagcacaaatatcttggttaaggtacaaggacatagaatgtactatgtgcctgtgagcatgtctagcagctacataggatagggcttaacaaagagttattagcacaaagcaaggaggcttgaaggaagttagtctttaaaagaaactattacttttaatacttacaaattattctttaacaagaagggaaactttgaagaggaaactttttactttctacaatagagtatccgtaattcttagactagaatctgctatagagccctattatgggggataaatttctaaccattgtctcatttactctaaaccacggaaaagaataacctaccaagtgtgctcattcagaagaacaatggcctcctggcaatgctctttatcctattctgaataagttctctttaacttgtaaagtaagttaagagcaatgaaccaatattctgtttctgatgttatgaagcaacaaatgtcccattaaaatgtctcacccacattggccctttatctttaatctatcaaggcataagtttg

SEQ ID NO: 874714 - DNA, 611 bp, Homo sapiens
tgtttcttcttcctgtatttctttctgggatcaattttcttctgttcaaataattttcttcattatgcttttcagtatagatttgctcgtgaaaaattttctcagttttgctttaatggacattcttttactttgacttcacttttaaatgatatttttactgatataacattctagtttgacaggtttgtaaccccgtcacygcctcccaaccaacccctccaatattttaaaggtatcattgccttattttctggcttcaatcatttatgttgagaaggcagctggatctattctttgctacttgaatctaatgtattttttttttctcttctgctttttaaatttcccctttgtctctggagttcagatgtttcattacgatgtgcctatatgtgattttctttgtgttttatagatttacagattgtagtgcttatagaatctgacttaatatttttgtttggaaaaattctcagatattttaacattttacctactctattttttgtcttcatcctttctgaatttccaattaaatttgtgccatgtctttttaccaattcccatgttttttatactgtatggttttctcccctttctttttttta

SEQ ID NO: 874715 - DNA, 579 bp, Homo sapiens
ttgctccgttttcttctggggacgccatactctgtaatgaagtaggtttcaataaactatctcttctcactatacttggtgacttaccttgagttctttcctacctgagatccaggaacccttttttggggtctggatcagattcctcttctgatcttctggtgaccacgacaaaggtaccttagaatgagaccctatgccaaggaaatccagtctaggcggcaccaattcactagtaactggggtctaccctagcatcctatcaagattaatattaccaaggcccagtggaattcctgggataagagatttgggttagagttctggccmaacagggtaagagtccctggggtataatatttgggatagagtcacggcccaatagggttagagtcccttgggtatattacagggcaaagatgcctgcctaagatttgagttagagttccaggccatggtattagagtccctggggtaggagattcaggttagagtcctggcccaacaagggtagagtcccttgtgtttaataaaaatagaagcagctttggaagatgatttccagtatatgctttgggt

SEQ ID NO: 874716 - DNA, 579 bp, Homo sapiens
ttgctccgttttcttctggggacgccatactctgtaatgaagtaggtttcaataaactatctcttctcactatacttggtgacttaccttgagttctttcctacctgagatccaggaacccttttttggggtctggatcagattcctcttctgatcttctggtgaccacgacaaaggtaccttagaatgagaccctatgccaaggaaatccagtctaggcggcaccaattcactagtaactggggtctaccctagcatcctatcaagattaatattaccaaggcccagtggaattcctgggataagagatttgggttagagttctggcccaacagggtaagagtccctggggtataatatttgggatagagtcacggcccartagggttagagtcccttgggtatattacagggcaaagatgcctgcctaagatttgagttagagttccaggccatggtattagagtccctggggtaggagattcaggttagagtcctggcccaacaagggtagagtcccttgtgtttaataaaaatagaagcagctttggaagatgatttccagtatatgctttgggt

SEQ ID NO: 874717 - DNA, 650 bp, Homo sapiens
tcatatttatctagacttctcttgacatcagaatgactttcaactttttcggctgtctcattatttacctttaacttctcatatattttactaaaattccaagcatgttccaccagtattttgaccaaatacagaatatatatatatgtgcaatattgtgaaaatatgtaaactagacatccaaatttygctcataatcattagaaaacagtatttttctaacctacttaaagttgaactcatttttatccaagtatgtaacatgcttttggctgcttggaatatttcttttaactatttactgccttacatttgggattatatttaccccatataatttgttttgaccaatgggttgtgggtcaaagtgacaatgcctcacttccaagatgaatcttaagagatatcatgagtttcagctcacttttatgctctggccctgctccataaatgcaatggtctcaggtcgagggcctttcctttatcttaagctatggaaagagatgatatgttgagtcaaatcaagcctagttcaggtaagcgcagtggagaccagaggagctagaggaggcttagttgaacaaaagcactcatatgaaaagagcaagaaacaaatatttgatgatgtcaatattgaagtggtgagactg

SEQ ID NO: 874718 - DNA, 650 bp, Homo sapiens
tcatatttatctagacttctcttgacatcagaatgactttcaactttttcggctgtctcattatttacctttaacttctcatatattttactaaaattccaagcatgttccaccagtattttgaccaaatacagaatatatatatatgtgcaatattgtgaaaatatgtaaactagacatccaaattttgctcataatcattagaaaacagtatttttctaacctacttaaagttgaactcatttttatccaagtatgtaacatgcttttggctgcttggaatatttcttttaactatttactgccttacatttgggattatatttaccccatataatttgttttgaccaatgggttgtgggtcaaagtgacaatgcctcacttccaagatgaatcttaagagatatcatgagtttcagctcacttttatgctctggccctgctccataaatgcaatggtctcaggtcgagggccyttcctttatcttaagctatggaaagagatgatatgttgagtcaaatcaagcctagttcaggtaagcgcagtggagaccagaggagctagaggaggcttagttgaacaaaagcactcatatgaaaagagcaagaaacaaatatttgatgatgtcaatattgaagtggtgagactg

SEQ ID NO: 874719 - DNA, 645 bp, Homo sapiens; identical to SEQ ID NO: 869018

SEQ ID NO: 874720 - DNA, 645 bp, Homo sapiens; identical to SEQ ID NO: 869019

SEQ ID NO: 874721 - DNA, 577 bp, Homo sapiens
cccagagtgctggggattatagtcgtgagccactgcgcctggcctatcttttcaaaagaatctatttggcacccattgctttacctgtgtgacttctcattcttacaataactctataagaacatgttgtcatgtctttatgtctgatgtaaaagctgaggttcaagggatacacattagcgccagcattgagattttatacagggctgacttcaaaacctgtagtatttatcctaagctgtggttcagctgacccataattctttctcctttcttttattttgccctgttgaacattcactgagggatcacttcttctgagacctcagttttttcatctgtatattcaacgagttggaatagatgctctttgagatactctcaagtttrgtgtttctaaaatttactaaaaagacaaccccatacaagcaagggcacagagcaagggctttggtccacagagtaggggagggtagaggtgaaatgaaaaggagaaaaagcttcagagacaaaggtgcagagcaaaaacgaagggggtgcctatgctgagatggacacttgctctattcctctagtg

SEQ ID NO: 874722 - DNA, 583 bp, Homo sapiens
taacaaaatatcatagactggggggcttaacagacatttgttcctcacagtttggaggatgtaagtccgagctcagggtgccagcatggttgggttctggtaagggatcttttcctggcgtgccggctgctgactttttactgtatcctcatgtggcacaaagaagcagccttgttctcttcctcttctccaaaaaacacaaatctcatcttgggggtccaccttcatgacctgatctaagcctaatctactcccaaagtccccacctccaaataccccaaataccattgcattcgaggttagggctttaacatacgacttttgyggtggcacaagtattcagtccgtaacatatgtccgcctctggactttgataaaatcacaagctcaccaacgtctagcagagcccagctgcgatggtgagggcctgtgtgtgtgcatatgcacggatgtagtgtttgtgcgtgtgtgcatggatgtaggggtgtgtgtgtgtccaagtgtgtgtgcgagaggcccctgacatcccgctcaggttctctcctgccctctccctggagaaggaggagtaggtgttgagtgg

SEQ ID NO: 874723 - DNA, 699 bp, Homo sapiens
tctatgtaaagttttcttgtagcacctcatcaagtgcagggcataaaatctaaacctatgacataatgtgctatgtataattgttgtcatacatgcatgactgtttattatgcaccaaaataaatactgtagcagttgagacagagtctagttagataactgagatagtgattcattaaatataaactacttaaaatcttttcatgtttcctccaggaatctcaaagtaccttcccaaaatgagctcattaatcctcatgaatattctgtcacataaattctgttacatttctctgaaaacataggttagtcaatcttactaactagtaagttctagcagcaagtcttcacagcactccaacacctttattgccttgaaatctcattagagatttagtttctaacactgttaatctagatggaattctttcatccctagctcattactacatttacccttcaacaaacatgtggtgggagtcaactgtgcrcaacgtgctgaatatgaaaagttaaatggggctcagggttcactgggaaagtgctggtaagttcattcacatgcactccagtacaacttggtatgcccagtgctgcctagcctagcaagaccctctttaatctactgttgccttcttgtacaggtctttatatcatgcgggctttgacacagataaacctactgtaatccgtgatttg

SEQ ID NO: 874724 - DNA, 624 bp, Homo sapiens
ctctctctttcatataaatatatatatttcacaataattacttgaataaatcctaggtacctctcctaaagagttttgaaaaataaacacatagatatgaagaaagatggcccaatataaaccaacagtggtcctactatccctgtcctctatgggcttgctragcaataccccaaggtaactttcaagctgactttgatgtgaatgcccaggttcacgtataggagtaacatagaccactaagaggggtttcttgacaatccacagtatctctctcccccttacaaaagatagtttttaacatcaagaggacagttgttgactctcatttgaattattaaaccaaataagtggctgttaaaggagcaaagatctgaataataatcagttatcatttgcagagataattcaaatgatagctaattattgggcaggcactctacataaattatttcttttcattcctatgagatgggtactttatgaggaaagagagaggttcagagaaggcatgtcagttttccaagatcacacagctcattgttgactgagccttgacatgaaactacagctatgtttaaaaccagtgctatttctagtgtactatcctgcttccttgtaatt

SEQ ID NO: 874725 - DNA, 612 bp, Homo sapiens
gaactaagaactccagtcttttaggccagtgattgctcctcagtatcaacatttaaaagtagttagttattcttgttttctgaaaccatcctgagaaaataaaggagataccacttctgtcttgtctcttctccctggttttaaacctgtgccttgtcataatgcaaaggccatgtatttatttaaaaattataaacacattttacctgaagtgacagctgaactgtggttctaaatagcctctgttggtggcctcaaacttctgtatatattcggtatattccattaagtgcaattttatgaaaatgtcataaacaaatcaatcactcttgacttaattttcagccaccatcagcttctattgagaatctcagccatcaaaatatccataagaccatatgatgaagtacatataaagtactgtgtgagcacaatgaaaaagcaatgagattcttttkgggggttcacggaaagcccccaagtgagggtgccatttgaattgagtataaaatgatgaatagagatttgtccattgaaaagggcagacaggccaggcacggtggctcacgcttgtaattccaacactttaggaagccgaggtggacgggtcac

SEQ ID NO: 874726 - DNA, 645 bp, Homo sapiens
tatccattttcataaaagatttcttaaaattcaagctaggttttcttcctttatttgaaaagggaatatggtaattttaggaatatgattatatatgcatatgtggaagagaagcagaatacttaaaagacaagcatttcctctttttatttgagagagagaaagagagagaaagaaactcctaggcaatcagagcagaacattcctaaccttacatttgatccacccrttgagctactgaataaatgcttaatatgtcagtgagcccacaagtttcttgtcctgggccctttaaactgatatatctcaatcacctttactgaaatgttatcctgagaagaccgtaaacccagggctgctcaccactgagtcttcttttatgaaggtttctcaggagaacatacagctaaagatctctaacatttttcctgagtagacctcttttttctcttcatgaggatatcataataaatgactcgttggtaatttatcagagcttgttccttccccaacccattctccttaatgcattttttaaatttatccagtatttgaaatgcagaagtccaggcttggtaggaacccagaagagaagaaggtgaaagaacaaaatgactgtgaagctaagaaatccagatttggaag

SEQ ID NO: 874727 - DNA, 607 bp, Homo sapiens
catcgggttcaagacatttttgtaagctatgataccagtgatttagtccatccttaaagaactgaaggtcctgaaaatataaccatactaatgcattctttttgacattattacctgaagaaaactgggtgccctttaaagaggttttaagattaggaaacaaagttaggaggagcaaaatcagggctgcaagatggttgcctaattatttcccatcaaaactctcacaaaattgctcgtgtttgatgagaagaatgagcaggagcactgttgtagtggatgaggactctctggtaaagctctcctgagtggttttgtgtttttgtttgtggtttgcaaaagctttggctttctcaaaatactctcataataagcaggtgttattgttctttggccctccataaagtcaatgagcaaaatgtcttgaacatcccccaaaactgttgccatgacctttgttsttgactaatctgcttttgctttgatttgaccacttctacctcttggtagccattgctttgattgtgctttgtttttagaatcatagtgatgaagccatgtttcatctcctgttacaatttttcaaagacatgcttcaggatgttga

SEQ ID NO: 874728 - DNA, 631 bp, Homo sapiens
attttaagccatgtaacctggaatgcttactaaatgtgtaattcttgttcttcctcttcatataatgcacagacttgaattcctatattgagagaataacttacctcttttaaataataccataatttgccttgaaggtagggaagaaagagagtgaagtgsggaaaatttcaaaattctgtcttccagggagcatattcctactcatctgtgacgtctaatgtaatagattttgaagaattatttgtaagatagatacttggagaagtttatactcacttcctaatcccagactatagaaacttctgcattctagaatttcagagaatgtgtctctgtcaattgtattctgaagataagatacatttgacatttgattgcttcaatcaacattctccaatgcagatcactaggcagaaacatcttgacacggcatatatttgatacacaatgattatttgcattgacttttaacaaagtcccatttagaaagattgaaagaaaaggcaaatgtgattggatgtatgctaaagcgtgttcagtatgtgttttgaaatatctttgaaagttcccaggatgtggcacgtatcattcacttgaagctgaaaatctctcagttgagcaaaaacaa

SEQ ID NO: 874729 - DNA, 631 bp, Homo sapiens
attttaagccatgtaacctggaatgcttactaaatgtgtaattcttgttcttcctcttcatataatgcacagacttgaattcctatattgagagaataacttacctcttttaaataataccataatttgccttgaaggtagggaagaaagagagtgaagtggggaaaatttcaaaattctgtcttccagggagcatattcctactcatctgtgacrtctaatgtaatagattttgaagaattatttgtaagatagatacttggagaagtttatactcacttcctaatcccagactatagaaacttctgcattctagaatttcagagaatgtgtctctgtcaattgtattctgaagataagatacatttgacatttgattgcttcaatcaacattctccaatgcagatcactaggcagaaacatcttgacacggcatatatttgatacacaatgattatttgcattgacttttaacaaagtcccatttagaaagattgaaagaaaaggcaaatgtgattggatgtatgctaaagcgtgttcagtatgtgttttgaaatatctttgaaagttcccaggatgtggcacgtatcattcacttgaagctgaaaatctctcagttgagcaaaaacaa

SEQ ID NO: 874730 - DNA, 631 bp, Homo sapiens
attttaagccatgtaacctggaatgcttactaaatgtgtaattcttgttcttcctcttcatataatgcacagacttgaattcctatattgagagaataacttacctcttttaaataataccataatttgccttgaaggtagggaagaaagagagtgaagtggggaaaatttcaaaattctgtcttccagggagcatattcctactcatctgtgacgtctaatgtaatagattttgaagaattatttgtaagatagatacttggagaagtttatactcacttcctaatcccagactatagaaacttctgcattctagaatttcagagaatgtgtctctgtcaaytgtattctgaagataagatacatttgacatttgattgcttcaatcaacattctccaatgcagatcactaggcagaaacatcttgacacggcatatatttgatacacaatgattatttgcattgacttttaacaaagtcccatttagaaagattgaaagaaaaggcaaatgtgattggatgtatgctaaagcgtgttcagtatgtgttttgaaatatctttgaaagttcccaggatgtggcacgtatcattcacttgaagctgaaaatctctcagttgagcaaaaacaa

SEQ ID NO: 874731 - DNA, 645 bp, Homo sapiens
cctatgaagaataatctatttcactggatcccttggttaggaatgtagcatatgcttgcccaggtccacttctaaggaccaggtctgtttctccttgctactgcctgaaatagcataataattaattcaaaagttggctgcttttcactagaagtctttaggacattgtaagacaattaagtctgtagaagaatgagaaggaatcttttatttgaggtctagaggtgtcataactgtgaatcacaaagttgtggcacartgcattcacctcagaaaattttcttcatgaaattaaagtttcattttgtcttaaagaaaaggttccactctcatgcgattttgtgtgttctcatcaaagcaagaatctaacttcctgatctggttactgggaatctatgcagacacacacaatccaacctctggggcctgttttgcaaacagtctttatgtcatgatttagaatactgcataagaaatttctccttgaagagagatgactgcttttgacagttggcttttcccagtgcagtcattagactgcacatgactgatgtgtgtgcatggacagggaggggtcttcattccctggaactataatgtcaggtttcatattgtctgagatcagcatctcttcagaaacaacca

SEQ ID NO: 874732 - DNA, 582 bp, Homo sapiens
aagaaccatctttgaagccagatatccctgtattttattcttgcctttgttacttagtaaagtgtaggactttgagcaagatgctacatctatctgagattccattttctcatctgyaaagtgaatacactaatcttaacattcagatttgctatgagaattgcatatggttatctttgtaaataaagtgcctggcacacagtaggtgctcagaaaacattgatttcttttaatcctctcattcaagagcacagatgataaaatatttatcactgttagtggtgttatccctggtatatcctggcaaatgcagtgagatactaagaagtttgatgctgaaattactttttcagcactagattattacatttttatgacaatttgaaaattaacctatcctatgtgtatcaatagcccagttttgtgctattttcaagtaatatgaatgttacagtgatggtggccacatgatatgttatgaaggaattttatttacatcaaacttcccacaatagcctgtttattgaattatccctgaaataaaaccaataaacctgtctttggaaaccagtgaccactgac

SEQ ID NO: 874733 - DNA, 702 bp, Homo sapiens
tataatctcagtgctttagaaggccaaggatgaaggactgcttgagcccaggagtttgagacctgtctgggcaacatagcaacatcctggctctacaaaaaataaaaagaaaccagttgggcatggtgacatacacctgtgatctcaactaytcaggaaacagaggtaggagaattgcattagcctgggagtttgaggctgcaatgagctatgattgtggcaccacattccagtgtgggcaacagagtgagaccctctttctaaaaaaatcaaaataaaaaatgacaacaattttctgaacagttaggatgagaccgtctttatattgtgatctttcaattttcagcccgttaaaagacaaaatactgaggctcagaaagattagtaaatgtagaaaaaagcacagcctgcaagtgacagacactatttaaatgacagttatcttaactccaaaatttatactatttccactccatcatacatcatacttccttaacctccattcttgtgaatgaatagaattaaaaaacataaaaatgatgttatacaatataagatttatagttggtattaatgcaatcacttttaatctgtggaaaaatcattgtatcttataaagataaaataaaatttgtcaatcttgagtacacaactatgatagataataaattatacacacaaatattgtttcattaccaaaag

SEQ ID NO: 874734 - DNA, 602 bp, Homo sapiens
tggatctttttaaggattttttgtgtctctatctctttctattgtgctctgatcttagttatttcttgtgttctgttagcttttgaatttgtttgaatttgcttctctagttcttttaattgtgatgttagggtgtccattttagatctttcctgctttctcctgtgggcatttagtgctataaattgccctctaaacaccgctgtggctgtatcccagagattttgtatgttgtgtctttgttctcattggtttaaaaagctttttttwaatttctgccttaattttgttatttacccagtagtcattcagcagaaggttgttcagtttccatgtagttgtgtgattttgagtgagtttcttaatcctgagttctaatttgattgcactgtggtctgagaaactgtttgtcatgatttctgttcttttgcatttgctgaggagtgttttacttccaattatgtggtcaattttagaataagtgtgatgtggtgctgagaagaatgtatattctgttgatttggggtggagagttctatagatgtctattaggtccacttggtccagactgagttcaagtactgaataccttcgttaatttt

SEQ ID NO: 874735 - DNA, 561 bp, Homo sapiens
ctacataatgttttgaaatatgtgtaaataatgaaatgtttagatacagaaaaatgacataggaattaattatcccagatacttatcattttttggtgaaaacacttaaaatctactcttttagtaattttcaagaatatgatatattgttactattagaatctactataggtttcttcaacttgttcttccaatcaaaatgaaattttgtgtactttamccgaatctctccaacctcttcactctcaacctctgggaactaccattttactctctgcttctttgagtttaaattttttagactccataaaaagtgagattatgtatttatcttgctgtgccttgcttatttcacttaacataatgtcctctagttcatccatgttgtcacaaattacagaattttcttctttgtaatgtctgaatgatatttcattgtgtatatgtaccccattttctttatccgtttatccactgataagatgcttaggctgattctatatcttggctattgtaaataatgcttaaatgaacaaggaagtgcagatattgatttggtaa

SEQ ID NO: 874736 - DNA, 622 bp, Homo sapiens
ccttaacaaccactgacaagttttctgtcttacatttttttacttttccataatgtcatataaatagaatcatataaaatgtaagtttttgagactaggttcttttacttagcacactgagaatcagggacattgggcaatgtctggagaccttgttagttaacttgtcagggaagagtgttactgtcatctagtggataaagtccaaggatgcaacaaaataacctacagtgcacaggatgccctacaagtcattcggcccaaaaaagtcaagagccctgctgttgagaaatcttaatttagcacaatgtacttgagattcattcatattgttgtatgcttcaatagttaattttattgctgagtagcattccattgtgtggatgtacgacaatttatttacccatttatccctgwaaaacatctggattgtttccaagtgtgaacaactataaataatgctgctgtaaacctgcatgcacaggttttgaatgacatgtttcctttctctaggatacatacccagaagtgtgatgtgtggctcacatgagtgtatgttagcttttcagaaaccatgaaatggtttccagagcggctatagtacgtctgcatctccatcagc

SEQ ID NO: 874737 - DNA, 606 bp, Homo sapiens
cctcaatgctctctgaaatatccctttacatattctacaaaaagcgttttcaaacttctgaatgaaaaactttcatctctgaaagatgaatgcacaccttacaatgcagttcctcacataacctctttctcatttttattgttgggtaattcacttttcygccattgaccccaatgagctacaaaatgtccattcacaaaagggacaaaaacagtgttccaaacagctgaaatcaaagaaaggtttgaatctttgagttgaatgcacacatcacagaatcacagagcagtttctcacaaagcctccgtctagtttttatctgaagatgtttcctttttcaccataggcctcaatgcacatagaaatatccttttgcagattctacaaaaactgagttcccaaatgcagattctacaaaaaccgagctcccaaactgctgaatgaacagaaaagtttaactctgtgagatgaatgcacacctcacaaagtggtttctcttatagcgtcattctagttttagactgggatatttgcttttttgccattggcctcagtgagctccaaaatgtccattcacagaatggacaaaaacagtgcttccaaact

SEQ ID NO: 874738 - DNA, 606 bp, Homo sapiens
cctcaatgctctctgaaatatccctttacatattctacaaaaagcgttttcaaacttctgaatgaaaaactttcatctctgaaagatgaatgcacaccttacaatgcagttcctcacataacctctttctcatttttattgttgggtaattcacttttctgccattgaccccaatgagctacaaaatgtccattcacaaaagggacaaaaacagtgttccaaacagctgaaatcaaagaaaggtttgaatctttgagttgaatgcacacatcacagaatcacagagcagtttctcacaaagcctccgtctagtttttatctgaagatgtttcctttttcaccataggcctcaatgcacatagaaatatccttttgcagattctacaaaaactgagttcccaaatgcagattctacaaaaaccgagctcccaaactgcygaatgaacagaaaagtttaactctgtgagatgaatgcacacctcacaaagtggtttctcttatagcgtcattctagttttagactgggatatttgcttttttgccattggcctcagtgagctccaaaatgtccattcacagaatggacaaaaacagtgcttccaaact

SEQ ID NO: 874739 - DNA, 618 bp, Homo sapiens
tcttcagataaaaactagaaagaagctttctgagaaaccactttgtgatgtatgatttcatctcacagagttaaactttcttttgattcagcagtttggaaacaatgtttttctagaatcggcgaaaggacattggggagctcattgaggcctaaagtgaaaaagaaaatatcttcagataaaaactacaaagaagctttctgagaaactgctttgtgatgtgtacattcacttcagagatttaaacatttcttatgattcagcagtttggaaacactgtttttgtactttctgtgaatggacattttagagctcattgaggccaatggtgaaaaagtgaatatcccaagataaaaattagaaggaagctatctgggaaatcgctttgtgatgtgtgcwttcacctggcagagttaaacctttcttttgatacaggatttggtaaacactgtttgtgtggattctgcaaaaggacatttgggagtgcattgaggcctgtggtgaaaaagaaaatatcttcagataaaaactagaaagaaggtttctgagaatctgcttcatgatgtgtgcgttcacctcacagagttaaacttttcatttgattcagcagtttggaga

SEQ ID NO: 874740 - DNA, 621 bp, Homo sapiens
agaattcggctgtgaatccatctggtcctggactctttttagttggtaagctattgattgttgccacaatttcagaggctgttattggtctattcagagattcaactccttcctggtttaatcttgggagggtgtatgtgtcgaggaatttatccatttcttctagattttctattttattcacatagaggygtttatagtattctctgatggtagtttgtatttctgtgggatcggtggtgatatctcccttatcatattttattgcatctatttgagtcttttctcttttcttctttattagtcttgctagcagtctatcaattttgttgatcctttcaaaaaaccagctcctggattcattaattttttgaagggtttttgtgtctctatttccttcagttctgctctgattttagttatttcttgccttctgctagcttttgaatgtgtttgctcttgttttctagttcttttaattgtgatgttagggtgtcaattttggatctttcctgctttctcttgtgggcattcagtgctataaatttccctctgcacactgccttgaatgtgtcccagagatactggtatgttgtgtctttgttctcattggtttcaaag

SEQ ID NO: 874741 - DNA, 645 bp, Homo sapiens
ttgtgatgtggggatccatctcacagaattaaactttcttttggtttagcagtttggaaacactctttttgtagaatctgtgaagaaacatttttggtcaaattgaggcctaaggggaaatacaaattatccccagataaaaacaacaagaagctaactgagaaactgctttgttttgtgtggattcatctcatggaattaaacctttctttggattcaccagtttataaacactttttttggagaatctgtgaggagatatttgggagcccatggaggcatatggaggaaaactaaacattcccagataaaaactagaaagaagctatatgtgaaactggtttgttatgtgttgattcatttcacagagataaacctttattttgattcagcacatcagaaacatgttttttgaagaatctgcaaagggacttttgtgagcaaattgaggccaatcargaaaaacaaaatatccccaaataagaacttgaaaaatatctatgtgtcaaactgacttgtaatgtgtggattcatctcagagtgttaaacctttgacttgattcagcaggttagaaaaactctttttggagaatatccaaagggacatttggcagccaattgaggcctatggtaaaaaaatgaata

SEQ ID NO: 874742 - DNA, 670 bp, Homo sapiens
tttttcttatgggtcttatttctaaatgaattctgttgttatcagaaaatatatttgatttagtcctttaaaatttattggtacttgttttttggcccaacatgtggtctattttcatgcatattatatgaacattaaaaatgatgtgcatacacacacataagacactaatgagcacttggaaagacttttgatatggttggttaagtaaaaatacaaccattcaattttatcatcagcaggaaatgtctttcctctkatctttacctgaagactttgctctaagctccaatctagaaattttgtttaaataaagagttaggcctgcataacaaagtttatacaaaattctatttactattgatacccagagaagtaaactataatgcacatgcttcagaaatgacatgaaaacaactactgggacccctttattatccagaagcacagaaatgtatacagtgtactgcagagccaagatccagtgaggcaagacttaattacatagaattgaataaaataatgagatacatgtaattgtgattgttttggaattttttttgctatcatttttaatattctatttcctactagatgtatgaggaagtatttttcacctcaacttgtctctaaccctcaaattagacttttttcatacttattatgaaat

SEQ ID NO: 874743 - DNA, 728 bp, Homo sapiens
tcagtaagttcagtcgaatgactagacttccatttagacatggttccaaggcccgactattactagcttcataaccttagaaatgccactgaactgtctttattctcaatttttcattctgaaaatgtatgagattttcaatattttcaagactatagagactcatgcaagtaaaaatgatttgaaatctatctattgctatatatattaaaatattaatgctatgtcaaaaatgccttgtagccagctgtgttttgaaattcaaatacttttgaattttagataatatattattatttagtaccaacaacaaggactgatggcattrgataataaacacattaatgaagtatttctacaggaaaatttgtgagcattcacactaagtaggataggtaaatgttatcaataattttaatcatgtcagtatgaataattttgtcagtataaatcagattgcataggtattgactcaaataagttatactttattgtcaattttctcagattttggtatcaaaattataagtgagataggcaacctcaattaaagttaaaataaagaggtggactccaggagagtttcaattaactactggatcgctcataacatattatcactaaagtttgtataaagatggatttggacatttttaactctcttaagtcttaagtgtcagtgtgtgtgcatggctctcttggttatatcagagagtcatctatatgcc

SEQ ID NO: 874744 - DNA, 575 bp, Homo sapiens
ttcttcctagttagtttaccttatcaccttacttatttacttcatagaatttgtttgaagccacaaacattttgtttatttagttatcatcatctaatctttggcaattttgttgccaaaataataatccatataactaggggtgtctctgtggttatttctaatgtcaaaaatggtgcttggcacattgtagggtaggcacttactacattttaaaatgtatattctcattccatttgactttttgtgactgctrtgaactaaactgtgtccacacaaaatccatatatggaacctctaatgctcaatgtgactatatttggagttggacttttaggaggtaattaagattaaatgaggtcataagagtgaggtcctaactcaatagagttggtggtcttaaacaaagagaaagatctctctctctctttctccctgtttctctctctctctctctccgtttctctctctttctttcttccttcctctctctctctttctctgcaccctcaaagaaaagcatgtgaggacaaagcagacatctgcaagccaagaggagagcccacaccagaaac

SEQ ID NO: 874745 - DNA, 574 bp, Homo sapiens
caaaagagcttcagtcttacattccagaatttttagctagcttttttaaaggtctgatgaaaacagaatgaatgagggtttgagggttataaaacctttgggctgggtgcagtggctcacacctgtaatcacagcactttgggaggctgaggcgggtagatcacttgagcctggtagatcacttgagcccaggagtttgagaccagcctgggcaacacatggagaccccatctctaccaaaaaaaaataaaataaaattagcgaggcgtgattgtatgtatctgtggtcctagcaacttgggaggctgagatgggaagatggcttgagactggtaggttcaaaggctgcagtgagccataattgtaccactgcagtccagcctggacaacagagtggtctctaaaaaaacagagtgtctytaaaaaaacaaaaaccaacctttgttaattatgaacaagtttaatatgagcataaatttttttaaggttctgaactatctaaatatctaaatacagtccctccgtgtacttaggagactggctgtaggactacccctgccccctaccatgtata

SEQ ID NO: 874746 - DNA, 701 bp, Homo sapiens
tagatacaggaagattatttgcagataggtgtttcattcttgtttaaacaatggattatttgtattctccattttcatctttagctctctttggtaatttgctaacatttagatttatcttattaatttccttggaataatcttcccatcagtatttcaggctaggcaaactctacaaagacacgctatgagtcatccctcactatttcaaattacttgacacttggtgacttcagctatttctctaggaagccaagtttctcatttcatatcccagtaattctctgaatgaaagtaatttctaaatcyaccctctcaatttcctttaccacttgtttgtggtcaccagttttatttggccctttctgcatgttcttaaacataatcacacatgacctcatccagcagcctttcattctggtaagccacagcatttctcattccctgccctaatatctaaaggtaaatagaaaaagcaaactctactttaatgaggattttttcaatggatatttagttttttatattctgtcacgtgcataaaatgcatataatacattgaatttagagtttttctcatgcttttctaaaaatagatcttgagtctctctatctacacacacacacacacacacacacacacacacacacactacatcttttaaattctttcaccctcatcagggaccagtaaaagattt

SEQ ID NO: 874747 - DNA, 516 bp, Homo sapiens
acctgaggtcaggagttcgagaccagcctggctcacatggagaaaccctgtctctactaaaaatgcaaaaattagccaggtgtggtggcaagcacctgtaatcccagcctcttgggaggctgaggcaggagaatcacttgaacctcagaggcggaggttgcagtgagacaacatcatgccactgcactccagcctgggcaacaagagggcaattccatctcaaaaaataaaaataaataaataaaaagctccacttaaagaagccaaaggkcagagctttttttttttttatcgtttagtacctgtatgtgataatcttctccttgtgaaatttgaaaaaatgactctaaatgacaaaaccagtttgctacagcaatacaagtcccagcgttaggcacagatacgggatcatattaatatgtttttgctgcaatgaaagcttttcagtcactgtagttctcagtagcctcattttaaaatgtggaaactaagctggcaaccactaacagaaaaaat

SEQ ID NO: 874748 - DNA, 657 bp, Homo sapiens
cacctggacagatactgtccaggatatttgtcaaagataagagaataacttttcagagaactgtactacaaacacaaaattgcacaagattggcaattttacaaaattcaatggttatttacaacctcacatcagacgttgaataratgagcaaaacatttaaataataatcaaaacacttgtttctagtaaagagatgggtataatcagtctatgtgtgccaaaaggaagaaaatctggaaataatgggcctatttgttttgggttgaattgtgtacccctaaaaagatatgctgaagtccttatccctctacctcaaaatgttatcttatttggaaataaggttattgtagatggaattattaagatgaggtcattctgcagtaagggtagacccctaatccaatatgaccatgtccttattaaaaaacactgtgtgaagggacatacatacagcaagcataccatgtaaccatgaaggcagagatcaaggagctacatctacaagccaaggaacgccaaagggtgccagcacaccaccagcaggtaggagagaggaccagaacagattctccctgataggcctcagaaggattccttgatcttggacttttagtctccagctagctagttttcccagcaaaatttatcacatag

SEQ ID NO: 874749 - DNA, 617 bp, Homo sapiens
agacaacccacagaatgggagaaaatatttgcaaaccatccatctgataaaggaacgctaaccagactatacaaggagctcaaagaactcaacaggaaaaaaactgaaaaaaaatttaaaaatgggcaaaagatcttaatagacatttctcaaacgaaggcatacaaacaacaggcatatgaacaggtgcaacatgattgatcatcagagaaatgcaaatcgaaattacaatgagatatcatctcaccccagtcaaaatgacatattcaaaagacatgcrataacaaatgttggtgaggatgtggagaaaaggtaactcttgtacactactggtaggaacgtaagttagtacaactgttatggataagagttaaaggtcctcagaaaagtaaaaatagaactaacacatgatctagcaatcccactgctaggtatatatatatatgcccaaaagaaaggaaatcagtatattgaagagacagctgcactcccatgtttattgcagcactattcacaatagccaagatctggaagcaaactaagtgtccatcaacagatgaatggacaaagaaaatgtggtacactacacaatggagtactattcagccataaaaaaa

SEQ ID NO: 874750 - DNA, 617 bp, Homo sapiens
agacaacccacagaatgggagaaaatatttgcaaaccatccatctgataaaggaacgctaaccagactatacaaggagctcaaagaactcaacaggaaaaaaactgaaaaaaaatttaaaaatgggcaaaagatcttaatagacatttctcaaacgaaggcatacaaacaacaggcatatgaacaggtgcaacatgattgatcatcagagaaatgcaaatcgaaattacaatgagatatcatctcaccccagtcaaaatgacatattcaaaagacatgcaataacaaatgytggtgaggatgtggagaaaaggtaactcttgtacactactggtaggaacgtaagttagtacaactgttatggataagagttaaaggtcctcagaaaagtaaaaatagaactaacacatgatctagcaatcccactgctaggtatatatatatatgcccaaaagaaaggaaatcagtatattgaagagacagctgcactcccatgtttattgcagcactattcacaatagccaagatctggaagcaaactaagtgtccatcaacagatgaatggacaaagaaaatgtggtacactacacaatggagtactattcagccataaaaaaa

SEQ ID NO: 874751 - DNA, 617 bp, Homo sapiens
agacaacccacagaatgggagaaaatatttgcaaaccatccatctgataaaggaacgctaaccagactatacaaggagctcaaagaactcaacaggaaaaaaactgaaaaaaaatttaaaaatgggcaaaagatcttaatagacatttctcaaacgaaggcatacaaacaacaggcatatgaacaggtgcaacatgattgatcatcagagaaatgcaaatcgaaattacaatgagatatcatctcaccccagtcaaaatgacatattcaaaagacatgcaataacaaatgttggtgaggatgtggagaaaaggtaactcttgtacactactggtaggaacgtaagttagtacaactgttatggataagagttaaaggtcctcagaaaastaaaaatagaactaacacatgatctagcaatcccactgctaggtatatatatatatgcccaaaagaaaggaaatcagtatattgaagagacagctgcactcccatgtttattgcagcactattcacaatagccaagatctggaagcaaactaagtgtccatcaacagatgaatggacaaagaaaatgtggtacactacacaatggagtactattcagccataaaaaaa

SEQ ID NO: 874752 - DNA, 557 bp, Homo sapiens
atcaggttacctaaagtcaagacaaaggaaagaatcttaagagttgtgaggcaaaagcatcaggtaacctgcaaaggaaaacttaacagattagcagcagatttctcagcagaaaccctatgagctagaagggattggggacctattttttagcctccttaaacaaaacaattatcagccaagaattttgtatccagcaaaactgagcttcataaatgaaggaaagatacagtcttttccaaacaaacaaatgccgagagaatctgccactaccaagacagcactacaagaactgctaaaaggagctctaaatcttgaagcaaatccttgaaatacaccaaaacagaacctccttggagcataaatctcacaggacctatataacaataacacaatgaaaaaagccaaggtattcakgcaacaaatgcacaatgaatagaatagtaactcacatctcagcactaacattcaatgtaaatgtcctaaatgctccacttaaaagatacagaacagtagaatgaataagaattcaccagccaagtttctgtgtcttcagg

SEQ ID NO: 874753 - DNA, 637 bp, Homo sapiens
ttgataaccttgactaaaatggctctcagtcactccttcccatcgctttctaggtcacacagcgaaatgaagtccaagctctaacttagcaggccaccatgcaaatacaaacgtcacagtggccatgcttctgagcctttggaaaggtagacttgtggtaggggaagaactatggtttctggtgccagactcctggctctgccacgtactagccatgtgacccagccaaactactcgactcctctgtgcttgggttttctcatatgcaaaatgggggtaataattgtaactaccttatggggttagagtacagactgaacaagttgatatgttcagcattgtaatgtcaagmactgagaacagtgccaggcatgtagtaagccatcaaaaagtgactgacactacaatgatagtgatgatgatgaggatgatcttgggaaaactgtacctcagttatcgattcccattctgggacacagctcataatatagatgtctactgaacagacctggagtgtgtttataatccatatgtcccacggcacattatagagcaaccggttccactgtattttcacataaatattcacatgtgcgaagattctatatcacagatgttctgggctgtcaccacaaaa

SEQ ID NO: 874754 - DNA, 612 bp, Homo sapiens
cttcctcccgccgaactgctcaggtatgtgagacggcaggcaggatcaaagccactactcgggttaaaaattgcctaatttgccgaattataatagaactcagagtggacttcctgtcttcaaagcaccttacaaaagttaactaattaatcgtcataacaccttgtgaggtgtgcattattattacattcaaggtgaagctttagttagtggctgaaatttaaataaggccacttgatagaagtaacccaactgaaaatgtaaccaaacatagaatggctttggatttcacaaactgctctccaagaatcctgtatgttatgactaagcaattgaagactgcctcagcagccattggaaacataraaaaggaaatcgtttactgagatacccgctgtttcaaagaagcattcaaatcagcaatttcggagggatgcagacttacctaaaattacatgttctgcaaaattaagatgtcaacgttctttgaaattattctcccaattgcaaggccccagcaaatctttatcatttggcttagagcagagtttctcaacctgggcactgttgacacctggggcttcatatggtttggctctgtgagcccaggca

SEQ ID NO: 874755 - DNA, 586 bp, Homo sapiens
ttggtccacactctgtattttagggtcttagcccctaggttctgcagctatttcaacagtttccttttgctagtcatgtgaaactgcccctggaattttctattctgtgaccatcctgtattattcctgtctcaggttgaatrgtgtccccccaaaatttatgttgacctgtaacttcagaatgtgattgtgatactgtgaaatatatatttggtcttcaaccccgttttctggcataaaactgctaaaattcttagaattaccaaaatgatgtctgtttatatgctactgattgactggtggctggccatccaagggtagcttcaggatggggcagatcacaagaaagatcaaggcaggattagagggctgggactttcagccccacccctaaccttcagggaggggagagggtctgaagtgcaagttgattaccaatggccactggtttaattaatcatgcatatgtgatgaagcctccataaaaacccaaaaggacagggtttgcagagcttccagatagctggacatcatggaggctactggaggatggctcaccaagggagggcatggaaggtccataccc

SEQ ID NO: 874756 - DNA, 657 bp, Homo sapiens
ctacatggtggcaggcaagacacaatgagtgccagcaggggaaatgccagatgcttataaaacgatcacatctcgtgagactcactcattatcatgagaacagcatagggaaaaccacccccgatgattcaattacctccacctggtccctcccacaacacatggggatttgtggtgttgggtccctcccacaacacatggggattatgggaactactattcaagatgacatttgggatatggccaaaccatatcaaccaccaaggaaggaaggtagcatcattcaaagaccctcctcacaagaggaagctattgaaccaagtgcagagaagataagactcaggagaaaatttaacttatgctagatctgaggcgagtgctcaaggagctctcattagtgaattyatctagagggatatctcagaatgcctaccattaaaattcacattgctataggttccttggctagctggaagaggatgctgcttaggaaaattcactgtacccatcaagcagaaaaaagcacagaaatagatcttcccaaaggtgaagaaaatcccattagaaaacagcctatatcatactgaatgggcaaaaactggaagcattccctttgaaaaccagcacaagacaaagatgccctctctaaccactcct

SEQ ID NO: 874757 - DNA, 635 bp, Homo sapiens
ggtgagaccaccaaaaacatgaagcattctcgagctatagaactgattaagaatggtggccgcagagttcgtctgtttctgaagcggggagacggctcagtaccagaatatggtgggtcaaactatgaaaacattccttccttccctggcatgactccatgaatttgtctccagaacggcagcaggaaagtcttttttgtttcccctattcaccagtgtcttaccagcctctcgcaccatgtgattatttgcctcgcttgttctgaaatctctacacatttcatccttttgcttgcttacgtggactggggcatggcytaagacaagatctttatagccccctttctgataatcagagagaacgttttgtctagtccgaccaagagcgaaggaatgtttgtttgtactgtgccaaactgttcctcagatccaattgttagcacaaaatgactatatactccttttaagaagcaggaaagcaggtttcctgagtgatatgttgaggcacaattattttttcctttttggttacttggtgtctttatttaagaggcatgaaattttgagagatttgggggctttgctaacctcccttatgctctgtatacaacacttctccatcccccaactggtgt

SEQ ID NO: 874758 - DNA, 611 bp, Homo sapiens
atttgagatagtcacgaaatctagaactagacagtatctcttttattggctgcagaatgtgtcaagactagtgaaaatgtcatctatctctccaacccatctatttgacagtcctccctatagccaccccctctaggaggaattttatgatttagattttccacttatccmtgggaaattataccttagctgaccttaactcactccattgtcttctaaaaatataaatcaggccaaagcagtttgttaacaaatatgtactgagtattattttccaggcttgatgctgggcactcagcgtcaaacaaaagcaataaaacttcagccttcctgaagttcagaatctgccaggaaagacagacattggataattgagttaaattgtggtaacagctatggagtgtatgtggtgcccttgagtgtctgtaattggaggacttaatcttgatagaagaaaaaagggaggcaagaaggaagagctctttccaaggaggaagcaagacctgagcaaaggcctcatggccaagggtgtgtgttttattccaggcatggagggaaggcccatgagactaaagatctaccatagccatggggagaaatagaagcaagaa

SEQ ID NO: 874759 - DNA, 655 bp, Homo sapiens
atagtagttctgttttaagtttggtgggaaatctccaaactgctttccccagtggctgaactaatttacatttctatcaacagtgtataaacattcacttttctttccagcctctccagcatgcgttgttttttgactttttcataatggccattcttagtagtgtgagatggtatctcattgtggttttgatttgcatttctctgatgattaataatgtggagcagaattgaacaatgagaacacttggacacaggaaggggaacatcacacaccagggcctgttgtggggtggggggatgggggagggatagcattaggagatatacctaatgtaaatcacgagttaatgggtgtagcacaccaacatggcacatgtgtacatatgtaacaaacctgcatgttgtgcacatgtaccctaaaacttaaagtataataaaaaaatgtgaagcattttttcatgtttgttggccacttgtatgtcctcttttgagaagtgtatgttcatgycttttgcccatttttcaaacagggcaatttgttttttgtttgttcagctattgaagttccctatagattccatattagaccttggtcagatgtgtagcttgtgaatattttctcccattctgtaggttgtctatttattgattat

SEQ ID NO: 874760 - DNA, 625 bp, Homo sapiens
actctacgttgtcccactttagggtgtgggagctatgaccttcctgctcctggatgctgggctcagctaagttttgataagtttatttgcattaattttatttaaataacattcaaaatattatatctaatttgctttagtaatttcaagaatagatgagttataaataatagagaactaaaaaattaataattcctggaagactaacaatcagaccttaatgttagtactttctttttttctcaaactaaaaatatcaaaactgtaagaggtatatcagtcaggatccagaagataaacatcaggttaagattaccagacagtaatcttaatatcaaaaattattaactgtaagaggggatttgctagcaaagaataaacagaactgttaataatagagtaatagcaaattataggggccactacccataaggctgaattgatacataatagaagcaaragggtctggaaccagcttccacacaccataccgatccagattcattggagagggcatagccatgaacatctgcatggcagggtttgctgaggctgcaaagtactcaggaagatatcagtagaagccatccacagataggtgtcatacaagcagcactctgtcatg

SEQ ID NO: 874761 - DNA, 580 bp, Homo sapiens
agccttaatttcctcaactaaaatattagcaaatcaaatacatcaatatatatgtaaagaacaattacaaggaggagttacccaagaaatgtaagatggtataacattctaaaatcaatataattcttcatattttcaaaaaacgataaaaaccatatgattctttcattagaagcagaaaaatattgacaaaactcatcatttatccatgtcaaaactctcagcaaactaaaactagaagaaagctgggcacagggatgcatacctgtagtcctagcttacttggaggctgaggtgagaggatcacttaagcccaggagtttgagtccaacytaggcaacataccaagaccttcatctaagatgaattaaagaatgaataataaattttaaaaattgcccttctgggctggtctaaaacaaactggaaggaaacttcaatttgttaaagagtatctataaaatcttacaagtagcattgtacttaatgaaaaatattgattacattccccctaatattggaaataagtcaataatgaccactttcatctcttttactcacaagtcttttggaggccctt

SEQ ID NO: 874762 - DNA, 690 bp, Homo sapiens
aagtagaaaagcaggcattattattatttttgtacagagtagcatttagaagctgtatcagtctgcttaaaactaagttcggctgtggcaacaaatggcatcctaatcttagtggcttacatcaacacaaacttatttttcacttagtttacaggtttatcaaatgtgtggctttgactctttattctaagacattagctgaaggagtatgcaggatattgcttttgtcctgcagacaaaaagaacactaacagatgcatgtgatggttcttaaggctcttctaagaaatagcatatgccattttttctcattttgcattgacaaaatcaagtcgcaagaccaagtcgttttcactgtggcactyttaatctaaccacagtacagggcttactaggaaaaaaaaaaaaacaagagtcaagggctacaattctttagacaataatacactctgccacagatacaagggcttatccaaggcttgtggtgacatcagttaattataaattcttgattccacatatgatgttgtcataatttatcatctggaaaagaaaaattaaaatggaagaatgttggaacataaaatgaaataattatgattttaatatcattaaatcagtatgtaaaagctttgagtgatacatcaattaaaaatagtatcagctacattttttttttattttgctgag

SEQ ID NO: 874763 - DNA, 666 bp, Homo sapiens
ctacaacatgattcaaaaatgtaagtctttgtttttgttgttgttgttgttgttgttgttgttgttgttgttgttgttgtttagaaagagtgtcttgttctgttacccaggctggagtgtagaggtgtggtcatagctcactctaacctcacctcgaacttctgggctcaagtgattctcttttctcagccacaggctatcgggggaaccagccccaaatatttcaacgtaggttctttctattttccctaagtgtcggctggtctgagaaataaagagaaagagtacaaagaaacgaattttgcagctgggcctccaggggtgacatcacatattgatcacatattggtaggaccatgatgaccctgagccacaaaaccrgcaagtttttattagggattttaaaaggggagggggtgtaaggacagggagtaagtcacaaagaacacatgctccaaaaggcaataaagatcacaaggcaaaggcaaaattagaattactgaggagggtctatgtcccactgtgcacatattgtcttgataaacatcttaacaggaaacagggtttgagaccagagaaccggtctgactagaatttaccaggctggaatttcccaatcctagtaagcctgagggtactgcagaccagggcgtatttcaatcctta

SEQ ID NO: 874764 - DNA, 696 bp, Homo sapiens
ttgctcaatgtagaaaatgaggcttatttagtcatttgctgttatggaatcagtcctctttacttttgtgttataaattcaattgtaatttttaaagtaatatgccagttcatacaatgtatatttacatcaataaattcatttggctatagacatttgactatcttacaaaaagtcacaatcttaataactagaacccttattgcttacttacggttgtaatgaaagttcataacataaagagacagaaaatataattatattttctaagaattatttttactcagcatctatttaataagtcaacacccgatgtcattaagtcattgttcaagatagcactagtatgccctattgaggtaccttttccttcttatacttctgaccctaatccccaaattgatgttcctttctcaaggtgaattttctgacatgtcattaattatttttccattttgtttaatcttattacctgtggtastttgtcagatcttttgaatttagacacatgtggttgcttgctagagggattaaaacacgtcaggaatctcacttttcttgacaactacattatgacacctctagcattggcgtgttttacattttcatgtttttttctgatttgattgacacattgcctacaaattgcaatagctcttgaatatattttcttgattataccctcaagaactccac

SEQ ID NO: 874765 - DNA, 642 bp, Homo sapiens
aactgacatggaattggaattgagtcatttaaaaatgtcatctatttgaatactggctaagctcttgataacgttagacatagtggagggcatagatattgaatgagtaagagatggtacactgaaattgacattgatgcctcagtggtagcgaaccttaccatctataataagcctcttcacaaaccaccaagttggacggttaatcaacttgttaatacaattgtaaacttctggggtctatgtatttcatgtttgaattctcaggacaaaaattcctgccacgtgattacctagcttagctggatcatcttctgtgacagagattacctacctttcagagcaaaatttcagttcaaattttgtattaaattgaactgaaatcagtggccctgtagcatttaaaattggactcaattctacctccggtgaatgattctcctaggtagatcgacatacytaccttatcattgtcataaaatattggatgttttcagtttataaaattatctttaattagtagttgatgtagctgcaaaaatcaccacttatctagtggaaaatgtgaagttatttgaagtgctgaaaggtattttttcaattaaggtaaccacattctcacttctcagttgcagcttttga

SEQ ID NO: 874766 - DNA, 691 bp, Homo sapiens
gcttacaaaaaagtgttgacactctatgtcccatcaaattattctacaacaaaccagggatagacagctgcaaatttgagcattgaatgacagaatttccagggacaccagaaaactcccatggcttccttctcctttctaaaaaatgcgaatttagtggtgaataacaaaaggaggatttacaaagctagagttttgatcctagttggggaaatcaacttccaaaggatgttagcagaaacatccaatagttcttctaaatgcatctctgcaaattattaccattaaatctatgttaactgaggaaaaaaawtctaccactcaaggattcacataataaagaagatgaaactagaatattctgcttttctgccatgactattatatctaccatttggcacaaatatttctttttttagttttcttttatttttaattgacacacaataaatgtacgtattataagaaacagcatttcagtacatgtacatgttgtgtaattatcaaatcagggtaattagcacatccataatctcatacatttattgtttctttgtagtgagaacattcaaaattctttcttctagctattttgaaatatacaatacattgctgttaactatagtcaccctactggcacaaatatttctgtaaggctgtttatagttttttatttaggtacatattccac

SEQ ID NO: 874767 - DNA, 691 bp, Homo sapiens
gcttacaaaaaagtgttgacactctatgtcccatcaaattattctacaacaaaccagggatagacagctgcaaatttgagcattgaatgacagaatttccagggacaccagaaaactcccatggcttccttctcctttctaaaaaatgcgaatttagtggtgaataacaaaaggaggatttacaaagctagagttttgatcctagttggggaaatcaacttccaaaggatgttagcagaaacatccaatagttcttctaaatgcatctctgcaaattattaccattaaatctatgttaactgaggaaaaaaattctaccactcaaggattcacataataaagaagatgaaaytagaatattctgcttttctgccatgactattatatctaccatttggcacaaatatttctttttttagttttcttttatttttaattgacacacaataaatgtacgtattataagaaacagcatttcagtacatgtacatgttgtgtaattatcaaatcagggtaattagcacatccataatctcatacatttattgtttctttgtagtgagaacattcaaaattctttcttctagctattttgaaatatacaatacattgctgttaactatagtcaccctactggcacaaatatttctgtaaggctgtttatagttttttatttaggtacatattccac

SEQ ID NO: 874768 - DNA, 691 bp, Homo sapiens
gcttacaaaaaagtgttgacactctatgtcccatcaaattattctacaacaaaccagggatagacagctgcaaatttgagcattgaatgacagaatttccagggacaccagaaaactcccatggcttccttctcctttctaaaaaatgcgaatttagtggtgaataacaaaaggaggatttacaaagctagagttttgatcctagttggggaaatcaacttccaaaggatgttagcagaaacatccaatagttcttctaaatgcatctctgcaaattattaccattaaatctatgttaactgaggaaaaaaattctaccactcaaggattcacataataaagaagatgaaactagaatattctgcttttctgccatgactattatatctaccatttggcacaaatatttctttttttagttttcttttatttttaattgacacacaataaatgtacrtattataagaaacagcatttcagtacatgtacatgttgtgtaattatcaaatcagggtaattagcacatccataatctcatacatttattgtttctttgtagtgagaacattcaaaattctttcttctagctattttgaaatatacaatacattgctgttaactatagtcaccctactggcacaaatatttctgtaaggctgtttatagttttttatttaggtacatattccac

SEQ ID NO: 874769 - DNA, 585 bp, Homo sapiens
gggagtggaccagcctggacaggctgggtggggtcagtgccccccatggctgatgtggtaaccataggccctgaggtgtgagatgggagaacctgggcctcagaacagcatgtcctggagcgtcctttgtgtctcttgccaaggggttgagagagaggacaaggacactgtccyatttcagcatcaccagccctgagtgcagggtctggccacagcagggacactgagttccaggagaatccaagacacttgcggtcccctccgtgtcctgcacacgtggccctgctttgcctctggggacttgacccttcctctcaggcaaaccctcgtggtctgtttccttccttgggtcctcagtccctttcctgggtccctgggtcaatgttctcctggcccggcatctgcctgagggtccttcctctctgctcaggacagatgtgggttcctaaagcctttcctcaactcccctctgctgggctccccctaacacaaacctgagggagacaggaggtctccatgcccatccttgaaaatggggttcccttcttgtcccctgttcgaactccaaagttgtggcttttaacc

SEQ ID NO: 874770 - DNA, 615 bp, Homo sapiens
atcacaccactgcacgctggcctaggcaacagagatgacaactccattgttaacttagtggcataaaacaacaacgtgtccacttggctgtgttcttcctggcagctccagggaaaagtctgttccctcaccttttccaattactagaggccgcctgcatccttaactttggccccttcctccatcttcaaagcgagcagtacagcatcttgaaacctctctgtgctctgcttccatcctcactgacttccccgcctccctgtctcacttgtatggttattttggacccacctggataaaccacaataatctccccatctcatcatccttcatttatctgctaagtgtctttgaccatgtgccrtattcacagatcttgggatgaggatgtgtgcatctttgagaggggcttgttctatccatctctcctctcaaggccattttatcatgattgttcactacaaagtacacatgggcacctggatagggttatcctgactgtggcatcagtttttgcagtgacgtcccagcaccctccaggtcctgagagagggagacggagggctctccatgcccctagtacctctccaccttctcctcggtgacaagcttagt

SEQ ID NO: 874771 - DNA, 661 bp, Homo sapiens
aaagatggaaaaataagagggctgagactgtaaagctccccagcctcacctacctggcagcaaggacacgccatgggaaacttctgtgtgtgtgtgtgtgtgtgtgtgtgtatgtgtatgtgtgtgtgcaccaacagtgttgcataattccagacctgtacaaggatagagcaaattagaaccaagcttactcctggggaggagagcggtcttcttctaccctgatttcacctcttgctcgtgaataatggtgatcatggtcccccacatggtctctctgagtcatagggagcacccacagagtttggtggtrgcacattagcaggtcagcacagagcctcgagagagcagcgctctccagagagaacaagagtccttatagtccgagctctctcttctgaaggaatgtggctagaactgacctggcaaaccaagaaaacattcctggatttttgagatttaacaaaggagggagattctgggaagcggagaaagacaatattttcctgctaggtggtagggtctgggggtcaattaatttgaatattaaaaggatctctttaggaacacttatacactgttggtgggagtgtaaaattagttcaaccattgtggaaagcagcctggcgattcttcaaagagctaaaagcagaattatcgt

SEQ ID NO: 874772 - DNA, 639 bp, Homo sapiens
ataccatttgacccagccatcccattactgggtatatacccaaaggattataaatcatgctagtataaagacatatgcacatatatgttaattgtggcactattcacaatagcaaagacttggaaccaatccaaatgtccaacaatgatagactggattaagaaaatgtggcacatatacaccatggaatactatgcaggcataaaaaaatgatgagttcatgtcctttgtagggacatagatgaagctggaaaccatcattctcagcaaactatcgcaaggacaaaaaaccaaacaccgcatgttctcactcataggtgggaattgaacaatgagaacacatggacacaggaaggggaacrtcacacaccagggcctgttgtggggttgggggagaggggagggatagcattaggagatatacctaatattaaatgacgagtcgatgggtacagcacaccaacatggcacatgtatacttttttaactaacctgcacattgtgcacatgtaccctaaaacttaaagtataataaattttaaaaaaagttaaaagaaaaacaatatgaattcttgcaatccatgaacacaggatatctttccatttatttgtgtcctgtttactttctttaataagtgt

SEQ ID NO: 874773 - DNA, 624 bp, Homo sapiens
ctcatcattcagctcccatttataagtgagaaaatatggtgtttggttttctgttcctgcattagtttgctgaggataacgactcccagatccatccatgtccctgcaaaggacatgatctcattctttttatggctttgtagtattccatgatgtatatgtaccacattttctttatccactctattattgatgagcatttttgttgattccatgtctttgctattgtgaatagtgcttcaatgaacatacatgtgtgcatgtatctttataatagaatgatttatattttttgagtacgtacccagtaatgggattgctggatcaaatggtatttctgcctcwaggtctttgaggaatcgccacactatcttccatgatgttaaactgatttacactcccaccagcagtgtagcagcatataaatgttcccttttctccacaacctcaccagcatctattttttgactttttaacaatagccattctgattagcgtgagatggtatctcattgtagttttgatttgcatttctctaacaattagtaatgttgaggtttttttcaaatgtttgttgggcgcatgtatgtcttttttttgagaagtatctgttcatgtcctttg

SEQ ID NO: 874774 - DNA, 647 bp, Homo sapiens
gagtccctcattttcaattgtttgtaatagtttcattagaaatggtaccagatcttctttgtacctctagtagaattcagctgtgaatctgcctggtcctgggcttttttggttggtaggctatttattaatgcctcgatttcagaactcattattggcctattcaaggatttgatttcttccttgttcagtcttgggaggctgtatgtgtccaggaatctatccatttcttctagattttctagtttatgttcatagaggtgtttgtagtattctccaatggttggttgtatttctatggagtcattgatgatattccccttatcatttctgattgtggctatttgattcttaygttttcttttttattagtctaagcagtctatctattttattaatttttttcaaaaaatcagctgctgcattcattgatttttgaaggatttttcatgtctctatctccttcagttcagctctgatcttggttatttcttttcttctagctttggggtttgtttgctcttgattctctagttcttttagttgtgatggtagtgtgttgagatctttctagctttttgatgtgggcatttagtgctataaacatccctcttaccaccactttagctgcatcccagagattctgg

SEQ ID NO: 874775 - DNA, 596 bp, Homo sapiens
ttaaggaaatataccaccaaaatggcccatcatatgaattcatctcagggaaaattattatgacctaacacagatttgaatgtaagtgtttagggtcctaaaaagataaatgaatggcatccatttttaataaatgatgaattayggaacaacatgtagaaattttaaaagaacatatagctatgaaaaagaatgaaatagacatctggaaatgaaaaattttgttatttacaaagaggagctggtactaagacaaagaaagtcttatcagcttaaggagtttttgggctgagacgatggggttttctaaatatacaatcatgtcatctgcaaacaggacaatttgacatcttctcttcctatcttcataccctttatttctttctcctgcctgattgccctggccagaatttccaatattatgttaaataggagtggtgaagagggcattcttgcattgtgccggttttcaaagggaatgtttccagcttttgcccagtcagtatgatattggctatgggtttgtcataaatagctcttattattttgagatgtgttcaatcaatacctagtttattgagtgttttttaacatga

SEQ ID NO: 874776 - DNA, 611 bp, Homo sapiens
actgctcagatactttcacggaattactctcagctgaagaaaaatgtctgacccaatgtcatgtcctctatcctgtaagagtccatatccaatggctggtcaatgcaggggtataaaatctcaatctccttccctcaaagtgaacaattttgaagggatatcacagctcaagtgttcccatggaattgcctgatgtctttgttaagattgcatagcagttcagttctcccctctgcttaatcctacttcctgtacttcctccaggtgttcattcatgcaagcacatatgccattaaatttcttgtatgaaactttccaccagcgagcttgtttctcatggaatccaatgtaagacaactggtgtgagagtttgattttagatactatagcgaataaggttggaatgacactaccttgagccygaatgacactaccttgagcccaaatgacacttttctgagaactagaaagccttgcccttagtcatctgtcagaaaattattgccctaaatatacaaatctccagcgattataaaggtggaaggtactcctacacttgagctgcataacagaaagtggctgtcttgaagtggaaaggtagatttgtgcca

SEQ ID NO: 874777 - DNA, 576 bp, Homo sapiens
tctaatgttgacagtggggtaacaaagtctcccattattattgtatgggagtttaagtctctttctaggtctctaaggacttgctttatgaatctgggtgctcctgtatttggtgcatatatatgtagaatagttagctctgcttgttgaattgatccctttagcattatgtaatggccttctttgtctcttttgatctttgttggtttaaagtctgttttatcagagagtaagattgcaacccctgccttcttttgttttccatttgcttggtagatcttcctccatccctttattttgagcctatgtgtgtctctkcacgtgagatgggtttcttgaatacagcacactgatggatcttgactctttatccaatttgccagtctgtgtcttttaattggagcacttagcccatttagaatgtatccatttcttctagattttctaacttatgtgtacaaaggtgtttacagtattctctgatggttgtttgtatgtctgtggggtcagtggtaatgttccccttatcatttctaattgtgtttatttgaatcttctctatgtttagtttattag

SEQ ID NO: 874778 - DNA, 640 bp, Homo sapiens
tttggagaatatgagagcaagtttggaattcacactaatgaaatgaaagagctcaaacatttaatgtttacttaaatatattttagggaaaaggtagataccatggaatacatttcttttaagtcataactctgtgaatatataaggtayacctcacacatggttatcaggtgctttttctttttctccttgtccacccttaaagccaccatttaatgttcttactaccttgactcctaaactttatgaaaaaaaaaaaaaacaccaaatcttctcctcttagtttctttatgtccttgtaatccagttttttactcccagaactctcttggaattgcattttgtaaggttgtctattgccccaataataagaaaatttagtagtcttttttaggagactttgagtctatgacgttacagacttacctgaaattctcttttctattgtccttgaagttctgaacactgcactccaatatatgccattctggcatattgattgttttgagttaaagaggaagtgggaagggggagagggagaaagaaaaaaaaagaatgagtgagagagaagaaagagagagaaagaaggaaggaaggaaggaaggaaggaaggaaggaaggaaggaaggaaggaaggaag

SEQ ID NO: 874779 - DNA, 600 bp, Homo sapiens
tattctgcaccctgtgcagcttttttatgcagtttcatctgattacgttttattaagatcatttttctccagtcgccttagtaggctcattgattgtttatgagtgcaaagaaagatattcatatctttacatttgaaatatttaaagttctaaattatctctcacgcccagactgggttcagcccgaggccctgcagacagctccacgagcatcaccctcatcctggtcaggctaaagctaaaagtgcaacttctaccacctctcatctccctctagccctgcagcctgtragcctcaagggtacccattattggctggggcagagtagaataaaggtggcctgggcctagggtgagaactgactgaaccaggatgtggggctgggagccaggtctttttccatccttccaacttccctttttaaacaggttttccaggcaattctaaatgcctcccaaacaactgccaccgggcctgaggggagggcagaaacaggatgatcttgggagatggccggcttagatacctgcactggggaatttggggtggttggatgtaaaagacatcgtcatcctctctctggccactcttaacacct

SEQ ID NO: 874780 - DNA, 624 bp, Homo sapiens
cccaaatcggtgcattagaaatctagacactttccttcattcttgccttatatatgctatttcatctatcttgattgaagcagagcataatctaaacaaaagttcaagtatttctctgcttcaagaagaaacaggcaacttgtaatttcctgagtagataatggggtttatgtgaactataaactgatactgtggtattatgacagttgtcagcacagttagcttagactcttttggaaacctaattctaatggaaggtgggccagtggaaagtggccaatatagaaatgttgctttataatgatcattgcagaacccatttctgttagtccacagtgtactgttaagttttccacaatatcagccacaggaacatggatggatggagcatagagaaagaggaccaggcaaggaaatgcataaagaaattagtctttttcagtgcagtcattcwtctagggctcaatggtccacaggggtcttggtcttctgcatttaagccaataggtgtggtattataaatggattttgctgcctaacgaatggaaacagaatactcttcatttgtcctcatgcttaaacacagataggtattagaaatatctccaatgatcttggcctgcc

SEQ ID NO: 874781 - DNA, 613 bp, Homo sapiens
cttcggcttggatgaggtaattggcattgatgatgactgtccctggggttaattcactctctttagaccctgaagcgagagtggtacacagtgttttatgtcttgtactctagatggagattgcctgaaggaaagggataaataaattctacatggaggaaagttaaaggactgttagacttggttcagtagcacattctgcatcccttctgagaatagaagtttcattctcaatcaagaacatgaagtttcccatgtgtgaatagaagctcaataaatatttaatcaaaagaaatgctaaataggagtggtgagagagggcatccttgtctttcaccrgttttcagagggaatgcttacagcttttgcccattcaatgtgatattggctgtgggtttgtcataaatagcccttattattttgagttatgttccatcaatatgtagtttattgagagttttaacatgtagaaatgttgaattttatcaaaggccttttctacatctgttgagaaaatcatgtggtttttgtctttggttctgtttatgtgatggattacgtttattgatttgcttatgttgaaccagccttgcatcccagggatgacgctgac

SEQ ID NO: 874782 - DNA, 665 bp, Homo sapiens
ctcttatcaaaatctaaatgattctaaaataagctttattattcaatggtagtgaattttgcttgaaactgccatattcatatataagtctggaatatttataaatttatgttatctttttaaagatcactaagacagtagagcccaagaagttcaaaatagttttcctttcactttttagtttcacatatgrtgaattatgctaaagaaacattttaaaagaagaaagctaaattatgaaaataatggccggggcagtggctcacatctgtaatcccagcactttgggaggccaaggagggtggatcacctgaggtcaggagtttgagaccagctggatgaacgcggtgaaaaatacaaaaatgagctgggcatggtggcaaacgcctataatcccgctactcgggaagctgaggcaggagaatcacgtgaacccaggaggcagaggtttcagtgagctgagatcacaccattacactccagcctgggtgacaaagcaagactcaatctcaaaaaaaaaaaaaaaaaaaggaaatatttataacatcattatttatatcagtgaagcattgccccctgggaaaaggaaaaaaagtttaaaagaaaaaattatattttagaaaaatggctgtattttttatttagaaaaatggctgtataaataa

SEQ ID NO: 874783 - DNA, 602 bp, Homo sapiens
atataactatacaactaactatataacttgctgtctatgcacaaaattattgaaagtattatgtaaaattaccttcagactatgtctataaggaatatataaaacaaaatgacaatttgagttcctcttttcctaattgaataccctttatttccttctcctgcctgattgccctggccagaacttccaacactatgttgaataggagyggtgagagagggcatccctgtcttgtgccagttttcaaagggaatgcttccagtttttgcccattcagtatgatattggctgtgggtttgtcacagatagctcttattattttgaaatatgtcccatcaatacctaatttattgagagtttttagcatgaagggttgttgaattttgtcaaaggccttttctgcatctattgagataatcatgtggtttttgtctttggctctgtttatatgttggattacatttattgatttgcgtatattgaaccagccttgcatcccagggatgaagcccacttgatcgtggtggataagctttttgatgtgctgctggattcggtttgccagtattttattgaggatttttgcatcaatgttcatcaag

SEQ ID NO: 874784 - DNA, 701 bp, Homo sapiens
tagattcacgtaagtgcagccacaatcaaagtaatattctagcaccatgagaaccccctagtgctggtgctcccctttatttaatcttcctccatgcccccaatctgttctcatcctggccactctgtttatagaggttacactccagcttctcctgcctcttggacaagcccagagccagtttcttcctcctcagggccagccagggagttctaagcttctgggatgcatgagggtctcatgtggtctgaataacttctgaaccccagctcatctctaccagggaaacagagtatttaagtctccaggcagcacagctcccagcggctcaccaggttcttacagtcccagcacacgacgatagagttatgctccccagagcaggaaggaccctgctgggaagcagctctttcagggcggtgccaatcacacrtgcaacacatttctcctgagcacctttaacatgcagggtgcagggccacacctgggcatgcaggggcctttcactcacacagaccttgtccaggtctgattctgccatcaccagctgtgtgactttgggcaagtgacttaacctctctgaacctcaggttcctcgttagtgaagtggcatgtaaagcttcaaaaaagtaaaacatttaaagcactgagcctaccagagtgtacgtgcagaataatcactgctgtgaccatgccagcca

SEQ ID NO: 874785 - DNA, 442 bp, Homo sapiens
cggctacaggcagataccccattagacatctcatggctagtgtgctccttcgtatcacttatcgcagttgcaatttaacatttatgtggacaattgtttgataaaggcacacctctcttcattgcactgtaaggtaagcacccaggaagacagagaatgtgtctgtctgtttttgctcaccagtatagtccacacctaacacaaggccaaacacagggtagaagctcaataaatatctcttgaattaataagtagaagaaaaaagggagaargaaagttagaaaagaaagaagtgagtaaaggaaagaggatggggagaggaagggaaagaagaaggaaggaaggaaggaagaaaggaaggaaggaaaaaggaaagaaggaaggaaagacagaaggagggagggagagagggagggaggaaaggagggaggaaagaagggag

SEQ ID NO: 874786 - DNA, 536 bp, Homo sapiens
catgcaactgcggtgcagcttattctaaataaacccaagatggaaggagtggggccaggacatcccttctcctccagtctccctccaggcgggctcttcccactgctcttagaaaatgaggccaattcacaacgtaactgtgccacatgccgctgtacactaaaaaacagtgtttaggccggtcacagtggctcacgcctgtaatcccaacaccttgggaggccgaggcaggcggaccacgagaccaggcgagaccagcctggcyaatatggtgaaactctgtgtctactaaaaatattaaaaaatagctgggcgcagtggcgcgcgcctgtagtctcagttactcgggaggctgaggcaggagaattccttgaacctgggaggcggaggttgcagtgagccgaaatcgtgtcactgcactccagcctgggcaacagagggagactctgtttcaaagaaaaaacaaacaaacaaaaaaacagtgtttagctgaaagagagcagtctcctaatttacagaagggaaggcagataaac

SEQ ID NO: 874787 - DNA, 633 bp, Homo sapiens
cttggatttggcaatggatttttacatataatgccaaaagcacaagtaacagaagaaaaaatggataaactggacttcatcaaaactgaaaatttttgtgcatcaaaggacattattaagaaaatgaaaggagaacctacagaatgagagaaaatatttgcaaatcatatttcttttgagagtctagtacccacaatatataaagaattcatacaacttagcaacaaaaagagaaacaamccaattaaaatatgggccaagcccttgaatagacgtttcccccaaaaagatatacaaatggccaaaaagcacataaaaaaattcaacattattagccattagagaaacaaaaatcaaaatcacaatgagataacactccatgcccattagaatggctaaaaaattttttaaagggaaataaatattggcaagcctgtggagaaattgaaaaccttttatattgctgttgggtgtgtaaaattggttcagctgctgtgaaaataggcagttttacagttcctacaattctattgaattgagctacaattctactcctaggtatatattcaaaagaattcaaaacaagtactcaaataaatacatgaacatgaatgttcatagcagcactattta

SEQ ID NO: 874788 - DNA, 633 bp, Homo sapiens
cttggatttggcaatggatttttacatataatgccaaaagcacaagtaacagaagaaaaaatggataaactggacttcatcaaaactgaaaatttttgtgcatcaaaggacattattaagaaaatgaaaggagaacctacagaatgagagaaaatatttgcaaatcatatttcttttgagagtctagtacccacaatatataaagaattcatacaacttagcaacaaaaagagaaacaacccaattaaaatatgggccaagcccttgaatagacgtttcccccaaaaagatatacaaatggccaaaaagcacataaaaaaattcaacattattagccattagagaaacaaaaatcaaaatcacaatgagataacactccatrcccattagaatggctaaaaaattttttaaagggaaataaatattggcaagcctgtggagaaattgaaaaccttttatattgctgttgggtgtgtaaaattggttcagctgctgtgaaaataggcagttttacagttcctacaattctattgaattgagctacaattctactcctaggtatatattcaaaagaattcaaaacaagtactcaaataaatacatgaacatgaatgttcatagcagcactattta

SEQ ID NO: 874789 - DNA, 601 bp, Homo sapiens
ttgaaatgatgtccccttagggctataagttatagccacaacttaagttcaaggtaaaggtgactggggttgctcctttggctgacataaggaataaacgtcagcccacgaggcctggcaggggctgggagaaggcatatgctaaggcagaagcaagaaggagcagggctgccttgctttgcgagggggcttttctcagagctatacacagacccagttgtagagcagtcctcataacccataaccccatgatgccayagtcctgcacagagaccaccctagctccacattgcctatagggtaaaagtgaaatggtctcccatagggtttgtgcaaggcccaccacagtctgaccctgcttctgctccactttcacctccagacctgcactgtggatgatgtgctgctgaggggtaagcactccattctatggtgtgtgtatgtagtgtggatatgtagtatgtgtgtatgtgtggtatttgtgtgtgtcgtgtggtgtctgtatgtagcatatgtaggtggtatgtgtggtgtgtattcatgtgtatgtgctaggtgctgtgtggtgtgtaagtgcagtgtgtgggtgtgtggtatgcca

SEQ ID NO: 874790 - DNA, 649 bp, Homo sapiens
gaaaattctgttcaagtgaggctgggacaggtgagaaaagagggccacccagggcaggcctggctctgagaagagacagcacctgggggtgggaagtctggcattcagatggctctgtgggattccacagagagtggagaaaaataagaaccagaggaatggggttgagagtacaaggtgacttccagcccttaaaggggtgggagcctctctgggcagccccygacctgtgtacatagagcataagctggatttcagcccactttcctcctgggatcaactgtatacatatggacagctatcccaggcagtgggccaggcaggccccatcagaggagggggacccactcaccagcctgccagcaaagattgggggacttatagaagaacaggattcacacggaggagggcagagccctgtgttccccacaattccatggctttaggagatagctgagcaagcttccagttgctgttttcaaagccaggtattagcaaactgaaatggcccatgcagggaagtcagggctgtgtaagaattaacagaatgggatgagagggcaccagaagcgtgaggatgatccgctggaattgctaaaaaaagcaaaagctttctgtaggaattctacatctgccctggcaaggacag

SEQ ID NO: 874791 - DNA, 607 bp, Homo sapiens
agacaataatttgcttcatagggttattagaaggattaaagtatttaatagctataaagcgggtatagcagtaagcaccagtaataagcactatacacagagccaattagcgtctgtgcttatgtaatacatagaagaaacataggtctcaggattgttggaatcttaagttgtgtaattttccttctgcatattatttgactaagatacaattagagaattttggagttgtaatagattttagaaattattgtagttttttaaattaattaattaattwatttatttatttatttatttttgagatggagttttgctcttgttgcccaggctggagtgcaatggcattatctcagctcactgcaacctctgcctccctggttcaagtgattctcctgcctcagccccctgagtagctgggattacaggtgcacaccgccatgcctggctaattttgtatttttagtagagacatggtttctccctgttggtcaggctggtcttgaactcctgatctcaggtgatccacctgcctcagcctcccaaagtgctgggattacagtcgtgagccaccatgcccggccagaaattattgtggttttatagc

SEQ ID NO: 874792 - DNA, 614 bp, Homo sapiens
gaaatgaacatagtgcatttttgaactttacacacacacacatgtgcacacacacccccctacattttcttgactgacacagtagtccgcattagaattaagtgataatgttttcctcataggtttctttggagttaatattcaccttggtgtatttcagttacccaaggtatgcattaatggcccagaatgcacaccttgggagatatcttaatactattatgatatggtttctcagtttcctatttgaatttgaagaattcttttattttctcttttattgaatctgtcctatttctatgaaatgacaaatgggaaataaggatagaaaagtagtaaaggcctctctctgctcyttaatgatgcttttattgtaaaatcttgcatttttttaattttaatttttcttctcaaaactttcttttacctgaagcctactgttgtttcaccatcttatatccttcagctcagttaagactaagtttccatttcctaatttaagttggccaagaacattaaattagcaggtgtttgtgttattttgtttcctaatagaacatgaagctgcccaatgaccagtgaagcaattggtatgcagcatcttggcagagaga

SEQ ID NO: 874793 - DNA, 520 bp, Homo sapiens
tgctagacattttcacttgcattatttcattaaatcttacaaaactactacattattagtcccactttagatatgaggaaactgaagttaagggggagtaaatgtcttgcctcaaatcacacagctagaaagtggtaaatgcagaagcaaaacctgaataactgagtgcccacaatgagtcaatttctgaagactctggaatgaaagacaaaacatactaggaagctttgggtgggggttggggacagacacatactctcatataagcaaaaatagttcactaggaaaacagagaagggactccaacccaggctggkaagtcatgaaaagacctattttatatttttaatttgctttatttttaaattttagattcaagaggtatgtgtgcatgtttgttacattgatatattgtgcgatgctgaggtttgagtttcaactgaatgcatatctcaagtggtgaacataatagttgacaggtagtttttcaacccttgcctccttccctccccacttttgg

SEQ ID NO: 874794 - DNA, 608 bp, Homo sapiens
tcctgggcctttttgttgaaagttttggattattgattcaagctctttatttattaattacctgtttagtatttttatttcttcttgattcagtctttgtaggttacatttctaggtatttaccaatttattctagcttattaaatttttggcatataattattcataatagtctcttgtaattcaaagggactacacaacagagaacagttaacaagatggcaatggtaaatcttttcctatcaacagttaccttaaatgaaaataaattaaactttygaataaagaggtatagagtagttgagtggataaaaatactaagattcagctatatgctgtctaaaagagactcacttcagctttaaggacacaggctgaaagtgaagagattgagaaaatgatattccatgtaaatggtaaccaaaaaaaaaaaaacccgaaaaacacaaaacaacaaaaaagcaggaatgtctctacttataccagacaaaattgattttaagccttgactattgtttatagagaaaaggaaggccattaaaaattaataaaattttacttcaacaaaaagatacaattataaatatatatatatatatacacccaac

SEQ ID NO: 874795 - DNA, 608 bp, Homo sapiens
tcctgggcctttttgttgaaagttttggattattgattcaagctctttatttattaattacctgtttagtatttttatttcttcttgattcagtctttgtaggttacatttctaggtatttaccaatttattctagcttattaaatttttggcatataattattcataatagtctcttgtaattcaaagggactacacaacagagaacagttaacaagatggcaatggtaaatcttttcctatcaacagttaccttaaatgaaaataaattaaacttttgaataaagaggtatagagtagttgagtggataaaaatactaagattcagctatatgctgtctaaaagagactcacttcagctttaaggacacaggctgaaagtgaagagattgagaaaatgatattccatgtaaatggtaaccaaaaaaaaaaaaacccraaaaacacaaaacaacaaaaaagcaggaatgtctctacttataccagacaaaattgattttaagccttgactattgtttatagagaaaaggaaggccattaaaaattaataaaattttacttcaacaaaaagatacaattataaatatatatatatatatacacccaac

SEQ ID NO: 874796 - DNA, 525 bp, Homo sapiens
catttttttttaatactacttctatttctccattcaacatttatcttttagatatgaccctctttatctaaatctcatcaattatcctttcccttcattttaacctcattttacaaattacttgcttcttccatctctcagtcatttctttttctttacatttatataaggtttatcatatcccttttcccaccactttctttctcatgctttataagtatttattgagtttttctatgtgtctggcatataggaacatactatgacrtagaccttgctttcaagaacttccccatctagaagagatagacacataaattaataaatttttaaaaatatagaaagttcatgaatataaataagacctgcagttttatagaagccctggagaatgtgaaatgggttgagagcggatgtcatcaagaaaaactacctggatgatgtttactacctgtaaggaattgacggaggaggtgatggaaagtgctctctaggtcagtgagacagcgtgacaaaaagactcag

SEQ ID NO: 874797 - DNA, 659 bp, Homo sapiens
  misc_feature 651, 652, 653, 654, 655, 656, 657, 658, 659: n = A,T,C or G
catctagacaaataaaaagtcaacctatatttctttgctgttgatatgattttatacccagaaaacataaaatactttactaaaaggctcctggaactgagacacgacttcagtaattttttaggatacaaaatcattgtagtaagaaatcaatagcatttctatacaccaataacattcaagttgagaaccagaatcaagaactcaactccatttacaatagctgcaaataaataaataaataaaacacctaggcatgcatctaaccaaggaagtgaaagatctctacaaggagaactatacaacactgctgaaagaaatcatagatgacacaaacaaatggaaaaatcatttcaatttcatcaactggaagaatgaatatcgttaaaatggccatgctgctcaaagcaatctacagattcaatgctattcctatcaagcaaccaacgtcatttttcacagaactagaaaaagaactattytaaaattcatatgaaaccaagaaatatcttgaatagacaagcaatcctaagggggaaaaaaaaaaaaaaaaagaagccagaggcatcatattacttgacttcaaactacactataggctacagtaacacacacagcatgatactggcacaaaacagatcacaggctgannnnnnnnn

SEQ ID NO: 874798 - DNA, 598 bp, Homo sapiens
aactttttgtataaaatatgaagaaagggtccagtttcagtcgttagcatgtgacatccagttttcccaacaccatttgttgaaaagactattatttccattgaacagccttggcattctggttgaaaatcaactattaatgtaaacattgatttctagacycttagctgtatcccattggtctatatgtgtatccttatgccagtacaagtctgtaattattactatagctttgtagtaaattttgaaatagagaagtgtgcatactccaaatttgctcttcacttttgagattactttgactatcaggagtcccttgcatttccacatgaatttttggatgggcttgtcaatttccacagaaaaggctgttgggatttctatagagacatggtgactgtatatcaatttggaaagccatcttaataatgtctcccaatctctgaacattggtgtcttgtcatttatttactcctttttttttttaccttctttcaagtatgttttgtagttttagggtataacttttgctctttttgaataattaatttctaagcattttcttttttgatgcaattatcaatggaattgtcttaat

SEQ ID NO: 874799 - DNA, 598 bp, Homo sapiens
aactttttgtataaaatatgaagaaagggtccagtttcagtcgttagcatgtgacatccagttttcccaacaccatttgttgaaaagactattatttccattgaacagccttggcattctggttgaaaatcaactattaatgtaaacattgatttctagacccttagctgtatcccattggtctatatgtgtatccttatgccagtacaagtctgtaattattactatagctttgtagtaaattttgaaatagagaagtgtgcatactccawatttgctcttcacttttgagattactttgactatcaggagtcccttgcatttccacatgaatttttggatgggcttgtcaatttccacagaaaaggctgttgggatttctatagagacatggtgactgtatatcaatttggaaagccatcttaataatgtctcccaatctctgaacattggtgtcttgtcatttatttactcctttttttttttaccttctttcaagtatgttttgtagttttagggtataacttttgctctttttgaataattaatttctaagcattttcttttttgatgcaattatcaatggaattgtcttaat

SEQ ID NO: 874800 - DNA, 607 bp, Homo sapiens
tgttatcagaacaatgtgtacaatgccagacaatctctacagttggctgatttgattgtaaataacacaaactattttttttcatgtaattctttttttctttctttttttttttaagacagtgtctcactttgttgcccaggctggagtgcaatggtgcaatctcggctcattgcaacctctgcttctygggttcaagtgattctcctgcctcagcctcctgagtaactgggattacaggtgcctgccaccatgcccggctaatttttgtatttttagtagagacagggatttgccatgttggccaggctggtctcaaactgctgacctcaagcgaaccgcccccgtcaacctcccaaagttctgggattacaggtgtgagccactgtgcctggcctcatgtaattctttaccaacacaagctagcaaagaacaggccccaaagagaaagacaacatagagctgcatgatgacagatgtggatatgaatggctgattccaggcccacgtgagcataaatgcagccctatgatcgtaaagattcctcatccatctatctacccaaactagcgccccctttgctttctaatctttattgcccttattt

SEQ ID NO: 874801 - DNA, 688 bp, Homo sapiens
ctgaaaaacacaagggaaacatatggagaaatacaaaatatacaaatgcaagttatatctgaatcatttacatctactctaacctatattatcttttctctcacattccaaattatcttttctatttagtttttgaaattgaaaatttttttcaaactaaaagcttctaattcacttgcatttaagtcatcaaaatattgtttcatgaaagctttctgatctctagaattttttgtaatggatgttttaaaaacttcctcacctcatttcctgtccctagagaaagcatgacaaccttcaaaaggttcaagtttcatctgaagttgaaaaatcaaggtttagaaattgtctcaccttggagaaaggttattaatcattcttcagtggaatccacagaatatttgaacattcacctgaggatagttttgaagacttatcacattgggaaggacacctmcttttctgtcatccaaggtggtttgtgatctccacaatggggctcagtcttattgtctctgctttgcactggtggcatgtggttctccccactatgctgatagccccatggtgattccaagtaaaaagagaaaggtggaggaagggagcctgtgtcctgtgaagtctctgtaagatgactgcaaggccctgcaggtctgctttttgtctttcccaggctagcacacacagt

SEQ ID NO: 874802 - DNA, 688 bp, Homo sapiens
ctgaaaaacacaagggaaacatatggagaaatacaaaatatacaaatgcaagttatatctgaatcatttacatctactctaacctatattatcttttctctcacattccaaattatcttttctatttagtttttgaaattgaaaatttttttcaaactaaaagcttctaattcacttgcatttaagtcatcaaaatattgtttcatgaaagctttctgatctctagaattttttgtaatggatgttttaaaaacttcctcacctcatttcctgtccctagagaaagcatgacaaccttcaaaaggttcaagtttcatctgaagttgaaaaatcaaggtttagaaattgtctcaccttggagaaaggttattaatcattcttcagtggaatccacagaatatttgaacattcacctgaggatagttttgaagacttatcacattgggaaggacacctccttttctgtcatccaaggtggtttgtgatctccacaatggggctcagtcttattgtctctgctttgcactggtggcatgtggttmtccccactatgctgatagccccatggtgattccaagtaaaaagagaaaggtggaggaagggagcctgtgtcctgtgaagtctctgtaagatgactgcaaggccctgcaggtctgctttttgtctttcccaggctagcacacacagt

SEQ ID NO: 874803 - DNA, 592 bp, Homo sapiens
ctttgttcttttttctccagattgttttagccatcaggacctttgtgattccacatgtattataagattttgtctctatttctataaaaaaatgcttccaggatttcgataaggattgcattaaaactatggatcattttgggtggtatagacattttataatattaaatcttccaatctgtgagcatgaaatatctttccatttatttgtgccttctttaatttctttaatcaatgttttatagttttcagtgtacaagtctttcacctcctgttaagtttattcctatttcatcttttttgatgttactataaataggattattttcctagtttccttaatttccaacagcttgatgttcatatataaaaacaatcctgatttttgtatgttgattttgaatcctgtcagtttactgaayttgtttagcagttctatcagtttttgtggagactctaggattttctacatataagatcatgtcatctgcaaacagagataattttacttctttctgatttaaatgcctcttatttcttttcctttcctaattgctctggctaggacttccactactgtagggaatagaag

SEQ ID NO: 874804 - DNA, 383 bp, Homo sapiens
gaaaaatgacatttgaagttaggcaatgctaggggacttttttattttcctgtggccaagttttatttattttcttttttctttttacttttacaactgttatttttagcttcgtgggattgtgcaggtttgttacatggataaattgtgcgtcattgaggtttagggtacaaatggccccatcaccaaggtggtgatcatggtccttgataggtagtttttcaacattcacttccctcacacscttcccccactagtaatctccagtgtccattgtttccatctttatgtccgtgtgtactcagtgtttagctcctacttatatgtgagaacatgcagtatttggttttctgttcctgcattagttcacttaggataatggc

SEQ ID NO: 874805 - DNA, 628 bp, Homo sapiens
gcctagtggagctgtgagaagagggctaccatcctctagaccccagaatggtagatccactgacagcttataccgtgtgcctggaaaagccacaggcattcaacaccatcctgggaaagcagccaggagggaggctgtaccctgaaaagccacaggggtggagctgcccatgaccgtgagaacccacctcttgcatcagagtaacctggatgtgagacatggagtcaaakgagattattttggagctttaagatttgactgccctgctggattttggacttgcatgggacctgtagcccctttgttttggccaatttctctcatttggaatggctgtatttacccaaggactgtacccccactgtatctaggaaacaactaacttgcttttgattttacatgctcataggcagaagggacttgccttgccttggatgaaactttggacagtggactttgagttaatgatgaaatgagttaagattttgggggactgttggaaaggcatgactagttttgaaatgtgaggacatgagatttggaaggggtcagggtggaatgatatggtttggctgtgtcctcacccaaatctcatctttaatttccatgcattgtgggagggacccca

SEQ ID NO: 874806 - DNA, 593 bp, Homo sapiens
tcaaccgaaatgtcatttgcattatacatgttcatttgccaaggaccttgtaaggtaagccagtctcatcagcattgaaaacctgctcctctacgtaacctttttccctgtaacacttagcaggtattcttaaaattcctctgcagtcttcttatctgcagaacctgcctcacattgaagcctaacattttttatgtgatatcaccattagaaagacacaagctggccagtactagccaaggaggttttaacattttcctgaccttgggtaacacakccataaatgtcttggactttcagtctcacaacaatgctatccagtatgctttttttttaattgaaaaaataagctatcatctcattaattcacaaatttaacttttctttgttttccatggcttcatttataaatattactttaacactttctggaacagcctcagatacagattggcaaattttttcttccttttctggttgtaacatattaatattgagctcccagtggaaagcactagaactcatgcctaaaggaagcttatccaaatgacatattttctctataaaacacatcacagacttcctgcatttag

SEQ ID NO: 874807 - DNA, 674 bp, Homo sapiens
ggctaaagcttatcttactgcagttacaaatgtattctgagcaaagctgtgatcacagccattttgtttttcattgttttaattcccagctcgaatctttcagagcacaccagcctcagtgccctgcacatagtagggccttgagaaaactttttggcatagctgagcatcagggctcaggaagccagttgagggtgtgcatgtggcagtttatcactttgagactcagagggttaatcccagcctggctcccctttggctttgacctaaagaccttcatccctaaatccctctgaaacaaaggcttggaccmaggtcctgggcagggcaaaaggagcatagggaagctgcaggcagctacagctggttttattttattttatttttttcccccaagacggagtctcgctctgtcacccaggctggagtacaatggtgcgatctcagctcactgcaagctccgcctcctgggttcacaccattctcctgcctcagcctcccaaatagctaggactacaggcacctgccaccatgcccagctaatttttgtatttttagtacagatggggtttcaccgtgttagccaggatggtctcgatctcctgaccttgtgatctgcctgcctcagcctcccaaagtgctgggattacaggcacaggcgtgagccactgtgc

SEQ ID NO: 874808 - DNA, 640 bp, Homo sapiens
ctaaaaagggaagcccatcagactaacagcagacctctcagcagaaactctacaagccagaaaagattgggggccaatattcaacatttttaaagcaaagaattttcaacccagaatttcatatccagccaaactaagcttcataagcaaaggagaaataaaatcctttccagacaagcaaatgctgaaggattttgttaccaccaggcctgcctggcaagagctcctgaaagaagaactaaatatggaaaggaaaaactggtaccagccactgcaaaaacacaaaatataaaggtcaatgataccrcaaagaaactgcatcaactagtgtacaaaataaacaaacagcatcacgatgacaggatcaaattcaagcataacaatactaaccttaagtgtaaatgggctaaatgccccagttaaaagacatagactggcaaattggataaggagtcaagacccattggtatactgtattcaggagacacatgttacgtgcaaagacacacacaggctcaacataaagggatgtaacaaaatttaccaaacaaatggaaagaaaaaaaaaagcaggggttgcaatcctggtctctgacaaaacagactttaaaccaacaaagatcaaaaaagacaaagaagg

SEQ ID NO: 874809 - DNA, 633 bp, Homo sapiens
gacagacctccatagtaggtattccataaatatttgaaaaatcacaaattattctgagaggagaaagtgtgacattgctccggtggcaggacttgtcttggaaagagaggaagaagaaattttcactctgaaggatagggagaaataaagagaaactgatgtaggaaacaatttttttattgagaagagatcagatacaatgatgctgcagaaaagatcttgctgacaattattattaaccacagtgttgttggtttaacttaaaaatcactgtccacagacttcctagaaaaaggaacacaacataattgtatttggcagttcagccccatcttcttcttttttttgagacggagtctcactytgtcgcccaggctggctggagtgcggtggcgcgatctcggctcactgcaagctccgcctcctgggttcacaccattctcccgcctcagcctccggagtagctgggactacaggcgcccgccaccatgcccggctaattttatttttgtatttttagtagagacggggtttcaccgtgttagccaggatggtctcgatctcctgacctcgtgatccacccgcctcggcctcccaaagagctgggattacaggcgtgagccactgcccccg

SEQ ID NO: 874810 - DNA, 515 bp, Homo sapiens
gagctgctataaagaccactgaaatatgtcttaattatcacagtttgtctaagaagagaaggctaacacatttgaaatacgtacaagagactacgtaattacaggtaattgccaaattataaatattgactatgggacaggagcagtggctcacacctgtaattccagcactttgggaggctgagacgtgcagatcaygaggtcaggagatcgagaccatgctggctaacatggtgaaaccctgtctctactaaaaatacaaaaaattagctgggcgtggtggcgtgcacctgcagtcccagctacttgggagactgaggcaggagaatggcatgaacctgggaggcagagcttgcagtgagctgagatcatgccactgcactccagcctggtgacagagtgagactccatatcaaaaaaataaaaaaatatataaataaataaataaataaataaatattgactatgcaagttataggaggttataggagttcatgtgactaagtaaatcaagg

SEQ ID NO: 874811 - DNA, 515 bp, Homo sapiens
gagctgctataaagaccactgaaatatgtcttaattatcacagtttgtctaagaagagaaggctaacacatttgaaatacgtacaagagactacgtaattacaggtaattgccaaattataaatattgactatgggacaggagcagtggctcacacctgtaattccagcactttgggaggctgagacgtgcagatcacgaggtcaggagatcgagaccatgctggctaacatggtgaaacccygtctctactaaaaatacaaaaaattagctgggcgtggtggcgtgcacctgcagtcccagctacttgggagactgaggcaggagaatggcatgaacctgggaggcagagcttgcagtgagctgagatcatgccactgcactccagcctggtgacagagtgagactccatatcaaaaaaataaaaaaatatataaataaataaataaataaataaatattgactatgcaagttataggaggttataggagttcatgtgactaagtaaatcaagg

SEQ ID NO: 874812 - DNA, 515 bp, Homo sapiens
gagctgctataaagaccactgaaatatgtcttaattatcacagtttgtctaagaagagaaggctaacacatttgaaatacgtacaagagactacgtaattacaggtaattgccaaattataaatattgactatgggacaggagcagtggctcacacctgtaattccagcactttgggaggctgagacgtgcagatcacgaggtcaggagatcgagaccatgctggctaacatggtgaaaccctgtctctactaaaaatacaaaaaattagctgggcgtggtggcgtgcacctgcagtcccagctacttgggagactraggcaggagaatggcatgaacctgggaggcagagcttgcagtgagctgagatcatgccactgcactccagcctggtgacagagtgagactccatatcaaaaaaataaaaaaatatataaataaataaataaataaataaatattgactatgcaagttataggaggttataggagttcatgtgactaagtaaatcaagg

SEQ ID NO: 874813 - DNA, 587 bp, Homo sapiens
aatttcatagcttaaaggcacacaattcaactatctagatgtaacagtgaaatacagtttctgaactgctttgactagtagacaagatatatttcttaattccacttttattttacttatttaatcttcaggctatacaacagtaaggaacaaacaatgacattctcatctcaaggcacaagcatttatattatcattcccagtggggatgttgcagaagcaagttttaggtcaacaagatttaatttgtttttacttcttttgaaatcaaatcatagggttttttaaaaataaaatgagaagtatacrgaaataaatcatatataaagttataggttagacattgagctcaaatgttaaataagacagaatgagaaaatcaattctcccccaagattaagaaaggtgagaaaaatgtaccagcactaggaggatggtagggacaggcttcctcctgcttggttttatgtatttaacaaacctgtcttggctactatgtgctagacattgatctatgcactttagaatattaattcacctttatagaaaccaatgaagaggtttagatattactattttatccattt

SEQ ID NO: 874814 - DNA, 691 bp, Homo sapiens
caattaaaaggcacagagtggtaatctggataaagaaccaaggcctattagtatgctgtcttcaaaagactcatctcacatgcagtgacacacataggatcaaaataaacagatggagaaaaatctaccaagcaaatggaaaacaggaaaaagcaggggttgcaatactagtttcagacaaaacagactttaaaccaacaaagatcaaaaaagatgaagaagggcattacataatggtaaatggttcaattcracaaaagatctaagtattctaaaaatatatacctccaaaagaggagcacccagattcataaagcaagttcttaacgaccttcaaagagacttagactcccacacaatgatagtgggagactttgacaccccattgacaatgttagacagatcatcaagacagaaaattaacaaagatacccaggacctgaacttagctctggatcaaatgaacctgatagacatcttatagaactttccaccccaaaaagacagaatatacatttttctcattgtcacatggcacatactctaaaatcgatcacataattagaagtaaaacactcctcagcaaatgcaaaagaactgatcataagaaaaaatctcttggaccacagcacaatcaaattagaaaccaagacaaaaaagttcactcaaaaccgtacaattacatggaaat

SEQ ID NO: 874815 - DNA, 691 bp, Homo sapiens
caattaaaaggcacagagtggtaatctggataaagaaccaaggcctattagtatgctgtcttcaaaagactcatctcacatgcagtgacacacataggatcaaaataaacagatggagaaaaatctaccaagcaaatggaaaacaggaaaaagcaggggttgcaatactagtttcagacaaaacagactttaaaccaacaaagatcaaaaaagatgaagaagggcattacataatggtaaatggttcaattcaacaaaagatctaagtattctaaaaatatatacctccaaaagaggagcacccagattcataaagcaagttcttaacgaccttcaaagagacttagactcccacacaatgatagtgggagactttgacaccmcattgacaatgttagacagatcatcaagacagaaaattaacaaagatacccaggacctgaacttagctctggatcaaatgaacctgatagacatcttatagaactttccaccccaaaaagacagaatatacatttttctcattgtcacatggcacatactctaaaatcgatcacataattagaagtaaaacactcctcagcaaatgcaaaagaactgatcataagaaaaaatctcttggaccacagcacaatcaaattagaaaccaagacaaaaaagttcactcaaaaccgtacaattacatggaaat

SEQ ID NO: 874816 - DNA, 691 bp, Homo sapiens
caattaaaaggcacagagtggtaatctggataaagaaccaaggcctattagtatgctgtcttcaaaagactcatctcacatgcagtgacacacataggatcaaaataaacagatggagaaaaatctaccaagcaaatggaaaacaggaaaaagcaggggttgcaatactagtttcagacaaaacagactttaaaccaacaaagatcaaaaaagatgaagaagggcattacataatggtaaatggttcaattcaacaaaagatctaagtattctaaaaatatatacctccaaaagaggagcacccagattcataaagcaagttcttaacgaccttcaaagagacttagactcccacacaatgatagtgggagactttgacaccccattgacaatgttagacagatcatcaagacagaaaattaacaaagatacccaggacctgaactyagctctggatcaaatgaacctgatagacatcttatagaactttccaccccaaaaagacagaatatacatttttctcattgtcacatggcacatactctaaaatcgatcacataattagaagtaaaacactcctcagcaaatgcaaaagaactgatcataagaaaaaatctcttggaccacagcacaatcaaattagaaaccaagacaaaaaagttcactcaaaaccgtacaattacatggaaat

SEQ ID NO: 874817 - DNA, 659 bp, Homo sapiens
aagtgttctttattttaattatatcaatgtcaatatccagactgtgataatttactgtagtttacaagatgttatccttggaggaaactgggtaaaatgtacatgagatatctctgtaacatttcttaaaagtgtcygtgaatcaacaattatatcaaaataaaaagtataatttaatacagcatcttaacattttcaacaaaactaagtgtcaaagtatccccataaacctcaaatacaaattggtgaggacaaaccactagtagttgcacgttattaatttttcctgttatggattatgcctttggtgtcaagtctaaaagctttttgcttaaccctagatcctgaagattttctcctgagagttttgtgactttatgttttacatattagactttgatccatttttatttcttcctttgaaatctgcacgccttttttttttctcgcccattacattatctagaacttccaacgccatgttgaataagcatggcgagagtggacatcattgctttgttcccgatctttgggggaaaaatttcagtctttcaccgctgtgttagctgtgagatttttttgcagatgctctttatcaagttgaggcagttcctctctatttgcattttctgagcattttatcatgaatggccattgaa

SEQ ID NO: 874818 - DNA, 659 bp, Homo sapiens
aagtgttctttattttaattatatcaatgtcaatatccagactgtgataatttactgtagtttacaagatgttatccttggaggaaactgggtaaaatgtacatgagatatctctgtaacatttcttaaaagtgtccgtgaatcaacaattatatcaaaataaaaagtataatttaatacagcatcttaacattttcaacaaaactaagtgtcaaagtatccccataaacctcaaatacaaattggtgaggacaaaccactagtagttgcacgttattaatttttcctgttatggattatgcctttggtgtcaagtctaaaagctttttgcttaaycctagatcctgaagattttctcctgagagttttgtgactttatgttttacatattagactttgatccatttttatttcttcctttgaaatctgcacgccttttttttttctcgcccattacattatctagaacttccaacgccatgttgaataagcatggcgagagtggacatcattgctttgttcccgatctttgggggaaaaatttcagtctttcaccgctgtgttagctgtgagatttttttgcagatgctctttatcaagttgaggcagttcctctctatttgcattttctgagcattttatcatgaatggccattgaa

SEQ ID NO: 874819 - DNA, 522 bp, Homo sapiens
gcaccttgtgcctttcaaatgataggtattcctaggggcaactaggctgctggcccactcaaggttctatactctaattaccaaaaaaaaaaaacctaaaaaacaaaacaaaacaaaacaaaacaaaacagaagatgaagaagacacagaatgaccctagacccaaacttctgcatgatctatatccaaaactgtagtgggagagactattccctgattgctacaacaacttccgatatatgcagttttttgggcacagcaagattacattaccatgyctctttttcagttaagaagtggcaagatgatgttctcttcaatggaaggggaattttattcactagaatagtgaaaactatactttatgaaatcaaatgttttaatcctaaattaaacatcgatgctcagaaatcttactgtgccaaatatttgagctttacattttgacaaatcttggcacacattgggaattgagttttggatgttaaaattattattcattagacagtgttattataatct

SEQ ID NO: 874820 - DNA, 647 bp, Homo sapiens
gtgggcgcctataatccaagctactggggaggctgaggcaaagagttgcttgaacccagctattcagaggtcgcactcagccaagttcacgccactgcactctagcctggatgacagagtgagactccatctcaaagagcaaacaaacaaacaaaacacataacacatagtattctgatgttgaagagaagacttcattataatgtaggcagtgaaggcacttgcaccatatggctttatgagtctacgaaaacgtctagcaatttaatcctatgtatttggttaaaggagtatctaagtaactaactgcatgaggtaactttccccccctgctatagactgtcaaaacagcmtgagccttctcaccactctaatattacacttggctgcaaattacctccttaatgctttttataactccttatgccaaaagtaccatggatagcaggctgtgtctgtctcatgtacgtataatgcctggcatgagtaggtacacacacaaaaaactatgttgagtggatatctataaagaatcaagtattccaattggacattaagatgtttattccattatttagcaaattttaataaatccctataatatcttgctcatggagctagattctggagattcaaagaaagtgaga

SEQ ID NO: 874821 - DNA, 627 bp, Homo sapiens
tgtcctaagccttgtatttactgcctccccattgctgatactgacattgtaaataacaagagttttgcaggttcggtcagcaaatgaaaaaatgaaagcagcattattttccaccaaagattagcaaaaaaaaaaaaaagcatcactgtttgcttaggagaacttgaagaaacctgagaggagtgattctaaaaaataaccctaaattcattaagagtggagatactragtaatttggagacattagattttgaaagtacaatttcaataaccattgcagtgatatttgtgagcgcaaacgtattttttgagttgtttcatgagtttacatgcaagcgccatgtgatagaaggcttgaagcctgctgctggaattcccacagacactgtctccaggctccatcatgccactgcagacatcattctaacaagctgctgtgcagctccatggccctgctgtcctcctattcccagggctaagaaccacttctgtgtttgacatcatcattattttaggcttggctatttttagaaggatgggattaatccggggaaaattaaattgagtatgtcaggaatcttggcatctttaggcacttgagggaaagaaaacagaccagctttgtaa

SEQ ID NO: 874822 - DNA, 622 bp, Homo sapiens
tatactctgcattcaggtactgatatctatcagatgggacagggaatgaaataatattgcaaaaaaataattcacttccccgttttcatgagcagaaatacaggatgcattttcggacactattaatgtataagcccacacaaaatgtgaattaaattattgcccttgtcctttgttttcaatgtaacactacctgaaatggatgtatttgctgcttcccaaagtgaacgttttattctttttcttctgagaaagatactgagattcaacagggggctccacaagcctcagagcaggttccagagagctcagtgctttgggacaatattccctggcagcaacttatttatggcagtggttttgctatttggattggactggcatattcctaagccctctgtattgtgtcttccaatttctgttttggggatgtgaagctacgtgggagcatgargcccaaggaagtgggtggggccagaggttccctattctactgcccagtcttgcttgtaagattggtctgatcctgcatgtctcaaaacttcttgcacattagactcctttggagaactttaaaatataacacagatgctcagcttcaacccagactaattaaattaga

SEQ ID NO: 874823 - DNA, 623 bp, Homo sapiens
aagaaagtcattggtagcttgatggggatgacattgaatctatgaattaccttgggcagtatggccattttcacgatattgattcttcctatccatgagcatggaatgttcttccatttgtttgtatcctcttttatttcattgagcagtggtttgtagttctccttgaagaggtccttcgcatcccttgtaagttggattcctaggtattttattctctttgaagcaattgtgaatgggagttcactcatgatttggctctctgtttgtctgttattggttttaagaatgcttataattggttataagaatgcttgtgatttttgcacattgattttgtatcctgagactttgctgaagttacttatcagcttaaggagattttgggctgagactatggggttttctagatatacartcatgtcatctgcaaacaggggcaatttgacttcctcttttcctaattgaataccctttatttccttctcctgcctgattgccctggccagaacttccaacactatgttgaataggagtggtgagagagggcatccctgtcttgtgccagttttcaaagggaatgcttccagtttttgcccattcagtatgatattggctatggg

SEQ ID NO: 874824 - DNA, 600 bp, Homo sapiens
tcaaatgttgaacttgctggtttaatcctctacaatgcttggattttcttttctatctttctctgtctttgagtttttgttctattctctgggagattttcttgacccatcagtgtgctgtattcaggagactatctcatgtgcagacacacataggctcaaaataaagggatggaggaagatctaccaagcaaatggaaaacagaaaaaggcaggggtckcaatcctagtctctgataaaaaaaaaaaaaaaacgttaaatcaacaaagatcaaaagagacaaagaaggtcattacataatggtaaagggatcatttcaacaaaaagagctaactatcctaaatatatatgcacccaatacaggagcacccagattcataaagcaattccttagagacctacaaagagacttagactcccacacaataataatgggagactttaacaccccactgtcaacattagacagatcaacgagacagaaagtcaacaaggatatccaggaattgaattcagctctgcaccaagtggacctaatagacatctacagaactctccactccaaatcaacagaatataccttcttctcagcaccacat

SEQ ID NO: 874825 - DNA, 600 bp, Homo sapiens
tcaaatgttgaacttgctggtttaatcctctacaatgcttggattttcttttctatctttctctgtctttgagtttttgttctattctctgggagattttcttgacccatcagtgtgctgtattcaggagactatctcatgtgcagacacacataggctcaaaataaagggatggaggaagatctaccaagcaaatggaaaacagaaaaaggcaggggtcgcaatcctagtctctgataaaaaaaaaaaaaaaacgttaaatcaacaaagatcaaaagagacaaagaaggtcattacataatggtaaagggatcatttcaacaaaaagagctaactatcctaaatatatatgcacccaatacaggagcacccagattcataaagcaaktccttagagacctacaaagagacttagactcccacacaataataatgggagactttaacaccccactgtcaacattagacagatcaacgagacagaaagtcaacaaggatatccaggaattgaattcagctctgcaccaagtggacctaatagacatctacagaactctccactccaaatcaacagaatataccttcttctcagcaccacat

SEQ ID NO: 874826 - DNA, 582 bp, Homo sapiens
cacagtggctcacgcctgtaatcccagcactttgggaggccgaggcaggtggatcacctgaggtcaggagttcaagaccagcctgaccaatatggtgaaaccccatctccagtaaaaatacaaaaattagccaggcgtgagggtgtctgcctgtagtcccagctactcagaaggctgggacaggagaatcacttgaacctgggaggccgaggttgcagtgggcagagatcatgccactgtactctggcctgggtgacagagcaagactgcatctcaaaaaaaaaaaaaaaaaaaaaaaagmcaaaaaaatttcatgtcagatgactagaaaagtttctaagtgctcactcacagttttgctcaactcattgcagtgtggtgccaatccacccagggccagcactgtccagggaacaccgtttgcatagtaccagtgtagactataaagaaaaggtctctaaacaaaaggaaagggataacagtttatattttttaagttcaaagttattaacttactattgatgtacagacaacaagataaattccagtatttttcaaataattccttttaaagaaaacatt

SEQ ID NO: 874827 - DNA, 682 bp, Homo sapiens
ggacccactgaatggcagggctgaaagaactgtaacatgaacagggctgaaacatgttccttgcttgccatgtggcaggagatgagaaggagagaagagctgtggttcttcagggagcttagacctaggagctcccccaagccagggctgtgacaaccactttggggctctgcagttgctggcatctacaagcaaccaggcatcactgtgccagcagtggaagctgcttgcagtgtgcctggtccagctgcagcctcatagggagcctgcacctgtgctggcacctggagctgaccatcccaccacagctagcatgcctggctggaccccacgctcactcgctcacataccccttgctgctatgttcctggcttgcccttggaaggtgcaagatccaggscagtagcacaagcctgaatgcaggctgcctggctgagtgggtggaatgagcccagtgggcccaggcaaaactcaggcaaagtcaccactggccacagaggttcccagatggaaaagtgacatcctgaggatcccatgacaaggagagacttcaagagcctacactatgccacaaaaaaaatcccactaaaagcagattgtaagaaaaatattaaaagattcttatgttaccaaacaaaaaagacagccccaatgatgctaggactttgaattaatttctgcc

SEQ ID NO: 874828 - DNA, 658 bp, Homo sapiens
aacatagcccatttctttttttaagtacaatttatttaacttaagttgatatataataattttacatatttatgaggttcaatgtgatgtggtgtcctttgccacattaaggtcaatatagttcacaacaatgtattttatttttccaaatagttagaaaagaggattctgaatgttctccctacaaagaaataatacatgtctgaggtgatggatatcctcattactctgatttaatcactatacaatgaatacatatatcagaactcctctttcttcttcaccctttcatcttaacaatggagggtcatttccaaataatacacacataattcacttactgtttataaattttacaagttctttgctaatgcagttttaacttagataacaatggcctctatcaartgagaactgccctcttccccatttacactatatatttatcatgtcagtttctatcagtttggtatttttgttggttttcttttccagattgctgtctttagtttgtctttgtcattcaaggttgtcttccaatgaatttacaggttgaaacttacagctgccctaatgtcagttcataagtcatttttttattatttaagcctatgtcaaatatatggtgtttattattctactcgcaatcatttctttt

SEQ ID NO: 874829 - DNA, 658 bp, Homo sapiens
aacatagcccatttctttttttaagtacaatttatttaacttaagttgatatataataattttacatatttatgaggttcaatgtgatgtggtgtcctttgccacattaaggtcaatatagttcacaacaatgtattttatttttccaaatagttagaaaagaggattctgaatgttctccctacaaagaaataatacatgtctgaggtgatggatatcctcattactctgatttaatcactatacaatgaatacatatatcagaactcctctttcttcttcaccctttcatcttaacaatggagggtcatttccaaataatacacacataattcacttactgtttataaattttacaagttctttgctaatgcagttttaacttagataacaatggcctctatcaaatgagaactgccctcttccccatttacactatatatttatcatgtcagtttctatcagtttggtakttttgttggttttcttttccagattgctgtctttagtttgtctttgtcattcaaggttgtcttccaatgaatttacaggttgaaacttacagctgccctaatgtcagttcataagtcatttttttattatttaagcctatgtcaaatatatggtgtttattattctactcgcaatcatttctttt

SEQ ID NO: 874830 - DNA, 674 bp, Homo sapiens
gaatgttaacagaaaatctcaattgcaaaccatattttctcctttaaattttacattcctttaaggacagcttcagaggttttgaaagaagagtaagaaaaaataaagaaataatattcactatttacttagaagaatgctatttgacatatttataactggatcagaaattgatgactttagatatgcttcaatctataaagtttatttttctttttgtcaaaagccctataaaagagagctgttttgtcaaatcccaaactatatcttgtttgtcagaaaaataatggttggaggtagatgtcagtcacttttataaacatgagacaacaaatctaagatgtaaaggaattttcgggccamtgagaattaaataaatggatttcaagagttctagcatcagaaattcagtttcatagatatgtgtcaatctaaaaggatgtcacatttaagtgatggctccgtacattttatttatgctaatatgtaatatgtttgcttctttagtgaaactgggtgatggtggttaggttggatggcagagatgcagcgatctgaaagaaagcagtatttgatactgccagatattcattctaatgaatttttacttaagcaatggaatgttgacacttgtcatttgagtagatggtataaataaaatgacttttcttctt

SEQ ID NO: 874831 - DNA, 482 bp, Homo sapiens
aagaatatctaggcaataccattctggaaataggcatgggcaaaagattttatgatgaaatcaccaaaagcaattgcaacaaaagcaaaaattgaaaaatgggatctaattaaactaaagagcttctgcacagcagcaggaactatcatcagagcgaacaggcaacctacagaatgggagaaaaattttgcaatctatccatctgacaaaggtctaatatctggaatctacaaagaacttaaatttataagagacaaaaacaaacaactccattgaaaagtaggcaaaggacatgaacagacacttcccaaaagaagacatacatgcaatatacmacatagacatacaacagtgtaactaactcccacgttctcacttttaagtgggagctgaacaattttgttcagctgtgagaacatgtggtgtttggttttctattcctggacacagggatgggaacaacacacactgaggcctgtcag

SEQ ID NO: 874832 - DNA, 581 bp, Homo sapiens
ggagctggttttttgaaaagatcaacaaaattgatagactgcaagcaagaataatacagaagaaaagagagaagaatcaaatagatgcaataaaaaatgataaaggggatatcaccaccgatcccacagaaatacaaactaccatcagagaatattataaacatctctatgcaagtaaactagaaaatctagaagaaattgataaattcctggacacatataccctcccaagtctaaaccaggaagaagttgaatctctgaatagaccaataataggctctgaaattgaggcaataattaatagctttcaaaccaaaaaaagtcaaagaccagatagattcacagccaaattctactagaggtacaagaaggagctggcaccattccttctgaaactattccaaacaatagaaaaagagggaatcctccctaactcattttatgaggycagcatcatcctgataccaaagcctgccacagacacaacaaaaacagagaattttagaccaatatccttgatgaacatcgatgcaaaatcctcaataaaatactggcaaaccgaatgcagcaacacatcaaaa

SEQ ID NO: 874833 - DNA, 632 bp, Homo sapiens
ccatacagcccaaggtaatttttagattcaatgccatccccatcaagctaccaatgactttcttcacagaattggaaaaaactactttaaagttcatatggaaccaaaaaagagcccgcatcgccaagtcaatcctaagcctgctactggtaccaaaacagagatatagatcaatggaacagaacagagccctcagaaataatgctgcatayctacaactgtctgatctttgacaaacctgacaaaaaaaagaaatagggaaaggattccctatttaataaatggtgctgggaaaactggctagccacatgtagaaagctgaaactggatcccttccttacaccttatacaaaaattaattcaagatggattaaagacttaaacgttagacctaaaaccataaaaaccctagaagaaaacctaggcattaccattcaggacataggcatgggcaaggacttcatgtctaaaacaccaaaagcaatggcaacaaaagacaaaattgacaaatgggatctaattaaactaaagagctcctgcacagcaaaagaaactaccatcagagtgaacaggcaacctacaaaatgggagaaaattttcacaacctactcatctgacaaagggctaatatc

SEQ ID NO: 874834 - DNA, 560 bp, Homo sapiens
catttctatgcagggtatgagaacacaatgtaagcaactgagactgaacttactaacatccaagtaggctaagtcttagaactaattaatttatggctttatagaaatgtgactttttcaatgcaaattgtcttcattaaattttatgcacactacacttcaaacaatggatgtagtactacaaagagttatctaggaatccattttccccacagttgagacatgtagttaacacttacataagtaaatataattttattccccctgggagaaacagttcttaaacaggatgttagaaaacaaacctaacagtaacagaacaaatttgataagtaacagaasaaatttgataagtaactttattccccctgggataaatagttcttaaacagggtgttagaaaacaaacctaacagtaacagaacaaaattgttatgtcaaattaagaaattctggccttgcatggtggctcacatctgaaatcgcagcagcactttgggaggctgagacaggtggattgcttgaggcaaggagttcgagaccagccttgctaatatagc

SEQ ID NO: 874835 - DNA, 598 bp, Homo sapiens
gttaaatttatttctaagtactttatcttctttgttgctaatgttaatggggctttgtctgctctgtgttctccaactgattatcctttatgtaaatgattgcagcctgcccacacctccgaggctggccctgtggaccagttggccttatttcttcagtggaaatctagtcactatgatgtggtagttggcgtgttgtcaccttgctataaccataaacttcaaaatgtgataagcagctggctgatcattggatacaacatcctgcattaagtcaacgtgtgcttgtcaaattcataatagatgcccatggctgctaagggcctgtggaagaccaggaggatccctactactcaacatcacaaatccagctttgaatcaggaaattgaggcattcagtctttctgaagacacttcatcagggttcgctgargaccgagttgtcagtgtgagtttccaacttctctacacgatccttattaccagtcttggggtgttctacaatgccaatgatgtgggtttccagaggaacgtcgctctcaagctttctcaggcagaacgggaagaggcccccttcattgttcactagagtcctcca

SEQ ID NO: 874836 - DNA, 589 bp, Homo sapiens
tgcctcttattcagtgttttctcattaagtaaggcactggctttaagactaaggaatatgtatatcttatcatgttaaaaatgtatgcaacaattcttattttcttgagtttttttttaaatcagaagagggtattgatttttttcaaaggcttttttcagcatttatggagataatcatactatttttcttctttaaaatttcaacatggcatattatactaatgaattttctatttttgaagcaagcttgcattcytgaggtaaattctacttggtcatgctgtattttttaaaatgtgaagttggattctttttgctaatatttagaatttttccaacaataagtgatactgggctgcaattttctctttttgtactgtctataccagggtgaagtgttaattttatagttgcttcatgaaaaatgaggatgttttccttcattttcaattgtctgtaacatgtaacaagagagcgttgggactatctgatctctgaagatttggtagtgattttcagtctctctagcacaaaatgggaacaattataatatttccttctagggagttgtcagaacaattcagttg

SEQ ID NO: 874837 - DNA, 599 bp, Homo sapiens
gccactgcttttggtgttatacacatgaagtctttgcccatgcctatgtcctgaatggtattggacaggttttcttctaggatttttctggtcctaggtcttacgtttaagtctttgatccatcttgagttgatttttgtataaggtgtaaggaaggggtccagtttcagttttcttcatatggctagccagttttcccaacaccatttattaaacagggaatcttttctccactgcttgtgtgtgtcaggtttgtcaaagatcagatggtggtagatgtgtggtgttatttctgaggcctctggttttttctgaggtgttytggtttttggaattttcagcctttctgctcggtttctccccatctttgtggttttatctacctttggtctttgaggttggtgacctcagttggaaatgcagaaatcactcatcttctgctttgatctctctgggagctgtagaccggagctgttcctatttggccatcttccaacctttatgttttaatttatggttatcttttcacttaaaaacgtaataaattatgttgatagtgttgctaattttaagctgtctctgcattcctgaaataaacc

SEQ ID NO: 874838 - DNA, 657 bp, Homo sapiens
aaactacccaaatgaaaatataataagggacactgaagaaaagcttgaaaaactaagaggacaaaaataaaagaaaaatatgtgtcaaaatgaaaaaaatgacaaggaagacaggcaaagaagatccaacatatagctggagactcagaagaaaaaaacagcagaacacaatattaaaaactgtaacttaccagcctgggcaacatggcaaaaccccatctctacaaaaaatacaaaaatcagctgagcatggtggtgtgtgcctgttagtcccagctactcaggaggctgagatgggaggactgcttcagccctgaaggtggaggttgcagtgagctggactgcatcactgtactccagcctgggcaacagagtgagatcctgtctcaaaaaaaacccacataaacaaacaaaaaaaccctgtaatttaagaaaatgttccagaaacaaaagaaagcctgaaaccacatttgaaagggcccatgtrtatctgtgatctgaaccaatcaactctaagacatatgcctataaaataattacactaatattaaacacttggtcctccaaacaaaatgaccaagtcacttgctaaaggaaggaaagcagattcacatcagagtttgacagcaacaatgcaagacaacagtggaggggcat

SEQ ID NO: 874839 - DNA, 625 bp, Homo sapiens
gagaaaagaagcagaatgagaatgaggtcttttgcatggaagggataatgagagtttgggcagagcaggaagagactactaaagaggggacgaagtcagcaaaaggatggacttggctagggagagcctgtattcatgcccctgagaggtctgagcgtggttgatgacctggaatgggtgtattctttgtgtccaaacctgtggctcagggatgacctagctgggccagctgtcctcattaaatagtcattatttttattaaatggaggatcgtgcttcattcaaagtcawtaacagctagtatcaatgactaagatattgactgcctagtagtagcaacatccctgcctacacccagagatattatcagccaattacctcatcatctggttatgggggaatctgtgttctgcgccatgccttgagcatgacacatattttggcaaacctatgtctaggtttcctttctgcaataccatatgaaatagtaaactcgagtgaccactggacttctaatgggatgagcagtgtggcagaagtttctgttttgctaggaccatcctaacctaagaaagtcatgaagtaaactccacagtatcgtgtatgaaattctatgctaggcatt

SEQ ID NO: 874840 - DNA, 641 bp, Homo sapiens
aaatgctttacttttttaaagttagagttacagactattcatgcttattaattttcctttactgtaaagattgtgacatttgttttgaattaaaaaccagtcttgattaggtaagggaataagtacatgataatcagcttaggtactgcatcccataaatatatttggttcatatattttactaggaggcataggcaggttacatttaattatttatagcaagactttataatattctaagtgtccggccatatatttggaagaaggaacagtatctttctttggatttaaatcaaagacttcytgcgacattactggttttgtgaaaatgtcatgaaaactactgattttactttctcaattttaggggagaatatagtacataaaaacaaattctgattatcatttatattcctagaaaaatgagagttagttacaggtgttctcaggtcattggtcctactattctttgaggtatccataagaacataaaaattgctatagttaggccattttgtaaataatatacatatatatgtatttaaaaaaaacccttgaggtaggtgaaccaaaaacttaatggtacttatgtttggaaagtatgatcagggataattttaactttcttttagtggtatttt

SEQ ID NO: 874841 - DNA, 666 bp, Homo sapiens
cctattaagatttcattagagcctaactgacctggggggagaaaaatacttaaccccagacccctctagccatcttgccttacctaaacaggcagtgtcagtggaattagagaacacttatgaagttcacagcccaaaggcacatacttactaacagactgatgtctaatcacagaactgtggaatatttcccatccccatacacattactatcacatcactaaaggccttggactatttactggacttctttttacatagtctctcatgtccagctttcaacaaaaaattacaaggcatactgaaaggcaaaatacacagttcgaagagatagggcaagtatcagaaccagactcataatagcacagggatgttcgaattatcaaactgggaaacaactgtgattaatatgctgagggctctaatgaaaaatgtggacaaaatgaaagaacagaagggtaamaaaacaacaatgagatatcatctcacaccagttacaatggctactatcaaaaagaaaaaaataacaaatgctgattaggatgcagatgcagagtaaaaggaactcttatactattgataagaatgtgaactagtacaaccactatggaaaacagtatggagatttctcaaaaaactacaactagaactaccatatgattcagc

SEQ ID NO: 874842 - DNA, 735 bp, Homo sapiens
ggtttacttttctattgcattgtcaggctgcaaattttctgaacttgccctgtttcccttgtaaaactgaatgcctttaacagcacccaagccacctcttgaatgctttgctgcttagaaatttcttctaccagataccctaaatcatctctctcaagttcagagttccacacatctctagggcaggggcaaaatgccaccagtctctttgctaaaacataacgagtcacttttgctccagtttccaacaagttcctcatctccatctgagaccacctcggcctgaatttcattgtccgtatcattagcattttgggcaaaaccattcaacaagtctgtagggagttacaaactttcccacattttcccatcttcttctgacccctccaaactgtttcagtctctgccagtacccagttccaaagttgcttycacattttcaggtatcttcagcaacaccccactctactggtatcaatttactgtgttagtcggttttcatgctactgataaagacatacccgagaagactgggcaatttacaaaagaataaggtgtattggacttacagttccacatggctggggaggcctcacagtcatggtagaaggcaaggaggagcaagtcacatcttacatggatgacagcatgcaaagagagcttgtgcagggaaactcccattttaaaactatcagatcttgtgagactcattcactatcatgagaacagtgcagg

SEQ ID NO: 874843 - DNA, 735 bp, Homo sapiens
ggtttacttttctattgcattgtcaggctgcaaattttctgaacttgccctgtttcccttgtaaaactgaatgcctttaacagcacccaagccacctcttgaatgctttgctgcttagaaatttcttctaccagataccctaaatcatctctctcaagttcagagttccacacatctctagggcaggggcaaaatgccaccagtctctttgctaaaacataacgagtcacttttgctccagtttccaacaagttcctcatctccatctgagaccacctcggcctgaatttcattgtccgtatcattagcattttgggcaaaaccattcaacaagtctgtagggagttacaaactttcccacattttcccatcttcttctgacccctccaaactgtttcagtctctgccagtacccagttccaaagttgcttccacattttcaggtatcttcagcaacaccccactctactggtatcaatttactgtgttastcggttttcatgctactgataaagacatacccgagaagactgggcaatttacaaaagaataaggtgtattggacttacagttccacatggctggggaggcctcacagtcatggtagaaggcaaggaggagcaagtcacatcttacatggatgacagcatgcaaagagagcttgtgcagggaaactcccattttaaaactatcagatcttgtgagactcattcactatcatgagaacagtgcagg

SEQ ID NO: 874844 - DNA, 669 bp, Homo sapiens
tggaccaccctctaagccagtgcagatctatgtgtgccagactatttttcggcacaagtgtctatcatggtcaagagaaagggaaatgtactagccattgtaagtatccaggaagacaaagaaatgtacaactctagagttcattcatgtctacctagacagkaaatgcacatacctcaagctgctgatctttgtattttctttttttttttaattatactttaagttctgggatacatgtgcagaacgtgcaggtttgttacataggtatacatgggccatggtggttggttgcacccatcaacccatcatcgacattaggtatttctcctaatgctatccctcacctagccccccacccactgacagaccccagcgtgtgatattcccctccctgtgtctatgtgttctcattgctcaaatgccacttataagtgagaacatgtggtgtttggttttctgttcttgtgttagtttgctgagaatgatggtttccagcatcatccatgtccctccaaaggacataaactcatccttttttttttttttgcaatctatccatctgacaaagggctaatatccagcatctacaaagaacttaaacaaatttacaagaaaaaaacaaccccatcaaaaagtgggcaaaggatatgaacagacacttctcaa

SEQ ID NO: 874845 - DNA, 669 bp, Homo sapiens
tggaccaccctctaagccagtgcagatctatgtgtgccagactatttttcggcacaagtgtctatcatggtcaagagaaagggaaatgtactagccattgtaagtatccaggaagacaaagaaatgtacaactctagagttcattcatgtctacctagacagtaaatgcacatacctcaagctgctgatctttgtattttctttttttttttaattatactttaagttctgggatacatgtgcagaacgtgcaggtttgttacataggtatacatgggccatggtggttggttgcacccatcaacccatcatcgacattaggtattyctcctaatgctatccctcacctagccccccacccactgacagaccccagcgtgtgatattcccctccctgtgtctatgtgttctcattgctcaaatgccacttataagtgagaacatgtggtgtttggttttctgttcttgtgttagtttgctgagaatgatggtttccagcatcatccatgtccctccaaaggacataaactcatccttttttttttttttgcaatctatccatctgacaaagggctaatatccagcatctacaaagaacttaaacaaatttacaagaaaaaaacaaccccatcaaaaagtgggcaaaggatatgaacagacacttctcaa

SEQ ID NO: 874846 - DNA, 585 bp, Homo sapiens
tatggaaacagctcagatttggaatgcagttttcccaggagtggacagacttccagctctgaaatagagcttcttattttgaacacatcatttctttctcttgttggttttttgaaagatgtaaataccatttggtccccttttttctccttttttatcttgagtaaaagcttaaaataaaaaatgaaaagattccacgggcactatatatctaagagaagagctaacactgaagggaatacatgtcttcacttttattgctttctctcagkgttgaaatcagggaagatctgaaaggatcttatttcctggctctttttgctggaatctggaacctttgaccgctctacaggagaaaagactgggtagccctgcctcacctttatgaatagaaagtgtgtcggctatgttttcatgataaaaacggatctgagtaggataactttttccttcttcttctttttttttgagacagggtgtcctctgtcacccaggctgaagtgcaatggcatgatcatagcttaccgcagcctccacctcccaggctcagatgatcctccctcctcagcctcctgagtagctggg

SEQ ID NO: 874847 - DNA, 606 bp, Homo sapiens
atatatattttttttttgagacaggttctgactccgtcacccaggctggagtgcagtggcatgatctcagctcactgcaacctccacctcccggggtcaagttatcctcctgcctcagcctcccaagtagctgacaccagacgtgtgcacaatgyttggcttatttttttattttttgtagagacagggtttctccatgttgcccaggttggtctcaaactcttggactcaagcaatctgcccgcctttgcctcccaaagtactaagattacaggcatgagccaccatgctggcctgatattttatttctttaaaaaatatatccaaagagaatagaaaaaaatggcaatatatgtgataagtctgtgtcacatgtggtcatggtattctctgcaattttttatgtttcacttttcacaaaagaaaaaaaaaaaacttggtatgaaaaagctaaccagagctctgcatttgtgactaaggcatgtgaactggcagctttgctgttggatgaccaggcaaaggtcagtgcagaaagaccgccatctttccatctgcagacattcagctttcagccctgcagctcttgtgagccccaagcctgtccct

SEQ ID NO: 874848 - DNA, 625 bp, Homo sapiens
aactaagctccccaaagagagtaatcattaagggaaattatattatttattttattttcctttacaatttggcaaaattttcctttaagatttcaaattgcctttgtttataaaagaaaactaagcaaaaaatagcttagcagattcatgctactgtagtagcaaattaaacatttagttctcagcatattaaaaaaatgaacaggaataattgatacagccaaagggaatcacagattggtttaatctggcagtataaccagttaaaactggagcaaggggaatattttagtctaggtattatctgacaattgagaaaaccatctttttacaactcaaccctattgcactgacagtaataatgcaagttctgatcacaaattgtctaaatttgagaatgctatttaaagrccaaggtttatttttatttttttcatataatgagtgtaaacaaatgaaatgcatttctggatatgttgaaagtttaaaattgcaagcattcaaaataggttaagcagtctgaattataactcattttataaagcttatagggctttagagaaaaaaatgtacctgaattcacagctaacatgacatttgcaatacaaaataagttaacaaggaa

SEQ ID NO: 874849 - DNA, 625 bp, Homo sapiens
aactaagctccccaaagagagtaatcattaagggaaattatattatttattttattttcctttacaatttggcaaaattttcctttaagatttcaaattgcctttgtttataaaagaaaactaagcaaaaaatagcttagcagattcatgctactgtagtagcaaattaaacatttagttctcagcatattaaaaaaatgaacaggaataattgatacagccaaagggaatcacagattggtttaatctggcagtataaccagttaaaactggagcaaggggaatattttagtctaggtattatctgacaattgagaaaaccatctttttacaactcaaccctattgcactgacagtaataatgcaagttctgatcacaaattgtctaaatttgagaatgctatttaaaggccaaggtttatttttatttttttcatawaatgagtgtaaacaaatgaaatgcatttctggatatgttgaaagtttaaaattgcaagcattcaaaataggttaagcagtctgaattataactcattttataaagcttatagggctttagagaaaaaaatgtacctgaattcacagctaacatgacatttgcaatacaaaataagttaacaaggaa

SEQ ID NO: 874850 - DNA, 593 bp, Homo sapiens
gtagaatctgcaagtgaatatttggagccctttttgacctatggtgtaaaaggaaataccttcacataaaaactacacagaagcattctgagaaacttctttgtgatatgtgcattcttctcaaagagaagaaactttaattcgattgaatagttttgaaacactctttttgtagaatctgcaagtggatatttggaacgctttggagagaatggtgaaaatggaaatatcttcatataaaaactatggagaagcattgtgagaaacgtctttgtgatgtgtgcattcaactcacagagttgaacctttcttttgattgagcagttttgaatccctstttttgtaaaatctgcaagtggatatttggagcattttggggcctctggtgaaaagaaatatcttcacataaaaactatacaaaagcactctgagaaacttctttgtgatgtgtgcatacaactcgcagagttgaaccattcttttgaatatgcagttttgaaacactctttttgtagaatctgcaagtagatactcagagggctttgtggagtattgtggaaaaggaaataactttgcataaaagctagacagac

SEQ ID NO: 874851 - DNA, 612 bp, Homo sapiens
taagaaacttccttctgatgtgcacattcagttcactgaattgtacctttcctttgattgagcagttttgaaacactcttttgcagaatctgcaattggatatttgaagctctttccagtctcaagtggaaaaggaaatatcttcacataaaaaatagacagaagcattctgcgaaatttttgtgatgtgtgcattcttctaacagagttgaacttttattttgattgagcaattttgaaacactctttttgtagattctgcaagtggacatttggagctctttcagtcctatggtggtaaaggaaataacttcacacaaaaactagacagaarcattctgagaaactcctttgtgatgtgtgcattcatctcacaggtttgaacctttcttttggttgagcagttttgaaacacactttttgtagaatctgaaggtggatatttggaacactttggggcctatggtataaaaggaaatatcttcacataaaaactagacagagcattctgagaaacaactttgtgatgcgtgctttcatctcacaaagttgaacgtttcttttgattgagtagtattgaaacgcacatttgtagactctaccagtggatat

SEQ ID NO: 874852 - DNA, 590 bp, Homo sapiens
cttctgtctacattttatctgaagatatttctttttcaccataggcctctaacttcgcagaaatattcctttgcagattttacaaaaagactgtttccaaactgctcaatgaaaagaaagtttcacctctgtgagatgtatgcagtcatcaaaaggaagtttctcagaaagcttctgtttatatttcatgtgaagatatgtcctttttcaccataggcctcaaagtgcttgaagtatcatttgcagattctacaaaaagactgtttccaaactgctcaatcaaaaaaaaggttcaaacctgtgagatgaaagcacacatcattaagaagtttctcagaatgcttctgtctagtttttatatgaagatatttccttttccaccataggcctcaaagtgctccaaatatccacttgaacactctatgaaacagtttttcaaaastgctcaataaaagaaagattcagctctgtgacatgaatgcacacagcacaaagaagtttctcagaatgcttgtgtctagtttttatgtgaagatgcttccttttccaccagaagcctcaaagcacttcaaatatacacttgcagatac

SEQ ID NO: 874853 - DNA, 653 bp, Homo sapiens
aatgctagggaagctggatgactgcctctcattctcttccccccatgtagaaacttggccccaggggaatcatctccatttgacatccatctcctctctgtgctgatttcaggtggagggtggcacgatcagagtaagacggttctttctacccttttaattcagatttcattcagttctgtggaccattaagtgtctcaggcttgtctctaagttytgaggtttgtaaaaggatgttcccatttgtaggtagtagctggttgacctttctgtgggagacagtggagcatgagactttctattctatagaaagtatctgtcgagcttgctctagctcgacacacacctgctaaagagctgtttctgaggcacccgttcttgcatgcttttggtcctttacctgccatagatggaaatgtcctctctctccccagggtcatctttatggcctcagggcctggtggtgatgccaggcaggcatgtaggtcccctgtgaacgtcaggaaatgaagccattacagagcaggccaccctgtgcattggtctagtgttaggaagcagaaagtgcaggctttgaattatttctaaagcaaactctagcttctcctggctttgaggagatagttgtgaccacacacatttcttaactacag

SEQ ID NO: 874854 - DNA, 651 bp, Homo sapiens
ccctcctgaggcacagagaatcctacagcctcccacttaatacagagatagtaacagtaacaaaactagcaaacttttactgaattctatatgctcacccctgtgtaattgaatataagttgtgtccctaaatactcatagaaatcttgtgtcttcctagaacttttccttgagattctaaacagattgagaggtccttacccgcagtgtgtagcacagagttgaccccgcggtagagctgattacttaagaagtggacactagatgaggactgtcccataaaaacaacagggagacacatatgtaattctaaactttctagtagctgcaataaaaaactaaaaataacagkgaattaactttaattatatattctatttaaccccatatgtaaaacagtattatttcatcatgtaatatcaaattatgaataagtagtttacattccttttctgtacagtattttatactcacagtgcacctctatttagatgagcctcatttcaatggctgggtagccacctttggctgctggctacagtatgccccgggttaagtgtctctgggccccacatgcacagcaaactcctgactctctagagtttactggtaacagaaagaaaatctggaagaactcacactaaaggttct

SEQ ID NO: 874855 - DNA, 642 bp, Homo sapiens
atgttgcccaggtgggtctcaaactcctgggctcaagcaatcattcctccttggcctcctaaagtgctgggattacaggcgtgagccactgcacccagcctgatattatttttaatcacaggtttataccttgttcaaaactatgtaaaagggatatattcaagggagtgtgtccttagtccaatctccactatttataggtcattttttgttaaaagtttctgatttaatttttttgagttgctatttgcaaaataagtagagatctatgttgatgtacgtgtttcttattcttgtgcacctaggtttttttcatacttaaaaatatcatggagaatagtgctccattgtgtgcacgtatcataatctattcaactagattattaaccttgggaatttaggttgtttccaaaagytgcaactacaaataatatatcagcatgaattactttgtgcaaacatttgttttatattcacgggggaaatctcagggtaaattcctagacattgaattgcttgagtaaatgcatacgtactttattagctattactaaattcccctcactggaaatgtaatactttatgtgctcagtaccaatgtatatataggccaattttccacaattcgtcagtatttaattt

SEQ ID NO: 874856 - DNA, 592 bp, Homo sapiens
atagtcctaaaattttcatttgactcacccctcggctgatttgtcagtttactaagaagtatcaaatccattttaagatgcagttctctccctgctgagaagtggcttatcagacatggacttgagatattctcagaggataaagaggtggctaattagaaggttaagacccatagaagagaagggagaaattccttatgattattttaagcagaggcacgtcttactagttcagttgtggagcyttccctcagagagttgctgtctgtggactattctgatccggagaaatagccttgctaacactcctggggcacacccatggcgaatccagctactgaacggacggactctctcagttggtctgtctgccagttggtagatgcaattgagtggaaaatcaaatggcagttcatgttttttccttctcaacagagaccaccaaagggggggaaaagtcataaatctttcctgtgttaattgagaacactggatgccattattaaagcatttccctcagggtcacactactcatttgaatcccagtccaagtttgttgaaatcataatggtagtaggcattattatgtcac

SEQ ID NO: 874857 - DNA, 641 bp, Homo sapiens; identical to SEQ ID NO: 874485

SEQ ID NO: 874858 - DNA, 641 bp, Homo sapiens; identical to SEQ ID NO: 874486

SEQ ID NO: 874859 - DNA, 597 bp, Homo sapiens
atttccagcagtagcaattgcatgtctttattttgcttgtttgttaatgtgacaatctttttccactagacactaagagtccttcaagggctggtaccatgtttttgtttttgtttgttttcctttgattctctaacatctagcacagtatctaacacacagaaaattcttcttatgtgtttgggtttttaaaaaatgacaaccaaagaatgaataaattaatgaggagagagaagtacacctataatttatttaaataaagtttcgattgtagcacagaatcatattaaagagtattgtggagataaaaacacagcccctctgcaatgtaatttattcttcaaccattctgttgggcatgctcctcagagatgaaagaactaarcgatggaggaggtctatatcctgcttcgtgtctgaagtttgttagagagaatctagaactccatcctcggtaccactgctgatttgctgtgaaatatgttctgggaaatataaggcattgctgaccccaggaacaaatgtttttctgccagtaagtaagaattctaatcctgtttgaaaccaattccaggtttggagagtcaaggagatcat

SEQ ID NO: 874860 - DNA, 569 bp, Homo sapiens
acacctgctcaatcttcatcacctggtcacaccaggcattctcatgctccttggcttttacacgtgctgttctttctgcccggaattccttccccatccattgtttttactggactcttgctcatctttcaagtcccaacataaaattggatcccctctcattacccaccctcaaccatagaactatctaggctccaacatcttgtgatccaaaccttaataataatacttacattgtgttatagttagccatttattaataaatgttttggatgaatggaatgaatgggtggatggatgaatgaatgaataaatgaatgaattctggatgagtaatgaayaggaaaggcaaatggataatacccaccaagctctgcagtcctggaggtttctgttcagtgatcaaaacccctgttctcccttataagcagtaaaagttttatttaagtgttaaaaattaaaaaaaaaaaaaacagtaaattatctacgcagagtcttgacagttaggaccataagctcatcaaataattgggtgaaagatgctgacagttcaagaagaacacatttcc

SEQ ID NO: 874861 - DNA, 614 bp, Homo sapiens
caaggcggcatcagcctctggggaggcctcagaaaaagcacaaagaagggaggtgctacacacttttaaacaaccagatctcacagtaactcactcactgtcacgagaacagcaccaagagaatggtgctaaaacattcatgaaaaaccacccccacaatacaatcctcccaccaggccccacctccaacactggggattacaattgaacatgagatgagctttgggtgaggacacgaatccaaatcatatcatacacctattggccattggyatgtattcttttgagaaatgtctactcagatccttcatccactttttaatcaggttatttgttttttcactattgagttgtttagttgcttatgtattttaaatattatccccttataagatgtatggcttacaaatatttttcctattctgtagattttctcttcattctgttgattatttcctttgctgcacagaggtttttagtttgaaatgatcagatttatctatttttgcttttaggatcatattcaaaacatcactgcccagaccaatgttatgtagttttccctcaatttttttcctagtaattatagagtttcagtttttatgtttaagatt

SEQ ID NO: 874862 - DNA, 639 bp, Homo sapiens
ccaccttgctggagctcttcacaggtcaggcacagtccaccagcacagaagctatgatgtgggcccccagggcccttgagactgccctgtgagcaggtatggccaggctggagccccaggagaggtcaccagaccaaaggatacatgggttggactagccccatctgatgtgcaagactgctctgcagcaatcaggtccaataatttccctagggctaaagtctcttataggagcaagttgagcccagggagatggccttccctggctgstctctactatagatgctccagcaccaaatcttctggactctacatcagctggcttgctgctgctaccatttctttaaacagctctccctgccacctaaagtgtccatggtggtcaagaggtcccctcttgctgggtttccagaggcctgtagcaagagcaggttgctccttgccagctcaactcacccattaccctggagctgttgtggttcaaaaatgggtcccagtgtgtggtagcccatgcagagttcccagctttctcctgcttcagcccactctctgtgtcttccctctggtccactcttggaaccttccctctgaacatctgttcagagtacaccagttgtctcagtcctgtgtgggagctgt

SEQ ID NO: 874863 - DNA, 603 bp, Homo sapiens
cacagaacgaatgcaccaactttactttatagagcctgaagtcaaaattagttttattgcatcctttacatcatgatgaaagagacattttgcatttatccagtcatattagaatggaaaatggcctgaaatgaaaagagaaaactgttactagagtttgccagaagctacttatgaagaaatcgagaagttttataacaaaagattttatgttataatattttgaaactttcaaaatctaagcattttaacctttataatttgttaacatatgtttaattttattaggggcaggaatgattttcaattgtcaccagagaactatgtactatgttattttcttcatattttacagttcaaaaagtaaaatttatatgtcacattctatttccagcattatggtaataatgatgttgtaatttcaattataaatactgaaaaaatggacatrctttatatttaacaagttgtatatttaattatggaaatatgatgcaggactcacttttaacattatgcgagctgtctccatgaagagacacactaagaaaacatcttattggttattggtcaagataatgtttcaggtggattcacagtgtg

SEQ ID NO: 874864 - DNA, 648 bp, Homo sapiens
ctatgccttaaaacccttcttttgactttagtacaatgttttcttttaaattttatttattcaagaagtttggaatttagaaatcatggagatgattgggcaaacctaatactaaaggaaaagtcagataatccataatatcattgctttttatcccattaaaaaagctgagaatactaataaagctaacttaactaaaatctgtatagttatgatcccgttctataaaagaagagaccagtgaattttttcatccctggtggtgcagcaggaaacagaatctaccacagaaaagaaaatgaggaactacatgaatcttagacaactattaagacctgtgtgtgaactagcttgacatgctggagtcccaaggaacccatccacaccatcaagctgtactcacctgccagcactttaccacaggtcttcaccaggcacagaggagractatactgaagactgagggaaagtcaagaaatctgagagagagagatccttgaggcatgtgaaccttccctaagtgcaaggcagcatcccagtgaagactggagtcagggcagaagagttaaaagaaatctgtctgagaaagtctaggccttcactaggtcaaaacagttgcaacggaggccagaaataaggcagaagaac

SEQ ID NO: 874865 - DNA, 490 bp, Homo sapiens
agttctccttgaagaggtccttcacttcctttgttagctgtattcctaggtgttttattctttttgtagcaattgtgaatagttcattcattcataatttggctctatgcttgcctgttgttggtatataggaatggtagagaatttttcacattgattttgtatcagactttgctgaatgtgcttatcagcttaagaagcatttgggctgagattatggggkttttgtagatataggatcatgtcttctgcaaaaaaggatggcttgacttcctatttcaatactctttatttatttctcttcactgattttcttggccagaaagttcaatactatattgaataggagtggtgagagaagaatctttgtcttatgccagttttcaaggggaatgattccagcttttgaccattcagtatgatgttggctgtgggtttgtaatatatggctcttattgttttcaggtatgttcctccaataccttgttta

SEQ ID NO: 874866 - DNA, 490 bp, Homo sapiens
agttctccttgaagaggtccttcacttcctttgttagctgtattcctaggtgttttattctttttgtagcaattgtgaatagttcattcattcataatttggctctatgcttgcctgttgttggtatataggaatggtagagaatttttcacattgattttgtatcagactttgctgaatgtgcttatcagcttaagaagcatttgggctgagattatggggtttttgtagatataggatcatgtcttctgcaaaaaaggatggcttgacttcytatttcaatactctttatttatttctcttcactgattttcttggccagaaagttcaatactatattgaataggagtggtgagagaagaatctttgtcttatgccagttttcaaggggaatgattccagcttttgaccattcagtatgatgttggctgtgggtttgtaatatatggctcttattgttttcaggtatgttcctccaataccttgttta

SEQ ID NO: 874867 - DNA, 595 bp, Homo sapiens
ggacctcaactcagctctgcaccaaacagacctaatagacatctacagaactctccaccccaaatcaacagaatatacattcttctcagcaccacatcacacttattctaaaattgaccacataattggaagtaaagcactcctcagcaaatgtaaaagaacagaaattataacaaactgtctctcagaccacagtacaatcaaattagaactcaggattaagaaactcactcaaaaccacacaactatgtggaaactgaacaacttgctcctgaatgactactgggtaaataacgaaatgaaggcagaaataaggatgttctttgaaaccaatgagaaaaaagacacaacgtaccagaatctctgggacacatttaaagcagtgtgtagagggaaatttatagcactaaatccccrcaagagaaagcaggaaagatctaaaatcaggaccctaacatcaaaattaaaggaagtagagaagcaagagcaaacaaattcaaaagctagcagaaggcaagaaataactaagatcagagcagaactgaaagagatagacacttaaaaaaactcttcaaaaaagtaatgaatccaggag

SEQ ID NO: 874868 - DNA, 498 bp, Homo sapiens
tatccagaatctacaaagaactcaaacaaattacaagaaaaacacaaacaaccccatcaaaaagtgggcaaagtgtgtgaatagacacttcccaaaagaagacatctatgcagccaacagacacatgaaaaaatgctcatcatcactgatcatcagagaaatgcaaatcaaaacctcaatgcggtatcatctcatgccagttagaatggcaatcattaamaagtcagaaaacaacagatgctggggaggatgtggagaaataggaatgcttttacactgttggtgagagtgtaaattggttcaaccattgtgtaagacagtgtggcgattcctcaaggatctagaactagaattaccatttgacccagcaatcccattactgggtatatacccgaagaattttaaatcatgctactataaagacacatgcacatgtatgtttatttggcactattcacgatagcaaagacttggaaccaacccaaacatccatcaatg

SEQ ID NO: 874869 - DNA, 652 bp, Homo sapiens
tggattctagtgagcactttttgctttcttgatctttggctcccatttgtgttggctcataggtagttctgatgaagccaggaggttgttgcctaaatccgagactatcctgttactaaagttctagccaccacgaggcagtaggaataatgaagtcaaggatggatagctccaagctaaatgagttaggaagaactgtagatttcactgatgagactgtgtttagatatttaaatcttcctctttattagttgtaagtggacaaatcaggctttctgagtttcaattttcatctgtaaagggaattgtctctggaattgagaataaaatgaaatgaaatgtataaaagcactaatcatgtgtctaacatcattaatggtggtttcagcagcatcagaggcattggttcaggatatcctttaagtgtagctttgagtagatcagacttcttgctgccacccattttcaggggtcctyagatacttaggttccctggctaatctaaaggtatatgaaagccacttaagtagtaattggaataagataggggattaatatgttaattaaatctgaatataagtaggagaattctgaaaccaagcagtatcaggtaggagtaattattctttctagttggccatatggttatgtg

SEQ ID NO: 874870 - DNA, 500 bp, Homo sapiens
atctccctctgccttggagaatttgctccctccattatgttccctggagtacacactccctaggaatctcagctagatgcccaggactctctaggagtccctcttccttaataccaccaattctttatcatgtctgtctacatattcagtagactatatctcatatttcttcttcttctcttgcttctctggcactgccttaatccaatcgaccatgatgtctcaattagataattgaagaacagwctatacaaacttcctctcttcagtctcagactgtccagcccagccactgcatggaaattactcatgcaattatgtggcttaatatcctttaggagccccccaaacttacaaagaaaacccagcttggtagactcagtatatgtttccagaatcagaacatggcatcctgactatctcttcggtagtactgtcttccatttactgattggtttagccaactgacattcttgctattattacattgtgcctacatg

SEQ ID NO: 874871 - DNA, 618 bp, Homo sapiens
cagttcagagactttcacagcagcccctcccatcacaggcctggaggcctaggagggaaaaatgcttttgtgggcagggctcagggtcctgctgctctgtgcagcctcaggttatggaaccctgcatcccagtcactccagctccagctgtggctaaaaggggccaaggtacagtttgggccattgcttcagagggtgcaagcctcaagccttggcagattccacatggtgttgaacctgcaggtgcacagaagggaagagttgaggtttgggagcctcagtctagatttcagaggatgtattaaaatgcctgttgcaggcagacttctcctcatggagaacctctactagggtagtgcagargagaaatgtggggttggagccaccacacagagtccccagtggggcactccctagtgcagctataagaagaaggccaccatcctccagaccccagaatagtaggtccattgacagcttacaccatgctcctggaaaagctacaggcagtcaacatcagcctgtgaaagcagccacaggggctgtaccctgcagagccataaaggcagagcttcccaaggctttgggagtctaccccttgcatgagtgtgcccttga

SEQ ID NO: 874872 - DNA, 637 bp, Homo sapiens
tgtattatggagacccatctcacatgcgaagacacacataggctcaaaacaaagggatggagaaaaatttaccaagtaaatggaaagaaaaaagaaaagcaggggttgcaatcctattctctgataaaacagactttaaactgacaaagataaaaacagacaaagaagggcataacataatggtaaagggatcaatgcaacaagaaaacttaactatcctaaatatatacgcacccaaaaacaggagcacctggattcctaaaacaagctcttagagacctacaaagagatttagactcccacacaatcatagcgggagactttaacaccccactgtcaatattagacagatcaagacagaaaattaacaaggatattcaggacttgaattcagctctgaatcaggtggatctaatagacatctacagaactgtgcatcccaaatcaacagaatatacattcttctcagtgccacaaygtatttattctaaaatcgaccacataattggaagtaaaacactcctcagcaaatgcaaatgaactgaaataataacaaacagtctctcagaccacagtggaaagcaattaaaactcaggattaaaaactcactcaaaaccacacaattacatggaaaat

SEQ ID NO: 874873 - DNA, 559 bp, Homo sapiens
aatttctgaagaggaactgaacttagtctgtcatttgccaatactctcagtagctgagaaaatgagtggtttggtcctaaaaaggggaaatctgagcagtacatcccaaaataccgtggcttaagtctctctcaacaatccaaaaatagatgagttcaagagaaagtagaacagtggttactgggggctggtgggaggagtgagcggagaggtgtttaataggtatagagtttyggccgggtgaggtggctcacgcctgtaaacccagcactttgtgaggctgaggcaggcggatcacgaggtcaggaattcgagaccagcctgaccaacatgatgaaaccccatctctactaaaaatacaaaaattatctgggcgtggtggcacgcgcgtgtaatcccagctactcaggaggctgaggcaggagaatcgctagaacctgggggtgcagaggttgcagtgagctaagattgcgccactgcactccagccggggtgacagagtgagactctgtctcaaaacaaaacaaaagaaaacaaaaaaataggtgtagagtttcaa

SEQ ID NO: 874874 - DNA, 559 bp, Homo sapiens
aatttctgaagaggaactgaacttagtctgtcatttgccaatactctcagtagctgagaaaatgagtggtttggtcctaaaaaggggaaatctgagcagtacatcccaaaataccgtggcttaagtctctctcaacaatccaaaaatagatgagttcaagagaaagtagaacagtggttactgggggctggtgggaggagtgagcggagaggtgtttaataggtatagagttttggccgggtgaggtggctcacgcctgtaaacccagcactttgtgaggctgaggcaggcggatcacgaggtcaggaattcgagaccagcctgaccaacatgatgaaaccccatctctactaaaaatacaaaaattatctgggcgtggtggcacgcgcstgtaatcccagctactcaggaggctgaggcaggagaatcgctagaacctgggggtgcagaggttgcagtgagctaagattgcgccactgcactccagccggggtgacagagtgagactctgtctcaaaacaaaacaaaagaaaacaaaaaaataggtgtagagtttcaa

SEQ ID NO: 874875 - DNA, 655 bp, Homo sapiens
ggccctgtgaggtgtcagtctgcccctactggggtgtggctcccagttaggctgcttgggggtcaggggtcagggacccacttgaggaggcagtctgcccgttctcagatctccagctgcgtgctaggagaaccactggtctcttcaaagctgtcagagagggacatttaagtctgcagaggttactgctgtctttttgtttgtctgtgccctgcccccagaggtggagcctacagaggcaggcaggcctccttgagctgtggtgggatccacccagtttgagcttcccagctgctttgtttacctaagcaagcctgggcaatggcgggcacccctcccccagccttgctgctgccttgcagtttsatctcagactgctgtgctagcaatcagtgagactccatgagcataggaccctccaagtcatgtgcgggatataaactcctggtgcgccattttttaagcccgtcgtctgtcacccctttctttgagtaggaaagggaactccctgactccttgcacttcccgagtgaggcaatgcctcgccctgcttcagctcacgcacagtgtgctgcacccactgtcctgcgcccactgtctggcactccctagtgagatgaacccagtacctcagatggaaatgcagaaatcaccc

SEQ ID NO: 874876 - DNA, 655 bp, Homo sapiens
ggccctgtgaggtgtcagtctgcccctactggggtgtggctcccagttaggctgcttgggggtcaggggtcagggacccacttgaggaggcagtctgcccgttctcagatctccagctgcgtgctaggagaaccactggtctcttcaaagctgtcagagagggacatttaagtctgcagaggttactgctgtctttttgtttgtctgtgccctgcccccagaggtggagcctacagaggcaggcaggcctccttgagctgtggtgggatccacccagtttgagcttcccagctgctttgtttacctaagcaagcctgggcaatggcgggcacccctcccccagccttgctgctgccttgcagtttcatctcagactgctgtgctagcaatcagtgagactccatgagcataggaccctccaagtcatgtgcgggatataawctcctggtgcgccattttttaagcccgtcgtctgtcacccctttctttgagtaggaaagggaactccctgactccttgcacttcccgagtgaggcaatgcctcgccctgcttcagctcacgcacagtgtgctgcacccactgtcctgcgcccactgtctggcactccctagtgagatgaacccagtacctcagatggaaatgcagaaatcaccc

SEQ ID NO: 874877 - DNA, 703 bp, Homo sapiens
ttacaaatgcaggtatggtaattcactccaagtgtatatgctgaatattctgaatctaccagcttgtctgtgtcctgttaactgattaaccagtcatgtggaatagtcctagcaaactgcaggcctatgaaaaatccacttcacatttgatagatcacgtcttgatgaacatttcagaaattgataggtttatttgtttcaaatcatgttcttttaaaaatactttctggtccaatttttatctttctagacatgttgcatactaaattctgaaagggtaagcaatcaggtttttaacacgtgccctttaaaatattgacatgattcaatactttcatatttcgtattcaattgttcttagccatttgcaagtgtcttcatatgtagtttgaaacattagaaaacttgtctatcttatttcccttacctctgtgctgggtggctcgtagttctttaagcctttctgccagtggtggtttctaactagactgttgccactgaacrctgcagggaggaaggtgggaagggcaggtaaaatggcagtaatgcccatccgtggtttcatcccttttcaaagattgaatctgaacagtaaatgccaaacccaatatgaaagtcatcagtttagagttacagaagggtatcgactcaatgttttctccaggtcctgtgtgtttttacctctcacttccaacataatgcc

SEQ ID NO: 874878 - DNA, 653 bp, Homo sapiens
ttgaggtgatggaatagtctgcctttcaaagagaatgatcttacaatttacaagtttgcctctcaattaactgagcactgtggctctttatttaatgttatttctacataatctaattttggctgcaggttaatggacccatagggagttactgctagttcagtttcaaacraattcagcagcattcccagattattggttgttaatgggatcacccagctgtttttacttcctccccatccttctcgaggtgactacagagaagaggacaaaaacggatgcagtgggactcacttttagatcactgggactactgagctctccctctgccggcttcctggccacactgggttccagcccctagaaaaccacctggtcatagccagagccagcatgacctgcactattattcatccaaacacattgactgagcacctagtgtgcccaaggcactattctggtgcagttggagacacagagatggatcaagcatggtgtgaaggaagaatataaatcggttgggttaaatcactaaaatcactaaaactgagctgtggtttccttacatgcagcgttcatcatcaatatgcctatcttcaattgtttgttgtttatttatgtaatgttgactgagaatctgcatgcaccagata

SEQ ID NO: 874879 - DNA, 584 bp, Homo sapiens
tcaattcaggctagactaaatgcctctctccatcagtgtttagctataagaaacagaaccactcgtagttgcaaggagtctgggaaacatagcttttgctttccagcttcagcagcacacaaaggaacagcaagagaaaatggagaggatcctgaaggttcatccaccatttctcatttcccatttctggtcgtgtctgcactgcacagtgcatagcattgcattcaggaggccaggttataagtgcctgcagggtggaactggagactgggacggggtgggaaaggaagccgacatcagagtgaaatgtctgagtcaagaggaagaagagctgagggaaacaaagcccagggtgtggcctgaacagagagtaaagtagcatgaatgagaaggccactgagacaagggattccaaggtgaggggaatcaggatggtcttsaagaactttaacatcttgttcatagcagaaaataagacaaagaggaagacattgagccattgagccagcttttgaatattttaatgattagaagaaggtgaccaggaagtcactgaatgagaagtgaaagggagtggaattgct

SEQ ID NO: 874880 - DNA, 566 bp, Homo sapiens
taaagcatatctcgacgatgtcacttcctagctcaggaactttcatcatttccattgccctagcagaggctttcaaagtgtgcagaatcagctggagggcttagtatgctgcagattgctggccccgccccaagagatcctcaggagtggacccmagccagtcacttttaaccagttcccgtaggatgctgatgctgctggtcctgtatccctactccaaaaacactagcttcataaattaacaaatatgtgagccctttaaggtccttgggaagcagggcccacccagcctcatcactcacccctaactctcacctcccaccttccaagcacactgaacacacctcccctgcctgggcacaaccagtgctcccctgtcttcctgccttttccccgtcccagctctttctggtctgcttggcaaattcctggcgatcattcaagatccagctaaatgccaccgcctctgagaagcctcctcctctccccaagcagaattagatacccctccctctgtattttcatagcactccatacttgactctaactcacagcacacatgatat

SEQ ID NO: 874881 - DNA, 566 bp, Homo sapiens
taaagcatatctcgacgatgtcacttcctagctcaggaactttcatcatttccattgccctagcagaggctttcaaagtgtgcagaatcagctggagggcttagtatgctgcagattgctggccccgccccaagagatcctcaggagtggacccaagccagtcacttttaaccagttcccgtaggatgctgatgctgctggtcctgwatccctactccaaaaacactagcttcataaattaacaaatatgtgagccctttaaggtccttgggaagcagggcccacccagcctcatcactcacccctaactctcacctcccaccttccaagcacactgaacacacctcccctgcctgggcacaaccagtgctcccctgtcttcctgccttttccccgtcccagctctttctggtctgcttggcaaattcctggcgatcattcaagatccagctaaatgccaccgcctctgagaagcctcctcctctccccaagcagaattagatacccctccctctgtattttcatagcactccatacttgactctaactcacagcacacatgatat

SEQ ID NO: 874882 - DNA, 604 bp, Homo sapiens
aatgctagtgatttttgcatattagttttgtatcctgagactttgccgaagttgcttatcagcttaggaaacttttgggctgagacgatggcgttttctgggtacgggatcatgtcatctgcaaacaaagatagtttgatgtcctctcttcctgtttgaatatgctttatttctttcctttgcctgactgccctgggcagaacttccaaaattatattgaatgggagtggtgagagtgggcatccttgtcatgtgcctgttttcaaggggaatgcttrcagcctttgtgcttttggtatgatattggctgtgggtttgtcatatatggctcttattatgttaaggtatgttccttcagtacatagtttattgagagcttttaacttgaagggatgttgaattctattgaaggccttttgtgcatctattgagataattatgtgggttttacctttttttttttttttttggtgatggagtcttactctgctgtccaggctgaagttcagtctcataatcttggctcactgtaacctctgcctcctgggttcaagtgatcctcctgcctcagcccccaagtagctaggattacaggggactgcca

SEQ ID NO: 874883 - DNA, 634 bp, Homo sapiens
cttttagttgtgatgtttggatgttctcttaagatctttctagctttttgatatgggcattttgtgctataaatttccctctgaaaactgctttagctgcatcccaaagattctggtacactgtctcttcattctcattagtttaaaagaacttcttgatttttgccttaatttcattaattacccaagagtcattcaggatcaggttgttctgtttccaggtagttgtgtggttttgagagaatttttagaacttaagttctaattatattacactgaggtctgagrgactgtttgttatgatttcctttcttttgcatttgcttaggagtgttttacttcggattatgtgatcaattttagagtaagtgccatgaggtgatgagaagaatttataccctcttgtttttgggtggagtgttctctagatgtctatcatgttcacttgatccagagcagagatcagagcccaaatatctttgttaattttctgtctcgatgatctgtctaatattgtcagtgggatgttaaagtctcccactattattttatgagagtctaagtctctctgaaggtctctaagaatttgctttatgaatctgggtgctcctgtattgggtgcatatatatttag

SEQ ID NO: 874884 - DNA, 665 bp, Homo sapiens
gagattcagtttcttcatctgtaaggtggtgataaaacttttctgcaatttttttggtgagttttgaagaaacagcatgcaaattaagtaaaatgtctggtgtaatgcttgttgtaatctttaatgattgagtacttgccacctactaagcacatgatgttttacttgtatttgctcttgtcagcaataaaaaatgagattggtagtgttatcatccccattttatggataggaagctgaagtaatagtgtttaaataacttgctcaaggttatacggttaaggaacggttgagcagaatttttacccggattagaatgtagaaagtttccaagagcaagagaccatcacatatcctaatagtaagaaaaaattaaagaaaaatttaaaaattataatttttggccaggcatggtggctcacacctgtaatcccaggactttgggaggccgaggccagggggatcacgaggtcrggagatcgagaccatcctgactaacatggtgaaaccccgtctctactaaaaatacaaaaaattagccaggcgtggtggtggctgcctgtagtcccagctattcgggaggctgaggcaggagaatggcatgaacctgggaggcggagcttgcagtgagccgagagcgcgccactgcactccaacctggacaa

SEQ ID NO: 874885 - DNA, 625 bp, Homo sapiens
gaaaatctgtattgaaaaaacctttgtggaaactggaaggaatcaaagactccagttgctttaagaaggtaaggaaataagtgtcttgtgctgtgtcactgtagtaggatgagttggtcacgtggaagtgctttggagtcagacagtcccaggctcaaatccacatccctcattgctatttaccagtgtatgggcattygcaaattattcaagctcttcaaatttaagttgttggttttttttattttttaacttgcaaagtaagattagggttagtttcttctttagagatgtttaaagattaatgagaagatatatgtaaactttgtaagacagtgcttggctcatggcaagttacccagaaatgttattggccttacttccttattctgatcactatcccactcagattcattagttttcattttgaaagccactaggtttatactttatctgagccaatgctgtttatcccagcatagccagagctccagagtgcccattaatgagagtttgatgaatcttcctttgcaacttccatttcacgagatggaaaagcaacatcagaaggaagccatttttacatgattttaggtttggtgaaatattgcctattgccccacag

SEQ ID NO: 874886 - DNA, 595 bp, Homo sapiens
aaaagtcttaaagggctcataagttatatcatggtacatttttaagatcatcaccttcacagttataaaaggaggatagtatcatgcctcatttccccagactccatagaccttacaatcctcatgtggtcccaagagccagctcaccagcctggctgaccccaactgtccagtagaatgcaaatatgagaaatcatgaggaaatagtaatggcaacactagcatttattgagtgctgtgtcaggtggtgtcttaagtttctgacacgtattaactcatttgatctttctacaacaccttctaagrtaaatagtattaatactatttaacagtttataatatatactatgtaatacgttaatattatttaactccttatatataaatattataatatatactagatattaatattatttaactcatatataatatatactatataatatattaattttattaatatttaactaatataataatacattaacattatttaactcatttgatcttcctacaacaccttctgatgtaaatagtaataataccatttatcattttataatatatactatataatatattttatatatat

SEQ ID NO: 874887 - DNA, 595 bp, Homo sapiens
aaaagtcttaaagggctcataagttatatcatggtacatttttaagatcatcaccttcacagttataaaaggaggatagtatcatgcctcatttccccagactccatagaccttacaatcctcatgtggtcccaagagccagctcaccagcctggctgaccccaactgtccagtagaatgcaaatatgagaaatcatgaggaaatagtaatggcaacactagcatttattgagtgctgtgtcaggtggtgtcttaagtttctgacacgtattaactcatttgatctttctacaacaccttctaaggtaaatagtattaatactatttaacagtttataatatatactatgtaatacrttaatattatttaactccttatatataaatattataatatatactagatattaatattatttaactcatatataatatatactatataatatattaattttattaatatttaactaatataataatacattaacattatttaactcatttgatcttcctacaacaccttctgatgtaaatagtaataataccatttatcattttataatatatactatataatatattttatatatat

SEQ ID NO: 874888 - DNA, 570 bp, Homo sapiens
gtggaaacacagacatttcagtgggatttctgtgctgaataaataagacgggagcattgaaaactgaagcaggcaaccaaggaaagaacaacttggggcacaaagttgagttgaaatttgaagagcgtgagtctgtcccagacctgacctcttcttgctcctgcaaagtgggagtgggcagtaaagaggtctaaaagyatctttatctggcatgccggggaaagctgaaggttcggattcaaggctgcttctcatgagaaccaaatggcagctctctcgcttccaattaggggtctgcgtgtgcctgacacagcgggaagcctcctgccacctcctgcatccgactcacagccaggcggagggaggcaaaggccggtgtgcaactgcacggctccagccgcacacgttccttctaggagggcaggtctcccctctccctcaactgcagggaaaattcagggtgcaaaggccgtgtttctcttgaattctgctggcgagctgatggcgcagctacattacacggtccccaaaggtggtgttctttttaaaaaaggacaatgatggggctcc

SEQ ID NO: 874889 - DNA, 616 bp, Homo sapiens
gcaagatttccagagaaatctcatggaacctcagcattcactgccctgcgctgcctcaggtctctgctccctgcattccagagcagagcacttcaaccaccccagccttgcctcaagctggtccaggtatggctcttgtgttgctctggagggtgcaatccataaaccttggtggtattccacccttcagaatgcaygagctttggagccacggaagccgccacctagatttcaaaggatatcgtggacagtctggggatccaggtagatactgtttgcagggatggaaccattacatagagccccaactaggacactttctcctgagttcctgggagagaggccacttcagatcgctcagaaacatagggccactaacatgaaattccagcctgagaaagctgcaggcattggactccaacttgtgagagctacttggtggactaagcctgacaaagccatagtggtagagcttccagaggttttgggggcctaataccacctcagtgtgctgagaatgggtgacataaaataagaggaaattactctccagcatgaagatttaatgttgtttcccctgttgcgttttaaacttagttggagcctacactctttt

SEQ ID NO: 874890 - DNA, 616 bp, Homo sapiens
gcaagatttccagagaaatctcatggaacctcagcattcactgccctgcgctgcctcaggtctctgctccctgcattccagagcagagcacttcaaccaccccagccttgcctcaagctggtccaggtatggctcttgtgttgctctggagggtgcaatccataaaccttggtggtattccacccttcagaatgcatgagctttggagccacggaagccgccacctagatttcaaaggatatcgtggacagtctggggatccaggtagakactgtttgcagggatggaaccattacatagagccccaactaggacactttctcctgagttcctgggagagaggccacttcagatcgctcagaaacatagggccactaacatgaaattccagcctgagaaagctgcaggcattggactccaacttgtgagagctacttggtggactaagcctgacaaagccatagtggtagagcttccagaggttttgggggcctaataccacctcagtgtgctgagaatgggtgacataaaataagaggaaattactctccagcatgaagatttaatgttgtttcccctgttgcgttttaaacttagttggagcctacactctttt

SEQ ID NO: 874891 - DNA, 583 bp, Homo sapiens
ttacatatgttttaccaggggataaactaaaaacaacttgctcagccaacttgaaccagtgcaaatccaggttatgaagtttagattatatccagtatgataaatttcacaattactagatatgaataggaaaaaaattgtatctgacatgaagaagacactgtttctaatgtaaaacatcctacgaaagaaatatctccaataaaaatatttaaaattgaagtatgttctaggcaaaccaattgagaatgcagtgattcagtgtgtctgagtttaaacataattattttcatactttttgtttactttttttttgagacagggtctcgttctgtcacccaggctggagtgcagtgcaggatctcagctcactgcaacctcctcctccygggttcaagcaattctcctgcctcggcctcccgagtagctgggactacaggcgcctgccaccatgcccagctaattttttttttgtatttttagtagagacagggtttcgccgtgttagccaggatggtctggatctcctgatctcgtgatccacctgcctcagtctccccaagtcctgggatcaccggcatgg

SEQ ID NO: 874892 - DNA, 592 bp, Homo sapiens
atatctagccatttctctctatatatgcaaatagatagatatatatgatgatagataatctttgtaactatatctgtctatcatttgcatacagatattaagactgaaattgagatttttatacagttgaagttgcctgttttttttgttttgttttgtttttttgagacagtctgactctgtcacccaggctgcagtgcaatggaatgatctcagctcactgcaacttccacctccaggttcaaacaattctcatgcctcagcctcctgagyagctgggattataggcatgtgccatcacacctgactaatttttttttctttttgcatttttagtagagacaaggttgctccacattggccaggctggtcccgaactcctggccgcaagtgttccacctgtctcagcctcccaatgtgctgagattataggcatgagccactccacctgacccaaaagttcagtcctaattttaatgatttgtttttgtctaagtgaaacaaacctttcttccatgacgattcggccatatggttacagaaagggttgcgtcttcaatcatccccacaaaacttgctatatctgtatgtc

SEQ ID NO: 874893 - DNA, 288 bp, Homo sapiens
ctgcagaaaccctataagtcagaagagagtggggaccaatattcaaaattcttaaagaaaagaatttttcacccagaatttcatatccagccaaactaagcttcataagtgaaggagaaataaattcctttacagacaagcaagtgctgagggattttgtcaccaccaggcctgcctttcaagagttcctcaaggaagcactaaatatagaacrgaaaaactggtaccagtgactgcaaaaacataccaaattgtaaagaccatcaacactatgaagaaactgcatca

SEQ ID NO: 874894 - DNA, 643 bp, Homo sapiens
taaaggttttgaagatggtgcgtgagcctgcacagacaagtctgcgggattgggtcctgttatgaaatgccaaaggggctttttagcgacaggcacgtgggcccctctcagccgccctgtcggcactcagatacgcaactaagaccgagtgggtttcttttctggttttgttctttaggcatcagagtttacatgtttagaaagagggaagttgaggctgaatagtcacatccaccatattctcataggggcaaatgttctctgattaggagggctcaaccacagtgcagagtcccctcttccaaaattctgtttcaacacygagaggagttcacatgaccaggcaaattagagattttcttagcatttcctgtttcccagatttcagaggagcccttcagggaatgtctggcccagggtagcacattcaggatgagggaaaaatggttatttttaggtccctccaaccatcacattcctccctgtctccacttgggcactctgttgttctagtgacctgtcaaagggatgggggcggggctgcgagaaaaaagccacatcgcttcctttggggtgggggtaagggtacccctgctccaggggtcctaaactgctcactagcccttctgctggagagggacca

SEQ ID NO: 874895 - DNA, 633 bp, Homo sapiens
gtggcaaatttgtataaaaacctactttttgagcttcaagtttccctttttctgttcttaaaggaagaataaagtggcttggctctgtgaggaattgaaccttccacacagacaggagctcatttggaggcaagagctgctctgcatgtgtggccagcatctctgggagggctgggtccctccatttttgttagagggtcccacagcagccttggtgttctcctgcatgtccaagctgtggcaacagaatgtcccgcagacgctgcctctcagcacccatatcatatccctagcatyctccagtgttcattgtgaggacaaacctgcatatcacttttctgtactaggggctaagaatctaaattcagggaactttcattatctgtgggcaaatcacagtctgtctgggccaccagcatctaactgaggtagaagaccagcaggacttatttccccatcctgacaggatgaagtaaaaaaccagcaggaaccagcaagtagtgaagaaggcaacctctagtcactgtcactgctcattagcataagacgctcccaccagcaccaggacagtttgcaaatgccatggcaacaatctggaagttaccatctcttttcatgaaaatgacctggaac

SEQ ID NO: 874896 - DNA, 633 bp, Homo sapiens
gtggcaaatttgtataaaaacctactttttgagcttcaagtttccctttttctgttcttaaaggaagaataaagtggcttggctctgtgaggaattgaaccttccacacagacaggagctcatttggaggcaagagctgctctgcatgtgtggccagcatctctgggagggctgggtccctccatttttgttagagggtcccacagcagccttggtgttctcctgcatgtccaagctgtggcaacagaatgtcccgcagacgctgcctctcagcacccatatcatatccctagcattytccagtgttcattgtgaggacaaacctgcatatcacttttctgtactaggggctaagaatctaaattcagggaactttcattatctgtgggcaaatcacagtctgtctgggccaccagcatctaactgaggtagaagaccagcaggacttatttccccatcctgacaggatgaagtaaaaaaccagcaggaaccagcaagtagtgaagaaggcaacctctagtcactgtcactgctcattagcataagacgctcccaccagcaccaggacagtttgcaaatgccatggcaacaatctggaagttaccatctcttttcatgaaaatgacctggaac

SEQ ID NO: 874897 - DNA, 649 bp, Homo sapiens
aagtttatcaatctttctgattgtattttcttcaatttgtatattggaaataatatcctcaccataaaatgattctagaaatttctaccaagtgaccattacatagctgacactgatctaggtgctggggttgtaaaaatgatggagccaaaattcctaccttcgttgagtttgcaatctagtcacagcagatttacaataatcaacataaatggtctactaattaaataaacaagctgtttcagatagtgataggttcacgaagaaaaaaaaaataggacaattgaaaattgagtgcccatccatgtgaggggtgcatgtttaaacttagtttcagatgaagacttcaggaggaggcattagaaatgaaaccaaatgataagaaagagacagtcctaggcatgtgtgggaagcctcattgcaaggagagataataatggtgagtgcaaagacttggaaatgagagcaggcttggtgggttccaygacagaaagaaggccagtctgactcaagtatagcaggtgatgcagaatgcaaccttgggaatataacaggaccagatcccatggttctttataaatcatgaggagaagtttggatttccaactttagaacttttggaaagtttccagtgagaagatgatatgtt

SEQ ID NO: 874898 - DNA, 580 bp, Homo sapiens
gtatgacataccccctgagtgattagagtctcatataactgattcttgtgatagttggcactgctgagattggtaagaaatcattttagataggctttccatttctgcatatgccctttcttcacatcctgttttgtattagtttttttgaggcatctaggcagggctagacagtggggaatgatcagggctataagttatttccagatagatcccttaaatgagtaagagtctgcctgtggtcttaagtgtaggtaactagtccctaargggaggtactagctgtattatctatagtaccctgtgggcatgcaatacgttcaataaagccataatagagtaataggtacaatcatttattatctttctccatttaaagctgtttcagagtgacatatcaaataccttaaaatgaagaagtttcctttcttcattttaaaatgatattgtagaattgcagcattttgttttttcactctcatatcatattgaattatttctggaatatttataaataatataccttgggtcaacatttcctatatttaataataatgatagtgataatagtaatgaaaac

SEQ ID NO: 874899 - DNA, 593 bp, Homo sapiens
ttcacatttaagataattatcaataagcaaggataatactgccattttgtttcattaggttttgttttgttttgttttttgtagatttttttcttctttccttcctctctcttgctgttttcttttgtggttaggtgcttctctctaatagtacrttttgattccgtgcttttaatttttagtgtatccactatagatttttgttttgtggttaacatgaagtgttccaaaaatatcttgcagttaaaacaagttattataggatgagagcaacctaactttaattgtaaaaataggaaatttaaaaaaggaaaccaaataaataaatgaatctacaatttaactttatttccccccacatatggaacttttcacatcccacattacataatattatagttcctacatttttttcaaattaaaatagtcgttattttttagtaatttgtttcttaagtcttaatattacatccacactcactcttactgtgctggcacaatttagacatgccaatgaacctaacatgcacatctttgggatgtgggaagaaactagaacacctggataaaacacaaggtgatgtagggagata

SEQ ID NO: 874900 - DNA, 593 bp, Homo sapiens
ttcacatttaagataattatcaataagcaaggataatactgccattttgtttcattaggttttgttttgttttgttttttgtagatttttttcttctttccttcctctctcttgctgttttcttttgtggttaggtgcttctctctaatagtacgttttgattccgtgcttttaatttttagtgtatccactatagatttttgttttgtggttaacatgaagtgttccaaaaatatcttgcagttaaaacaagttattataggatgagagcaacctaactttaattgtaaaaataggaaatttaaaaaaggaaaccaaataaataaatgaatctacaatttaactttatttccccccacatwtggaacttttcacatcccacattacataatattatagttcctacatttttttcaaattaaaatagtcgttattttttagtaatttgtttcttaagtcttaatattacatccacactcactcttactgtgctggcacaatttagacatgccaatgaacctaacatgcacatctttgggatgtgggaagaaactagaacacctggataaaacacaaggtgatgtagggagata

SEQ ID NO: 874901 - DNA, 630 bp, Homo sapiens
gtgggtaaataaggaaatgaaggcagaaataaagacattcttttaaaccaatgagaacaacgacacagcataccagaatctctggtacacatttaaagcagtgtgtagagggaaatttattgcactaaatgcccacaagagaaagcaggaaagatctaaaatcgacatcctaacaccacaattaaaagaactagagaagcgagagtaaacacattcaaaagctagcagcaggcaagaaataactaagatcagagcagaactgaaggagatagagagacaaaatactctccaaaaaatcaatgaatccagtagctggttttttgaaaagatcaacaaaattgatagatcactagcaagactaataargaagaaaagagaaaagaatcaaatagacgcaataagaaatgataaaggggatatcaccaccgatcccacagaaatacaaactatcatcagagaatattataaacacctctatgcaaataaactagaaaatctagaagaaatggataaattcctggacacatacacccttccaagactaaaccaggaagaagttgaatccctgaatagaacaataacaggctctgaaattgaggcaataattaatagcctaccaaccaaaaaaag

SEQ ID NO: 874902 - DNA, 630 bp, Homo sapiens
gtgggtaaataaggaaatgaaggcagaaataaagacattcttttaaaccaatgagaacaacgacacagcataccagaatctctggtacacatttaaagcagtgtgtagagggaaatttattgcactaaatgcccacaagagaaagcaggaaagatctaaaatcgacatcctaacaccacaattaaaagaactagagaagcgagagtaaacacattcaaaagctagcagcaggcaagaaataactaagatcagagcagaactgaaggagatagagagacaaaatactctccaaaaaatcaatgaatccagtagctggttttttgaaaagatcaacaaaattgatagatcactagcaagactaataaagaagaaaagagaaaagaatcaaatagacrcaataagaaatgataaaggggatatcaccaccgatcccacagaaatacaaactatcatcagagaatattataaacacctctatgcaaataaactagaaaatctagaagaaatggataaattcctggacacatacacccttccaagactaaaccaggaagaagttgaatccctgaatagaacaataacaggctctgaaattgaggcaataattaatagcctaccaaccaaaaaaag

SEQ ID NO: 874903 - DNA, 630 bp, Homo sapiens
gtgggtaaataaggaaatgaaggcagaaataaagacattcttttaaaccaatgagaacaacgacacagcataccagaatctctggtacacatttaaagcagtgtgtagagggaaatttattgcactaaatgcccacaagagaaagcaggaaagatctaaaatcgacatcctaacaccacaattaaaagaactagagaagcgagagtaaacacattcaaaagctagcagcaggcaagaaataactaagatcagagcagaactgaaggagatagagagacaaaatactctccaaaaaatcaatgaatccagtagctggttttttgaaaagatcaacaaaattgatagatcactagcaagactaataaagaagaaaagagaaaagaatcaaatagacgcaataagaaatgataaaggggatatcaccaccgatcccacagaaatacaaactatcatcagagaataytataaacacctctatgcaaataaactagaaaatctagaagaaatggataaattcctggacacatacacccttccaagactaaaccaggaagaagttgaatccctgaatagaacaataacaggctctgaaattgaggcaataattaatagcctaccaaccaaaaaaag

SEQ ID NO: 874904 - DNA, 595 bp, Homo sapiens
tgagcacccagattcataaagcaagtccttagagacctacaaggagacttagactcccacacgataataatgggagactttaacaccctactgtcaatattagacagatcaatgagacagaaagttaacaaggatatccaggaattgaattcagctctgcaccaagtggacctaatagacatctacagaactctccaccscaaatcaacagaatatacattcttctcagcaccacatcacacttattccaaaattgatcacatagttggaagtaaagcattcctcagcaaatgtaaaagaacaaagagaagcccatcagactaacagcagatctctcagcagaaactctacaagccagaagagagtgggtgccaatatgcaacattcttaaaagaattttcaacccagaatttcatatccagccaaactaagcttcaacccagaatttcatatacagccactgcaaaaacatgccaaattgtaaagaccatcgatgctaagaagaaactgcatcagctaatgagcaaaataacgagctaacatcataatgacaggatcaaattcacacataacagtattaacctttgtaaatggg

SEQ ID NO: 874905 - DNA, 614 bp, Homo sapiens
gtccagaggtgagttcaagtcctggatatccttcttaaccttctgtctctttgatctgtctaatattgacagtgtggtgttaaagtctcccattattattgtgtgggagtctgagtctctttgtaggtctctaaggacttgctttatgaatctgggtgctcatgtattgggtgcatatatatttaagatagttagctcttcttgttgaattgatccctttacaattctgtaatggccttctttgtctcttttgatctttgttggtttaaagtctattttatcagagactaggattgcaacccctggtttttttgtttgtttgtttgtttgttttttgctttccatttgcctggyagatcttcctgcatccctttattttgagcctatgtgcatctttgcacatgagattgatctcctgaatacagcatatcaatgggtcttgagcctttatccaatttgacagtctgtgtcttaaaagacacaattaaaattggagcatttagcccatttacatttaaggttaatattgttatgtgtgaatttgatcctgtcattatgatgttagctggttagtttgcccattaattgatgcagtttcttcacagtgtcaatgg

SEQ ID NO: 874906 - DNA, 598 bp, Homo sapiens
ccaagatccttctggaattttaaaggtcaggctcacaaattaaatgggatatgacagggaaccaccatcatttctttaaatcttcaaaggtggagttatcatctactatttcccttgggacatggtaattttaataatttattagttttattggarggagccaatttccagcatttccacttagctttcaccactaggatagttcttacctcacagatcagggaattatttaggggttttatgaacttcttgaaagcttcatggacaacatatccaatcattcttgaaatatcttgatattatttttccccaattcttggttacctaaaaataaaatgtcagagaccttgatgttttagagtctttccttaaaaagacagttttgagtgtagacagcctggaacttagctcactaatgctagtggaaaactctcagtatgaaatctgccttgccaagtgtgtgggagcttctctctggaacactaccccaggggccagggaaccacccccacccctacttccacaggggctgctgcttgcccttcacacagaaactcagagtatggacctgccaggcccagccccaaactggcattgc

SEQ ID NO: 874907 - DNA, 639 bp, Homo sapiens
aaatgctgaaaggagttctaaatcttgagaccaaagcttgacatacactggaatagaatctcttaaaaggttaaaactcacaggacctataaaacaataacacaatgaagaaacaaagtatctagggaacaatgaacatgatggaatgttaatggaacagtacctcacatctcaatattaccattgaatgaaaatggtgtaaatgctctacttaaaagatacatattggcagaatggataaaaaaatcacaaaccaaatatctgctgactttaagagactcacctaactcacaagaattcatatcagctcaaagtaaaggagtagaaaaagatattccatgcaaatggaaaggaaaaatgagtaggagtagatgttttcatatcagataaaacagactttaaarcaataacagttaaaaaaaagacaaagccattatataatgataaaagaatcaatacaacaagaagatattacaaacttaaatgtatatacatctaacactggagctaccagattcagaaagcaattactactagacctaagaaatgagatagacagcaacacaataataatagggaacttcaatattccactgacagcagtagactattgagacagaatgtcaatgaagaaacact

SEQ ID NO: 874908 - DNA, 579 bp, Homo sapiens
acaatgtcccactagggcaaaggatgacacttgctgggccctccccaaccttcaccccaggccccccaaactcagagctggttctgtagagaattccagagtaaactctaagcatcctacatcctacctgaggcttccttcctggtgtggcagccctctgtggcccagcattgggcataaaaaacagactgacccctccagcaggyttctttgctggagcttctagctgcttctccaggtttttgaccatcgactgcaccagtgttcctggaaggtgaaaaagtggctgtgtcagtgggagaagcctagaaaatgaacatctcagttttgtggctcatgtccaggctccagtgtggacagagggaatgagcagaagggccaggaggaagaaggctgagcaaccacaaaaaaggagacagagaaggccaggccaacaggtacccagtgaacagaggcttggcatattctgaaaatgtgactgtgcaaacttaatgacatggctagtgacagaggcttaggaagctgtgcttccctctaatgagaggctgaggcaggacctctgctcagtgtggggaatga

SEQ ID NO: 874909 - DNA, 641 bp, Homo sapiens
gctgaagtttaccaggaagccacccaaatttaatggagttggctcctgagattaaaaacaaaacaggccaggtgcagtggctcatgcctgtaatcccagcactttgggaggctgaggtaggtggatcacctgaggtcacaaattcaagaccagcrtggccaacaagatgaaaccctgtctctactaaaaatacaaaattggtggggtgtggcagcacactcctgtaatcccagctactccagaggctgaggtgagagaatcgcttgaacccaggaggcagaggttgcagtgagctgagatcacaccactgcgctccagcctgggcaacagagcaagacaccatctcaaaaaataaataaattcaaatgaaacatcaacaacaacaaaaacgtatttgccttatttgtgaggctctttaaatgttttattttttcaattcccattatagccttttgagagagacagttttaatccttattttataaataagggttataaataagggtagaataggctcactagtgccaattagcttttccatgttcatttggctgcaaggcccaggggtgagattgagactttggtctatttgttactgaacttcttattcaaacataccagaccagctatgtgatttgaaa

SEQ ID NO: 874910 - DNA, 598 bp, Homo sapiens
tatcagatataataatccatataatataataatatatataatataatctaaggacttttaaaatattgaagaaattaatgtttgttatctgagcatctgtcaaaggtatatagcactaacaatgaaatcatcccttgtgactctaagacactttaatattcactgatttgtttgcagcrgaaatgaatttgctttaatctatttaatctttgccttggcacaggaaacattaaaataattcttagagacaacattcagcaccactgtttttcaaaatcgaatattgattactcattaaatacaaatagccgtaccaactgatgtgggcaacgtaaagagatcatagctatggttctgttcttaggaaggatataatgtattgtataatgaaaacatacactcataaaaagtaccaagttcacactcataaaaagtaccaagttcagaaagttcaccttataagcttcagtccctcggttctccatccacattgtgccaacctgtctcccattagactctgagctctttgaggacatagactgtatttattcttttttccccagagttttaaccaaaagattctttttagaaaatagaa

SEQ ID NO: 874911 - DNA, 606 bp, Homo sapiens
ttataggttgaattagaccccctaaaaaatatattaagatcctaacccccaagacctatgaatatgagcatatttggaaatgcagtcttttcatatgatcatgttaagttgaggccattagggtaagtcctaattcaatacaattggtattctcataaaaagggaaaatttgcacacaaggacagacacctacagagggaagatgatgtaaagacactgggaaaatgacatctacaagccaaggaacacatgatgctactggacgctaggagtgaagctagaaattggacagattatttcctcacagctctcaggagaaactaaccytaaaaataccttgattttgaacttctagaccccagaactgtgagacaacagatttctgttgtctgagccaccagtatgagatactttgttacagcagcctcagggctctaacacaatatcaaatataagacgcttttatactctaagtcacctggaacactatatattaacaagtccaaatggtatgcctttttattttattgatgttatttatgttcattctatttaatgataacctatatgatcacatgaccagtggtctcacataagatcaggggt

SEQ ID NO: 874912 - DNA, 606 bp, Homo sapiens
ttataggttgaattagaccccctaaaaaatatattaagatcctaacccccaagacctatgaatatgagcatatttggaaatgcagtcttttcatatgatcatgttaagttgaggccattagggtaagtcctaattcaatacaattggtattctcataaaaagggaaaatttgcacacaaggacagacacctacagagggaagatgatgtaaagacactgggaaaatgacatctacaagccaaggaacacatgatgctactggacgctaggagtgaagctagaaattggacagattatttcctcacagctctcaggagaaactaaccctaaaaatacyttgattttgaacttctagaccccagaactgtgagacaacagatttctgttgtctgagccaccagtatgagatactttgttacagcagcctcagggctctaacacaatatcaaatataagacgcttttatactctaagtcacctggaacactatatattaacaagtccaaatggtatgcctttttattttattgatgttatttatgttcattctatttaatgataacctatatgatcacatgaccagtggtctcacataagatcaggggt

SEQ ID NO: 874913 - DNA, 595 bp, Homo sapiens
ctcgtgcctcatttaagggcttgcaaaatgctaatgaaatttttgaactcaaaaaatcctcatagaaataaaaaaaattaaaaggaaatccacaaaaattaatcaagataagtgcagaaaaaaagttcagagactgaatacatattatatgtcaatgaatargtctgcttgggtttaacacaataaaaaaaaaagtctggcctatttgtggtgatttcctttggtgtgagcatggacaaattttctctccactaagaatgggttcttttattctcagtttcattcaggtaatagtggactcaactttccttagtattgtggaataccatgctggggaaatggcttcaaataatgagcactgggctggtgaatgaaatgctgctcatgtttacactggcacacaggcacaaacaaaagctccagcacaccagcagcattctgctgatctgctgattttctccgatatggttcctgcggagacacaataacaagggaaaacaacaaaaagtcagctaaaagatctgttatgtggatggcgagcaaagtcttttcaaaataagactataatatgttcatatagtgctgaaattcaccc

SEQ ID NO: 874914 - DNA, 614 bp, Homo sapiens
gagtacattttattacatatgtagtattttatgtaaccacaatatcgggatatataataagaacatatttcttaatcttgataatgttagctccttacacaagtaaaaagataatagttatctctgggttatagattaaacattgtttttactctcttcttcctgcttgtcttcactttgtaatttttctaacattaacttataatatgtttgaagtaacaaagaggttattatgaatcttacataagggaagaaaatggctttccaagagtattctatttgggaaattaaggtacacatacagcttggtaagagatgatatagcactggtcaagggccaaggaaataatctcagataccayggcaaaaatggccacatattatttacatttgtgtatccatactcctttccaatatgactttgtaactcctcccatcaagaactggaacctattcctctacccattgaaatctgagtttggccatgtgacttgctttggccaatgggatattagcaaatgtaatgtaagccaaagcttgaaaagtatttgtacattggattttgctctttttgctgctcttgggaaccctgaaaacaccacatgtgatcaagc

SEQ ID NO: 874915 - DNA, 624 bp, Homo sapiens
aagcaaataaaatatgtacaaattagtgaaatcccactagagaccataaagcgtgaacatttatttttaaagtactgagaaaaagtagctgtctacttacttgtatacccagctgtactctctagctgaacagcgtaagtgaatcaataatactttcaggagactaatataatcatagattatggttcaaataatacttaaaagacatagttcaggaaaaaataatcaatgaacccacaagcaaaaatgaggatataagaagcaatgtcaaaaaaagaatttgataaatgtgttgatatattaaaatatcatggattctattggtcaataacttaaacaagtattgccatttttctggcaactaaaaacaatgtgaaactaaaattacaaacaattaaattgatgagtggacagtgatgagagtaaacttttcgaaggtcaaaggtcygaaagctttagggtatctcatgcacttattaatttttattttacaaacacttaaatagtgcttaatattttcctcaaattttattaaagatgatataataatatgtagcctgaggtcactacttttgatgtatttattttaaaggactattgcatccattttcccacaaccttttt

SEQ ID NO: 874916 - DNA, 598 bp, Homo sapiens
tcctcttgaattattttccacttagaaatttcttccgccaataccctacctctctcaagttcagagttccatagatctctagggcagggccaaaatgatgccagtctctttgtatagcaagagtgatatttactccagttcccgaaaaactcctcatctccatctgagaccacctcagcctgaattttattgttcatatcactatcagcattttggtcaaagccgttcaataagtctctaggaagttccaaactttcccacatcttcctgttttctgtgtcctccaagtctctaggaagttccaaagtttcccacattttcctgtcttcttctgagccctctaaactgttccaacctctgcctgttaccaggttccaaagttgctcccacattttcgggtgtctttacagcagtgctccactacacggtmcaaatttactatattagttcattctcatgctgctaataaagacacacccaagactcagtgatttctaaaggaaagaggtttagtgggctcacagttccacatgcctgagtaagcctcacaatcatggtggaagatgaaggaagagcaaagtcacttcttacatggcaa

SEQ ID NO: 874917 - DNA, 657 bp, Homo sapiens
taggcagttttgaagaactaaatggaatatctagaatgaaaaaccatgcttgctaaaattaactcaatgagtgagtttaaaaagcaatttagacccagctgagagctgaatttgtggtatatgcagaaattacttctgatgcgaggcagagcatgatgacagaatgaggagatcccaaacatctatgagagttccattctgaatgattagaagaatgaggaagcaacagtatttaaaaagataatcactaagaaagttctatacttgatgaaaaatgtgaatcctaagattcaggaacagtgtgagacttcagctggggaaaaaagatgaaactacacttctacatttaggagtaaaactacagaatacaaaagacaaaaaaattttaaagtgaaaaataaaaccactcagcattacatcaaaagcagtyatcatgaaagcagcctatcaattacaatgataaaagccaagcaatagtcaaatatcgatttttttcaaagtcacaagataaaataagtagtaacataggattctgtacatagcattatttgttacctattggggcataacaaaattccccaaaactttgcagcttaaaaaacattcagtatttcaccattgccatgagtcaggaatccaggcgtggcttgagtcctc

SEQ ID NO: 874918 - DNA, 658 bp, Homo sapiens
tagacatcaacaagacggtaaaagaaaaagccttgaatcctccttccccctctaaacactaaattaacaataatagatggatacatttcctttgtgacaaacttagatactagttgagagggtcctgcaccctgagtgagtgagaaaccatctacattgaagctggaagaaaaatttgacacactctttaaacataatctctactcctgccacrgtgtcataaaaccaggattaaacgctccatctccaaggttctccattcagagggagaaaaaggaactacttggtcaatgtagcagttttttgatggtatgttcaaaggacatccttctctcttccctttctcagagtgttgacaggacctgccatatgctagatggctgaaggccagtgagaacaaagatggcattttgatctggcacataactggttcctccagcttagtacaaagcaaataggcttaatatctcagattccaacttcttcctgagaaagaaaataattggacagagcctttgataatccaacttttccaggggatgcccaaggaagtgggcttcattgtcacttatctgaaaatgctgatgggacttgtcatgctctacatacctggggcccactaagaacaaagaaaacaggttggataagcatgaaaaat

SEQ ID NO: 874919 - DNA, 670 bp, Homo sapiens
ttttgtagaatctgcaagtagacatttggagcactaggtggcctatggtggaaaaggaaatatcttcccataaaaactagatagaagaattctgagaaacttctttgtgatgtgtgcgttcatctcatagagttgaaccatactttagattgagcagttcggaaaccctctttttgtaggatctgcaagtagacatacggagcgcaatgcggcctatggtagaaagggaaatatcttcacatamaatctagagagaaagagtctgagaaacttctttgtgatgtgtgcattcatctctcagagttaaacctttctttttattgagaagtttgaaactctttttttgtagaatctgcatggggaccactggagccctttgagtcctatggtgcaaaaggaaatatctacacataaaaacgagacagaagaattctgagaaacttctttgtgatgcgtgtattcctgtcacagagttgaacctttcttttgattgagcattttggaaacactctttttgtagaacctgcaagtggacatttggggtgctttagggtagaaaaggaaatatattcaaataaaatctatacagaagcaatccgataaacttctttgttatgtgtgcattcacctcacagagttaaaacttacttttgattgagcaattttgaaa

SEQ ID NO: 874920 - DNA, 546 bp, Homo sapiens
aaactagacagaagaattctgagaaaatattttgtgatgtgtgcattcatcacacagcgttgaactttcttttgattgagcagtttggaaacactctttgtggaatctgcaagtgggaagttggaatgctttgaggcctacagtagaaatgaaatatcttcagataaaatctagacagaagcaatctcmgaaacttatttgtgatatgtgcattcatctcacagagttaaacctgtcttttgattgagcagttttgaaatctctttttatagaatctacaatggatatttggagtgctttgaagcctttggtggaaaaggaaatatcttcatataaaaattagataaaaccattctgagaaacttctttgtgatgtgtgcattcatctcccagatttgacacttccttttgatggaccagttttgaaatagtctttttgtggaatctgcaagtggatattttgagctccttgaggcctgtggtggaaaatgaaatatcttcacatacaaactagacagaagaattctgagaaacttctttgggatg

SEQ ID NO: 874921 - DNA, 625 bp, Homo sapiens
atttgtagaatctgaaggtggatatttggagggctttgaggcctattttggaaaaggaaatatttttacataaagactacacagaagcattctgagaaacatctttgtgatatgtgcattcagctcacagagtttaaccaatctcttgatggatcagctttgaatcttttcgtagaatcttcaaccggatatttagagaccttatcggcctatggtggaaaagggaatatctttaaactctacaaggaggaattgtgagaaatttctttgtgatgtgtgaactcatctcagagttgaamttttcttttgatagagccgttttgaaacgctgttttcgtagaatctgcaagtggatatttggagcactttgtggcctattgtggaaaacaaaatatcttcacacaaaaactacacagaagcattctgagaaactactttgtgatgtgtgcattcatctcacagtgttgaaattttcttttgattgagcaattttgaaacgttgttttcgtagaatctgcaagtggatattcggagtgctttgaggcctactgtggaaaaacaaatatcttcacataagaactacactgaggcattctgagaaacttcttcgtgatgtgtgcattca

SEQ ID NO: 874922 - DNA, 563 bp, Homo sapiens
atcgagcagttttgaatctctctttctgtagaatcttcaactggatatttggagcccttattggcctatggtggaaaagaaaatatcttgaaataaactctatacgacagcattgtgagaaacctctttgtgatgtgtgaactcatctcacagaactgaaactatcatatcattgagcagttttgaaacactcttttcataaaatttgcaggtggatatttggaggatttgaggcttattttggaaaaggaaatattttctaataaagaatacgcagaagcattytgagaaaattatttaagatgtatgcattcaactcacagactttaacctatcttttgattgagctgttttgaatatctcttttgcagaatctgcaagtggatatttggggcccttttctgcctatggtgaaaaaggaaatatcttcaaataaaaactgcacagaagcattctgagaaaattcttagtgatgtgtgcattcttctcacagagttgaacctatcttatcattgagcacttttcaaacactctttttgtacaatctgctaaaggatatatgg

SEQ ID NO: 874923 - DNA, 579 bp, Homo sapiens
attttgagaaacttctttttgatgtgtgcattaatctcacagggttgaacattctgttgattgagcagttttgaaaaactctttttgtagaatctgcaagtgaatatttggagtgcttttaggcctatggtggaaaaggaaatatcttcatataaaaactacacagaagctttcttagaaacttctttgtgatgtgtgcatttaacacacagagttgaactatcttttgattgagcagttttaaatctctctttttgtagaatctgcaagtggatatttggarccccttgcagcctatgatggaaaaggaaatatcttcaaataaaaactacacagaagcattctgagaaacttctttgtgatatgtgaattcatctcacagagttgaacctatcttatgattgggcttttaagaaacaccgtttttgtagaatctgcaagtggatatttggagccctttgtggcttattgtggaaaaggatatatcttcacataaaaactacacagaagcattctttgaaacttctctgtaatgtgtgcattcaacacacagagttgaacatatgttttgattgagca

SEQ ID NO: 874924 - DNA, 578 bp, Homo sapiens
actagtgtgtttcaaatctactaaatcataagacagtttcaaatctgtgagatgaattcacacatcacgaatatgtttatcagaatacttctgtgtagttttcacattaagatatttcgttttccacactaggcctcaaagcactccaaatatccacttgcagattctacaaaatgattgtttcaatactgcgcaatcataagacaggttcaactgtgtgagatgaatgcagmcatcacaaagaaggttctcagaatgcttctgtgaagtttttatgtgaagatatttgcttttccacagtaggcctcaaagcgctccaaatatgcacttgaagattctacaaaaacagtgttcctaaactgttgaatcataagttaggttcaactctgtgagttgaatgcacacattgcaaagaaattcctcagaatgcttctgggtagtttttatttgaagatatttccttttcctccataggccacaaagggctccaaatgtccacttgcagatcctacaaaaagagggaatgaaaactgctcaatgaaaagataggttcaactctgtgagtttaatgcacatat

SEQ ID NO: 874925 - DNA, 593 bp, Homo sapiens
aaagaattttctcataatgcttctgtctagttttcatgtgacgatatttccttttccaccacatgcctcaaagcgctccaaaaatccacaagcagattccataaatagagtatttcaaaactgctgaatcaaaagaaagtttcagctctgtgagatgaatgcacacttcacaaagaagattctcagaatgcttctgtctagttttcatgtgaagataattccttttccacattaggcctcaaagctcttcaaatatcccttgcagattctacaaaaagagtgtttcaaaactgctcaatagaaagaaaggttcaagtctgtgagatgaatgcaygtctcacaaagacgtttctcagaatgcttctgtctagtttttatttgaagatttatcctttttcacaataggctgcaaagtgctccaaatatccacttacagattcttcaaaaagagtgattccagactgctcaatcaaaagaaaggttcaactctgttagttgaatgcacacattacaataatgtttatcagaatgcttctgtctagtttttaggtgaatatattcccttttaaactgtagtctgcaaagcactccaa

SEQ ID NO: 874926 - DNA, 593 bp, Homo sapiens
aaagaattttctcataatgcttctgtctagttttcatgtgacgatatttccttttccaccacatgcctcaaagcgctccaaaaatccacaagcagattccataaatagagtatttcaaaactgctgaatcaaaagaaagtttcagctctgtgagatgaatgcacacttcacaaagaagattctcagaatgcttctgtctagttttcatgtgaagataattccttttccacattaggcctcaaagctcttcaaatatcccttgcagattctacaaaaagagtgtttcaaaactgctcaatagaaagaaaggttcaagtctgtgagatgaatgcatrtctcacaaagacgtttctcagaatgcttctgtctagtttttatttgaagatttatcctttttcacaataggctgcaaagtgctccaaatatccacttacagattcttcaaaaagagtgattccagactgctcaatcaaaagaaaggttcaactctgttagttgaatgcacacattacaataatgtttatcagaatgcttctgtctagtttttaggtgaatatattcccttttaaactgtagtctgcaaagcactccaa

SEQ ID NO: 874927 - DNA, 659 bp, Homo sapiens
ttctcagatttgttctgtctagattttatgtgaagatatttcctattctgccataggccgcgaatcgctccaagtgtctacatgcagtttccacaaaaagagtgtttccaaactgctccatcaaaagacacattcaactctggcatgaacgcacacatcacaaagtagtttctcagaattcttctctctagttttcatrtgaagatgtttccttttccacaatagatctcaaaccgctccaaatgtccacttgcagattctataaaaagacagtttcaaaactaatctatcaaaagaaaagttttaactctgtgagatgaatgcacacagcgcaaagaagattttcagattgcttctgtctagattttatgtgaagatatttccttttttaccataggccacaaagccctcctaatgtccacatgcagatcctacaaaaagattgtttccaaactgctcaatcaaaggaaagattcaactctgtgagataaatgcacacatcacaaagaaattgctcaggttacttctatctagattttatgtgaagatatttccttttctacaataggccgcaaagtgcacaaaatgtccacttgtagattctcaaaaacgtttgcttccaaactgctcagtcaaaagaaaggtttacctctatgaga

SEQ ID NO: 874928 - DNA, 659 bp, Homo sapiens
ttctcagatttgttctgtctagattttatgtgaagatatttcctattctgccataggccgcgaatcgctccaagtgtctacatgcagtttccacaaaaagagtgtttccaaactgctccatcaaaagacacattcaactctggcatgaacgcacacatcacaaagtagtttctcagaattcttctctctagttttcatatgaagatgtttccttttccacaatagatctcaaaccgctccaaatgtccacttgcagattctataaaaagacagtttcaaaactaatctatcaaaagaaaagttttaactctgtgagatgaatgcacacagcgcaaagaagattttcagattgcttctgtctagattttatgtgaagatatttccttttytaccataggccacaaagccctcctaatgtccacatgcagatcctacaaaaagattgtttccaaactgctcaatcaaaggaaagattcaactctgtgagataaatgcacacatcacaaagaaattgctcaggttacttctatctagattttatgtgaagatatttccttttctacaataggccgcaaagtgcacaaaatgtccacttgtagattctcaaaaacgtttgcttccaaactgctcagtcaaaagaaaggtttacctctatgaga

SEQ ID NO: 874929 - DNA, 659 bp, Homo sapiens
ttctcagatttgttctgtctagattttatgtgaagatatttcctattctgccataggccgcgaatcgctccaagtgtctacatgcagtttccacaaaaagagtgtttccaaactgctccatcaaaagacacattcaactctggcatgaacgcacacatcacaaagtagtttctcagaattcttctctctagttttcatatgaagatgtttccttttccacaatagatctcaaaccgctccaaatgtccacttgcagattctataaaaagacagtttcaaaactaatctatcaaaagaaaagttttaactctgtgagatgaatgcacacagcgcaaagaagattttcagattgcttctgtctagattttatgtgaagatatttccttttttaccataggccrcaaagccctcctaatgtccacatgcagatcctacaaaaagattgtttccaaactgctcaatcaaaggaaagattcaactctgtgagataaatgcacacatcacaaagaaattgctcaggttacttctatctagattttatgtgaagatatttccttttctacaataggccgcaaagtgcacaaaatgtccacttgtagattctcaaaaacgtttgcttccaaactgctcagtcaaaagaaaggtttacctctatgaga

SEQ ID NO: 874930 - DNA, 533 bp, Homo sapiens
tgaacgcacacatcacaaagaagtttctcataattctcctgtgtagtttttaagtgaagataatttattttccacaataggtcacagggcactcccattttccacttgcagatactacaaaaagagagttccaaatctgctccatcaaaaaaaagatcaactctgtgagatgaacgcacacatcacaaagaagtttctcakattgcttctgtctagattttatgttatttccttttccaccgaaggccacaaagcactccaaatgtccacttgcagattctgcaaaaagagtgtttcaaaactgctctatcaaaagaaagatttcactctgtgaggtaaatgcacacatcacaaagaagtttctcaggttgcttgtgtctagattttatgtgaagatatttccttttctaccataggccacaaagcgctccaaatgtccacttgcagattctacaaaaagaatgttttgaaactgctcaatcaaaagaaaggttcaactctttgagatgaatgcacacatcacaaacaaattt

SEQ ID NO: 874931 - DNA, 575 bp, Homo sapiens
gcatcaaatggttccaaacatacacctgcagatactacaaaaagagagcttcaaaactgctcatcaaaagattaattcacatctgtgagttgaatgcacacaacacaaagaattttctcagaatgcttctgtgtggtcttaagttatttccttttccacaataggcctcaaagcgttccaaatatgaacttgcagattttacaacaacagtgtttcaatactgctcaatcaaaaaaaakgtacaactctgtgagatgaatgcacacatcacaaagaagtttctcagaatgattctgtgtagattttatgtgaagatatttcgttttccaaaataggcctcaaagccctccaaatatccacttgcagattctacaaagagagtgtttcaaaactactcaatcaaaagaaaggttcaactctgtgagttgaatgcacacatcacaaagaagtttctcagaatgcttccgtgtagtttttacataaagatatttcctattccaccataggcctcaaagcgctccaaatatcctcttgcagaatctacaaaaagagtgtcacaaaactgctcaatcaaa

SEQ ID NO: 874932 - DNA, 673 bp, Homo sapiens
ggaagtgaaggatctctacagggagaactactacaaaacatggctcaaataaatcagatatgacacaaacaaatggaaaaactttccacgcttatggatagcaaaaatcaacatccttaaaatggccacactgcccaaagcaatttacagattcaatcctattcctactgaactaccattgacatttttcacagaactagaaaaaactatttttaaattcctatagaaccaaaaaagagtccgaatacccaagacaatcctgaacagaaagaacaaagctagtggcatcatgttacctcacttcaaactataccacagggctacagtaacaaaatagcatggtactagcacaaaaayagacatatagacaaatggaacagaatagagaacccagaaataagactgcatacttacagtcatctgatcttcaacaaacctgacaaaaaaaaatggggaacagatttcctattcaataaatggtgccaggataactggctattcatattcagaagatcgaaactggatccctttcctgtatcatacaagaaataatctcaagatagttttacatataaaacccaaaattgtaaaatttttgaaagacaacctaggcaataccattgtgaacctaggaacaggaaaatatttcatgacaaaatcacaaaaagcaatt

SEQ ID NO: 874933 - DNA, 575 bp, Homo sapiens
attatttcttctccagcctatctaagattcacaagatttgggagcagtcaagtagcattttctttctgtttatgatttccctctgagactatcattgctttaggcaaatgcattcatgtgaagaatcatttttctccatgtctgagcctataataaatgtcaacccttttttggcaactgcaactaatgctgcagacctaccattactaaaaatgaaattacacatgttaggaccccaratcaatgtatttcaagggacatttaagatcactctggacaggcaatggaatctctccacctctgtagctatgagcctccttctggaaaaaaagataaaatttttacttgattttttttctctttctcttagtgcttggatcaagcaaaaaaaatgcaaatgaaatttctagccttgttaattcccctgaaatctagcatcctctctaaaatacttggtaaaactaagcacccaggaaacaaagtttaaagtctttaaggtgtgctcagtgtagcctgtaaggtgtttaataaatagcccttaaatttgcatagaaatcataggccattggagcaaa

SEQ ID NO: 874934 - DNA, 623 bp, Homo sapiens
tttcagtctaagaaagtaaataaagcttatttctttcaatctttcaaaatattacaatgagattatttgagcctctgttctggtaaaatcatcactttttcaaagatgatttcttgctgttgtctcattatttacatggtcagagaggttacttaaagagtaccgctttaaaatctggagcattgagagagaaccacaaacagccctataccatgaaaaatcctatttatgtgggagggaaattttcttaaacgtcagtttttaaatcagtttgggacattaaatctctccacctcccactctctcctccctcactgacttctgaggaacaacaaccaccaagaaaaaaaaaaaaaaaaaaccactgtgttttgaattccattatgtttccaaacttccaagtcagaggaaattatttaaaatgacttaccccacacaaatacacataaggagggrgggaaaaacaaattgccagctcacaagattgtttctctactaaccacccgcttttgctgacctgacaaattaaaagtatgtaatttcctcacggcatttccgacatattttagtgatattttgtaagagttaagagagttctgtttgctctttttactcaagcctct

SEQ ID NO: 874935 - DNA, 645 bp, Homo sapiens
ccctgatttctgttggcctactgtaatattaaggaacattagtgttggtgactggaggtccccataacctcacattattttcttcactggatgaagacattcctataagagccaaatccgtagtcattatgaatcacagccacggacgtcaatatatcatggagcacagcacgctggtctctgtttagagaaacacttgcatattgtgcattgcagcagattctcccaactcttaaagttatawgccagtctttcttttagtgtcttaccttgtttccaaggatcttctgaacgcctttaatggcctcatttagatttctggaattaaaagacttatagataatctattgccctgtagtatttacacttctcccgttgaaagagatgagttaccaacctgtaagacctgaatgcaggctctgatcactgggatctcctcccctgagcaccgggtctgtagacaagttatatgtctcctggttctcactcgtcctgccttgggctgtgccactcatggctgactctccccttggattcaacaagagccatacctaggtaaggtcaattcagagattatcctctccctccacatgagaagggagaggggagagaacacagcagagtcaaacatccatataaaagact

SEQ ID NO: 874936 - DNA, 602 bp, Homo sapiens
gagtgagacctgcccttcggattgcgtgggagctgggtgaggcctgtgattgccagctttcccccacttcctgacaacctgagtgactcagcagaggcagccatagtcctcctaggtgcataactccattgacctgggaacctcacccctaacccccacatcagccacagcaagacttgccccaggagagtctgagctcagacatwcctagccctgcccccacctgatggtccttccctacccaccctggtatctaaacaaaaagagcatatactctttggagttctagggctccacccaccaccgttcctctccatatttccacaactgatgctctctggaaagcatcacctcctggcaggaagccaaccagcataaaaatggagcattaaaccataaagctaagaaccctcacagagtccatttcacccccctgctacctccaccagaacaggtgctggtatctgctgctgagagacccacagacagttcacatcataggactctgtgcagacaaccctcagtaccagcctggagcctggtagacttgctgggtggctggacccagaagagagataacaatcactacagcttggctctca

SEQ ID NO: 874937 - DNA, 659 bp, Homo sapiens
tcataacattgaattgtaggctaggcaaattattttattcccactttaaaagtagacactctgaaacactctgaggttaagttatttgtgcaaggtcacccagctactaagtagtagattcagaaatctaatcctctccttttctctgttcatcactctaagtaattcacctgcaatttttttgtgtgtgtgtgtgtgtgtgtgacagagttttgctcttatcgcccaggctggagtgcaatggcatgatctcggctccctgcaacctctgcctcccaggttcaagcgattctcctgcctcmgcctcctgagtagctaggatcacaggtgcccgccaccatgcctggctaatttttgtatttttagtagagatggggtttcaccatgttggccaggctggtctcgaactcctgacctcctgatcctaccgcctcggcctcccaaagtgctgggattacaggcgtgagaattgtatatatgtgtaatttgaataattttccaatttgaaaattgatgttattttctttgttgtactttgcaagacagagcgttgcatagttgactaatcactacttaactttgttctcatttaaccgcagctattgtaaacaactagttccatttgcaacccacacatgcagagaacactgcctcccatg

SEQ ID NO: 874938 - DNA, 648 bp, Homo sapiens
tataaaagcatcttgctttggccacttctttggacttcactccacgtacatgtaaaactatactttcctcttgttaatctgcctggtgacaatttagtttctagatacagccaaagagcccacatgagagcttaaacggggatgatctctggtgatctctgctcccctacgctttcttctttaccatcttcccatatatgtgttggcttttgatgacttttaccctttttaaagtcatgggctaacattactaacctctttaacaggggaaaaagaaagcaacgtgctcagttagtatgacattcactgctggcgtctaatgatcaattaattgaaataatatctgcaaagcatttaaaacaaagtaaacatcaaaaatattkgctgttgttaaatggctacttgtatattacaccaagtcacagtaatgttgctctaattacgtacttgtatgctaccatggctgcggagcacagacagagtttgtggacagtacaactccaagggggcactattgatattatttaggaaatgactactgacttttggtttgctgttgataaaatgctgttattccttgtaatgtccatctactactgtattttaaaattatttatttacaaggaatacaaaataaaatgtacagat

SEQ ID NO: 874939 - DNA, 556 bp, Homo sapiens
aaaaatagtggatatgcttgaagaagctatttactttgcatttgagctaagataaaggatggttatccagaatatatttttaaaaacttataaattaattcagtgacgataagtactacaataggaaatttattgaaaatcttgtcaaaatgtctaatggacatgatatgattctcatttccagtagtaattaaggaaatgaaaattaaaatatcaatgagctattattagagcatgaacattggcaaaatatcaatgttttatattaacaaatattaatgataacgcagtgatggggattctcatacactcttgatggaagtgtaaatggtagactattctggaaagcatcttgacaayatctaataatattgtagatgaaaaatattctaccaaccaaaaactctacttgtacatccacaaccaagagaaagtctcacacatatttatactagtattcaatgttaactgtgacattttaattgaaaaacagaaaaaggactacatgctcatcaagttaaaaatggatagatcttttatttctttaaatcctcta

SEQ ID NO: 874940 - DNA, 596 bp, Homo sapiens
aattctcacaacaatacgtaatgtatgcttttactccactttacaaatgagaacatctaagcccaaagtcacatagctagaaaaactgcagagcaggacttaaacccagttctatctaaatacaaagaatgtgccctttaacacartggtaaataagaaataaagttcactagaatatcacttaaatgaaactgttggcctttctctcctggacagataatgtaaacacagcagtcatgaccaatttcactcccaccttaagaagaaccatcagaaagtaggtaagtgataaagggaataaccaagtcaactctgaatctgctgtagttaatgagggaataaatgatttatctaactcattggttaaaagattatctgaaacaaaaggataaaagcattactatgaaacttaaaacatatgtaaaatagttggacattattttttatgaaagacaaagaataaaacagatatggatcatgaatattttcatttttagtgataaggattgtatttaaatgtagtaaaatatacataaaatggaaacattttacaatttagagatatactatggattggcacatgtatgtacattggg

SEQ ID NO: 874941 - DNA, 643 bp, Homo sapiens
aacatatgcaaatcaataaatataatccatcatataaacaaaaccaaagacaaaaaccaagtgattatctcaatagatgcagaaaaggcctttgacaaaattcaacagctcttcatgctaaaaactctcaataaactaggtattgatgggacatatctcaaaataataagaggtatttatgacaaacccacagccaatatcatactgaatgggcaaaaactggaagcattccctttgaaatttggtacaagacagggatgctgtttctcaccactcctattcaacatagtgttggaagttctggccagggcaatcaggcatgagaaagaaataaaggktattcaattaggaaaagaggaagtcaaattgtccttgtttgcagatgacgtgattgtatatttagaaagccccctcgtctcagccccaaatctccttaagctgataagcaacttcagcagtctcagaatacaaaaatcaatgggcaaaaatcacaagcattcctatactccaataacagacaaacagagagccaaatcatgagtgaactcccattcacaagtgcttcaaagagagtaaaatacttaggaatccaacttacaagggatgtgaagggcctcttcaaggagaactacacaccactgct

SEQ ID NO: 874942 - DNA, 626 bp, Homo sapiens
caagtgttctcattgttcaattcccacctatgagtgagaacatgcagtgtttgttttttttgttcttgcgatagtttgctgagaatgatggtttccagcttcatccatgtccctacaaaggacatgaactcatcattttttatggctgcatagtattccatggtgtatatatgccacattttcttaatccagtctatcattgttggacatttgggtgggttccaaatctttgctattgtgaatagtgccccaataaacatacgtgtgcatgtgtctttatagcagcatgatttataatcctttgggtatatacccagtaatgggatggctgggtcaaatggtatttctagttctagatccctgaggaaccaccacactgtcttccacaatggttgaagtagtttatagtctgtgggaggaatttaccccaaatttctttaaaattgtcyggaagttttatgtctttttcagtggaattctattggtatagtgatagttatttgaaaaaatgagtctatttttttttaatggaatatcagtatctgtgtaactttttccaggatagtaatgaccagcaaaacctcattctggagaagccatcatcagtagttaaatgggattttgtt

SEQ ID NO: 874943 - DNA, 625 bp, Homo sapiens
acagccatatgaaaagatgatcaacattactaatcatcagagaaaagtaaatcaaaaccacaatgaaatacttcatcacacctgtcagggtggtcattatccaaaaaacagaaaataacaagtgttggcaaggatgtggagaaaaggaaacccttgtataccattggtgggaatagaaaatgcatcagccactatggaaggaagtataaaatttcctcagcaaactaaagatagaactaccatttgatccagcaatcccatatctgagtatttatcccgagaaattaaaatyaggatctggaagagatatttgtactcctatgttcactgaagcaattttcacaatagctaaaggtagaaacaatataaatgtccattgacagatgaatgagtaaaggaaatatgggatatacattcaatggaatattatttagccttaaaaatgaaggaaattctgtcatatgctacaacgtggatgaacctcgaggacatcatgctaagtgaaataacagtcacagaaggacaaatactgtataattccacttacgtaagatatcttaagtagtcaaactcaaagaagcagaaagtaggatgatggctgccagagtttgaaaggggagggaaa

SEQ ID NO: 874944 - DNA, 575 bp, Homo sapiens
tctgaaaggttcattaacaacatctaaaagctctactgatcattaaatggcaaggtagaattaccaacaaggaggccctggaatagagccagccaaactgcattgaaacttgataaaatacagccacctttctatgccttgcacataattggagcccaacaaatatgggctgatttgttgatccactgagttggatcggtggggagcatggatgtgcacaggatattcaagcagttcatggatgatgagtgaagtagggtacctacaaatggggagattagaaacaaaatgtttttaaagatatcctgaagcaaaacttcaaacactctgtcatggytatggaccactgagaaacccacacagcagatggctcaatctaatgcccggctaaaatgaaatggctgctttcacaaaagtaccaacttccctccaatgggaagaaacagcttcaaatgtagggcagtctgcatttgtatagggtagggaaagggctgcaacacacaaaagaaacattttcaactcaaatgtcattaaaataagcagtttctctaaatttctctctgcctcttttacta

SEQ ID NO: 874945 - DNA, 566 bp, Homo sapiens
taaataatggatagtctaagtaccctactgcacctttgttctctgcatttaagatttatgctaattctgtggatttaagaaaacagtgggaatagtgaattaaataataccaatatagatgaataaaaatacaaataataacaatttattgattactaattattttctggacaggattttcagtattttggataggtcttgggccaagatgaccaaatagaaacagctccggtcttcagctcccagtgagaccaatatagaaggcagtaattgggactggctaggtggtgggcatgaaccacggagagccagcagaaccagggtggggtgtcgtttcacctgagaagtgcacaaagtggagcaacctttcttccccagccaggggaaatggtgagggactgtgctaccygccaagggtactaggcttttcccatggatttttgcaatctgcagatcaggagattccctcgtgagccttttcagggacaaatctgggcagctgtttgggcaggcactgagcttcaggagttttttacatactccagcggcacctggatctccagtga

SEQ ID NO: 874946 - DNA, 647 bp, Homo sapiens
cttaaatttactttagtgccatttttaatggtcaattattttattttctctcttttaaaattttaattaaccatgaaccagaaagtaaattcctctcctttaaagtaattcagagataaacttgcaattcttatctgtactcttattacccttcaataatcaataatttagaactgatacaatgatttttaagtytaaatagtttatttttcagaattttaatatataccagtaacatattgaaagtttatttttttttgcttttaaggaggaagctgaaaacagaaaattaattaattagtggcttatattttacatgaataaaaaactaatgagagaacataaatgtcaagttgtaattccaagtcactttttttccagtttaaaatttctggatttatgttggaagaaatcatgacattttatacttttctgtcacttttttcttctactcatttcaaataaatttcttaaatttgtatgccaggctatgctagactgtaggttccttggaagcagaaatgatattttagacttcatatttcccccaacatttagttcagtgtttagcacatggtacaaaatgggaacagatagaaagtgcactaagacagatttgggggttgaagtggatcagtgaagatatg

SEQ ID NO: 874947 - DNA, 647 bp, Homo sapiens
cttaaatttactttagtgccatttttaatggtcaattattttattttctctcttttaaaattttaattaaccatgaaccagaaagtaaattcctctcctttaaagtaattcagagataaacttgcaattcttatctgtactcttattacccttcaataatcaataatttagaactgatacaatgatttttaagtttaaatagtttatttttcagaattttaatatataccagtaacatattgaaagtttatttttttttgcttttaaggaggaagctgaaaacagaaaattaattaattagtggcttatattttacatgaataaaaaactaatgagagaacataaatgtcaagttgtaattccaartcactttttttccagtttaaaatttctggatttatgttggaagaaatcatgacattttatacttttctgtcacttttttcttctactcatttcaaataaatttcttaaatttgtatgccaggctatgctagactgtaggttccttggaagcagaaatgatattttagacttcatatttcccccaacatttagttcagtgtttagcacatggtacaaaatgggaacagatagaaagtgcactaagacagatttgggggttgaagtggatcagtgaagatatg

SEQ ID NO: 874948 - DNA, 671 bp, Homo sapiens
gcttcttccattagacaccactgcactgggaccaaagactgtgacctgtttattctcatgtctccagcaccagcacaggacctgactagtacatagtacatgcttcatgttgagtgaatcgatgaaggaatggggacatacatttaattataatcccagataggagctatccagagaaaccttcacagggagccatgtgggcacatggtgggggtcaatgcttacttggtcaacaaaagatcagtgagtatgtaaggagggaacacattctaagtagaagatccatgtgtgagggcaaagactgtgagtcagagatgttcaaagaatggctgacagaatggccacagaagccctgtaggaaaaaaatcaccccagccccactgggatcccagcaccccagacaccaccaggcataagtcctccttcccaagcgaacagataggatttcaacagatagtgtcttctatctctaagcaagttatttcataatctgtttcctttctcagagataacctgcttatctaytaaaaagagaaacatatgctgtctatagttgctctgcataaaagtccttcttaatttacaaattatgctctttctcatgttttttaaaaatagaaataaccaaaacagttttgaaaaaaatgttggagagcttataatacttgatt

SEQ ID NO: 874949 - DNA, 664 bp, Homo sapiens
aattagttttccgaatgtaattgctttggggtgctttattacttaggaatgaacaatattttaggttactatttgccatgttttcaggcatcttatgaggaagtgtgtagcatttgatagacaagcatttcactctaaggtatttttagttgtgtggttgtagcaggtgtaaaaaaagagacagactcacatttgctcttctacctgccaggctctttgcctgcccaactccccacccttttaggkgtttctgagtggcaaaaactatatgaattacaaccctggctgcaatcagtggaaaagctcagatactatttttcctagcttgcatacatattttatgtcttttgccagatgaaaagattggcaatacagtaaaagaagcaccacagtggttcactatttctattttcctggttttcctgatgaaccaccttctggcaatttcaggactctcaaggctgctgctctcaaaggcggatttgccatgggggtgggtccccctcctccagcgctttcctcttgccttcactacatgagctgctactcagggccctcacttggccacaacagcctgaattggaggttataaattcaaaaaagcaagaaaaactttccactttctctgcatctttaggataaaaacaccataacagagcaatgc

SEQ ID NO: 874950 - DNA, 552 bp, Homo sapiens
gcgtgcattcaactcacagggttgaactgttctttggatagagcagttttgaaacactccttttgtagaatctgcaagtgttcatttggagtgctttgaggccaatggtgggaaaggaaatatcttcacataaaaactagacagaagcattctcagaaacttccttatgatgtgtgcattcaactcgmagagttgaaccttccttttgatagagcacttttaaaaaagtctttttgtaaaatctgcaagtggataattgcagggatttgaggcctatggtggaaaagggaatatcttcacataaaaactagacagaagcattctcagaaactgctttgtgatgtgtgcatgcaactcacaatgttgaacctttcatttgatagattagttttgaaacactttttttgtggaatctgcaagtgttcatttggagtgctttgaggcctatggtggaaaaggaaatatcttcacataaaaactagacagaagcattctcagaaactaacttgttatgtgtacatttaactcatcgagttgaaccttccttttgag

SEQ ID NO: 874951 - DNA, 626 bp, Homo sapiens
gaatctgcaagtggatatttggagcgatttgaggcctatagtggaaaaggaaataccatcacataaaaccttgacagaagcattctcaggaacttttttgagatgtgtgcattcaactaaccgaattgaacctttattattatagagtcgttttgaaatactccttttttagaatctgctattggatatttggagatttttggggccttagttggaaatggaaatatcttcacctaaaaactagacagaagcattctcggaaagttctttgtgatgtgcgcattcaactcgcagagttgaccctttcttttgatcgtggagtttttaaacagtccttttgtagaatctgcaagcgttcatttggagygctgtatggcctatggtggaaaatgaaatatcttcacctaaaaaccagacagaagcattctcagaaacttctctgtgatgtgtgcattcaactcacagagttgaacctttcttttgatagagcagattttgaacagcctttttgtagaatctgcaagtgttcatttggagagacttgaggcctatggtggaaaaaagaatatcttctcataaaaactagacagaagcattctcagaaacttctttgccatgtgtgcatt

SEQ ID NO: 874952 - DNA, 599 bp, Homo sapiens
tcacagagttgaacatttcttttgatagagcagttttgaaacactccttttgtagcatctgcttttgaatatttggaggtctttgaggaattccttggaaactgtatatcttcacataaaacttgacagaagaattctcagaaagttctttgtgatgtgtgcatccaacacacagacttgaacgtttattttgatagagcactttttaaacagtcttttagtagaatatgaaagtgttcacttggagtgatttgagtcctatggtggaaaagggaatatcttctaataataacaagacagaagcattctcagaaacttctttgccatgtgtgcattcaactcacagagttgaatcttacttttgacagagcagttttgaagcagtgtttttgtagaatctgcaagtggataattggagtgatatgaggyctaaggtagaaaaagaaatatcttcacataaaaactagacagaagcattctctagaacttctttgtgatgtgtgcattcatgtaatagagattaatcttttgatagagcagacttgaaacactctttttgtagaatctgctagtggatatttggagatttttgaggcctt

SEQ ID NO: 874953 - DNA, 644 bp, Homo sapiens
tgtaatagagattaatcttttgatagagcagacttgaaacactctttttgtagaatctgctagtggatatttggagatttttgaggccttcattggaaacgggaatatcttcacataaaaactagacagaagcattctcaggaacttttttgatatgtgtgcattgaactcacagagttgaacatttcttttgatagagcagttttgaagcactccttttgtagaatccactagtggatatatagagctgtttgagtaattcgttggaaacgggatatcttcacataaaaacttgacagaarcattctcagaaagttctttgtgatgtgtgaattaaactcacagagttgaacatttcttttgatagagcagttttgaaacagtatttttgtagaaactgcaagtgttcattcagagagctttgaggcctatggtggaaaaggacataacttaacacaaatagtagacagaagcatcctcagaaacttctttgtgatgagtgcattcaacttacagagttgaacctttcttttgatagagcagttttgaaatactctttttgtagaatctgcaagtgttcctttggagcgctttgaggtctatggtggaaaaagaaatatcttaaataacttgacataaaaact

SEQ ID NO: 874954 - DNA, 644 bp, Homo sapiens
tgtaatagagattaatcttttgatagagcagacttgaaacactctttttgtagaatctgctagtggatatttggagatttttgaggccttcattggaaacgggaatatcttcacataaaaactagacagaagcattctcaggaacttttttgatatgtgtgcattgaactcacagagttgaacatttcttttgatagagcagttttgaagcactccttttgtagaatccactagtggatatatagagctgtttgagtaattcgttggaaacgggatatcttcacataaaaacttgacagaaacattctcagaaagttctttgtgatgtgtgaattaaactcacagagttgaacatttcttttgatagagcagttttgaaacagtatttttgtagaaactgcaagtgttcattcagagagctttgaggcctatggtggaaaaggacataacttaacayaaatagtagacagaagcatcctcagaaacttctttgtgatgagtgcattcaacttacagagttgaacctttcttttgatagagcagttttgaaatactctttttgtagaatctgcaagtgttcctttggagcgctttgaggtctatggtggaaaaagaaatatcttaaataacttgacataaaaact

SEQ ID NO: 874955 - DNA, 611 bp, Homo sapiens
aaaatgaaataaaccaggtgtctgtgatttctaattaatcaccgctggccattacacaggttttgttgtttggggtggggagggggcttttgttcccttttgacataatatagtcaatgcactaacaattatgtatattcaaacttgattattttaaattcgatcttcagctgtactgtaaatagggtactgcattgtagtctccatatctgtattacttttctgtaatatttaagagttgcttaaaagcatacaaaatgtactgttactaaaacagctaattatttctctctccccctttgacaggaaggggcttcagttgttcctccatggctagaaccataataaacaatgtacccgtaatttgtaacataaagtattgsaatatgttagtaacaatcttgcagccttcctttccaaagttcattttattttgatcagttcagtatattgcactaattattttaggtattttcattatatgaaagctaccatgtgtcagagatgatttaatctatttaagtgttggactgctaggagaacttgtacatttatgataatgcagaattaggaaaacggttcaccagtgtttagttttatattgaggtgct

SEQ ID NO: 874956 - DNA, 666 bp, Homo sapiens
ctttaagtacttgtctctctggtattttaatctcttgcaggaaaagaattattttatgatacaaattaacccttataaatatgttgatttctatttgtctttctataattcttgatatattaatattcattttttgtcattattagcaaaaaatttgaaatatatctagtgggttgaacagtgctccctaaaacatatgtccaagtcctcatttacggtagctgtgaatgtgatcttatttggaaatatggtctttgcatgtgtaattaagctaaakaatttgagatgaaatcatcttggatttagagtaggccctaaattattattattattattattattattattattatcattcttcttcttcctcttcttcttcttcttcctcttcctcttcctcctcctcctcctcctcctcctcttcttcttcttcttattttgagatggagtctcgctctgttgccaggctggagtgcagtggtgtgacctcggctcactgcaacctctgcctcctgggttcaagtgattctcctgcttcagcctcccgagtagctgggactacaggtggcatgtgccaccacacccagctaatttttgtatttttagtaaagacggggtttcaccatgttggccaggatggtctcaatctcttgactttgtgatttg

SEQ ID NO: 874957 - DNA, 666 bp, Homo sapiens
ctttaagtacttgtctctctggtattttaatctcttgcaggaaaagaattattttatgatacaaattaacccttataaatatgttgatttctatttgtctttctataattcttgatatattaatattcattttttgtcattattagcaaaaaatttgaaatatatctagtgggttgaacagtgctccctaaaacatatgtccaagtcctcatttacggtagctgtgaatgtgatcttatttggaaatatggtctttgcatgtgtaattaagctaaataatttgagatgaaatcatcttggatttagagtaggccctaaattattattattattattattattattattattatcattcttcttcttcctcttcttcttcttcttcctcttcctcttcctcytcctcctcctcctcctcctcttcttcttcttcttattttgagatggagtctcgctctgttgccaggctggagtgcagtggtgtgacctcggctcactgcaacctctgcctcctgggttcaagtgattctcctgcttcagcctcccgagtagctgggactacaggtggcatgtgccaccacacccagctaatttttgtatttttagtaaagacggggtttcaccatgttggccaggatggtctcaatctcttgactttgtgatttg

SEQ ID NO: 874958 - DNA, 637 bp, Homo sapiens
tcactagaggtcaggagttcaaaaccagcctggccaacatggggaaaaccccgtctctactaaaaatacaaaaattagcgtggcttggtggtgcatgcctgtaatcccagttactccagaatctgaggtgggaggagcacttgaatccgggaggcagaagttgtagtgagcagagatcttgccactgtactcctgcctgggctactgagtgagactctgtctcaaagaaaaaaaaaaaaaaaaaaaaaaaaaaaggaaaagaaaaaattaaagaaagaaaagaaagtaaataaaactttttatttctaaactttttttttaactttaatgcttatttttatagattcagggagtactcatggaggatttttacatggatatattgtgcaggattgtgtagtggtgagggtttggcttmtagtatatctgtcacccaaatagtgaacattatacccataggtaattttttcaacactcattctattcccttccacatccccctttttgtactccccagtggcttttatatatttaacttctgtagagcttttactctatgtttaacaccctgataaacatttttcataaattatcttatttcattcttacaacaatactaaaagattaatagttattt

SEQ ID NO: 874959 - DNA, 617 bp, Homo sapiens
tgttttcttttccaattactgcttttttgttttctagcatttgagttctcatagctgcatctttttcctaattaaagcctttttgtttgctgttttctcagccaacataaatcatccatccaacaagcttctcagttgaggaaacatttctcatttaggatacatacagtttargatacatttctaaagttatttgtaagataatatgagctcttaaataacttgagaaaaaaatcatttaacatgatgtaaagcatgatagatatacctagaccatgaaaaaagagctttacacataatttctttgctatttaactttgggttttctaggctgctaaaaataacccaggcacacctgtgttattaattgatactttatactgtagagtttgggttatactgtgtttccacttaagtgttgatggctaggcagctgcttaaatttatctggtacatttgaatgatttcaagttagcagcattttccatgattagcacagtaataataatagtaactcatgaaatgtaaagctcttcatttagttctgtcagtgatagatcattattgttaatcttggcctttctgcttccagtaactgccacacaaataagagattg

SEQ ID NO: 874960 - DNA, 530 bp, Homo sapiens
tcaccagccaaccaattcaacattctctcttcagctttactttttttttctcttttttttttttgagagagagtctcactctgttgcccaggctgagtgcagtggcatgatcccagctcactgcaagctccgcctcccrggttcatgccattctcctcagagaatgatttctctgtgggcagttagtgctataaatttccctctacacactgctttaaatgtgtcccagagattctggtatgttgtatgtttgttctcattggtttcaaagaacatctttatttctgctttcattttgttatgtacccagtagtcataccctcccgagtagctgggaccacaggcacctgccaccacgcccagctaattttttgtatttttggtagagatggggtttcactgcattagccaagatggtctcgatctcctgacttcatgatccgcccacctcggccttccaaagtgctgggattacaggcgtgagccaccgtgcctggcccagctttacttttatcttaagaatcatacag

SEQ ID NO: 874961 - DNA, 744 bp, Homo sapiens
tctctcaccactcctattcaacatagttttggaagttatggccagggcaatcaggcaagagaaagaaataaagatattcaaataggaagagaggaagtcaaattatctctgtttgcagatgacatgattgtatatttagaaaaccccatcatctcagcccaaaaactccttaagctgataagcaacttcagcagtctcaggatacaaaatcaatgtgcaaaaatcacaagcattcctatacaccaataatagacagccaaatcatgagcaaactcccattcacaattgctacaaagagaataaaatatctaggaatacaacttacaaggaatgtgaaggccttctttcaaagagaactacaaactactgctcaaggaaataagagaggatacaaacaaatggaaaaacattccatggtcatggataygaagaattaatattgtgaaaatagctatactgcccaaagtaatttatagattcaatgctattcccatcaagctatcattgacttccttcacagaattagaaaaaaaactactttaaattgcatatggaaccaaaaaagagcccatatagccaagacaatcataatcaaaaagaacaaagctggaggcatcacgctacctgatttcaaactatactacaaggctacagtaaccaatatagcatggtactggtaccaaaacagatatatagaccaagggaacagaacagaggcctccaaaataacaccacacatctaca

SEQ ID NO: 874962 - DNA, 485 bp, Homo sapiens
agaaaagagaataacctactattcaaaaacatctacagggcttctgaggccctgaacaaagtctctattgaatgggggtccttcagtctttatgactcaaaattcactgttgttactttctgtgttcttcaaatgacyatatcaaattgggtgtcagcctggctgaatggccagggcccaggctcccaagtcagacatacctggctagaatcccagcgctgccacctagtagctgtggaggatgtgggcaagttccttcaccttgctgaccctcgttccttcatctataacacacagcctgtaaggcctccctcagggtttgctgtgaagactaatgatacggtgcatgtgaaatgcctggtgaccagcaggcatcctgtgacagatggcagttattcctattagtggtgtggcttccttgcttgctggtgtcacttcctggtgcctggaagccgacgggagtgcatgccttcccacgtagatca

SEQ ID NO: 874963 - DNA, 485 bp, Homo sapiens
agaaaagagaataacctactattcaaaaacatctacagggcttctgaggccctgaacaaagtctctattgaatgggggtccttcagtctttatgactcaaaattcactgttgttactttctgtgttcttcaaatgactatatcaaattgggtgtcagcctggctgaatggccagggcccaggctcccaagtcagacatacctggctagaatcccagcgctgccacctagtagctgtggaggatgtgggcaagttccttcaccttgctgaccctcgttccttcatctrtaacacacagcctgtaaggcctccctcagggtttgctgtgaagactaatgatacggtgcatgtgaaatgcctggtgaccagcaggcatcctgtgacagatggcagttattcctattagtggtgtggcttccttgcttgctggtgtcacttcctggtgcctggaagccgacgggagtgcatgccttcccacgtagatca

SEQ ID NO: 874964 - DNA, 598 bp, Homo sapiens
acagtggtatggtcctggcattcctagcagctgaacacatgaaaatttttcttatcaagtttgttctccttgcaatgtaacaaaatagtatacacatttatcaggatgtgtatttttttttaactatttttgtctcttcctattgctaactttgctctttctggaccttctattatggttctgtccatccctacctcctagtaaacgtgaagtgtcaaatgtttacattctctgaatgcttattttctgggtgtgtgcattmtgaattttacatatgaattaaaaatcttaattcctttcttaatcttctacagattgtgaagaaacaagctgctctaagtctcaagattttgtgaagtcagtggaactcttgtagataatgtggactccaacaaagacaaagcaaaaaataaatagacttgaaacatcgaatcaataaatcaagatgtatttctgaatatcccagggaaggaaaatacatgactaattctattttttctctttgtagtataattctaataccattactaatactgccagtattactagctagcatgtgtggagcttgtagtatgcaatggactgtctatatagaaac

SEQ ID NO: 874965 - DNA, 667 bp, Homo sapiens
cttacataaggattggaaagaacaccatgcccccaagtgataaatcattgattacatctgcatctgatggctgaaagtcaggagtttaccaattttcttgcatcaggaaaaaattgttgacattatcctctttaccaatgatagatcctgcatatttcaaactcatatctgctgaatggccagggcacaagaaagcaggaatttttctataaggatcaggtggagtcagttcttctaccttaatagagtggtaatttagaagtttttgttttgctttatttttttaaagaacgctttaaaattatcagccccctaagcagataatctgaagcagttgaataattgaacaaagtatgagtggctatggaatcactgggaatttttttctgtcaatgaagaataaattactacctgtgaaccaaatcgtgtacaagcaggaagtcaaaaaccrctagggtagtttagatattcctgaaactatgtatcaaatgtgggggtcttttttttttttttttgaatcctaaaaactaagctaccaaaacacagagtgattctgcaatttcttctctgggataaatacagctaccgtagaaagcaaaattggaaggatagacaagaggcctttaatttatggaaaatttggatttttacagtaaatttgaaatgg

SEQ ID NO: 874966 - DNA, 638 bp, Homo sapiens
tgtgttagttcttgctgcctatttgtaacaaagtttctttgcctaactttagtgcaagtcttctgtcttactggattcatattctggcagctgggtttgtgcaaaacctcctgccagacttagacatttaagcagaaattggcmaggtgtttaaaaccctcccctgggattggtaaccaatgcaggatgcccccctcctaggaattgatactggtgcacggtatttctgcttaacaataagggtgaccaaattacagtttaaatatttaacatagctatgtaaagcttgtaaatagtagcaatagctaaacttttgatgacaaagttatgcaaacacatcaggcaatagacaattgcctactggttgacaacagtggttaacaataagcgtgaccaaattacagtttaaatatttaacttagctatgtaaagcttgtaaatagtagcaatagctaaacttttgatgacagagttatgcaaacacatcaggcaatagacagttgcctactgggtgacaacagtggttaatctgctgtacttgataaggttacttacaaaacaaaacaaaacaaaaaaaaacgagactttggagagacacaacctgacacaagccccaggttcactactgaccagtagcg

SEQ ID NO: 874967 - DNA, 638 bp, Homo sapiens
tgtgttagttcttgctgcctatttgtaacaaagtttctttgcctaactttagtgcaagtcttctgtcttactggattcatattctggcagctgggtttgtgcaaaacctcctgccagacttagacatttaagcagaaattggcaaggtgtttaaaaccctcccctgggattggtaaccaatgcaggatgcccccctcctaggaattgatactggtgcacggtatttctgcttaacaataagggtkaccaaattacagtttaaatatttaacatagctatgtaaagcttgtaaatagtagcaatagctaaacttttgatgacaaagttatgcaaacacatcaggcaatagacaattgcctactggttgacaacagtggttaacaataagcgtgaccaaattacagtttaaatatttaacttagctatgtaaagcttgtaaatagtagcaatagctaaacttttgatgacagagttatgcaaacacatcaggcaatagacagttgcctactgggtgacaacagtggttaatctgctgtacttgataaggttacttacaaaacaaaacaaaacaaaaaaaaacgagactttggagagacacaacctgacacaagccccaggttcactactgaccagtagcg

SEQ ID NO: 874968 - DNA, 591 bp, Homo sapiens
gaggtgaagaacccactttaggttaggaagcctgaggtttctaatgcctgtttatcctaaataattgtctgtgttggggtatctcatcattgatttggagctgtgctttactggatacaagctgagagactttcttttaaaccaaaaacaaattttaaaaagctttcatttagcactaatagatcactacttggccaagtggggaagtgactgggcattctggagaaggctctggaagttctcagcatctargaaacacctctaggaaacatcctttaacatgagcagggtactcaagtcactggagtcaacgagtctgagagttttgctcttctgaaatgactagctatttgcagtctgtattaactgtctttaggatatgaacatcttgttcaatggacaagttagatggtaagggcaagcccaggatcaacttggttcctaaggaacaatgtgtgttttcctataatcttccctacactttcctctgtgctatagccagggcatgacaaccaaagccttgtcacaaacatttaaaaagacaattttcaaaggttgtaaaacttttaaagccagcttcctcctttgcaa

SEQ ID NO: 874969 - DNA, 579 bp, Homo sapiens
gtatgagtcaactatgttttcttagaaaaaggaggaggaaaaggaggatgagaacgtagtacgagttataggcaaatattgctacttctttttttttttttttttttttttttgagacagagtctcgctctgtcgcccaggctggagtgcagtggcgcgatctcggctcactgcaagctccgcctcccgggttcacgccattctcctgcctcagcctcccgagtagctgggactacaggcgcccgccaccacgcccagctaattttttttttggtatttttagtaaagacggggtttcaccgtgttagctaggatggkctcaatctcctgaccttgtgatctgcctgcctcagcctcccaaagtgctgggattacaggcgtgagccaccgcgcctggccaatattgctacttctaaaataattgcaaagctaaacatatgggatgcaaggtcagatggtacaaatgccaagtggtactccattctacattcagcaaaaatgtattgtgtacctatatgtgaaagacatcatgtagggtagacatctatgatcaattccttttggcatctgggctataga

SEQ ID NO: 874970 - DNA, 673 bp, Homo sapiens
gcaacaagagcaaaattccatctcaaaaaaaaaaaatagattttaggtccattttagtacctttctgtagaaaaagcataaaattgatgagttggggtgcaaagtaaagtcaacacttctatttcacacacctatttcactragtggcaaatttctagctttgaagaaactgatctccgtagaatgctagcttttgaaaaccaaatcttaagtaaggcttgttttctgactgacgaacttacaccctgttctagttaagtcagggttttctttccactgctttcccacaatgctagactaattttcaactccatgcctctccgaggcattttcttagtatgaggcactgtgtttccaaaaatgtcagaaaaccaagagaactgcgagagatgatttggaggtggggagtgggcgcccacattttaggcatacatagaactaacaataaataacattgagtaagtcattccttcaccaagtcccatttattcttcatggcaagatgcaaatctcacttatgtgccagtcttgaacagtagaatctttgccaggagcagcgagtgagcctaaggtaaggctagtgtggctttagtgatactacctgggctagaaattaacagcattgctttgctttcattgtgccttttaaaaatgatgatctcctcctgttggc

SEQ ID NO: 874971 - DNA, 673 bp, Homo sapiens
gcaacaagagcaaaattccatctcaaaaaaaaaaaatagattttaggtccattttagtacctttctgtagaaaaagcataaaattgatgagttggggtgcaaagtaaagtcaacacttctatttcacacacctatttcactaagtggyaaatttctagctttgaagaaactgatctccgtagaatgctagcttttgaaaaccaaatcttaagtaaggcttgttttctgactgacgaacttacaccctgttctagttaagtcagggttttctttccactgctttcccacaatgctagactaattttcaactccatgcctctccgaggcattttcttagtatgaggcactgtgtttccaaaaatgtcagaaaaccaagagaactgcgagagatgatttggaggtggggagtgggcgcccacattttaggcatacatagaactaacaataaataacattgagtaagtcattccttcaccaagtcccatttattcttcatggcaagatgcaaatctcacttatgtgccagtcttgaacagtagaatctttgccaggagcagcgagtgagcctaaggtaaggctagtgtggctttagtgatactacctgggctagaaattaacagcattgctttgctttcattgtgccttttaaaaatgatgatctcctcctgttggc

SEQ ID NO: 874972 - DNA, 657 bp, Homo sapiens
acaatatgtgtatcttcccacatattccttgatggaagtacaactgaaatcacaattcttttatggtagaagcattctggtttaaaaaactgaggttaaattaaacatatcattatgtgatattgctatatgtttaaccaactgcccctgtattactatatggctactcaattgccactatattgctatctggttacccaactgttataaatcaacagagaggcacggggagagcattctgtagagcagtgacagtgctggtaacccttctgtcaagacctggctaaaacaagggacagctgtatgagcatcaggctcaagggtttacaggcaatatgggcccagctttcccaacctttttttgcaagggccactcttagttcttgctgtttggccactggctaccacccatattatcactctaagatataattctgagatgagctaggaattccaaagacgcmtcaagctgaggtgtcagactccttcctctgtcaggctgcctgtcattttgaggcctttgtcttttctccctattgaggctgtgagcctgctgcccaacactggctggctctgtacctagcagcaccttggtagacgctgatgccgagggacacagctgacccctctgagtctcgacacccagcgcccttggtt

SEQ ID NO: 874973 - DNA, 611 bp, Homo sapiens
tagataagtggtggtatttataacacaagttattcttttcatgtacataatccatatttttttgtttcttggcctaattactaaaataatgtcaagatctagaagtacgcctttctataagaagctgcatgtgattaccatgaaatggattaactatctttcttggactctctcacattttcctaactttaattatgcccttcaaaaagctttggtataattgttagtctaagattatactttctttatttttttwaaaaaaattatattggcctgtgtgcttcacaagtcatctcctcacagagtgcctggtatatctgttttatatattttctgaataactgaattaatacctttcagatgaaacttaaacattaaatttctaaatttgtcataattttagtgtgtattcataatgtacactttaatatacacagaaaaaatttcttaagtctggataaaaattgattttgtaaagtgatgtacaacaagttatatatcttaatatatcaaaaagttggttggtcatagcacttcccactaaaaccttctgacacataaagtgaactatcatttttgttttctttcatgcaacattttcctttccttga

SEQ ID NO: 874974 - DNA, 611 bp, Homo sapiens
tagataagtggtggtatttataacacaagttattcttttcatgtacataatccatatttttttgtttcttggcctaattactaaaataatgtcaagatctagaagtacgcctttctataagaagctgcatgtgattaccatgaaatggattaactatctttcttggactctctcacattttcctaactttaattatgcccttcaaaaagctttggtataattgttagtctaagattatactttctttatttttttaaaaaaaattatattggcctgtgtgcttcacaagtcatctcctcacagagtgcctggtatatctgttttatatattttctgaataactgaattaatacctttcagatgaaacttaaacattaaatttctaaatttgtcataattttagtgtgtattcataatgtacactttaatatacacagaaaaawtttcttaagtctggataaaaattgattttgtaaagtgatgtacaacaagttatatatcttaatatatcaaaaagttggttggtcatagcacttcccactaaaaccttctgacacataaagtgaactatcatttttgttttctttcatgcaacattttcctttccttga

SEQ ID NO: 874975 - DNA, 657 bp, Homo sapiens
aagcacttctctgtattggttattctacttatacattcgtctaaatttttttcaaagttttcaacttctttgcctttggtttgaatttcctcctgtagcttggagtagtttgatcatctgaagccttcttctctcagctcatcaaagtcattctccatccagcttttttccattgctggtgaggaactgcattcctctggaggaggagaggcactctgcttttcagagtttccaatttttctgctctgttttttccccatctttgtgattttatctacttttggtatttgaagatggtgatgtacagatggttttttggtgtggatgtcctttcagtttgttagttttccttctaacagacaggaccctcagccaagatggccraagaggaacagctccagtctacagctcccagcgtgagcgatgcagaagacaggtgatttcagtgcaccgtgcaccagccaatgcagggcgaggtattgcctcactcaggaagtgcaaggggtcagggattccctttcctggtcaaggaaaggggtgacagacagcacctgtaaaatcgggccactcccacccaaatgctgcacttttccaaagggcttaggaaacggcgcaccaggagattatatcccacacttggcttggagggtcctatgc

SEQ ID NO: 874976 - DNA, 544 bp, Homo sapiens
tgcacacttcacaaagaagtttctgagaatgcttctatcgagtttttatgtaaagatatttcgttttccaacagaggcctcaaagggaaacaaatatccacttgaagattcttcaaaaggagtgtaacaaatctgctctctgaaatgaaaggttcaactctgtgagttgaatgcacacatcacaaagaagtttctgagaatgawtctgtctagtttttatgtgtagatgtttccttttccaccataggcttcaaagcgctcaaaatgtccacatgcagattctgcaaaaggagtgtttcaaaactgctctatcaaaagaaaggttcaacgctgtgaggtgaatgcacacatcaaaatgaagtttctgagaatgcttctgtctatttcttatgtaaagatatttcatttttcaacatatgcctcaaagggaactgcatatccacctatagatccttcaaaaagagtatttcaaatctgctctatctaaagaagtgtacatctctgtgagttgaatgcacacatctcaaagaagtttctgagaatg

SEQ ID NO: 874977 - DNA, 544 bp, Homo sapiens
tgcacacttcacaaagaagtttctgagaatgcttctatcgagtttttatgtaaagatatttcgttttccaacagaggcctcaaagggaaacaaatatccacttgaagattcttcaaaaggagtgtaacaaatctgctctctgaaatgaaaggttcaactctgtgagttgaatgcacacatcacaaagaagtttctgagaatgattctgtctagtttttatgtgtagatrtttccttttccaccataggcttcaaagcgctcaaaatgtccacatgcagattctgcaaaaggagtgtttcaaaactgctctatcaaaagaaaggttcaacgctgtgaggtgaatgcacacatcaaaatgaagtttctgagaatgcttctgtctatttcttatgtaaagatatttcatttttcaacatatgcctcaaagggaactgcatatccacctatagatccttcaaaaagagtatttcaaatctgctctatctaaagaagtgtacatctctgtgagttgaatgcacacatctcaaagaagtttctgagaatg

SEQ ID NO: 874978 - DNA, 544 bp, Homo sapiens
tgcacacttcacaaagaagtttctgagaatgcttctatcgagtttttatgtaaagatatttcgttttccaacagaggcctcaaagggaaacaaatatccacttgaagattcttcaaaaggagtgtaacaaatctgctctctgaaatgaaaggttcaactctgtgagttgaatgcacacatcacaaagaagtttctgagaatgattctgtctagtttttatgtgtagatgtttccttttccacsataggcttcaaagcgctcaaaatgtccacatgcagattctgcaaaaggagtgtttcaaaactgctctatcaaaagaaaggttcaacgctgtgaggtgaatgcacacatcaaaatgaagtttctgagaatgcttctgtctatttcttatgtaaagatatttcatttttcaacatatgcctcaaagggaactgcatatccacctatagatccttcaaaaagagtatttcaaatctgctctatctaaagaagtgtacatctctgtgagttgaatgcacacatctcaaagaagtttctgagaatg

SEQ ID NO: 874979 - DNA, 513 bp, Homo sapiens
aaactttcctttgacagagccgttttgtaacactctttttgtaaaatctgcaagtggatatttggagcgctttgaggcctatggttgaaaaggaaatatcttcacatgaaaactagactgaagtgttctccgaaatttccttggatttgtgtgcattcaattcacagtgttgaacttttcttttgatagagcagtttagaaacactctttttgtgaaatgtgcaagaggatatatggagcgctttgaggcctaargtggaaaaggaaatatcttcacataaaaactagacagaagaattctgcgaaacttctttgtgatgtgtgcattcaactcacagtgttgaaattttcttttgatagagcagttttgaaacacggttttgtaagttctgcaagggatatatggagcggtttgaggccagtgttggaaaaggaaatattttgatataaaaactagagagaaacattctcccaaaccttattgtgatgtgtgcattcaactgacagagttga

SEQ ID NO: 874980 - DNA, 563 bp, Homo sapiens
gggaatatccccacataaaaactagacagaagcattctcagaaacttctttgtgttgtgtgcattcaactcacagacctgaatatttcttttgatagagaagttatgaaacactcttttttagaatctgcaagtggatatttggagtgcattgaggcccatggtgaaaaaggaaatctcttcccataaaaactagacagaagcattctcagaaacttgtttgtgatgtgtgtactcaactaacagagttgaacatttcttttgatagagcagttttgaaacactctttctgtagaatctgctaggtgatatttkgttccctttgtggcctatgttagaaatcaaaattacttcagataaaaactagacagaagcattctcagaatattctttgtgatgtgagcattcatcccacagggttaaacctttcttttgatagaccagttttgaaacactctttttgtagaatctgcaagtggatatttggagcactttgaagcttatgatggaaaagggaatatccccacataaaaactagacagaagcattctcagaaacttcttt

SEQ ID NO: 874981 - DNA, 620 bp, Homo sapiens
aaaagaagacatttatgagccaaaagacacatgaaaaaatgctcatcatcactggccatcagagaaatgcacatcaaaaccacaatgagataccatctcacaccagttaaaatggcggtcattaaaaagtcaggaaacagcaggtgctggagaggatgtggagaaataggaacacttttacgctgttggtgggactttaaactagttcaaccattgtggaagccagtgtagtgattcctccgggatctagaactagaaataccatttgacccagccatcccattactgagtatatactcaaagcattataaatcatgctgctataaagacacatgcaaacatatgtktattgcgacatattcacaatagcgaagagttggaacaaacccaaatgtgcaacactgatagactggattgagaaaatgtggcacatatacaccatggaatactatgcagccataaaaaagatgagttcatgtcctttgtagggacatggatgaagctggaaacatcattctcagcaaactatcacaaggacaaaaaaccaaacaccacatgttctcactcataggtgtgaattgaacaatgagaaaacatggacacaggaaagggaacatcac

SEQ ID NO: 874982 - DNA, 620 bp, Homo sapiens
aaaagaagacatttatgagccaaaagacacatgaaaaaatgctcatcatcactggccatcagagaaatgcacatcaaaaccacaatgagataccatctcacaccagttaaaatggcggtcattaaaaagtcaggaaacagcaggtgctggagaggatgtggagaaataggaacacttttacgctgttggtgggactttaaactagttcaaccattgtggaagccagtgtagtgattcctccgggatctagaactagaaataccatttgacccagccatcccattactgagtatatactcaaagcattataaatcatgctgctataaagacacatgcaaacatatgtgtattgcracatattcacaatagcgaagagttggaacaaacccaaatgtgcaacactgatagactggattgagaaaatgtggcacatatacaccatggaatactatgcagccataaaaaagatgagttcatgtcctttgtagggacatggatgaagctggaaacatcattctcagcaaactatcacaaggacaaaaaaccaaacaccacatgttctcactcataggtgtgaattgaacaatgagaaaacatggacacaggaaagggaacatcac

SEQ ID NO: 874983 - DNA, 620 bp, Homo sapiens
aaaagaagacatttatgagccaaaagacacatgaaaaaatgctcatcatcactggccatcagagaaatgcacatcaaaaccacaatgagataccatctcacaccagttaaaatggcggtcattaaaaagtcaggaaacagcaggtgctggagaggatgtggagaaataggaacacttttacgctgttggtgggactttaaactagttcaaccattgtggaagccagtgtagtgattcctccgggatctagaactagaaataccatttgacccagccatcccattactgagtatatactcaaagcattataaatcatgctgctataaagacacatgcaaacatatgtgtattgcgacatattcacaatagcgaagagttggaacaaacccaaatgtscaacactgatagactggattgagaaaatgtggcacatatacaccatggaatactatgcagccataaaaaagatgagttcatgtcctttgtagggacatggatgaagctggaaacatcattctcagcaaactatcacaaggacaaaaaaccaaacaccacatgttctcactcataggtgtgaattgaacaatgagaaaacatggacacaggaaagggaacatcac

SEQ ID NO: 874984 - DNA, 507 bp, Homo sapiens
ttgcagattctgcaaatgactgtttccaaacttctcaatcaaaagaaaggctcaaccctgggagatgaaagcacacatcacaaagaagtttctcagaaaacttctgtgtgtttttatgtcaagatatttcctaatacaccatgggcctgaaagggctcccaaatatacctctgcagattctacaaaaagwctgtttaccaactgctcaatgaaaggaaagatgcaactatgtgaggtgaatgcacacatcacaaagaagtttctcagaaagcttttgtctagcttttatgtgaagatatttctttttcaccactgccctcaaatggctcagaaacaccctttgcagattgtaacaaaaagcctgtttccaaactgctcaatgaaaagtaagtttcaactctatgagttgaatgcaaacatcgcaaagaaatttctgaaaaactgtctagtttttatgtgtagatatttcctatttcaccataggcctcaaaatatcccaaatatccc

SEQ ID NO: 874985 - DNA, 708 bp, Homo sapiens
  misc_feature 695: n = A,T,C or G
tacatttcaaaaccaatcatgtgttcccaacagtcccccaaagtcttagctcatttcagcactaactcaaaagtccataatccaaagtctcatccaagacaaggcaagtcccttccaccttgagcctgtaaaatcaaaagcaagttagttacttcctagacacaagtattgggtaagtacagccattcaaaatgggataaattggccaaaatgaagggactacaggccccaggtatgtccaaaatccagtggggcagtcacatcttaaagctccaaaattatctcctttgactccatgtctcacatccaggycactgtgatgcaagagatgggttcccatggtcttgggaagctctgcctctgtggctttgcagggtacagcctccctattgactgctttcacaggctggcattgagtgtctgtggcttttccaggtgcatggtgaaaactgtcagtggatctaccattctgaggtctcgaggatggtggctatcttctccagctccccaggtgggtgccccaatgggaacactgtgtgagggctccaaccccacatcttccttcttcactgccctagcagaggttctccatgaaatccctgatcctgcagcaaacttctgcctgggcattccaggcatttccatacatcttctgaaatctaggtgggaggtttccaaaccccaattctagaccnctgtgcacttgtg

SEQ ID NO: 874986 - DNA, 586 bp, Homo sapiens
gtgacactctggctgggagcccttttctactgtaaatcatgaggtgagataagtcctctaaatcagcacctaacagcagactttgccaaatgacatctcatcagtcaaaatggcataacatgctgggctttactaagatttagtaagcatcatctgcagcattcaactggattcttacgatagcctttccgattcttttgttcttccatgctgctctcttattctcctctctgaacaagccatttaggaattaaactactcacttycttaaagtccctttatggaaggactttaaggaagtcctttttggaaggtactcaattgcttacaggataagaatcaacttcttaatgttgcataaaagatccttcataacattcatacaagggcacacagaacacttttccatgtatttatttcctaattggatttgctctctaatgatttgtctattcatgaactttaccaattaggatgttttctatattatagacatcaactttttgacatgtgtgttgtttacattttatactttgtaattggccttttataaatcattttaaactactcttggtaacttattttt

SEQ ID NO: 874987 - DNA, 708 bp, Homo sapiens
atttattatttaatagtaaaaagtattagtgaactcttatcatgtgtcaagcacaggactagacaatggtaatacaaagatgtgcatcacagtcactactgtgaggtcttcataacagaagaaaagtaaaaacataaactgctccatagagtgatgactgaaaaatgtgaatcatttcaaaatatgaaggtgtcactaagaagcacacatttatttaatggctgttttatctatgtggtgaggtttttgaaattattgaaatacttattttctcatgagctgatacatatttctaaagactttcatttcctttacttatgwcgctttgaattgtacattttatgaatgctatctcctctatagtcttacaaagttagtaatttattatgtaatgtattgactttcattgtcagtcacttaatctctatcaataacgaactcaaagtattttcattccaaagaagggcttatgcatctttttgttttatggagtttctagcaccagtattcaactgagttcagggaagtatgcaatacattctgagaacaaaattttgaaactgaacagagatatgtaccccatggaatcaagatgacatttaaacattgagaagaataacatatttaaaattttaaacgaaacattactttgtaaaagaaggatgattcattcaaatgttaatatgtagacatatggcttcaggcata

SEQ ID NO: 874988 - DNA, 563 bp, Homo sapiens
agactattgcaatatccttctacctggtaaccctgcaatctatttactgcaaggcaggcagagcaaccctattgtaataaaaagaaaaatcagttacctttgtgcttgatgtcctcttagggcctctcatctcactcaaaataaaatgtgatctccataatatggccaaaaagagcttcatgatctrgtccccatccagatctcaggcccttctcctccactctttcttttcttttcttttctttcttgctttcttttcttgagatggagtcttgctctgtcaccaggctggagtgcagtggtgtgatctcggctcactgcaacctctgcctcctgggttcaaacgattttcctgcctcagcctcctgagtagctgggactgcaggtgtacaccaccatacccagctaatttttgtatttttagtacaggtggggtttcaccatgttggccaggatggtcttgatctcttggcctcatgatccacccaccttggcctcccaaagtgctgagattacaggtgtaagccacagcgcctggcctctcctccactctcttaactcac

SEQ ID NO: 874989 - DNA, 599 bp, Homo sapiens
  misc_feature 280: n = A,T,C or G
tgattcctcaaggctctagaaccagaaataccatttgacccagcaatccctttactgtgtgtatacacacaaaggattttaaatcattctactatgaagacatatgaacatgtatgtttattgcagcactatttacaatagcaaatacttggaaccaacccaaatgcccattaatgatggactggataaagaaaatgcagcacatatacaccatggaatactatgcagccacaaaaaagaatgagctcatgtcctttgcagggacatggatgaagctggnaagccatcattctyagcaaactaacacagggaacaggaaaaccaaacactgcatgttcttacacataagtgggaattgaacaatgagaatacacggacacagggaggggaacatcacacactggggcctgtagggggatgtggggcaaggggagggagagcattaggacaaatacctcatgcatgcagggcttaaaacctagatgacaggttgataagtgcagcaaaccaccatggcacatgtatacctatgtaacaaacctgcacgttctgcacatatattccagaacttaaagtaaaataaaataataataataatt

SEQ ID NO: 874990 - DNA, 586 bp, Homo sapiens
cattgtggttttgatttgcgtttctctgatggccagtgatgatgagcattttttcatgtgtcttttggctgcataaatgtcttcttttgagaagtgtctgttcatatcctttgcccacttgttaatggggttgttygtttttttcttgtaaatttgcttgagttcattgtagactctggatattagccctttgtcaggtgagtaggttgtgaaaattttctcccattttgtaggttgcctgttcactctgatggtagtttcttttgctgtgcagaagctctttagtttaattagatcccatttgtcaattttggcttttgttgccattgcttttggtgttttagacatgaagttcttgcccatacctatgtcctgaatggtaatgcctaggttttcttctagggtttttatggttttaggtctaatgtttaagtctttaatccatcttgaattgatttttgtataaggtgtacggaagggatccagtttcagctttctacatatggctagccagttttcccagcaccatttattaaatagggaatcctttctccattgcttttaatttaaagtgtaaataatgtaa

SEQ ID NO: 874991 - DNA, 586 bp, Homo sapiens
cattgtggttttgatttgcgtttctctgatggccagtgatgatgagcattttttcatgtgtcttttggctgcataaatgtcttcttttgagaagtgtctgttcatatcctttgcccacttgttaatggggttgttcgtttttttcttgtaaatttgcttgagttcattgtagactctggatattagccctttgtcaggtgagtaggttgtgaaaattttctcccattttgtaggttgcctgttcactctgatggtagtttcttttgcygtgcagaagctctttagtttaattagatcccatttgtcaattttggcttttgttgccattgcttttggtgttttagacatgaagttcttgcccatacctatgtcctgaatggtaatgcctaggttttcttctagggtttttatggttttaggtctaatgtttaagtctttaatccatcttgaattgatttttgtataaggtgtacggaagggatccagtttcagctttctacatatggctagccagttttcccagcaccatttattaaatagggaatcctttctccattgcttttaatttaaagtgtaaataatgtaa

SEQ ID NO: 874992 - DNA, 601 bp, Homo sapiens
cccctgaaggagtgctcaggtgccattggtggtagactgggctggatggtttccaggtccctagatagcataccgggacactggaggggtaaagacaggttgggcagacctgttctgaagtcccctgatggtgtgtgtaggcactggccgtggttaggcaagagtgaggtgatatccagcacactggccgaatgcttgagtaggggaggcagcagcactgcagccctgctactgargacagcagggttgctctcagtggcagtaactgtattcaggcatttgggaagcctgtacttcacttctgctttggccccagcagtggcagcccacagtggtagtggctgtgggtcagggactttgcccttggggcatgtgaaaattcatgatgtctttgctgctgggggcagcggggtcattgccagtggctcatgctttagccctagcagcagcagaaccaactgtggtaggctccaaggcaagatacagtctagtggggactgggctctcaatatgagccttgctgtagctgcttaaagcttacaggtgtatgggacccagtgtgagttctctccctctagcaatgcctttatgtgatctccag

SEQ ID NO: 874993 - DNA, 601 bp, Homo sapiens
ccaataaacttttgaccactatatatttttctacctcctctttaaggacagtaacttttaaatatgccattttgaggttattttctagatcctgtaggcatgtttcattcttctttattcttttttcttttgtttcctctgactgtgtatttttgaatagcctattttcaagctcagcaattttttcttctgcttgatcaagtcttctattaaaggactctgacacattcttcagtatgccaattgtatctttcagctccagaatttctgcttgattattttgattttaatatctttcttaaatttgatataattatgaattccttccctgtgttatattgaatttctttgagtttcttcaacacagctattttaaatactctgtcttaaaggtcacatatctctgtctttccaggattggcccctggtgscttatttaattcatttggcaaagtcatgttttcctggatggtgttggtgctaatagatgttctttggtgtctgtgcattgaaaagttaggaatttattgtagccttcactgtctgggcttatgtatagcccttcttcctgggaaggatttacagacatatgaaaggactt

SEQ ID NO: 874994 - DNA, 639 bp, Homo sapiens
ataatgacaggaacaaatacacacacagcaatattaaccttaagtgtaaatgggctaaatgccccaattaaaagacacagactgggaaattggataaagagtcaagacccatcagtgtgctgtattcaggagacccatctcacatgcagagacacacataggctcaaaataaagggatggaggaagatctaccaagcaaatggaaagtgaaaaaaaaggcaggggttgcaatcctagtctctgataaaacagactttaaaccaataaagatcaaaagagacaaagaaggccattacataatggtaaagggatcaattcaacaagaagagttaactatcctaattatatatgcacccagtacaggagaacccagattcataagccaagtccttagagacctacaaagagacttagactcmcacacactaataatgggagactttaacaccccactgtcaatattagacagatcaatgagacagaaggttaacaaggatatccaggacttgaactcagctctgcaacaagcagacctaatagacatctacagaactctccaccccaaatcaacagaacatacattcttctcagcaccacatcacacttattccaaaattgaccacatagttggaagtaaag

SEQ ID NO: 874995 - DNA, 639 bp, Homo sapiens
ataatgacaggaacaaatacacacacagcaatattaaccttaagtgtaaatgggctaaatgccccaattaaaagacacagactgggaaattggataaagagtcaagacccatcagtgtgctgtattcaggagacccatctcacatgcagagacacacataggctcaaaataaagggatggaggaagatctaccaagcaaatggaaagtgaaaaaaaaggcaggggttgcaatcctagtctctgataaaacagactttaaaccaataaagatcaaaagagacaaagaaggccattacataatggtaaagggatcaattcaacaagaagagttaactatcctaattatatatgcacccagtacaggagaacccagattcataagccaagtccttagagacctacaaagagacttagactcccacacamtaataatgggagactttaacaccccactgtcaatattagacagatcaatgagacagaaggttaacaaggatatccaggacttgaactcagctctgcaacaagcagacctaatagacatctacagaactctccaccccaaatcaacagaacatacattcttctcagcaccacatcacacttattccaaaattgaccacatagttggaagtaaag

SEQ ID NO: 874996 - DNA, 590 bp, Homo sapiens
cccagctatcccattactggttatatacccaaaggattataaatcatgctattataaagacacaggcacacgtatgtttattgcggcactattcacaacagcaaaggctgggaaccaatccaaatgttcatcaatgatagactggattaagaaaacgtggcaaatgtacaccatggaatactatgcaaccataaaaaggatgagttcatgtcctttgtagagacatggatgaagctggaaaccatcattctgagcaaactatcgcaaggacagaaaaccaaacactgcatgttctcactcataggtgggaattgaacaatgagaacacttggacacagggcrgggaacatcacacactggggactgtcatgggttgggaggatggggaggaatagcattaggagaaatacctaatgtaaatgacgagttaatgggttcagcaaatcaacatggcacatgtatacctacataacaagccttcacgttgtgcacatgtaacctagaacttaaagtataatttaaaaagttaaataaaaagcatatataaactctatgttttgtgccatttaaattttgatcaagtttgtaca

SEQ ID NO: 874997 - DNA, 590 bp, Homo sapiens
cccagctatcccattactggttatatacccaaaggattataaatcatgctattataaagacacaggcacacgtatgtttattgcggcactattcacaacagcaaaggctgggaaccaatccaaatgttcatcaatgatagactggattaagaaaacgtggcaaatgtacaccatggaatactatgcaaccataaaaaggatgagttcatgtcctttgtagagacatggatgaagctggaaaccatcattctgagcaaactatcgcaaggacagaaaaccaaacactgcatgttctcactcataggtgggaattgaacaatgagaacacttggacacagggcgkggaacatcacacactggggactgtcatgggttgggaggatggggaggaatagcattaggagaaatacctaatgtaaatgacgagttaatgggttcagcaaatcaacatggcacatgtatacctacataacaagccttcacgttgtgcacatgtaacctagaacttaaagtataatttaaaaagttaaataaaaagcatatataaactctatgttttgtgccatttaaattttgatcaagtttgtaca

SEQ ID NO: 874998 - DNA, 654 bp, Homo sapiens
taaacaatatgaatgactgtagtggaaaggagaaacagtgtaaaccatgtggataaagacaaacaatgggatcaagatgatgctggcctcatacaatgagttgaggaggagtccctcctctcaatttttcggaatagtttctctaggaatggtaccagctcttctttgtacatctggtagaatttggctgtgaatctatcagatcctgggctttttttgattggtaggctacttattactgattcagttttggaactcattattggtctgttcagggaacaaatagccaggaaaaaactgaatcaatttcttcctggctcagtcttgggagggtgtatgtgtccaggaatttttccatctcttctaagttttctagtttgtgtgcatacaggtgttcatagtagcttctcatggctgtttttatttctgtgtagtcagtagtaacattccctttgtcatttctaattgtgtttatttgaattttctcttttttcttctttattattctagcyaatgtcccatctcttttactatttctttcaaaaaaccaactcctggattcattgaccttttgaatactttgttgtgtcttgatttccttcaggtcagctctgatttttgttatttcttgccttctgctagctttggggttga

SEQ ID NO: 874999 - DNA, 608 bp, Homo sapiens
gtaatccgacctttctctctggctgtgcttaatattttttccttcatttcaaccttggtgaatctgacaattatgtgtcttgcagttgctcttcttgaggagtatctttgtggtgttctctgtatttcctgaatttgaatgttggtctgccttgctaggttggagaagttctcctggataatatcctgaagagtgttttccaacttagttccattctccctgtcactttcaggtacaccaatcaaacatagatttggtcttttcacatagtcccatatttcttggaggctttgttcatttctttttacycttttttctctaaacttgggttcttgctttatttcattaatttgatcttcaatcactgataccctttcttccacttgattgaattggctattgaaactttgcatgcatcacgaagttctcttgccatggttttagctccatcaggtcatttaaggtcttctttaccctgtttattctatttagcccttcgtctaacctttttttcaaggtttttagcttccttgtgatgggttagaagatattcctttagcttggaaaagtatgttattaccgaccttctgaaacctccttctgtcaac

SEQ ID NO: 875000 - DNA, 608 bp, Homo sapiens
gtaatccgacctttctctctggctgtgcttaatattttttccttcatttcaaccttggtgaatctgacaattatgtgtcttgcagttgctcttcttgaggagtatctttgtggtgttctctgtatttcctgaatttgaatgttggtctgccttgctaggttggagaagttctcctggataatatcctgaagagtgttttccaacttagttccattctccctgtcactttcaggtacaccaatcaaacatagatttggtcttttcacatagtcccatatttcttggaggctttgttcatttctttttacccttttttctctaaacttgggttcttgctttatttcattaatttgatcttcaatcactgataccctttcttccacttgattkaattggctattgaaactttgcatgcatcacgaagttctcttgccatggttttagctccatcaggtcatttaaggtcttctttaccctgtttattctatttagcccttcgtctaacctttttttcaaggtttttagcttccttgtgatgggttagaagatattcctttagcttggaaaagtatgttattaccgaccttctgaaacctccttctgtcaac

SEQ ID NO: 875001 - DNA, 702 bp, Homo sapiens
aaacaccatttgacccagcaatcccattactaggtatatacgcaaagtaatataaatcatcctattataaagatacatgcatgtgtatgttcattgcagcactattcacaatagtgaagacatggaatcaacccaaatgcccatcaatgatagaatggataaagaaaatttggtacatatacaccgtggaatactatgcagccataaaaaggaatgagattatgtccttttcagggacatggatggagttggaagccgttatcctcagtcaactaacacaggaacagaaaaccaaataccacatgttctcacttataagtgggagctgaacaatgagaacacatggacacatgttgggaaaaacaacaatttctcatatcttagaggaagaagttgcttatttattttcactttgattctcagcctttcttatttacactgcgtgatcctgatgagctctcatagtctctcagcctctgttatattaatatttaagacaatctttctcattaggcaaatcacaatgtgtcactactcttttaaaacattttsatagccttttatggcctaaagaaaagtctcaaatcctcatcatgatatgtagaactcaccacataaaagttccactcgtttttggttttttttaagtacaatattatttcaaatcgacgtaataatgagtcaaatgatctcctgaaactc

SEQ ID NO: 875002 - DNA, 592 bp, Homo sapiens
aaaaaaaatgaaaaataaaattccagtcaatagtaaggacagtgataagaagcttgaaggactttttaaaaaatataaagtagggtaatatattgtgattctttcagagttcacatcaaatgtatttgtgtgtgtgtataacaattttgttaaagctgcaggtcttaagatgaaaaaaactaaagagtgtactctgaagtataaattagatatacattcatggaaaagatagaccctctttatggatgagaatattaaatgtaaagatggcaatttacctaaaaataatttaaaaatttaaagaatagtaaattttcaagtaaatattttgagtkaacaattatttagaaatatttcagtaaaaataaacattttagactaggtagaatttttttaaataaaagatgttgactttctctgtcaggtaatgaatatactataaaaccataattataatagtttagtcctggaaataagaacaaggcaacagatcaacagagcagaataaaagaactccgatctgctataccagaatctattcatatttctatcttatttctctataatcaactactattaatcttatttagaa

SEQ ID NO: 875003 - DNA, 589 bp, Homo sapiens
ctggtttctctccatgtttgtggttttatctacctttggtctttgatgatggtgacgtacagatggggttttggtgtggatgtcctttctgcaggtctgttggagtttgatggaggtccactccaggtcctgtttgcctgggtatcaccagtggaggctgcagaacagcaaatattgcagaatggcaaatgttgctgcctgatccttcctctggaagctttgtctcagagggtcacccggttgtatgaggtgtcagtcagcccctactcrgaggtgtctcctagttaggctactcaggggtcagggacccacttgaggaggcagtctatccattctcagatctccaactccatgctgggagaagcactactctcttcaaagctgtcagacagggatatttaagtctgcagaagtttctgttgccttttgttcagctatgccctacccccagaggtggagtctacagaggcaggcagacctcattgagctgcggtgggctccacgaagtttgagcttcccaggcactttgtttacttactcaagcctcagcaattgcggaagcccctcccccagccttgctgccaccttg

SEQ ID NO: 875004 - DNA, 589 bp, Homo sapiens
ctggtttctctccatgtttgtggttttatctacctttggtctttgatgatggtgacgtacagatggggttttggtgtggatgtcctttctgcaggtctgttggagtttgatggaggtccactccaggtcctgtttgcctgggtatcaccagtggaggctgcagaacagcaaatattgcagaatggcaaatgttgctgcctgatccttcctctggaagctttgtctcagagggtcacccggttgtatgaggtgtcagtcagcccctactcggaggtgtctcctagttaggctactcaggggtcagggacccacttgaggaggcagtctatccattctcagatctccaactccatgctgggagaagcactactctcttcaaagctgtcagacagggatatttaagtctgcagaagtttctgttgccttttkttcagctatgccctacccccagaggtggagtctacagaggcaggcagacctcattgagctgcggtgggctccacgaagtttgagcttcccaggcactttgtttacttactcaagcctcagcaattgcggaagcccctcccccagccttgctgccaccttg

SEQ ID NO: 875005 - DNA, 721 bp, Homo sapiens
tcatagcggcttttttttttttttttttttttttttttttttttttaacagagtctcgctctgttgcccaggctggagtgcagtggtgctaacttggcttgctgcaatctccgcctcccaggttcaagcgattctccatcctcagtagcttggattacagtcacccaccaccatgcccggcttacttttgtgtgtgtgtatttttagtagagacagatttcaccatgttgaccaggctagcctcgaactcctgacctaaagtgaactgcttccttcagcctcctaaagtgctgggattacaggagtaagccaccatgcctggccaagcatagcatcttaatacttacctatattgcttctatttttttgtatctttcttatggttgtttcagctctttgttatgcaaaatgtaagactaaaaagtgatttaggttttctctyagctgtgctattttccagtttagaatgacattttggggaactgttctctgcttctgattatcacagttctcaaaagaggagtatgcatttgcttgctccaattcctcttcttctacactctcttaagcattcctcaaccagtctaatatctcatagttccccaaaactgctctgttcaagaccattagtaagatctttgatgttaatctgtggaccgtatctctgtccttattttacttgaagcccaacagcacgtaaaaaagttgttctcctctcctc

SEQ ID NO: 875006 - DNA, 683 bp, Homo sapiens
tattagtaaaatctttaggcattcaaaagctttaacaatttttttcataatatttgacctaaggtttaatctctgggaatttcctggggtaatactcatgggtgattacggtggtttaatttaattagtactcattgcagaactgctcagaatgaaaagaaaaaccccactcaacaaaaagggaataattaaataaatgatagtacatttgttcaatgaaattctaggcaactgtcacaaaaatccagtagcaggtatttaatgatcaaaaacaatttcataatatatgtgtacaactaggttttatgccagtccttcacccttttcttatttttacattaaaaacaggcataaatagacaagaagacacacacacacacacacacacactcaaagtgtgtctgtataaatactggggaataagcacaaaaccttgaagccagagkttagtaattgccagtaatttttgttactttttaaatgtaatctcaaaattttagaatgagcacatatgctttttgtaagaaacattgctaaaagaataacaatgttctaaaaacaaaattatattacactggccctgaaaatgtcaagttagtttttctggaatcacgcattaagtctgtttgatgaactcaatcgtatttggcatacaagtacttttcctggactctggctcagct

SEQ ID NO: 875007 - DNA, 416 bp, Homo sapiens
acctatggattttgaaactatctaagttcagctgtctgctcccatgcagagctgtccctgatcacacacgggatggtgtgttgaagaatgtcagagagggttgaacggtaagacctgtgggagccatggcaaagatttcaaggccaagtttgatagtgaagcatggacagaggtgtatcattggcagctactaagcaaagcatgcatgaagtcctttcctctaatgtttgtcactatttaaaacascaaacgttttgcattatcctaaaggtggaagtagggcatcccccaaacatgactgaagtagaattgtccaccagttagacgtctgaggcattgaaacatttacatccatttgaaaaacaaaggaaaaatggtatttctttcatactaacgttatggattaaaagtcacac

SEQ ID NO: 875008 - DNA, 640 bp, Homo sapiens
gaactgccttctctttttccaggaagattaaatctgtatcctctctgccattcagtttaatacctatgtgcaaggcatcagtagagaccagatagatagatagatagatagatagatagatagatagacagacagatagataggcagagatgtttgtgtgtgtgtttgtgtgtgtgttgtgtgtttgtatctctaagtrcatgaagaattggcatacatcccagaacacaacagactgaaactcctgattaaagataacaggtaaatggaatgaacatccaataaaaacctgtttgtgtttttaaacaaaattaaaagactaaaataagaatagaatataggaataggaagaaagccttacatgacaataatcaatttgggtaccattttgttacctcctggccttctgcaacttaaagggaaaaaaaaattaccaccatcaggcaaatgccttatcatgataggacaaaattcttcccattgtgtggctctgttggcatttttaaatgtgtcatatgtggctgggttgtggggtacaagatgtagacttgcttaggagacaaagaccagcataaacttttgaggatccatcctacatggagaatgtagtgaatatgctattgctctaagtggagacaga

SEQ ID NO: 875009 - DNA, 632 bp, Homo sapiens
atcctttatgaggttggggttcttccctgacagttgctgaggctgtgggaacaaacgagttcatatagggagtgagtgaggagggagacttcagacgctcagggattctacaccatggaggaggctatgaaggagatccattttcttctaaatcattctgataggcttctggatggctttcggtctctggccagstgctgatggaaagctctcctctctgatgaagattaatcatcaaacccaggagataattttattctgctcttctgagtcatgttagattccagaacaattaactttattttccccaaatcttgtatctcttgggaatcttccagtaactttggtttccagtctacggagctacttttggcagcttgttgtcaaagaagtgataattcttaaagcttagagtgctaaactgcaactcagttgagaattgaaacctttccagtaaggggctcagccccagacacctgggactcctctttctcctttcaccctcaggtacaggagtgttacataaaatggcactaatccacttttacagtttttgtgttattaagcaatacattaagatttaataaccataacaaaagggttgttttctcaccaagcagttattatttgtt

SEQ ID NO: 875010 - DNA, 529 bp, Homo sapiens
gggagttgtgtgttcataatgccactttgccaccctgaaatctatgcagataatctacttggaaggctttgagccccagtggaatacagaaccatgtaagtatcctgcattgatttacagcacctgctacagctgcttggatcttggcaggcattttctctcctgccaaatgctgttgaaattgctgggctggtttagatggaggttatatttactggacatgtttataatcttcagagtgatctaagccatagagagctaatttcccaaagatcaatgactaagggaggatttcagaggttatcctctttatccratttcctgtgtcctaatgagatggctgaaacctgtttggaatctttctgattaggaactcttgtgagagtcaataaagaatatgacattcataaatctaaataagaggcgacttggcagcctgtaggtgattcatgccacgagaagcctttcccctgcccccaacaggatgtgccatgggtggccaacctgagacaaggtcagacttgaacca

SEQ ID NO: 875011 - DNA, 572 bp, Homo sapiens
tataggttttctcatggtggttaccatgaggtaaaaaatatagatataatacattattttattttatttttttaataaactttttaagttttagggtacatgtgcacaacatgaaggttagttacatatgtatacatgtgccatgttggtgtgctgcatccattaactcatcatttaacattaggtatatctcttaatgctatccctcccccctcccccaccccacaacaggctcsggtgtgtgatgttccccttcctgtgttcatgtgttttcattgttcaattcccacctatgagtgagaacatgcggtgtttggttttttgtccttgcgagagtttgctgagaatgatggtttccagcttcatccatgtccctacaaaggacatgaactcatcgttttttatggctgcatagtattccatggtgtatatgtgccacattttcttaatccagtctatcattgttggacatttgggttggttccaagtctttgctattgataacacattatttcaaagagatgagaacttatctttgatcacacagaaaaaaaatagggacaaacaaacca

SEQ ID NO: 875012 - DNA, 572 bp, Homo sapiens
tataggttttctcatggtggttaccatgaggtaaaaaatatagatataatacattattttattttatttttttaataaactttttaagttttagggtacatgtgcacaacatgaaggttagttacatatgtatacatgtgccatgttggtgtgctgcatccattaactcatcatttaacattaggtatatctcttaatgctatccctcccccctcccccaccccacaacaggctccggtgtgtgatgttccccttcctgtgtycatgtgttttcattgttcaattcccacctatgagtgagaacatgcggtgtttggttttttgtccttgcgagagtttgctgagaatgatggtttccagcttcatccatgtccctacaaaggacatgaactcatcgttttttatggctgcatagtattccatggtgtatatgtgccacattttcttaatccagtctatcattgttggacatttgggttggttccaagtctttgctattgataacacattatttcaaagagatgagaacttatctttgatcacacagaaaaaaaatagggacaaacaaacca

SEQ ID NO: 875013 - DNA, 572 bp, Homo sapiens
tataggttttctcatggtggttaccatgaggtaaaaaatatagatataatacattattttattttatttttttaataaactttttaagttttagggtacatgtgcacaacatgaaggttagttacatatgtatacatgtgccatgttggtgtgctgcatccattaactcatcatttaacattaggtatatctcttaatgctatccctcccccctcccccaccccacaacaggctccggtgtgtgatgttccccttcctgtgttcatgtgttttcattgttcaattcccacctatgagtgagaacatgcggtgtttggttttttgtccttgcgagagtttgctgagaatgatggtttccagcttcatccatgtccctacaaaggacatgaactcatcrttttttatggctgcatagtattccatggtgtatatgtgccacattttcttaatccagtctatcattgttggacatttgggttggttccaagtctttgctattgataacacattatttcaaagagatgagaacttatctttgatcacacagaaaaaaaatagggacaaacaaacca

SEQ ID NO: 875014 - DNA, 658 bp, Homo sapiens
agccgtaggggaatcacatagtttgtgcctttcctccccacacacccttcccaccatcccaccccaagacctgctcctattttctaggcttggtgagggcactaaggaagaaatatgcctccttccgccaaattacttccatttcttaaaataaatcccagcttttctcttctgggaagccaccccagagtggactaagatctcaaaatatcttttatttactttattcaagaaacattgagagtctaccaggcgccagacaggaacagaccctgacttcaaggtggagactagcatgtaattaagcccaatraaggaccaaaatcattgtacaggtacagtcagaggaggctggttttccagtttgaagtttaggaagtcaaaaaacttcttcaggccgggcatggtggctcacgcctgtaatcccagcactttggggggccgaggcaggtggatcacaaggtcaggagatcgagaccatcctggctaacacagtgaaaccccgtctctactaaagacacaaaaaatgagctgggcgttgtggcaggagcctgtagtcccagctacttaggaggctgaggcaggagaatcacttgaacccgggaggcggaggttgcaatgagccaagattgcaccactgcactccagcctgggcgca

SEQ ID NO: 875015 - DNA, 646 bp, Homo sapiens
tatacaagtaggcgctctgaatgcctggagacctgcctagacaagtgtcagagaggacccctgcaccccatactacaatctatgtccaggaagggtggggtggctcaggctgctggaccaggcaaatgggtgctccagatacctgcatttttgcctgcatgtgaagcagggagagacccactgcaccataatctattttgaggaagggtggagcagctcaagctgctgaactaggaaaatgggtgctccaaatgtctggagatctgcttggtcatggagcagagatagccttgctacaccacaatctatgtacttaaatggtggggtgactcaggctgttgaagcaggtgaatgagtactctgaatgcctgcagatctgctaggtgtggagcagagagaacctgactgcrccacaatctatgtccaggaaaggtggggtagctcaggctgctggtccaggcaagcaggtgctctgaatacctgctattttctctggggatggagaagagaggacaccactttgtaccccaatctcaggaaagcagggtacgtacaccagcagtggcacatgcagatcagttcctgcttgccaagctggactttgctgcaagtgttgccacccaggagaaactgcagctgtagtatc

SEQ ID NO: 875016 - DNA, 683 bp, Homo sapiens
tcatggaagcagattcagaaaatgggtaggcattaagggaggataagcagcaggattaatagcaaagtttacgctgcagaaacagcctgattagaatgctgtccctggcaccactgccacggcctatggtagacaccactgccatctcagctagtcagtcacctctatggtcactactgaacactgctatagtgaaatcaattatcaattcagtttttctctacttgctccaaattcgaaatctaatatggaagcaaataattgccaaaccccagttcacctgtctgagacctttatgtcagggttgaacagaaattgcatctcatccattctgttttctgtactgggaagttgtgttctgtctcctataaaggctcacataataggggattcttccattgcagggcagacaataccaacaaccccaaattcaacattggcaaatgtccatacacaaagaaaagtgcrtaataatggtatgacactagggccacagtggtcactacttcttggggaagtcaggagctctctcctaagcctttcttctagggcctgcctggctcaatggatgacacttcatgcattcagttgcacaagctagaatcccaggtatcatccctgacacctgtctctcccttacgccacatagccaatccatcacgcaccatcctttcaatttcact

SEQ ID NO: 875017 - DNA, 587 bp, Homo sapiens
aagatgacttttatatgagctgtaccagtggtccccagcatcactgataaataatggcagcctaaaacctccatcaatgatagcagagaaattaatgaaccattaaatcagcatgtgcattctacctttggagaaaactttgattctgatgactggaatccataccattaatatgagcctcttacaagtcstaggataagagatattttgctggtgtttaaatattgtattttgatggtggtcaggttgtctgataactgtgaattccttagggctttcaggacatgtaaaaaatgctgaaacacatatttaaatgtatatcttgttatatcctaagatcttggacaattaggagggctgcttgggaagctctttttaaatattctcaatgctcttcctctgcagaaagaaccccccaggtccttcaaggacaataagaaaaagaggatttgcttctgtggcctttctgcccaacagacaggagaacattttagaacttaaagcagacatgatttaacgacattatgcaatttgattatggaaggaaaagctgggtttctactccatcccttgaaatccagcctttt

SEQ ID NO: 875018 - DNA, 539 bp, Homo sapiens
tgaagtgatgttgaattttatcaagtcttttctgtactcattgaggtgatcatgtggcttttgtttttagttctgtttaagtaatgagtcacatttgttgatttgcatatattgaatcaaccttgcatcccagggagaaatcctgtttggttgtggtggatgagctttttgatgtgctgctggattcagtttgctagtatgttacgaaggatttttgcatctatgttcgtcaagaatattggcytgaattttcctttattttgctgtgtctaaactgattaattaaaaataaatggattaatagcagtgttttaagacaaaactgtaacctatatgactaaaattttatgtttacttagtatttctcttacatgtagtttagatttttcatttcttaataacggaattgcatgatttttcccaaaaatcagttttcattttgattgatatctatattgtatatttactttatttactttgtattatttatgtcttaaggaacagcaaatttcttaaaacttagattataaacttctgtg

SEQ ID NO: 875019 - DNA, 588 bp, Homo sapiens
ttggaatggggatcaggtaaaggaatttcaattttttaaaacattttttccatttaaaattttacagtgaagtgtatccatctttttaaactgcagaatatcaaaagtcaggaaaacaaaaaatcacatatagtatatataatagatatttattaaataagaacttagtgagtttcataattctsttacaaaatattactattatacttcacatttaatttggctttataatatatatatttttaatatgcattatgtcatttgggttttatataaccctcttgagttgggcagacagcatcttacaaaatgggattttgaggctctgagaggttacatcatttttccaaggttatacataagtgatacttggacaatcttcttgttacttgacttttattcttttacctgagattttttggggcccctctatgtgctaggcccactgttctccccactacaccatatgcactgcaatttgcaaataaagatttgaaaatacacaagcaccatataactcaaagcctgaaaatgataaatacaaacctctaactaatggataactcttagatgcaaattttattttgg

SEQ ID NO: 875020 - DNA, 588 bp, Homo sapiens
ttggaatggggatcaggtaaaggaatttcaattttttaaaacattttttccatttaaaattttacagtgaagtgtatccatctttttaaactgcagaatatcaaaagtcaggaaaacaaaaaatcacatatagtatatataatagatatttattaaataagaacttagtgagtttcataattctgttacaaaatattactattatacttcacatttaatttggctttataatatatatatttttaatatgcattatgtcatttgggttttatataaccctcttgagttgggcagacagcatcttacaaaatgggattttgaggctctgagaggttacatcatttttccaaggttatacataagtgatacttggacaatcttcttgttacttgacttttattcttttacytgagattttttggggcccctctatgtgctaggcccactgttctccccactacaccatatgcactgcaatttgcaaataaagatttgaaaatacacaagcaccatataactcaaagcctgaaaatgataaatacaaacctctaactaatggataactcttagatgcaaattttattttgg

SEQ ID NO: 875021 - DNA, 595 bp, Homo sapiens
tacatatggctacccagttttcccagcaccatttattaaatggggaatcctttccccattgcttgtttttctcaggtttgtctaagatcagatagttgtagatatgcagcattatttctgagggctctgttctgttccattgttctatatctctgttttggtaccagtaccatgctgttttggttactgtggccttgtagtatagtttcaagtcaggtagcgtgatgcctccagcttcgttcttttagcttaggattgacttggcaatgygggctcttttttgttccatatgaactttcaagtagttttttccaattctgtgaagaaagtcattggtaacttgatggggatggcaccaaatctataaattaccttgggcagtatggccattctcaggatattgattcttcctaatcatgagcatggaatgttcttccatttgtctgtatccttttttatttcattgagcagtggtttgtcgttctccttgaagaggtccttcatgtcccttgtaagttggattcctaagtattttattctctttgaaggaattttgaatgggagttcactcatgatttggctctctgcttgtccg

SEQ ID NO: 875022 - DNA, 595 bp, Homo sapiens
tacatatggctacccagttttcccagcaccatttattaaatggggaatcctttccccattgcttgtttttctcaggtttgtctaagatcagatagttgtagatatgcagcattatttctgagggctctgttctgttccattgttctatatctctgttttggtaccagtaccatgctgttttggttactgtggccttgtagtatagtttcaagtcaggtagcgtgatgcctccagcttcgttcttttagcttaggattgacttggcaatgtgggctcttttttgttccatatgaactttcaagtagttttttccaattctgtgaagaaagtcattggtaacttgatggggatggcaccaaatctataaattaccttgggcagtatggccattctcaggatattgattcttcctaaycatgagcatggaatgttcttccatttgtctgtatccttttttatttcattgagcagtggtttgtcgttctccttgaagaggtccttcatgtcccttgtaagttggattcctaagtattttattctctttgaaggaattttgaatgggagttcactcatgatttggctctctgcttgtccg

SEQ ID NO: 875023 - DNA, 660 bp, Homo sapiens
ttctcccaagaaactagttcatttttattacaaacactgaatactacataactaatcagtatctgaaagaaaactcagagtcaaatctgtatcctacttgtaggacagtcttgtgccataaatccttggatactaactttttattggaggttattttttcttcttttaytttctcttcttgctgacttattatattgtcaatattttattgtatgaatgtataggttgctacatattctttgtcatattgaagagggtaggtacttgttgaatgacatataagtcctatatttcaagctaaagctacaacagcattatagtttaactgatgtgaaacaagaaagcatattcttccagaaatttgtgaattatgggattaaatgtattagcaatgcttggcattatccaatatttcacaaatatatgagtattctcagaaaaagttgaggaagcataaattattatttgtattattcttaggaaaatgacaattcataagcctaaatcttgcttttctttaatttcttaatgattcacactgtccaatggtcacaaaaatataaaatatataaaacatttatttttaatttgggcatttgattctttttttttatactttacattttagggtacatgtgcacaatgtgcaggttagttaca

SEQ ID NO: 875024 - DNA, 621 bp, Homo sapiens
tgctgagtgggggctgataggcaacctgtgttttgctcattaaacatgaaccctagcacatgggtgcatccattcaaaccggcatttttttttttttttttttttttgagatggagtctcgctctgtcgcccagactggagtgcagtggcacgatctcagcttactgcaagctccgcctcctgggttcacgccattctcctgcctcagcctccctagtagctgggactacaggctcccaccaccacacccggctaattttttgtatttttagtacagacggggtttcaccgtgttagccaggaggtctctatctcctgacctcgtgattcgcccacctcrgcctcccaaagtgctgggattacaggtgtgagccaccgcacaaagggacatttttctaacttgcactgaagcattacgtaggttactcatggccctgtcagtgcatgtgaatctgcgtcatcgtatgcaactactgcattgtgatccaagaaatgatggtgccataactcattaagttaaaattttctattgatagtaagttatttccagttctttggctactagcaaaaaatgccacaacgaagacagtattgattatactgtctttgcatgcgtgcaag

SEQ ID NO: 875025 - DNA, 583 bp, Homo sapiens
ttatcagcttcagaaatattccttccaatattttatgagtgttgccacctcccattgtttctgttgtttcagcccaaaattcctattagatttttttgtaataacttgtatctatgtctcttaacttccactcattatgcgacctttttttgtatttttgctttgcttattgtgagatcttcttgactcactggaccakatcagcagcttggtcttcagatatatccattttattattcactgtcctttgaaacatttattgttgcagtcatatttttaactttcttattttccttcagttacctagtcaacaaacaaatattaagtgcttaaaatgtactgagcactcttccagatggaagggatacaaaataacatcttttctccaaaggacctactttctacaggagggaagcataaaataaaacagtaaaccaactaaggggtggaatgaactaataagagaaaagaatcagagtggaatcctagaagctgggtgaaaaagctgtttctgaaaggaaagtaagatcaaatgtctcaaatgctatgcatagacccaagtagaccagaagaaaactgacat

SEQ ID NO: 875026 - DNA, 653 bp, Homo sapiens
caggatctacaaggaacctaaacaaatttacaagaaaaaaacaatcccatcaaaaaatgggcaaaggacatgagcagatacttcacaaaagaagacatttatgtggctaacaaacatatgaaaaaatcgtcatcactggtcattagagaaatgcaactcatcatcactggtcattagagaaatgacattatgcagctaacattagagaaatgaccattatgcggctaacaaacatatgagaaaatcatcatcactggtcattagagaaacgcaactcatcatcactggtcattagagaaatgcaactcaaaaccacaatgagataccatctcacgccggtttgaatggcgatcattaaaacatcaggaaacaagatgctagagaagatgtggagaaataggaacacttttacactgttgggagtgtaaattarttcaaccattgtggaagacagtgcggcgattcctcaagaatctagaaccagaaataccatttgacccagcaatcccattactgggtatacacccaaaggattataagtcactctattataaagacacatgcacacatatgtttattgtagcactattcacaatagcaaagacttggatccaacccaaatgcccatcaatgatagaatggataaagaaaat

SEQ ID NO: 875027 - DNA, 704 bp, Homo sapiens
tcactggtcattagagaaatgcaactcaaaaccacaatgagataccatctcacgccggtttgaatggcgatcattaaaacatcaggaaacaagatgctagagaagatgtggagaaataggaacacttttacactgttgggagtgtaaattagttcaaccattgtggaagacagtgcggcgattcctcaagaatctagaaccagaaataccatttgacccagcaatcccattactgggtatacacccaaaggattataagtcactctattataaagacacatgcacacatatgtttattgtagcactattcacaatagcaaagacttggatccaacccaaatgcccatcaatgatagaatggataaagaaaatgtgccacatatacaccacaaaatactaygcaaccataaaaaaggttgagtttgtgtcctttgcagggacatggatgaagctgaaagctattattctcagcaaactaacacaggaacagaaaaacaaacactgcatattcttactcataagtgggagttgaacagtgagaacacatggacacagggaggggaacatcacacaccagggcctgttgtggggtggggggagcggggagggatagcattaggagaaatacctaatgtagatgatgggttgatgggtgcaacaaaccaccatggcaagcgtatgcctatgtaacaaacctgcacatt

SEQ ID NO: 875028 - DNA, 704 bp, Homo sapiens
tcactggtcattagagaaatgcaactcaaaaccacaatgagataccatctcacgccggtttgaatggcgatcattaaaacatcaggaaacaagatgctagagaagatgtggagaaataggaacacttttacactgttgggagtgtaaattagttcaaccattgtggaagacagtgcggcgattcctcaagaatctagaaccagaaataccatttgacccagcaatcccattactgggtatacacccaaaggattataagtcactctattataaagacacatgcacacatatgtttattgtagcactattcacaatagcaaagacttggatccaacccaaatgcccatcaatgatagaatggataaagaaaatgtgccacatatacaccacaaaatactacgcaaccataaaaaaggttgagtttgtgtcctttgcagggacatggatgaagctgaaagctattattctcagcaaactaacacaggaacagaaaaacaaacactgcatattcttactcatwagtgggagttgaacagtgagaacacatggacacagggaggggaacatcacacaccagggcctgttgtggggtggggggagcggggagggatagcattaggagaaatacctaatgtagatgatgggttgatgggtgcaacaaaccaccatggcaagcgtatgcctatgtaacaaacctgcacatt

SEQ ID NO: 875029 - DNA, 647 bp, Homo sapiens
cagcatcctcatctgtaagatgcaggtgctaaatgatgactgttgttctttcaaatgttaactttctatgagtcacttcttcattgtatgtgtcaagaagcacaacctcgaaagcctgcctttgacaatgcttagaggttagaggatgccaaatgagcctcatcttctttggctactgagttartaaccatccttcatttatctcagggagcaaaggcaggatttccgtgggtgtccaaggtccttactcacagtcaggatgcatggcagtacccttaataactacagattcagaatcacagaagacatttaccgagtatgtattttctgccaaaccctgtgccaggtgttattagaacattacttatgaaatatttggtagtgtggatgaagaggcagcttttcctgcttacacaatacagaaatatgatttcaaaaatctattaaaattttattaatctcagaaggcatgatttctaattgtgtttgatcttacacttgttatgatttaggaattcacatctgagttggttgcatgatgctatagttggcaacatgattctgaccgccaccatcacaaatagaggttagaaaatattacttatgtgaaaataaatgccatttctggcacctaaaacagctctttt

SEQ ID NO: 875030 - DNA, 647 bp, Homo sapiens
cagcatcctcatctgtaagatgcaggtgctaaatgatgactgttgttctttcaaatgttaactttctatgagtcacttcttcattgtatgtgtcaagaagcacaacctcgaaagcctgcctttgacaatgcttagaggttagaggatgccaaatgagcctcatcttctttggctactgagttagtaaccatccttcatttatctcagggagcaaaggcaggatttccgtgggtgtccaaggtccttactcacagtcaggatgcatggcagtacccttaataactacagattcagaatcacagaagacatttaccgartatgtattttctgccaaaccctgtgccaggtgttattagaacattacttatgaaatatttggtagtgtggatgaagaggcagcttttcctgcttacacaatacagaaatatgatttcaaaaatctattaaaattttattaatctcagaaggcatgatttctaattgtgtttgatcttacacttgttatgatttaggaattcacatctgagttggttgcatgatgctatagttggcaacatgattctgaccgccaccatcacaaatagaggttagaaaatattacttatgtgaaaataaatgccatttctggcacctaaaacagctctttt

SEQ ID NO: 875031 - DNA, 617 bp, Homo sapiens
atcatagaaaaaggaaactatagatcaatatgtcttatgaccgcaattgcaaaaatactcggcaagtatttaaaaatcaatttggtaatatataaaaaggaaaatgcatgctgaccaatttggcttcacaaaagaaatgcaaggctgatttaacattcaaagatcaggaatgcatttcatcatattagtagactgaataagaatatatatatatgtgtatatatgtttataatattaatggattcagaaaaaaagtaacacaatttaaaacrtatttatggtaaaactcaccaaaaatccctacaaaatagaagggaaatttcttaatccagtaaatcataaatatgaaaattctccagctaacatcatacttaatggtgactaaacatagtcactttctaagattgtgaagaaagcaagcatgtcctttcttataagaaaaattaataaaaaaatgtaaagactggaaagaaagaaataaaaatgcctttattcacaaatgacatgctattgtttgtacaaaacttcaaagaacccacccacacacaaagaaatcctgaaacttttaatcaagtagaacaacatcacaggatataaggttattagacaaaaataaa

SEQ ID NO: 875032 - DNA, 514 bp, Homo sapiens
ttataatgtacacttcattaaagataaaaaatatgtgctcatcaaaagacatcactaagaatatgtagtcttctgtgaccagaggaattgggagatccacagggaaaatgccaggatacctgggaagctaggaaatgattacagaaatatttctacatggaggccaagatggctgactagcagcagccagtgtgcactgctttcacggagagaataaagagtggtgggttgacactagctcttcaaccggaacatccaggtgaacacattgggattcawcagggaaacagcatgacccacagagaacagagaagagtgagacaggaaaactgcccacctggagtggcccagagccaggggagtcaccacactggggaaacagtgagtaagtgagagtcctcagggacccacacttctaccacttctgctcaggaaatccccgcaaactcccctgctgcggcctccagaccaacacagagaactacgtgggagtctgggcagagccctgctcaag

SEQ ID NO: 875033 - DNA, 514 bp, Homo sapiens
ttataatgtacacttcattaaagataaaaaatatgtgctcatcaaaagacatcactaagaatatgtagtcttctgtgaccagaggaattgggagatccacagggaaaatgccaggatacctgggaagctaggaaatgattacagaaatatttctacatggaggccaagatggctgactagcagcagccagtgtgcactgctttcacggagagaataaagagtggtgggttgacactagctcttcaaccggaacatccaggtgaacacattgggattcatcagggaaacagcatgacccacagagaacagagaagagtgagacaggaaaactgcccacctggagtggcccagagccaggggagtcaccacactggggaarcagtgagtaagtgagagtcctcagggacccacacttctaccacttctgctcaggaaatccccgcaaactcccctgctgcggcctccagaccaacacagagaactacgtgggagtctgggcagagccctgctcaag

SEQ ID NO: 875034 - DNA, 620 bp, Homo sapiens
cctaattgtatccctccccaagccccccctaatccactcacaggccctggtgtgtgatgttccccgccctgtgtccaagtgttctcattgttcaattcacacctatgagtgaaaacatgtggtgtttggttttctgcccttgtgatagtttgctgagaatgatggtttccagctttatccatgtccctgaaaaggacatgaactcacccttttttatggatgcatagtattccatggtgtatatgtgccacattttcttaattcagttgaaaattgatggacatttaggtcggttccaagtctttgctattgtaaatagtgccacaataaacatacatgtgygtgtgtctttatggcagcatgatttataatccttcgggtatatacccagtaatgggattgctgggtcaaatggtatttctactcctagatccttgaggaatctccacactgtcttccacaatggttgaactaatttacactcccaccaacagtgtaaaagttttcctatttctccacatcctctccagcagctattgtttgatgattttttaatgatcgccattctaactggtgtgagatggtatctcattgtggctttgatttgcatttctctgatg

SEQ ID NO: 875035 - DNA, 594 bp, Homo sapiens
tgccagtttggggctgggcctggcaggtccatactctgagtttctgtgtgaagggcaagcagcagcccctgtggaagtaggggtgggggtggttccctggcccctggggtagtgttccagagagaagctcccacacacttggcaaggcagatttcatactgagagttttccactagcattagtgagctaagttccaggctgtctacactcaaaactgtctttttaaggaaagactctaaaacatcaaggtctctgacattttatttttaggtaaccaagaattggggaaaaataatatcaagatatttcaagaatgattggatatgttgtccatgaagctttcaagaagttcataaaacccctaaataattccctgatctgtgaggtaagaactatcctagtggtgaaagctaagtggaaatgctggaaattggctccytccaataaaactaataaattattaaaattaccatgtcccaagggaaatagtagatgataactccacctttgaagatttaaagaaatgatggtggttccctgtcatatcccatttaatttgtgagcctgacctttaaaattccagaaggatcttgg

SEQ ID NO: 875036 - DNA, 646 bp, Homo sapiens
gaccactgcaaaaacatgccaaattataaagaccattgacactgtgaagaaactgcatcaattaatgggcaaactaaccagctaacatcataatgacaggatcaaattcacacataacaatattaaccttaaatgtaaatgggctaaatgctccaattttaattgtgtcttttaagacacagactgtcaaattggataaaggctcaagacccattgatatgctgtattcaggagatcaatctcatgtgcaaagatgcacataggctcaaaataaagggatgcaggaagatctrccaggcaaatggaaagcaaaaaacaaacaaacaaacaaacaaaaaaaccaggggttgcaatcctagtctctgataaaatagactttaaaccaacaaagatcaaaagagacaaagaaggccattacagaattgtaaagggatcaattcaacaagaagagctaactatcttaaatatatatgcacccaatacatgagcacccagattcataaagcaagtccttagagacctacaaagagactcagactcccacacaataataatgggagactttaacaccacactgtcaatattagacagatcaaagagacagaaggttaagaaggatatccaggacttgaactcacctctggac

SEQ ID NO: 875037 - DNA, 578 bp, Homo sapiens
atactgttatgtgtgaatttgatcctgtcattatgatgttagctcgttattttgctcattagctgatgcagtttcttcttagcatcgatggtctttacaatttggcatgtttttgcagtggctgtatatgaaattctgggttgaagcttagtttggctggatatgaaattctgggttgaaaattcttttaagaatgttgcatattggcacccactctcttctggcttgtagagtttctgctgagagatctgctgttagtctgatgggcttctctttgttcttttacatttgctgaggaatgctttacttccaactatgtgatcaattttggaataagtgtgatgtggtgctgagaagaatgtatattctgttgatttgsggtggagagttctgtagatgtctattaggtccacttggtgcagagctgaattcaattcctggatatccttgttaactttctgtctcattgatctgtctaatattgacagtagggtgttaaagtctcccattattatcgtgtgggagtctaagtctccttgtaggtctctaaggacttgctttatgaatctgggtgctca

SEQ ID NO: 875038 - DNA, 593 bp, Homo sapiens
cctatttggaggttattaggggttaggacttcatgaatgtttgaggaacacaatcccataacattgcctacttttaacgttttctcatttttaaaaatgttttttaaaatttttaaaatttttctcatttttaaaaatgtttttagtcattttaaaaactaaattcaataaaytaatttaaatatacttattagaaaattatattatcatatattattttttaaaggtgagtagtctactcctgatgctctacaaagagaaaaatgaacatttggctcaaaaaagtcaggtacagcatttgactgaaaaacatttttcttttaaaaacacagcttaaaattagtaagaaaaaatatcaagctctaaatttaaacagtttttgaaaaaatgtttgatattccttttcgttaagcagatttgttagggaataactgacatacaataattgcacatactaaaagagtacaatttgatgttctgacatatgaatatgcctgtgaaactattatggcaatcaaatcaagataattaatatatccatcacctctaaaagtttcctcatgctcttttataattccctgcttcatccccat

SEQ ID NO: 875039 - DNA, 577 bp, Homo sapiens; identical to SEQ ID NO: 868429

SEQ ID NO: 875040 - DNA, 555 bp, Homo sapiens
ctaaactccagcctgggcaacaagagcggaactctgtctaaaacaaacaaacaaacaaacaaacctgattttaaaaaaagttcttggaataatgtctggcacacagtgaatactcagtaaatattagcttttattaccttttctattctggaagcagaaaaagcatggtaaaaaggtgaaatactttttctcccttttattagaaagtccttgaactttagaaaagggattccctaattatatctaactagctcccttcacctcacccacaattgctctctgggaatcttttcaytccaagcccatttcaagaagcacctcttctgggaagtcttccctgatgcctgacctctcctcttcctcctccacattttctacagcattttgatacctgccatggaatacttctgaatatggccaatacctgctttccagtttctgggtgtctctttccaatcacctaagtcagtggatctcaactaccttcctgtggaatatattgaccctagagctaaacaaagatgttttgctgctgagattaaataatgacattta

SEQ ID NO: 875041 - DNA, 526 bp, Homo sapiens
ttttaatttcattccagataagatttgtattttaatagaggcccttgaggtaattttaggtgatacaatagtcttttaaaatatagttataagtttactttgatgtgaattattgaaaaatgcaaatagacacctaatgtgtaatttcacagatgttactgctttggatgaggctaagtataaagaaaagtcaattttttttaaatgtaaaaaatagaagaaaaagtagttcatagatctggtgaatattggaaaggtagtatgtaaagaactgaagtttgggaaacacagctttaaccctaaggattgaaaaactaggaacatagtaagtactcagtaagtgtctatttatccatttattacaaaaaatgtgttgagctcytactatatttactacgagctagagaaacgatagtgatcaagacagctagatggaatccttgccctaaccaagctacagccattcacatgaaggaacagataaatgaataaatgaattatgaggaagaatggaagggagggaggg

SEQ ID NO: 875042 - DNA, 623 bp, Homo sapiens
cacatattttgtcctacccaattatccaaatccttagtgactattaattactgaagaaaagcaagcatggccaagtcaatgatatatgcaggcactccttgctctagacaggatcataaaaatgactgtatgagctgaaaccatacatagtagtagtcttaataatcaatggggaaaaattatgattgttctgtgacctttaaaatttcctgtcaaaacactgaaatctcttttactgttgtttataaatgtataaggaaattaaaaaacatggtaaaagttttttttagtatgctgtaatttaaarcattagaaatgggacttaaagtgtttaatacttttgtaaaagaacttatgaagaatagtttgagcaatgtttgtcttctcatgtataacttatagtactaagtgagcatttttttctaggctttggtgaatcttgacagcccattctaagtttggatcagcttccaacattttatcctttgcactttcaaccttgtgaagtatctctgagtatccatttagggtaaagatttttaatggcatcagtttctctgggagatcttcatccttttcatcactacaagtttttgcatttctgttggtaacttcaccttcac

SEQ ID NO: 875043 - DNA, 601 bp, Homo sapiens
ctgatgacatttctaacagttacttattaaaactgttttccctttcaggaaagagaatgcaatgtaggtattcattcttagtttaagctaaactttttaaaattctgacaaatgaaaaagtgtcaagacttaatgatttctgctcttaagagcccacagcccacaaaaggagacaaatgtgccaataatttctccatgctttcagagtacagtagtgtccaaaagaagagtggtaagaggagaaaaaccaggactgtggtatgcacaaagccaaggaagaatatgtttcaaggactaaccagactttcttttccagcacaatggcagagtatataccccggataattacagagaaaacaaagacaaagtgaacgcasgaactctgaaatgtaaggattaggactggattttgccgtggagatttcaaacaaatccaatagcaaaaccaaagtgaagatgctaacagaggagctacctgaaactatgatccctcagtgtaaaggtgaacaagaaaatgggcaaagagacaacaatgaaatttgcctactttaaactgaaaaaaattctcccctgaaatttcataacctcaacccacatggat

SEQ ID NO: 875044 - DNA, 631 bp, Homo sapiens
ctggtctattgctagtgagctcatcgaaaagaggttggctagaaggccacggggtgggtgcgtggatgcatgaagccctgccctggggtccagatactgggcatctcctcctagctgtgcactgtccagcctgggcacagtgggcccttcctgaagctattcccaggggatatgctgaactaagttgccacaggacctgcagcctgcccactctcccctaggtgccgccggatggtggtggttgtctctgatgattacctgcagagcaaggaatgtgacttccagaccaaatttgcactcagcctctctccaggtaagctcaaccctgctctggcaagagaatgagggaatgtgtaggtggggcctctggattgtcagcyttccctccccaaggactgtggatgcagtaccaaagaactgctgaagatctctgcacacctgagcatgtgtgcatgtgtgtgcctttttgtgtgagtgaatgtgtgccaggggtacttagatgggggatggctgttgttaaccctggggttgaagactgggcttgtcccaccatggggcaagggcctgatgccagcatggcaccccttggcttgcaggtgcccatcagaagcgactgatccccatcaagtac

SEQ ID NO: 875045 - DNA, 617 bp, Homo sapiens
ttaataagattagagatcactgatatatacaaaatgaagagctataaaaatagtgttacaaagcaaaagttttaagtaaggtccatggataggcttcaggggcaccataaattcctgcatttatatgcaaattgttaaggatgtacattttacaacaacagtgtcagctttcatcagattctcaaaataatttatgataaaaaaaggaattagaaataatgctcgagatggatgaggtactagatgaagaataccacttagaaaactatttaaaaaggtcaacggcagaaatctttcaaagacatatcatgtgttctctattagagatayaaaaatacaacaagtaaactcactgtcttcgtgtcttgggaagaaatcctaccatttccatggcaagttgtaggcgctcaaagtcatgtctcaaatcttctccttccaccgtgaagcaatcctgcttatttaaaataaaagtttaaaaatcaagattatatattttaaaataatgtgggccattcagaaatatggtaatttaggataggtacctgtatgtataaatgcaaattagagctggtagaatagtaagacctagtcaaattcattagacctcttatcttact

SEQ ID NO: 875046 - DNA, 608 bp, Homo sapiens
ccccagtagggactctgggagagctctgatcccacatttcacttctgcactgctgtagcagaggttctctgtgagagccctgcccctgcagcagacttcttcctggacatctaggcatttccatacatcctccgaaatctaggcagaggttcccaaaccccaattcttgacttctgtgcacttgtacagcacagggactctggcccggcccrtgaaactattttttcctcctaggcctctgggcctgtgatgggaggagctgctgtgaagacctctgactaccctgctgtatttcagacttgcatggggcctgcagcccctttgttttggccaatttctcccatttggaaaggctgtatttacccattgcctgtacccccattgtatctgggaagtaactaacttgcttttgattttataggctcctagccagaagggacttgccttgtcttggatgagactttggactggacttttgagttaatgctgaaatgagttaagacttcaggggactgttgggaaggcatggttggttttgaaatgtgaggacatgaggtttgggaggagccaggggtggaatgatatggtttggctgtgtccccacccca

SEQ ID NO: 875047 - DNA, 640 bp, Homo sapiens
ttctttcatttcatcaaaatattccctttcttccttgaaaattctccaagatattttatctatcaaatttgttttctggctaaaaatttcaataaagttattcatttccatgaactcttctaggcggtttttttaaatgtcttttaattggggcttttagcccatttacatttaaggttagtattttgtttgtttgttttgtttgtttttgtatactttaagttctagagtacatgtgcacaaygtgcaggcttgttacatatgtatacatgtgccatgttggtgtgctgcacccactaattcatcatttacattaggtatttctcttaatgctattcctctcccctccccccaccccacaacaggccccagtgtgtgatgttccctgccctgtgtccaagtgttctcgttgttcagttcccacctatgagtgagaatatgcagtgtttggttttctgtccttgcgatagtttgctcagaatgatggtttccagcttcatccatgtccctacaaaggacatgaactcatcctttttttatggctgcatagtattccatggtgtatatgtgccacattttcttaatccagtctatcattgatggacatttggggtggtttcaagtctttgctattgtgaat

SEQ ID NO: 875048 - DNA, 640 bp, Homo sapiens
ttctttcatttcatcaaaatattccctttcttccttgaaaattctccaagatattttatctatcaaatttgttttctggctaaaaatttcaataaagttattcatttccatgaactcttctaggcggtttttttaaatgtcttttaattggggcttttagcccatttacatttaaggttagtattttgtttgtttgttttgtttgtttttgtatactttaagttctagagtacatgtgcacaacgtgcaggyttgttacatatgtatacatgtgccatgttggtgtgctgcacccactaattcatcatttacattaggtatttctcttaatgctattcctctcccctccccccaccccacaacaggccccagtgtgtgatgttccctgccctgtgtccaagtgttctcgttgttcagttcccacctatgagtgagaatatgcagtgtttggttttctgtccttgcgatagtttgctcagaatgatggtttccagcttcatccatgtccctacaaaggacatgaactcatcctttttttatggctgcatagtattccatggtgtatatgtgccacattttcttaatccagtctatcattgatggacatttggggtggtttcaagtctttgctattgtgaat

SEQ ID NO: 875049 - DNA, 640 bp, Homo sapiens
ttctttcatttcatcaaaatattccctttcttccttgaaaattctccaagatattttatctatcaaatttgttttctggctaaaaatttcaataaagttattcatttccatgaactcttctaggcggtttttttaaatgtcttttaattggggcttttagcccatttacatttaaggttagtattttgtttgtttgttttgtttgtttttgtatactttaagttctagagtacatgtgcacaacgtgcaggcttgttacatatgtatrcatgtgccatgttggtgtgctgcacccactaattcatcatttacattaggtatttctcttaatgctattcctctcccctccccccaccccacaacaggccccagtgtgtgatgttccctgccctgtgtccaagtgttctcgttgttcagttcccacctatgagtgagaatatgcagtgtttggttttctgtccttgcgatagtttgctcagaatgatggtttccagcttcatccatgtccctacaaaggacatgaactcatcctttttttatggctgcatagtattccatggtgtatatgtgccacattttcttaatccagtctatcattgatggacatttggggtggtttcaagtctttgctattgtgaat

SEQ ID NO: 875050 - DNA, 625 bp, Homo sapiens
tctctagtgagattggggacctttttgtggattacatcctcacatatgttttccaagttgcttactctctctccttccttctcaagaacgtcaatgactcataggtttggtttctacaaaatcccatatttcttggacattttgttcattttcttaaattcttttttttttttttttgtctgagttgatttgaaraactgatcttgatgctctgagattcttcagcttagtctattctgttgctaatgcttctaatggtattatggaattcttgtgatgaattttttaattccagaagttcagtttggttctttcttaaaatggctatttcgtctttcaactattgtattattttactggattccttgaattccttggattgggtttcaactttctcctgaaccttaatgagcttccttgccatccagattctgaattctatatgtcatttcagtcatttcactctggttaggaactattgctggagagctaatgtactcatttggaggtaaggagacactgtaactttttggattgccagagttcttattgctgattctttctcatctaagaggactggtgttccttgtctttttggatttgctgtcatttggatattgttttt

SEQ ID NO: 875051 - DNA, 624 bp, Homo sapiens
ccaaggacctggagtctctccttttgtgttagtgtgggatgtatcagaataatggtcctcgcagcaggctggtgcttccagtggcatttttctcaggctaatgttaaagttaatttgcattccctgatcccacccagactcttctttccagggkcagtgaggtggaagggggagtgggttgaagctgtcaagaagctctgtagacttgtccttgtataagtggtcttcacatttttcttttactgtcatactttctaaaagaattttgaaaacctatatgcatttgcacatttttaagttgacatctataatatttcatcattaagcagctgcaaatcatgtaatttatggtacattgcccatattaatttttaaaattaaactgacatatgattattgtaaatgtatccagtgggatgtaaatattctacacctcaattcccaccatagtcttatgaagtactgtatgtatgcaaatctatgttagctgacaaacatttaacattgttgcttgctcttcttaaatttcgactttcatttcattccacatactgtattttaacctagtatatcattttaacctattttaaagaaacttattactcaatatcttttccgcagcaa

SEQ ID NO: 875052 - DNA, 624 bp, Homo sapiens
ccaaggacctggagtctctccttttgtgttagtgtgggatgtatcagaataatggtcctcgcagcaggctggtgcttccagtggcatttttctcaggctaatgttaaagttaatttgcattccctgatcccacccagactcttctttccagggtcagtgaggtggaagggggagtgggttgaagctgtcaagaagctytgtagacttgtccttgtataagtggtcttcacatttttcttttactgtcatactttctaaaagaattttgaaaacctatatgcatttgcacatttttaagttgacatctataatatttcatcattaagcagctgcaaatcatgtaatttatggtacattgcccatattaatttttaaaattaaactgacatatgattattgtaaatgtatccagtgggatgtaaatattctacacctcaattcccaccatagtcttatgaagtactgtatgtatgcaaatctatgttagctgacaaacatttaacattgttgcttgctcttcttaaatttcgactttcatttcattccacatactgtattttaacctagtatatcattttaacctattttaaagaaacttattactcaatatcttttccgcagcaa

SEQ ID NO: 875053 - DNA, 657 bp, Homo sapiens
ggggactcaaagcatgtgataccaggaaaacgtgactcctctgccttcttgcatatcaccttctcccaccttcacctccttccctttacagtttaagttccatggtccattactgcaactactcttttgcaaaaaactctgtcatccttgctgcgtttcattcttccattacaggtgccaggcaaaaagactgactccagatcaaaccacctatccrtttctctgctaagatccccaggctgctgactttgcaagaagaaatcttacaaatgtacacatcaattgcactgtaaactaatagtctccatccttaactggttcctcaaaacgacatggtagtcatttagtattttcctaggtggctctctctcctttgcacagtgcttcacagaattcaacgttttcactttcctcaaaatctgacgcctgccttcctccccaacagagaagataatgctattaaggaactccttcaccttctcaccctaaccagtggtatgagtaaatgcctgataactggctctccagatgtcagggtatggggaagtactgatgtatagtatttactaatttccatgatgtaaatatccccactgtggctgaattccagctgttaatgtgaggttaaccaattagcaaaattgctgaaaatttaac

SEQ ID NO: 875054 - DNA, 657 bp, Homo sapiens
ggggactcaaagcatgtgataccaggaaaacgtgactcctctgccttcttgcatatcaccttctcccaccttcacctccttccctttacagtttaagttccatggtccattactgcaactactcttttgcaaaaaactctgtcatccttgctgcgtttcattcttccattacaggtgccaggcaaaaagactgactccagatcaaaccacctatccgtttctctgctaagatccccaggctgctgactttgcaagaagaaatcttacaaatgtacacatcaattgcactgtaaactaatagtctccatccttaactggttcctcaaaacgacatggtagtcatttagtattttcctaggtggctctctctcctttgcacagtgcttcacagaattcaacgttttcactttcctcaaaatctgacrcctgccttcctccccaacagagaagataatgctattaaggaactccttcaccttctcaccctaaccagtggtatgagtaaatgcctgataactggctctccagatgtcagggtatggggaagtactgatgtatagtatttactaatttccatgatgtaaatatccccactgtggctgaattccagctgttaatgtgaggttaaccaattagcaaaattgctgaaaatttaac

SEQ ID NO: 875055 - DNA, 613 bp, Homo sapiens
atttcttgtgagactgggctcattgttgtgaaaatggatttgctttcacaagagtgggttgtttaaagtaggtcagcctcccttctcccttcccttccttttctttttttttttttttttttttttttgagacggagtctcgctctgtcgcccaggctggagtgcagtggcgcgatctcggctcactgcaagctccgcctcccgggttcacgccattctcctgcctcagcctcccgagtagctgggactacaggcgcccgctaccacgcccggctaattttttgtatttttagtagagacggggtttcaccgtgttagccaggatggtctcgatctcctgacctcgtgatccgcccgcctcggcctcccaaaktgctgggattacaggcgtgaaccaccgcgcccggccccttcccttccttttcacatgtgcttgcttccccttccacttttctgtgatgctgtgaagcaacacaaggtccttgccagacaccatcaccatgacgttggtcatcccagactccagaatcatcagccaaataaattcttttctgtatatattacacaatcttaggtattctgttacagcaacagcaaaatggactaacacaag

SEQ ID NO: 875056 - DNA, 590 bp, Homo sapiens
gtatatattacacaatcttaggtattctgttacagcaacagcaaaatggactaacacaagagataagaaacaatttatggccagaacaaattgttctgtgttgctgttattttctactttcaggttcttgatattagaacctgccaggcataataggttcagctagaccacataaacctccactaagtagttgttgaaaactaacctggatttaacagatactacctgtccggatagtctgtgctgtgttgttggtgccacaaggtattttggcaggtgaaaaggcaattattttgttaaccaagaattaaagccgtatttttgtctgtatttcaaaagyagttttaggaggcggacagcttaatatatttgttttatattatataaagtattgttagtacaattgtaattatatgttaatatgcatattcatattcacttaaaaaaatggaaagataataagcagtaaccagggctgcatatcaaatgtaaataaatgacaaattcatatacatggattcatttttttaagataattttgttttaaaggtgatatatgctttaagagctttaatattaaaaatatgttt

SEQ ID NO: 875057 - DNA, 585 bp, Homo sapiens
ttctacttcctccctttacagatggcaaacatgggcctcagagaggagaagggccagagccaggattccatagagtcaggttctgcagagaagcagcaccaagacaatgtgcatgtatatatatacacctctctctctctttctctctctatttacatataaagagattcattttaaggaattggctcatgtgattatgaaggctggcaagtccaaaatcttcagggtgggctggcaggctggagacccagggaagagttgatgctgtagttcaagctcgaaggacatcaggctgaagacccagaaaaaagccaatgctatagctcwagcccgaacgctgtctactggcagaattccttcttactgggaggagggtcagtcttctgttctattcaagccttcaactcgtagcatgaggtcaaccccgttaggaaggccagccttctttactcaaagtctaccaatcttaatgttaatctcatcccaaaacaccctcacacaaatatcccgaataatgtttgaccacacatctgggcactatggcccagccaaggggacacataagatttgaagtggaaatggaat

SEQ ID NO: 875058 - DNA, 669 bp, Homo sapiens
cacaagtatcaatagctgatggatcatgtggaagaaaagatatcagagattgaaaatcaactcaatgaaataaagcaagaagacaacgttagagaaaaaagagtgaaaagaaatgaacaaagcctccgagaaatatgggactacatgtaaagaccaaatctacttttcattggtgtacctgaaagtgatggggagaatggaccaagttggaaaacactcttcaggatattatccaggaggacttccccaacctagcaagacaggccaacattcaaattcagaaaatacggagaccaccacaaagatactccttgagaagagcaacccaaagacacataataatcagattcaccaggggtgaaatgaaagaaaaaatgttaagggcagccagagagaaaggtcaggttacccacaaagggaagcccatcagastaacagcagatctcttggcagaaaccctacaagccagaagacagtgggggccaatattccacattcttaaagaattttcaacccagaatttcatatccagccaaactgagcttcataagtgaaggagaaataaaatcctttacagacaagcaaatgctgagagattttatcaccaccaggcctgccttataagagctcctaagggaagcactaaacatggaaaggaacaactggaac

SEQ ID NO: 875059 - DNA, 646 bp, Homo sapiens
aaaacagagaagaaacaaaacaactttacccgaattaatgagatacccacaagaaacaaaacattagtagtaaacccaagtgcttataaaatttaaagcatgttacacatttccaatgccttaaaaaacttagttataataaacctctcaaatagaacaaagtttagccatgctgtctagtgatggatgcagattctgggacaaagtaacttctatgaattygatgaatgtggtaatggcatgatggatacttggaaggcttgcttcttccaagtctgtaaattgaagtcaatgactctaacttttaaaatcgtaaccactttttgactaggttatgttaatggtttcccacattgtgtagcgtactgaaaagtctcaagctgtacaaaggatttgaggaagattttaggccccacagctctatttccactgggttgattttgctaccctgtttaactttattaagttaatagacatagtcttgtctagaaagagaatataccctaccttactgttaaaaaaggaaatcttactcttccccatccttaatatagccacctattagagtactggagtttccatccatagatttggtattttttaaattaaacttataaacctgggtttctaggctcaatatttgata

SEQ ID NO: 875060 - DNA, 646 bp, Homo sapiens
aaaacagagaagaaacaaaacaactttacccgaattaatgagatacccacaagaaacaaaacattagtagtaaacccaagtgcttataaaatttaaagcatgttacacatttccaatgccttaaaaaacttagttataataaacctctcaaatagaacaaagtttagccatgctgtctagtgatggatgcagattctgggacaaagtaacttctatgaattcgatgaatgtggtaatggcatgatggatacttggaaggcttgcttcttccaagtctgtaaattgaagtcaatgactctaacttttaaaatcgtaaccactttttgactrggttatgttaatggtttcccacattgtgtagcgtactgaaaagtctcaagctgtacaaaggatttgaggaagattttaggccccacagctctatttccactgggttgattttgctaccctgtttaactttattaagttaatagacatagtcttgtctagaaagagaatataccctaccttactgttaaaaaaggaaatcttactcttccccatccttaatatagccacctattagagtactggagtttccatccatagatttggtattttttaaattaaacttataaacctgggtttctaggctcaatatttgata

SEQ ID NO: 875061 - DNA, 643 bp, Homo sapiens
tcagaactgcagacatcaaaaataatatttaggaacaatttcctgttgaggttttgaatctatggaggttaaaaaaaaacttgtcaaaatcactgacatagattaccaataattttcaggagatgaagtaaaaggagttctgaggcttgctaagctatgartcttatgttcaagattctttctagaatatatattactaaaaaatattttcttaaattatttttattgtatacaacagttagtattattggtagtattaagccaaacactcaatagtctacttcaatattatgtataacagacaaatagataaataatataatatacagcccaaagtccttttaaagtgtgataacatataaattaacaataaaaccaatcactactttccttgcttgtgaagagatttccagttgcaaatagctaacaacaaagtaaagctgatagataatatagaatggaaaatcagcaaataaagcatactgcaattattgacagtggaacaaatgtggtgaaggctatgaatgatttaggaatcacaagtacacaatgttttgttcacaaccttccattgtatcttcagaaataataaaaaattttgatagctgggatttattgacaacagcagaaaaactgtcaatca

SEQ ID NO: 875062 - DNA, 625 bp, Homo sapiens
ctatcttatggggttcttatgaggcttagataagtaaaaagtacttagaatagcacttggcaaaaagaacttaatgagcggtagctatgattactgttgttagtggttaatgtggtttggcactgtgtgcccacccaaatctcatgttgaactttaatccccagtgttgggggagggacctgatgggaggtgattggatcatggggcaaatttcccccttgctggtctcatgatagtgagtaagttctcatgagatctggttgttaaaaagtatgtagcacctcccccttcgyggtctgtcttcctcctactccgacacgtggagaaggtgcttgcttccccttcacccttctgccatgactgtaagtttcctgagtccttccaaccatgcttcccatatagcctgtggaactgtgagtcaattcaacctcttttcttaatacccattctcaggtagttttttatagctgtgtgagaatgaactaatacggtggtccattgtagcagggacataagtttcaaaattatggaagaaaaagactgaatagtcagaataagtggatgacagatatgatttcatcgaaaacagatcccattgtggtatctcaattaggtctttaaagtt

SEQ ID NO: 875063 - DNA, 666 bp, Homo sapiens
gcaaaggacatgatctcattactttttatggctgcatagtattcaatggtgtaaatgtaccacatctttatccagtccaccattgataggcatttaggttgattccatgtttttgctacgtgaatactacctcaatgaacagacacatgcatgtgtccttatgatagaatgatctatattcctttggatatatacccaataatgggattgctgggtcaaatgttaattctgttttaggtttttttcttttctttatatagatgtaaaatacagtttactttaratttttgttcccattaagaccagaattttaaatgcagccttaagctaagaccctaatatttttggttttttttttttttttcgattttttttcactcatggaattttttatggaataagtaaataaactgtgtttgaataaagtgttgaaattttctgattttataggtaagacaatcagagaagtcactaactcatatcacatggctaggtaggaattccaaatggtcttgatattgcggtatcattactctgaattaattccaatctccatatcattaacaggcatcaagaaacacaaatccatggctgatgttaattttacattggttactgagtttatccttttggaactgacagatcgtgctgaactgaagatggtcc

SEQ ID NO: 875064 - DNA, 631 bp, Homo sapiens
attccagtcctggttttgccactggccagatgaggcaaatcacattacttggtgtcagtttccaattctgccaactaagagggtcatttcaatgccttccaaagacccttttatagctctataatatggtatcttttcctttacacaatgttcaataccaaattggcaacacaagtcacagaagtttaaatctcaggtgttcaggagcctcttcggaggaccaattcttctctctgtcccaggaatctgtagggrgtagattgggcaggctttggggcctagcaatgctttgtaaagcctccctcttgattgcttggccaatctgactgcatccctcataagcattttaggcagtgacatgctgccttgaaattcttcctttcagtagaaaagtcagatctgtcaggaggagaataactccctgcttttgatttcttgttaagaacccaaggcgggaaaaaaatgcaaggagattaaaaaaacaaaaacaaaaactttggggcaaaggaaaatacatactctagcagctggctggccaaggtgcccgagtgaaaagcacccacaattctgcacactctgactataagtttttctctgtattaaggtgtctatagctccacccatgaacagc

SEQ ID NO: 875065 - DNA, 550 bp, Homo sapiens
aactttggaaagaaagaaaaatcctccatcatttactaattgggtgagttacttgcggttagcagttgagctgaacacaattcccccatctctggcaactactcccaatacacacgatacccggtgggccccgatgccaaggccaaagggggattcttaacccagactgagccagccagatcttcttgtgcgcccaagtatgcatatgcccgtgttcgtgtgtgtgcgcgcccgtgtttgttcgcgtatgtgcctgttcgcgtgtgtgcacgagcgtctgtgtatgcgcgcatgttcgtgtgtgtgtgcgckcgcgcattggtacatctaatacctgaaagtccccagtacctaagtaactcctgggagtaaatgagtagatgcattcaggaacaactgaattaccaacgtttctggattacttcgcaacgaaagggccggtgactctactccgggctggccctcctcctgccacatcagattttccagaaattgctccgaagcacacttcagtagctaagcagggaaagttaaatgaaggaattctttg

SEQ ID NO: 875066 - DNA, 550 bp, Homo sapiens
aactttggaaagaaagaaaaatcctccatcatttactaattgggtgagttacttgcggttagcagttgagctgaacacaattcccccatctctggcaactactcccaatacacacgatacccggtgggccccgatgccaaggccaaagggggattcttaacccagactgagccagccagatcttcttgtgcgcccaagtatgcatatgcccgtgttcgtgtgtgtgcgcgcccgtgtttgttcgcgtatgtgcctgttcgcgtgtgtgcacgagcgtctgtgtatgcgcgcatgttcgtgtgtgtgtgcgcgygcgcattggtacatctaatacctgaaagtccccagtacctaagtaactcctgggagtaaatgagtagatgcattcaggaacaactgaattaccaacgtttctggattacttcgcaacgaaagggccggtgactctactccgggctggccctcctcctgccacatcagattttccagaaattgctccgaagcacacttcagtagctaagcagggaaagttaaatgaaggaattctttg

SEQ ID NO: 875067 - DNA, 640 bp, Homo sapiens
tatagagttgcaatagtgcttgtagatttgcaaattctggatacaagtcttttattagatatgagttttaattatcttttcattttctttatggtgtctttgcagtacaaaacatatttgaattttgatgaggcctaatttttcaatgttttttcttttatggatcatgcttttggtgtctgagctaaaatgtctctgtatagcccctagctctcaaaaattttcttctgtgttttcttttaaatgctctattgtttagctattacatttcagcctaagatctattttaaggtgtgtgtgtgtgwgtgtgtgtgtgtatggtgtaaagtgagagtctaagttaatctttctgcgtgtgtatactgaatgtcctctgcaccatctgctgaacacactgtgtttcccataataaattgccaggcagttttgccaataattaattgagtagacaaataaaacttagttttatacttttcatttttgtctgttatttatatactacccttatgctagtattacactgttttgataactgtagctttatggtatgtattgaagttggaaagtaaaagtatttgtaccttgttattacttaaaaaaattgttttggcaaattgatatgctttgtacttccatatat

SEQ ID NO: 875068 - DNA, 609 bp, Homo sapiens
atttggcgtgatcctgttctgagagcttataatgccaggattggatgttaccacaatgaaagtggccttgataagatccctttgatttacacagtacagatttcaaaggcatagataatctaagccacagccacatgccgtattcttttatggtaattaagagagagaatggtttatcttatgtccctcacatggagttcaccaagcagatgctccagtgaattccttgtgcatcacgttctctgccccactgcctccagtcacgacctgaacctgtgtgcctgggacctctaaacctagtcccctagggagaaaasccctccctccacagaagcaccatgttgggtatgaggcaggaccgttttccttcactgccctgttctttcttctccacgctctaccaacataagaccttaggactgtgttacaggcaagctagagaaaacggcatgataggagaaaaaagctagaacgtgacataaatatggactctattccggttcaagaaagcaacatttcacaggataacgtggtttctgaccttacttcattgtcctctgcctctagtcacctcttgaaagaacaactccaggttctaaccactgctgg

SEQ ID NO: 875069 - DNA, 609 bp, Homo sapiens
atttggcgtgatcctgttctgagagcttataatgccaggattggatgttaccacaatgaaagtggccttgataagatccctttgatttacacagtacagatttcaaaggcatagataatctaagccacagccacatgccgtattcttttatggtaattaagagagagaatggtttatcttatgtccctcacatggagttcaccaagcagatgctccagtgaattccttgtgcatcacgttctctgccccactgcctccagtcacgacctgaacctgtgtgcctgggacctctaaacctagtcccctagggagaaaagccctccctccacagaagcaccatgttgggtatgaggcaggaccrttttccttcactgccctgttctttcttctccacgctctaccaacataagaccttaggactgtgttacaggcaagctagagaaaacggcatgataggagaaaaaagctagaacgtgacataaatatggactctattccggttcaagaaagcaacatttcacaggataacgtggtttctgaccttacttcattgtcctctgcctctagtcacctcttgaaagaacaactccaggttctaaccactgctgg

SEQ ID NO: 875070 - DNA, 645 bp, Homo sapiens
ggtttttatgaaagtaaatattatattatttcttttgaagcatttgaatattatttaacattttgagaagggactattttgttgttgtttcttggaacacctggtttgcttcaaatgatgaaatgttataccagtagtacatcacaattgcacaactgccactattaattggcattccttcaayaacttagggggatctcatcctagccacaacaaactagaaaaatctctcttcccaccattattattgctgctgaacacttgtcggaacactgcttttctatttcactgatgtatccccttccaattactgtggctattttgttgttgttttcccagggtttctacattattactactcaacaggcctgaggttttcctcagcacttttcggaacaagaaatttcagttcactgtgagaagcttaatagtaataaaactgtgctctcagaactattcatctttcttatgcttaatgtttcccgttagggttctcactagatgaatatgatgtggcttttaaaatccattagctttccaacagcattcccttttctttcttgtattcaaatcatttccacaccattatcttctgggagtggcaccagtaacaagggaattagctcttaactgagtttctgaaat

SEQ ID NO: 875071 - DNA, 525 bp, Homo sapiens
ttacatggcaggagcaggagcaggaacaaaagagtcagggaggtgctacacacgtttaaacaaccagatctcatgagagcttactatcaccatgatagtaccaacagggatggtattaaaccattcatgagaaactgccccaatgatccaatcacctcgcactaggccccacctccaacattgggaatgacaawtgaacatgagatttcggtggggatgcagattcaaaccatcccatctattatgcctcaataaagctgagaaaatgcattaaatggcagagtcacaaaggaaaccaattatactggcaattatcaatagatttaaaatattttgatatattagtgaatatggttcttaatgccttcaataactcagctaatgatagagctaatagctaatttcagattaaaaatttgtataaataatatttttatatatctataataactacgatgtataaaatatacaatttctattaatggggaagtcacagatacttgttgcctttatttgtaactgaag

SEQ ID NO: 875072 - DNA, 525 bp, Homo sapiens
ttacatggcaggagcaggagcaggaacaaaagagtcagggaggtgctacacacgtttaaacaaccagatctcatgagagcttactatcaccatgatagtaccaacagggatggtattaaaccattcatgagaaactgccccaatgatccaatcacctcgcactaggccccacctccaacattgggaatgacaattgaacatgagatttsggtggggatgcagattcaaaccatcccatctattatgcctcaataaagctgagaaaatgcattaaatggcagagtcacaaaggaaaccaattatactggcaattatcaatagatttaaaatattttgatatattagtgaatatggttcttaatgccttcaataactcagctaatgatagagctaatagctaatttcagattaaaaatttgtataaataatatttttatatatctataataactacgatgtataaaatatacaatttctattaatggggaagtcacagatacttgttgcctttatttgtaactgaag

SEQ ID NO: 875073 - DNA, 627 bp, Homo sapiens
aaagggctagttagtaaatatttttcattttaaatgactagaaggtctcttggttgcaactactcaaccctaccgttgtatcacaaaagcagctacaaatagtgtgtaaacaaatgagcacggctgtaatccaataaaacttgatttataaaaagaaacagcaggctggagttacttcatgggccatagtttgctggcccctggtctagsggaagcaggggccaactataaacccgctttaaactcccttcaggctagaaagcaaagcaagtccctattgccccacatcatggcccccacaagaaacaactgcaggttctcttcattttgattacactttcgtgtctcagcctaaaagccacttccttgggaagcctttccaactccctaggtctgggttgggtgtccatcttctatatgcctatggtgccactcacttgctccatcacagcaccgagtccagtgtgacatgagtgactaggtggtcgtctttcttagagagggggacaagttctgtcccctccaggccccatccctggtacctggcacagggtctggtgtacaacaggccactgagagcattgcttccgtttttcccatttccgcatccatttcagtggccttgag

SEQ ID NO: 875074 - DNA, 637 bp, Homo sapiens
ttctctattctgttccattggtctatatgtctgtttttgtaccggtaccatgctgttttggttactgtagccctgtagtataaagtagggtagtgtgatgcctccagctttgttcttttacttaggattgccttggctattaaggctttttggttcgatatgaatttttaaagtttttttttctagttctgtaaagaatgtcactggtagtttgatatgagtagcatagaatctacaaaatgctttgggcaatgtgaccattctratgatattgattcttgctatccatgaatatgtgatgtccttccatttgtttgtgtcatctctgatttctttgagcagtgttttgtaattctcattgtagagatctttcacctccctcgttagctgtattcctaggtattttattctttttgtggcaactgtgaatgggattgcattgctgatttggctcttggtttggctgttgttggtgcctaggaatgctagtggtttttgtatgttgattttgtatactaaaactttgctgaagttgtttatcagctgaaggagcttttgggctgagacaatggggttttctcaatatagaaaccatgtcatctgccaacagggaagtttgacttcctctcttcctatc

SEQ ID NO: 875075 - DNA, 565 bp, Homo sapiens
acataacatcctggacatgaggcacttttacataaatgagtcagttggcccaccaattttcagtgctaccactgtttagtgggtcagtgaatcagatttgtcctactaggcactacagggtaatcactccttatctgcttggagggaccttttggagaaactgacatactcaattatcttacgggtactgtgtcctggaccctggatgctctgccaacagggagaaatatgttgagttcccccaggcccttagtcccagatgtatcttatgaagcagctcagggaagactttgctttctaagctcctcaattttaggctaggaattcatggcaacacttgacaaaaacaacacaatgcagcagccatcaagcagcaagtgcaacaacaaccagccatrctttcccagtgagtggctgctgtctgtcagatccagttcgtaaaccaagagtagcttgaagacataacatctccctctggtgtcaaactcccctgttccaattgttttaaaataaacccagggtttgcatggcatatggtaaaacatgcagacgtggaaatgactgt

SEQ ID NO: 875076 - DNA, 640 bp, Homo sapiens
gcagttttccagacctgtaaactcaaatttcacttacatcttttctgtctccccagtaaaactagaattcacagaatgataaattgaaaatataaaacgtcaggagggaaagtggaaagggagaagaaaaatgaccaattttggatgccaatgcatgccattttgacatttatccacttaatcaatgaatatttgttaagtataaaataggtttgtttcatgmaatttatcttacttaataaaagtaataacttatctgtttatttaaatgcaattccaggaaatcttatggttctatagtaactactcaattaatcaaattacttgaaagaagaaacattctaattgattaaatttaaattagtgggatttcaggagtcgcattagaagctttttttaaagcaaatttataattacattggatagcctatttctcatatgtttttaggagaaatcatttttatcaagcacaaattttacgtccagattgtgaaccataatgaagataatatatcacagaggctaagaacttcctttccttcaccacacctggttccaggcctggcttaggtagtcagtagctgtctcatcttaacttatttaattttaagccactcagcttatttaattagaataatca

SEQ ID NO: 875077 - DNA, 640 bp, Homo sapiens
gcagttttccagacctgtaaactcaaatttcacttacatcttttctgtctccccagtaaaactagaattcacagaatgataaattgaaaatataaaacgtcaggagggaaagtggaaagggagaagaaaaatgaccaattttggatgccaatgcatgccattttgacatttatccacttaatcaatgaatatttgttaagtataaaataggtttgtttcatgcaatttatcttacttaataaaagtaataacttatctgtttatttaaatgcaattccaggaaatcttatggttctatagtaactactcaattaatcaaattacttgaaagaagaaacattctaattgattaaatttaaattagtgggatttcaggagtcgcattagaagctttttttaaagcaaatttataattacattggatagcctatttctcatatgtttttaggagaaawcatttttatcaagcacaaattttacgtccagattgtgaaccataatgaagataatatatcacagaggctaagaacttcctttccttcaccacacctggttccaggcctggcttaggtagtcagtagctgtctcatcttaacttatttaattttaagccactcagcttatttaattagaataatca

SEQ ID NO: 875078 - DNA, 647 bp, Homo sapiens
gtcactgcaaatgccattaattcattcctttttatggctgagtagtattccataatatattccatatatatatattccacagtttctttatccactcgttgattgatgggcatttgggttggtttcacatttttgtaattgtgaactgtgctctataaacatgtgtgtgcaagwatcttttttgtaaaatgacttattttcctctgggtagacacccagtagtgggattgctggatcaaatggtagttcatcttttagttctctttttttgagatggagtcttgctccgtcatccaggctggagtgcagtggcatgatcttggctcactgcaagcttcacctcctgggttcacaccattctcctgcctcagcctcctgagtagctgggattacaggcgtctgccaccacacctggctaattttttgtattgttagtagagatagggtttcaccatgttagctaggatggtctcgatcccctgacctcgtgatccacctgcctcaacctcccaaagtgctgagattacaggtatgagccaccacacctggccctacttttagttccttaaggaatctccacactgttttccataatggttgtactaatttacattcctatcagcagtgtagaagtgtttcctgttcac

SEQ ID NO: 875079 - DNA, 647 bp, Homo sapiens
gtcactgcaaatgccattaattcattcctttttatggctgagtagtattccataatatattccatatatatatattccacagtttctttatccactcgttgattgatgggcatttgggttggtttcacatttttgtaattgtgaactgtgctctataaacatgtgtgtgcaagtatcttttttgtaaaatgacttattttcctctgggtagacacccagtagtgggattgctggatcaaatggtagttcatcttttagttctctttttttgagatggagtcttgctccgtcatccaggctggagtgcagtggcatgatcttggctcactgcaagcttcacctcctgggttcacrccattctcctgcctcagcctcctgagtagctgggattacaggcgtctgccaccacacctggctaattttttgtattgttagtagagatagggtttcaccatgttagctaggatggtctcgatcccctgacctcgtgatccacctgcctcaacctcccaaagtgctgagattacaggtatgagccaccacacctggccctacttttagttccttaaggaatctccacactgttttccataatggttgtactaatttacattcctatcagcagtgtagaagtgtttcctgttcac

SEQ ID NO: 875080 - DNA, 639 bp, Homo sapiens
aagaaacacttttctatcaagaaaatgccctagggagataaattgagaatctcttaattgctcttaatccaggaaatcacgagaaatattctactaaaattaaatataaacttgatgctgtttctcttgttttaaatgaaaaacaaaccataattctacataaaatttaaattgcccatggaaataaggcccatcagcttctctgaggcaacaatcttttcttgaaaattagatccaaaaaaattttttagagatatgtagaggcgtaaagtatacagaaatatatcattcaatccatttaaacttcatctgtttttccaaagtaggttagaatatatttgtcagccagccaatgatgaagaaaatatgtcctacagctacaataaggatatgttttgactagaccatcttgtttttttkgagatgcgagacagtatgcttttcttatacaccatctttttaaatgattggtgagtagctaagactgtgaattctgcctgactgggaccagtggtatgcaattttagcatgtgtattatatattttctgtgtgtaagactaattctaaatttgatgcaccaaaatacctgcttccaattttgcctttaatttattagaatgtgtaagagagtggctgtc

SEQ ID NO: 875081 - DNA, 618 bp, Homo sapiens
acaattattatgtattattataattcctcttgaacctgagtttcaaccatctttcaaaatggggaaaatagtaatcacacatacatgcacacacatgcaaacaatgtatgcactcatttattattcaacaaattttattgaacatctactatgtttgagcactgttctgcattctacagatagagctgtaaatcaaacagttgtaattctgttaacatgcagcagcattaaatctgattatgtatgcattaagttgtgcataaaattgtgataaaatctcattgtatatgcataaaaatgtatgcagcatagtatgaagcatactttaagtaacaaaagcaaccactgagaaaacactagactgaatactagaacagcctatttcaacaatcagaactacatttacaaacattcaaacccctcagtggacctaggattcagtatgaccctgaaatggtatttgtatgtaargattaaagtctgttagttgtactgttttataaatacacataaacacatatataaatacatatacatatacatgtaaaagttctgtaatatatgctctataacacatatatgttcatatatgtatatgcatatacagagatataattt

SEQ ID NO: 875082 - DNA, 578 bp, Homo sapiens
ctatggctagaatttttctttttaaaataagattatgttttaaatatttatatcaaagaaatatgcctcgtatgatcttcacaaaagtatttgatctataactcataaaagaactataaaatgtgtaagaaactcctrttttatctttttattgtcattgttttcagtgttatcatactggaaaaatattatgggcagtatacatatttttccttaaagggagatttgaaaataaataaatcaagcaaaaaagaaacttctagtcatgattgtttctccctatttttttaagttttagaaagctgtaatttggaagaaatgctggaatcttattttacatatagtctcttcctgaagttctagagttttgctatcaatgaaactctggaaaaaaaaaaccaggatgtctaagatggtgtaaaagaaagtctcagctcttgtttcccacagaaaaaacaatttagcaatgatacatagaccaaaatacctttgtgagaattctagaatccaggtaagaagctgaagtaccctaggcaagcaaaaagacaagaataaatatatttaaatggctaagaaga

SEQ ID NO: 875083 - DNA, 578 bp, Homo sapiens
ctatggctagaatttttctttttaaaataagattatgttttaaatatttatatcaaagaaatatgcctcgtatgatcttcacaaaagtatttgatctataactcataaaagaactataaaatgtgtaagaaactcctattttatctttttattgtcattgttttcagtgttatcatactggaaaaatattatgggcagtatacatatttttccttaaagggagattygaaaataaataaatcaagcaaaaaagaaacttctagtcatgattgtttctccctatttttttaagttttagaaagctgtaatttggaagaaatgctggaatcttattttacatatagtctcttcctgaagttctagagttttgctatcaatgaaactctggaaaaaaaaaaccaggatgtctaagatggtgtaaaagaaagtctcagctcttgtttcccacagaaaaaacaatttagcaatgatacatagaccaaaatacctttgtgagaattctagaatccaggtaagaagctgaagtaccctaggcaagcaaaaagacaagaataaatatatttaaatggctaagaaga

SEQ ID NO: 875084 - DNA, 578 bp, Homo sapiens
ctatggctagaatttttctttttaaaataagattatgttttaaatatttatatcaaagaaatatgcctcgtatgatcttcacaaaagtatttgatctataactcataaaagaactataaaatgtgtaagaaactcctattttatctttttattgtcattgttttcagtgttatcatactggaaaaatattatgggcagtatacatatttttccttaaagggagatttgaaaataaataaatcaagcaaaaaagaaacttctagtcatgattgtttctccctatttttttaagttttagaaagctgtaatttggaagaaatgctggaatcttattttacatatagtctcttcctgaagttctagagttttgctatcaatgaaactcyggaaaaaaaaaaccaggatgtctaagatggtgtaaaagaaagtctcagctcttgtttcccacagaaaaaacaatttagcaatgatacatagaccaaaatacctttgtgagaattctagaatccaggtaagaagctgaagtaccctaggcaagcaaaaagacaagaataaatatatttaaatggctaagaaga

SEQ ID NO: 875085 - DNA, 702 bp, Homo sapiens
ctttttttaatatatgttctcagcattagagctgtgtccaaaccatccctgctgacacatccatgacagcctaggataaataagcctttgagaaactgtctgaggagtgacatgggagctgccaccagaccttcccagggagctccttgacttcccatgcccactaccttcccaccataaaggtgggcccatttgcttttgattttgaaactaaagcaaatttagtttacagaagccatgtctcagggtggaaaatagctcatctctactggaaaacactgacwggccattcaattcatcactgagcaaaaatcagcatgagagtatccaaaatgaagcggcagaaggaaggaattcacaggcacatcaggaaaggtcgtgtggcagcagcgtttgctccgcagcccgagaactccctccagaccagcaagaagaaatgaaggacagtcagccggcactgccactcagaggacttggtgcaaggagaagccgcggccagcactggtcctattgcccatgctccagtagcttctgcaagctatgggatcaccagtcccattgctaatacgggttagcataaacataccttatccaaacagagaagaaaagacacagagtatgtataaatacatattatagattcatgatacgtaaagtgtgtcgataacctaaagatttctttgccaggcatggtggttcacg

SEQ ID NO: 875086 - DNA, 702 bp, Homo sapiens
ctttttttaatatatgttctcagcattagagctgtgtccaaaccatccctgctgacacatccatgacagcctaggataaataagcctttgagaaactgtctgaggagtgacatgggagctgccaccagaccttcccagggagctccttgacttcccatgcccactaccttcccaccataaaggtgggcccatttgcttttgattttgaaactaaagcaaatttagtttacagaagccatgtctcagggtggaaaatagctcatctctactggaaaacactgacaggccattcaattcatcactgagcaaaaatcagcatgagagtatccaaaatgaagcggcagaaggaaggaattcacaggcacatcaggaaaggtcgtgtggcagcagcgtttgckccgcagcccgagaactccctccagaccagcaagaagaaatgaaggacagtcagccggcactgccactcagaggacttggtgcaaggagaagccgcggccagcactggtcctattgcccatgctccagtagcttctgcaagctatgggatcaccagtcccattgctaatacgggttagcataaacataccttatccaaacagagaagaaaagacacagagtatgtataaatacatattatagattcatgatacgtaaagtgtgtcgataacctaaagatttctttgccaggcatggtggttcacg

SEQ ID NO: 875087 - DNA, 620 bp, Homo sapiens
attctcagtaaactatcgcaagaagaaaaaaccaaacaccacatattctcactcataggtgggaactgaacaatgagatcacatggacacaggaaggggaatatcacaatctggggactgtggtggggtgggggcaggggggagggatagcattgggagatatacctaatgctagatgacgagttagtgggtgcagygcaccagcacagcacatgtatacatatgtaactaacctgcacaatgtgcacatgtaccctaaaacttaaagtataataaaaaaaaaagtgcttataaaatatgagaacagagcaacggtaagtgcaatcttctataaacaaagaatttaataaaagagacggaaataaaaataactttaaaaagttaaatgtttttcatttaacttttgtttttacccaatttaagtgtaaattcctggtaccaaaactagattacaatattgtgtaatatacaatagacaaagtaaatttttagaaaagcattactacaattaattatgaaggtttaatgcagaagttctggattactaatatccagtgaatatattccattcataatttctaaaaactgctttttaaaaaaaatcaaagccatttacttct

SEQ ID NO: 875088 - DNA, 620 bp, Homo sapiens
attctcagtaaactatcgcaagaagaaaaaaccaaacaccacatattctcactcataggtgggaactgaacaatgagatcacatggacacaggaaggggaatatcacaatctggggactgtggtggggtgggggcaggggggagggatagcattgggagatatacctaatgctagatgacgagttagtgggtgcagtgcaccagcacagcacatgtatacatatgtaactaacctgcacaatgtgcacatgtaccctaaaacttaaagtataataaaaaaaaaagtgcttataaaatatgagaacagagcaacggtaagtgcaatcttctataaacaaagaatttaataaaagagacggaaataaaaataactttaaaaagttaaatgtttttcatttaacttttgtttttacccaatttaagtgtaaattcctggtaccaaaactagattacaatattgtgtaatatacaatagrcaaagtaaatttttagaaaagcattactacaattaattatgaaggtttaatgcagaagttctggattactaatatccagtgaatatattccattcataatttctaaaaactgctttttaaaaaaaatcaaagccatttacttct

SEQ ID NO: 875089 - DNA, 643 bp, Homo sapiens
gtgtacataattaaatgtgtattcatgcaaagaataaattgggttcaaaacaatctggttgttaatactttggtctatatatcaacgggagttagttttcccatactcttattttattttttcatccctaggcaatccagtattgccagaaaaataaacatgagcatgctaattggctttactgcaaatatatgtctycagcttcagctgggattccatggttacttggaaatcatgtgttgtccctagtcttttccttctcatgcttcccacagcagcaatacactttaaatctttttttctctagtcttctgccctaccatcttgaagcatcattcttgccaataaagaaaacagataacacagaatgttgattttccttcagcctctcttacaacatcgatagtagcatccatcttttactcaattcatcagaacagcaactaacaatgtgattcttcatttattatctgccatgtgccaagtgctacgctaaacactttacatataataagtaatttggatcccacaataatcttataagtatttctggttctactttatagaaaagtgaagctcagaggggctaaatgatttgtttggggttcttatctaatcaatggtaaaaaacagatttgaatcc

SEQ ID NO: 875090 - DNA, 550 bp, Homo sapiens
gctctagacttgtcagatgaaaccttataaaccaatagagactgagggactattttcagtattcttaaataaaagaaattccaactaataatttcatatcctgccaaactaagcttcataagtaagggagaaacaaatttttttgaggcaarcaagtgctaagggaatttattactgtcagaccaaacttatgagaaatccttaagggagttctaaacatggaaatgaaagaatgatacctgctaccacaaaaatacatttaaatacataactcataggccctataaagcaatagaaaccacaaagcaaacagctaacaagttcatgataggttgagacctcacatgtcaatattaactttgaatgtaaatagtctaattgtccctcataaaaggcacagagtggcaagttggattaaaaaataaaacaaacaaacaaaaaaaccaagaaccatttgtctactgtcttcaagagacccatcacacctgtaatgtaatgtcattcataacctcaaagtaaagggttggagaaagatctatcatgcaaaact

SEQ ID NO: 875091 - DNA, 602 bp, Homo sapiens
ggaccagtgccgttagttcacttgaatataaatgtagccaaatcctccagtctctcaaaacttgcattactagattgaggatcttcatgccactattttatgtaaatgtatttaataactatcttccaaaaaaaagtctaagtaaatctgtgatgttctttctaaccagcaaaacaatagccactatgactaatctttgttaagcttctgtaagaraattacatggcatgcgtaagtgtgatttcttattaattagccttttttaaatagaaaaaaattatatttctacttatgtatatgtgcaagagatttttaaaatccagttttcttaaaattgaagtttttgtttagtacaatgaatgttcaaataaagatcactttcaaacatgccattttaatatcacattagatatacactaaaatacatgaaaatcatttatttatcaaatatttattgagtgcctaatatgtgcaaatattatgcaaggtgctaggagtaaaagagttttgctttttatattccttctttgattgtagctttcttatttaagaaatcaaccaagattgtgtgaattactagcagttacaaaatacactgcaag

SEQ ID NO: 875092 - DNA, 655 bp, Homo sapiens
cccaagtcacagtccgtgaagaggccctactgtatgtagcatccattgtaggccacatcctacacagaagaagcctcaggccataagaacagcctgccttgagaccagtggtgggaatttagaaggagactggtggttagtgtcactacagacttcacagactctaaggacaaactgcctgagttgatatccaactctgccaccaatacatgtgaccttagtttcctcatctataaattggtactattactaaccaatgtgaattataattggtactattactaaccaaggtgaagataagctcagagaatataggcaaatagatcctagtacaaagtaattgctagtgagtattttttcacaaaaaataggttccaagagttaacttactttgatstatacccatgagtgagatataaaatgttagtataatttatttctccttccaggcctttattcttccacataattcagaagccatctgaacagctattggcttagtccagcttagtctggttcgtcatgctgcaacatctacccatcatgccactactgctgacccttatcccccacatcagtaagtcataagacacagacaagttatactctcccagtccttgttttttattccattctctgaattttcttaagctgc

SEQ ID NO: 875093 - DNA, 579 bp, Homo sapiens
tgtcttttgcagggacatgaacgaagctggaaaccattattcgcagcaaattaacacaagaacagaaaaccaaacactgcctgttctcactcataagtgggagttgaacaatgagaacacgtggacacagggaggggaacatcacacactggggcctgtcgggggatggggggctaggggagggatagcattaggacaaatacctaatgtagacgacaggttgataggtgcagcaaaccaccatggcacgtgtatacctatgtaacaaacctgcaygttctgcacatgtactccagaacttaaagtaaaataataataataataataaaaagaaggctccaggatagccacagttactgccacatcaagttcttttacagaccccgttctacatttgggaaccaccttcctcctcccatctcatcatcaatgaagctcgtactcagccccttcctcaggcaaggcaaccttcgcgtttggccagtctctgaacttctcccaacactcctcaatgtgaccatgtcctttctcttattctacagctcaccacccacacaaatattgatccttggtatggtt

SEQ ID NO: 875094 - DNA, 617 bp, Homo sapiens
actggagcaagtccacaagtaatgatggtagcttttccttattgtcagtcctggggcaaaagtaagacaaaagataacaaggtagaataaagattatgtaagaaagaaggacagcagcaggacatgggaaacttccatagggtaacattttgataatggatgatgagaattaatgcgttagacagagatgggcgggaatgattgaaggtctgagcattttagtacagattaagaccaaatcattaggattttaagagwtgtgtacagttggtgaagaaaaagccctagaatttaatttgactgttgataaaacattcttggattagactgaagactcttttctgtgctaagtaagtatatttatgataatgatgatgactgtagtgctaaatatttaatcaataaaaacaaaattaactgccgcatacataatgtcctgaatactattgtaaatgttttatcttattttctttaaactgtctacagcactgtaaggtaggcaccagtattgtcacagttacacagatatggaaactgagacatagggaagttaagttacttgatcaattgcaagcaatcggcaagccatggagcatctatgtcagggctgccaggac

SEQ ID NO: 875095 - DNA, 599 bp, Homo sapiens
tgttaacagcacccaagtcacctcttgaatgttttgctccttagaaatttcttttgccagataccctaaatcatctctctcaagtacaaagttccacaaatctctatggcaggggcaaaaatgctgccagtctctttgctaaaacataacaagagtctcctttgctcccaataaggtcctcatttccatttgagaccacctcatcctggaccttattgttcatattactatgagcatttctgtcaaaggcattcaacaagcctctaggaagttcaaaactttcccacattttcctatctttttctgagccctccaaactgttccaatctctgcctgttacccagttctaaagtcacttccaccttttcgggtatcttttcagcaacagcaccccacttctggtactaatttactgtattagtccattttcaygctgctgataaaaacatacccaaaactgggcaatttatgaaagaaagagatttaattggacttacagttccatgtggctggggaagcctcacaatcatggcagaaggcaagcaggagcaagtcctgtcttacatggatggcagcaggcaaagagaatgaggaagatg

SEQ ID NO: 875096 - DNA, 621 bp, Homo sapiens
ggcaatattggctgtctctgctcatcagccataccaaagtacagcacttgaatgctcattctcagcaataactgcactaatgagagcttagtccacggtgttttattaacaattttctaacagtgtttgggaaatagaaattgtctgctgctcccacacccagcctgcaactgcatgtccagtgggcctgactgaactctgtaccactagacagatgttagcaaggaaaataaggttgtataaaatatcttttggtaccaatggccactatggttttactgtatttaatgcaagtcaaagctggtgacttctacctacctatccacctatcttcctatctacctttcttcctatttacctacctacctatattagtttgctaagctgccattacaaatcacaaactgggtgrcttagaacaacagaaatttgttttctcacaattctggagactagaagcctgaaacccagtgttagcagcgttggttccctctaaggggcatgttataatttgaatatgtcaggtgttgaaacttaatggccaatataatagcagtaagaagtgcagcctttaagaggtgattaggttatgagggctcctccctcatgaatgggattaag

SEQ ID NO: 875097 - DNA, 635 bp, Homo sapiens
cctggaatgtttcccatgatgatcttcagcatgttatcaagtttatagtcagcctatggaagttggaatgtaggataggggatgcatttgtgatgtttctgagatagaatatttggaacagagattagaaattgagaatgtgaagataaggttactacaatagttttttacataatatataataaatactcattgagtgaaataataastggactttaagaggattaaaaactgtaaataaattttatagattttattgacattaatgttgacataaaaatagaaaatacaccaccattcctttggtagaaaatgcacagcttaataattaataaaacaactatgtaattattgtcttaaaattatctggggactttttccttatgaattttgctatttcataattacttaaataaataaaaatgaaagaataattgaaaacagtttttctggcttattccggaacacttaagaatttaacatgtattaataatattttttccactgaccatataacctaacatacattttgtgagaagtttttaaaataaagtggaaaagttatttcagttagaattgttagcacaaatcagttccttgaatgtcattctttaaattcttgaggtgtcatggag

SEQ ID NO: 875098 - DNA, 624 bp, Homo sapiens
ttgtattgaaagttttagtcaggtcaaaaaggttgaaaaagaaaataaaacgtattcaaattgtatagaaagaaagtcaaaaatggactccttccttacaccttatacaaatattaaatcaagatggattaaagacttaaatgtaaaacctaaaactataaaaagcctagaagaaaatctaggcaatatcattcaggacataatacactggcaaagatttcatgamaaaaatgcgaaaagcaattgcaacaaaagcaaaaacggacaagcgggatctatttaagctaaagagcttttgcatggcaaaagaaactatcatcagagttaattgacaacctacagaatgggagaaaaattttgcaatgtatccatctgacaaaagtctaatatccagattctacaagaaacttaaactaatttataaaacaaacaaaaaagccatcgaaagtgggtaaaggacatgaacagacacttctcaaaggaaggcattcatgtagccaaaaaacatatgccaaaaagctcaaaatcactgatcgttaggaaaaggcaaatcaaaaccacaatgagatattgtctcatgccagtcagaatggtgataattaaaaagtcaagaaacaacagatg

SEQ ID NO: 875099 - DNA, 624 bp, Homo sapiens
ttgtattgaaagttttagtcaggtcaaaaaggttgaaaaagaaaataaaacgtattcaaattgtatagaaagaaagtcaaaaatggactccttccttacaccttatacaaatattaaatcaagatggattaaagacttaaatgtaaaacctaaaactataaaaagcctagaagaaaatctaggcaatatcattcaggacataatacactggcaaagatttcatgaaraaaatgcgaaaagcaattgcaacaaaagcaaaaacggacaagcgggatctatttaagctaaagagcttttgcatggcaaaagaaactatcatcagagttaattgacaacctacagaatgggagaaaaattttgcaatgtatccatctgacaaaagtctaatatccagattctacaagaaacttaaactaatttataaaacaaacaaaaaagccatcgaaagtgggtaaaggacatgaacagacacttctcaaaggaaggcattcatgtagccaaaaaacatatgccaaaaagctcaaaatcactgatcgttaggaaaaggcaaatcaaaaccacaatgagatattgtctcatgccagtcagaatggtgataattaaaaagtcaagaaacaacagatg

SEQ ID NO: 875100 - DNA, 624 bp, Homo sapiens
ttgtattgaaagttttagtcaggtcaaaaaggttgaaaaagaaaataaaacgtattcaaattgtatagaaagaaagtcaaaaatggactccttccttacaccttatacaaatattaaatcaagatggattaaagacttaaatgtaaaacctaaaactataaaaagcctagaagaaaatctaggcaatatcattcaggacataatacactggcaaagatttcatgaaaaaaatgcgaaaagcaattgcaacaaaagcaaaaacggacaagcgggatctatttaagctaaagagcttttgcatggcaaaagaaactatcatcagagttaattgacaacctacagaatgggagaaaaattttgcaatgtatccatctgacaaaagtctaatatccagattctacaagaaacttaaactaatttataaaacaaacaaaaaagccatcgaaagtgggtaaaggacaygaacagacacttctcaaaggaaggcattcatgtagccaaaaaacatatgccaaaaagctcaaaatcactgatcgttaggaaaaggcaaatcaaaaccacaatgagatattgtctcatgccagtcagaatggtgataattaaaaagtcaagaaacaacagatg

SEQ ID NO: 875101 - DNA, 593 bp, Homo sapiens
aatctctaagtttcattattttatgttcaaggcaaaaaatgggggtgagcttgctggcagaaacaaaatattacatctgagctggatttcagataaaaatgtgcaagttcttacaagaagaaaaatcaaacaaaaagagatgccaaaggttgtttgcttagcattaaaaatatgaacaatttttcaggagaaatgtagttactgtatcttacaaatccaagcaattgtgttcaaatgccatttcatactataacattttattatatatggggaatatttatttataacttatatttatttaacactctataatttctattggaggcttccagttaactttggaaagtactatgtgtgaaacaacaatttatatatatatatatgtatatatacatgtgtgcgtgtatatatatatatayacacacacacacacacacacacacacacacacagagatactgccacagataaggatgactttgggttgattttgtttttcattgttttagttttcaccagctaaatcgttatgcaatctctcaatattatctatttttccattttttgtatgttaaattaaggaaattgggact

SEQ ID NO: 875102 - DNA, 620 bp, Homo sapiens
aaaaagttggatgaattgatatgaaaagacttattaaaatgacttttctgagagtcaagaaaacaattagtaaaacaaggtaattgtctaatttaatttcatcctttagtaagagtccctcattagaatgtttttgaataattcccaaagagtgttggcaataaaccacttctattaattatacagtgcttatcaagaaagactgaaagccagtgtgtccccaaagaagcacatgattaaactgagccctgccatgtctaattaygattattacaacaaccacgttgaaagaattgatttcaatattgttagtcccattgaactgagggggatattttaaataaactgtactaattaataccattgtgtagaattatagttaataaatattttgagatatcatcatgctaattattttagcgcttgagaggaatcccaataatgtaccagagggcagataaataagaagataatttttaaaaaagaatgaaggcttgcattataacaaaatactatgcttacatgagagaacctagcttttgtctttaaaaccttttatcctaagatgaggctactcaaaaaaatttttcattcatttatttcctcctttccttctcttt

SEQ ID NO: 875103 - DNA, 469 bp, Homo sapiens
atgtgagctaaattcctaaaataaatttctctatctatttatctatctacatcctgatgtttccgtgtctctgaagaaccctgacaaatacaaaatctctaaagataacctgaaatttgaataatagcaaagtgcacgtagatccttccactggaaagaggtgagatggctctgggacatagtacaggatctgggaggcatgttgaccaagactcacagaagatgggactgatttttttggactttgagttatgaaaatggctacattttttgaaacttactatttatttacrattctatgattcatttcttttatgcctcaatgatatggtttagctttttgtccctatccaaatctcatccccaaatttaatccccacctgtcgagggagagacctggtgggaggggattggataatagaatcaggcttcccccttgctgttctcatgacagtgagggaattctcac

SEQ ID NO: 875104 - DNA, 469 bp, Homo sapiens
atgtgagctaaattcctaaaataaatttctctatctatttatctatctacatcctgatgtttccgtgtctctgaagaaccctgacaaatacaaaatctctaaagataacctgaaatttgaataatagcaaagtgcacgtagatccttccactggaaagaggtgagatggctctgggacatagtacaggatctgggaggcatgttgaccaagactcacagaagatgggactgatttttttggactttgagttatgaaaatggctacattttttgaaacttactatttatttacaattmtatgattcatttcttttatgcctcaatgatatggtttagctttttgtccctatccaaatctcatccccaaatttaatccccacctgtcgagggagagacctggtgggaggggattggataatagaatcaggcttcccccttgctgttctcatgacagtgagggaattctcac

SEQ ID NO: 875105 - DNA, 592 bp, Homo sapiens
cccatggaccaatcagcatgcattttcttccctctgaagcccataaaaaccctggactcagccagacttggacaatgcgatgacctgtctgcagattggagctattaactgtgggtctcctctctgctgagggctctgcagatgatgggatgacctgcctgcagaatggagctacccactctgggtctcctctccactgaggaccgcacagaaattgtgactaccagtttcaggaaggagctacacactccagatctcctgagaactgttctgccactcagtgaagttcctctctgacttgcttaccctccagttgtctgcatatctcattcttcctggatgtgagacaagaacttgggacccactgaatggtgggrctaaaaaagctgtaacacaaacaaggctgaaacatgctccctgctcaccacattgcgggcaatgagaaggcgagaagagctgaggccctttgtgaagcccagacctaggggctccccaagccagagctgtgacattctctttgaggctttgtagttcttggaatctccaagcctctggcgccaccatgttctccttgtccagccatgggtgccct

SEQ ID NO: 875106 - DNA, 605 bp, Homo sapiens
aagtagcagggtttggcagggttgaatccaatgctgaaataatttctactgtgaggaaaatgatatcaaaaacagcaacatattctacagaggaatctttcctgaaaggaagattcggtccagcaaacttcatgactgtcttattttaagtaattgccacagctacctcaattctcagtatccacagccctgatcagttaggagccattaacatcaaggacaagactctccgtcgaaaaaatattacaactcactgcacgctcagataattgttagcatttattttcaacaatttttttttttttttgagacggagtcttgctctgtcatcaagctggagtccactggtgtgatctcagctcactgcaacctccacctcttgggttaaaggattctcctgcctcagcttcccgagtagctgggagtacaggcacgtgccaccatgcccagctartttttttgtatttttattagagacagggtttcaccatgttggccaggatggtctcgatctcctgatctcctaattcgcctgccttggcctcccaaagtgctgggattacaggcaaacaaaatatttttaaattaacgtatattcattgctt

SEQ ID NO: 875107 - DNA, 557 bp, Homo sapiens
aaagataaactaatcttaaataataaggtcaaaataaatcaataacgaatggaaaaaaggcccaaaataatatttataatgtattttggtattttttggtggaccactgtagttaacaaaaagggaggctgaatttagatagctttggaattttctttttttttattattrtactttaagttctagggtacatgtacacatcgtgcaggtttggtatatatgtatacatgtgccatgttggtgtgctgcacccattaactcgtcatttacattgggtatatctcctaatgctttccctccccactccccccaccccacaacaggccccagtgtgtgatgttccccttcctgtgtccaagtgctctcattgttcaattcccacctataagtgagagcatgcagtgtctggttttttgttcttgcgatagtttgctgagagtgatggtttccagcttcatccatgtccctacaaaggacatgaactcatccttttttatggctgcatcgtattccatggtgtgtatgtgccacattttcttaatccagtctatcattga

SEQ ID NO: 875108 - DNA, 608 bp, Homo sapiens
cagtccctggctcccagaatgcacttctggacctgctgggggcccagaggaactcactgtcctgaagtgaaggacacaagcctaggtggcttcactacctgctgattgtagagcctctgggccttgagcaaacataagacagtagcmaggcagtgattacagtgggccttggtgagcccctgtactgtactggctttaggtgtgacccagcacagtcccagtgttggtggccacaggggagcttgtgttcccctaccatcatctacaggtggctcagaacagagacagactccatttgttgggaaaagttaagggaattgaagaagagtttttattgcctggtaatacagagtattctttcagatcttattcaagactattgaggtagtatctttaggagtctgcaaaaaccacaggattactggttcgggggtgcttcctaatgcagatgcaatttagaccacaatacccaagtctttttgaattcctggaaagacttcccaagagggacaggtacaaacaagcccagagagtgaagactacaataaatacctatccgttcaatgcccaggcacagacaaacatccataagcacgagaccatccagg

SEQ ID NO: 875109 - DNA, 657 bp, Homo sapiens
tattgtgttagattctctaacccagtggactagaatttgcctgtcgattttgatctttacactgattccaaccaaacgatcatggctaacctgtaagcttttcttgacatatacctattctgctcagaaataattttgtgtcagttgtctctcctactcctatccccgttatggcctttcttgtctgggtcagcatccagackaagctggataattgaaattccagaaaaaaacatttctcctgattttagtgaggacatttgaaaataacctacgtgttgctcaatccctgaagctcatttgaatgtctgctcttatatttaaaaagcaatgtatgccacctggaagcaaaaaataactgtagtttgctaatgttgtcactatgctgcgtcaatctctaatttgttataaaatgtaggaagatatttcgagtaagagggtgtctacctcaattcttcaaaattatacccagttttccttgttatgaagcataattactttacaaagctataaaatgccataaagttttagtaattcacttagcatttcattcactatatttttagtctactgtactgcaaaggttgaaagacattttatgttttatctgaggtgccatccacaaattacggcacctattatgcaaataatgcctgc

SEQ ID NO: 875110 - DNA, 657 bp, Homo sapiens
tattgtgttagattctctaacccagtggactagaatttgcctgtcgattttgatctttacactgattccaaccaaacgatcatggctaacctgtaagcttttcttgacatatacctattctgctcagaaataattttgtgtcagttgtctctcctactcctatccccgttatggcctttcttgtctgggtcagcatccagacgaagctggataattgaaattccagraaaaaacatttctcctgattttagtgaggacatttgaaaataacctacgtgttgctcaatccctgaagctcatttgaatgtctgctcttatatttaaaaagcaatgtatgccacctggaagcaaaaaataactgtagtttgctaatgttgtcactatgctgcgtcaatctctaatttgttataaaatgtaggaagatatttcgagtaagagggtgtctacctcaattcttcaaaattatacccagttttccttgttatgaagcataattactttacaaagctataaaatgccataaagttttagtaattcacttagcatttcattcactatatttttagtctactgtactgcaaaggttgaaagacattttatgttttatctgaggtgccatccacaaattacggcacctattatgcaaataatgcctgc

SEQ ID NO: 875111 - DNA, 657 bp, Homo sapiens
tattgtgttagattctctaacccagtggactagaatttgcctgtcgattttgatctttacactgattccaaccaaacgatcatggctaacctgtaagcttttcttgacatatacctattctgctcagaaataattttgtgtcagttgtctctcctactcctatccccgttatggcctttcttgtctgggtcagcatccagacgaagctggataattgaaattccagaaaaaaacatttctcctgattttagtgaggacatttgaaaataacctacgtgttgctcaatccctgaagctcatttgaatgtctgctcttatatttaaaaagcaatgtatgccacctggaagcaaaaaataactgtagtttgctaatgttgtcactatgctgcgtcaatctctaatttgttataaaatgtaggaagatatttygagtaagagggtgtctacctcaattcttcaaaattatacccagttttccttgttatgaagcataattactttacaaagctataaaatgccataaagttttagtaattcacttagcatttcattcactatatttttagtctactgtactgcaaaggttgaaagacattttatgttttatctgaggtgccatccacaaattacggcacctattatgcaaataatgcctgc

SEQ ID NO: 875112 - DNA, 704 bp, Homo sapiens
tgacagggcaaatccttttctaggtacaagaagaattaactaaatacatttaaataatcattaaatatccaattactttatatataaacacaaagataaaccaaagttcatggatatagtacattgaaactgtatttgtcaagttagttaattatgctttaacacatggtttcagaaaatcattatattatgctcttgcccttgttggcaatttgacacttttaacatgttattaacaaaaatccaaacatactatacarccctattctgctttatattatgaaaagttcatctttccacatcactacatattcatccatctccacagaaatagataactacagtaaagaacaacctagtggaccattgtgtgcacagtctataattcaataaaccccattttgaagatcacaaacatttttaactaaacatcatgtgctttattttgtagcacctgtgagatcaacctacacatttcctctaatcatactaggtttactgagaaggaacacaactcttaggaagaaaaactccacactcattaacatttttctgtatcccgagggcacgatcagtcaagaaccaggacaaaatttaataaccattctctaattggcagccaagatattggagagagatatatatatacatctatatatatatgtatatatatacacacacacacatatatatacacacacata

SEQ ID NO: 875113 - DNA, 586 bp, Homo sapiens
cacaaaacaagtgtcgccaaattcaagagtcaaaattatatcatgtatcttctctgaccacaatagaatgaactagaagtcaacagaaagtagaaatttagaaactatacaaatacatggaaattaaaatgctcctgaatgaccaatgaagaaagtaaagaaggaaattctaaaaagtattaaaacaaatgaaatggaaatacaatatatgagaacctatgggatatagcaaaagcagtacaaagagggaagtttacatatagcctaaataaaaaaataggaagacttcaaatagcctaacaatgaacctgaagaaactagaaaagcaagaacaaaccaaacctaaaaatagtagaaggaaagaaacaataaagatcagagcagaaatgaataaaattgaggctaaatacagaagatcaataaaatgaaaaggttgttttytgaaaagataaaaaaatgacaaatctttagctgggctaaaaaaagggaagattcaaataaaatcagagacaaaaaggaacacattacaactgatatcacataaattattagagactactaaagatttttgagactgctatgaaca

SEQ ID NO: 875114 - DNA, 570 bp, Homo sapiens
gtgtctcacgcctgtaatcccagcactttgggaggctgaggtgggtgggtgatgagatcatgagttcgagaccagcctgaccaacatggtgaaaccccatctctactaaaaatgcaaaaattagctgggcgtggtggtgcatgcctgtaatcccagccactcaggaagctgagggaagagaatcgcttgaacccgggacacacaggttgtagtgagccgagattgtgccackgcactccagcctgggcgaccgagtaagactctgacaaaaaaaaaaaaacctgtcagaaccagactcacaaagccattttgagttgccaactgtcttagagaagataaaaagatgtgcttctactctgccaacagactcctagcacagagactcgagcacagaaaacaatttctaaaaacggtctgtcagtcctcagttgtgttactcaagtgggcagatcattgtctgtccctctttgctatctttctatatctattgagaggcaaaaaataatcagaggaagaatgaagagaggagggggatagttgtcatgcactgacaatggcagtataagctga

SEQ ID NO: 875115 - DNA, 570 bp, Homo sapiens
gtgtctcacgcctgtaatcccagcactttgggaggctgaggtgggtgggtgatgagatcatgagttcgagaccagcctgaccaacatggtgaaaccccatctctactaaaaatgcaaaaattagctgggcgtggtggtgcatgcctgtaatcccagccactcaggaagctgagggaagagaatcgcttgaacccgggacacacaggttgtagtgagccgagattgtgccactgcactccagcctgggcgaccgagtaagactctgacaaaaaaaaaaaaacctgtcagaaccagactcacaaagccattttgagttgccaactgtcttagagaagataaaaagatgtgcttctactctgccaacwgactcctagcacagagactcgagcacagaaaacaatttctaaaaacggtctgtcagtcctcagttgtgttactcaagtgggcagatcattgtctgtccctctttgctatctttctatatctattgagaggcaaaaaataatcagaggaagaatgaagagaggagggggatagttgtcatgcactgacaatggcagtataagctga

SEQ ID NO: 875116 - DNA, 709 bp, Homo sapiens
attttctgactttagagtcaggttttttatcatcaaaatatctgtataataaagcttagttaaaggtgagtgttcttttatttatatattaaaatagtgtaggcatggtgtggtggctcatgcctgtaatcccagcactttggaaggccaaggtgggtggatcacctgaggtcaggagttcgagaccagcctcgccaacatggtgaaaccccgtctctactaaaaatacaaaaattagctgggtgtggtggcacaygcctgtaatcccagctaccagggaggctgatgcaggagaattgcttgaacctgggaggtggaagttgcagtgagctaacatggcgccacggcactccagcctgggcgacagagcgagactccatcaaaataaaataataataaaataaaataaaataaaatgaaataaaacaaagtcaaataaaatagtgtaatctggtaatttagggagggtctgcaaatctactatctctttggcaatgctgctaaccatatatttagtttattcatgtgaactgtattaggtcaactattatttcatttacacattcaatatttcatagatttaagaatcatgaagtgtgcaagcaattttcatgattcatactagtatgcaacatttggttccaattgatcaataaataaaagattgggattatcatctactttggatgaaaaagcatatagttttgct

SEQ ID NO: 875117 - DNA, 643 bp, Homo sapiens
ggactatgtatcatattttctttatttagtctactgttgacggacatttaggctgattccatgtctttgctatttctccaatgtttagtaatgttgagcatttttcatatgctttttggccgcatgtatgtcttcctctaaaaccaaccacacaattggacataaaacaatcctyagcaaattaaaaaaaaaaaacctgaaatcataccaaccacactctcagaccacagcacaataaaaatagaattcaatacaaagaaaattgctcaaaaccatacaattacaggaaaattaaaaaaaaaaggtcctcaatagcttttgggtaaataatgaaattaaggcagaaatcaagaagttctttgaaacgaatgagaacaaaggtacaatatcagaatctctaggacactgctaaggcattgttaagagagaaatttgtagcactaaacacccatatcaaaaagttaaaaagatctcaaattaacaacttaacatcacagctagaagaactaaagaagctagagcaaaccaaccccaaagctagcagaaagcaagaaataacgaaaatcagagcagaactgaaggagagtgaaacacaacaaaccgtacagaagatcaacaaatccaggagttggatacttgaaaa

SEQ ID NO: 875118 - DNA, 612 bp, Homo sapiens
ataccacaatctgggagaggaatgacaaagaaagaaaacttcaggccaatatctccaatgaacatagacacataaattctcaacaaaatattagcaaactgaattaagtagcatatcaaaaagttactttgccagaatcaagtaggcttattcctgggatgcaaggttggttcaatatatggaaatcaataaatgtgatttaccaaataaacagagttaaaagcaaaaactatatgatgatctcaatagatgcagaaaaagcttttgataaaattcaacaacccttcatgatacaaaccctccgcagtgtagacattgaaagaacatacctcaaaatcataagagccaactattacagatccacaaccaacwtcttgctgaacgggcaaaagctggagccattctctatgagaactggaacaagacaaagatgcccactctcaccactcctattcaacaaattactggaattcctagccagagcaatcagccaagagaaataaatagaaggcatcaaaatcaaaaaagaagacggcaaaaaaaaaactatctttattgttgatataattctatatttagaaaaccctaaagactccaccaaaacgttactag

SEQ ID NO: 875119 - DNA, 612 bp, Homo sapiens
ataccacaatctgggagaggaatgacaaagaaagaaaacttcaggccaatatctccaatgaacatagacacataaattctcaacaaaatattagcaaactgaattaagtagcatatcaaaaagttactttgccagaatcaagtaggcttattcctgggatgcaaggttggttcaatatatggaaatcaataaatgtgatttaccaaataaacagagttaaaagcaaaaactatatgatgatctcaatagatgcagaaaaagcttttgataaaattcaacaacccttcatgatacaaaccctccgcagtgtagacattgaaagaacatacctcaaaatcataagagccaactattacagatccacaaccaacttcttrctgaacgggcaaaagctggagccattctctatgagaactggaacaagacaaagatgcccactctcaccactcctattcaacaaattactggaattcctagccagagcaatcagccaagagaaataaatagaaggcatcaaaatcaaaaaagaagacggcaaaaaaaaaactatctttattgttgatataattctatatttagaaaaccctaaagactccaccaaaacgttactag

SEQ ID NO: 875120 - DNA, 633 bp, Homo sapiens
agcagtcaatgggtttgttgtggtagtttctatcatcatatactgatgttgcatattgttcctttataataattttaaattccatatgccatataattttcaaattattaaccaaaagttgactaaatttaaaataaattattgacataacctcacccatatctacctatttagggacactctgtataattactgggcagctttctctgcccacagccygtgtttactattgcctcatccaggctccaagacagtgctatcctctcccccactacatgatagttccagaatactttatcccttgggcagcttttttctaattaaaatttacctctcataaaattaatttttcagtttgtaaaatattagtgaatgtgtattttctagtctggtagccaatgataaattcaataaaattctaaattctacctttttggatataatatttgatatcctttggctatgttcccacccaaatctcattttgaattgtagtttccacaatccccacgtgtcgtggaagcgacctggtgggaggtaattgaatcatggtggtggttacctccatgttgttcttctgatagtgagtgagttctcacgagatctgatggttttataaggggccttactctc

SEQ ID NO: 875121 - DNA, 640 bp, Homo sapiens
atgtaggagtgacagttaattcagctgatgttatgagttgtatctattcatcaggctacatttaggacttaggacccctgatataaatagtgagaattttacgagagaatgagcagaagcagtggagcaaggacctaagattagtttsaatgaactatatttgttatataagtgacattctagaaggctctttttaagagacaattgagttttttattctcttccttaacatgatgttactgtacttgtcactgttttagattagcaattattttataaggaattgacaaaagactacattatttaatacactgcataaccttcagcagatgaagcaaggtgaatacaatgtaaaactaaaagcatagtcttttttatttttgccttaagatcaacataagcattataatggagtccacgaattatgcatgaactttttcataatgcagtaattgtttccatgctttgctgtgctgcagtgttttaagctgcagatgatattatctgatgggtaaatgcaggaactaatgaaagaaaggcgtgcctgtctcaggaccttgaataaaaaatcagaaaggtgctgatttggataatcgttaaaaataagaatatcaaactgaaaggtttgagctgaatttag

SEQ ID NO: 875122 - DNA, 589 bp, Homo sapiens
cactaagcaaataaacaaatgaccaaaccatcaacaacagtatccttcccctttactgaagagagacattgtattcagagttgctaaattttatctaaatacccagtcttaaacaaaaaattaaaacacatatggaaatagaaaaatgtgatccatatacaattcaacaakaatagttgaagacttcattatcttcttttgcttaaaaataaaactaggcataaatcaacaagcaaacagaagacacgaacattataaaccaactagacctaacagacatctatagaatacttcatccaacagcagcaaagtagacattcttctcacattctccaggatagatcatatgcgaggctgtaaaagaaccctcaacaaatataaaaggattaaaattatacaaaatttgttctcagagcatggtaacaattaaaatagacaaaaataacagaataaaattcagaaaatctataaatatgtgagaattaaacaagacattctaaacaactaaagggtcaagaaaaaatcacagtggaagtcccttcagaagaataaaaacacaatccataaaaacctatgggatgcagacaat

SEQ ID NO: 875123 - DNA, 589 bp, Homo sapiens
cactaagcaaataaacaaatgaccaaaccatcaacaacagtatccttcccctttactgaagagagacattgtattcagagttgctaaattttatctaaatacccagtcttaaacaaaaaattaaaacacatatggaaatagaaaaatgtgatccatatacaattcaacaataatagttgaagacttcattatcttcttttrcttaaaaataaaactaggcataaatcaacaagcaaacagaagacacgaacattataaaccaactagacctaacagacatctatagaatacttcatccaacagcagcaaagtagacattcttctcacattctccaggatagatcatatgcgaggctgtaaaagaaccctcaacaaatataaaaggattaaaattatacaaaatttgttctcagagcatggtaacaattaaaatagacaaaaataacagaataaaattcagaaaatctataaatatgtgagaattaaacaagacattctaaacaactaaagggtcaagaaaaaatcacagtggaagtcccttcagaagaataaaaacacaatccataaaaacctatgggatgcagacaat

SEQ ID NO: 875124 - DNA, 660 bp, Homo sapiens
gttctctgttctccataggtcattttcttcctcagttaatctcagtgtgtctacctggatgatccagttgaagagatagtgtttatgctccacttattctctccatgagagcagcatgcactagctgcttctatttagccatcttggcaccccccacctttggtacatgttttgagaccaaggttattattattttttttgccagtgttgcataatttctattgcctcctacaggggaggagatgactttcattaggtagagcaaacactctttgaaacttaccaacattaaccagttttgaaaatggagggagtaattgtgctcttcttccatccttcagtaaacctcccctcaatttccttcactttttttttcaaattctccccaacctttcaatttttgagcatytcataacagacttggtcctcttctttcggtatcctcacttctcggtgatttcgcccaggcttgagctttgatcctccatctctctgctaatgctcccaaatacttatctctagtcctgaccttgctcccaaactccagactcatgcatccaactgctgacttgccttctgcacttggacgtccaatagtatgccaactcagcatgtccaaactaaactcctacccctcccccacagagcctttgctctgtc

SEQ ID NO: 875125 - DNA, 685 bp, Homo sapiens
atagggagatgagggaaagtttggaatttcctagagacttgttgaatggttgtgaccaaaatgctgatagtgatatggaaagtgaagtccaggctgaggtggtctcagacagagatgaggaacttattaggaactgaagcaaagatcacccttgctatgctttagtaaagaggctggtgtcattgtgcccctactataaggatctgtggaaatttgaactcgagataaattatttaggatatctggtggaagaaatttctaagcagcaaagcatttaagatgtgacctggctgctcctaacagcatacagtcttatgaattcacaaagagatggtctgaaattggaaattatgtttaagagggaagcaaaacataaaagcttggaaaatttgcagcctgaacatgtgatagaaaagaacaagccattttctggggagaaattcaagccagctgcagaaatttgcataagtaaacaggaactgagtgttaatagccgagaccrtggggaaaatgtcaaatgtctccaggtcatatcagagaccttcacaacagcccctcccatcacagacccagaggtctaggagggaaaaatggtttcatggtccaggcccagggctctgctactctgtgcagcctcaggacatggtgccctgtgtcccagctgctccacttccagctgtggcta

SEQ ID NO: 875126 - DNA, 687 bp, Homo sapiens
cttctagggaggcctcaggaaacttgcaattatgttggaaggtaaagagtgacgaggcatgtcacatggccagagcaggaaaaaaagccgggggaggtgctaaaagtgaaggtgaaggtagaccagctgagactggatccatgattagctttttcccctccccaccaccctttttgcttcacttttaaacaaccagatctcatgagacctctctcaccatcaygaggacaacaccaatgagatagtgctaaaccattcatgagaaatctgcccccattatcaaatcacctcccaccaggcccccctccaacattgggaattacatttcaacatgagatttaggtagggatacacatcaaaactatgtcacccatgataaatgcgattactctataggttatggcaccaatacgggaattctgccaatggttaagggtatttatgctgattatatgttcagaaaccagaaaaataacagctgggtagaaatatgaaatggacctgaacaagggctctattgattatcacagaattacctgagactgggtaatttataaagaaaagaagttgaattgatgttacagttccacaggctatatggaaagcatggctgggaggcctcagaaaaattacaatcatggcagaaggcaaaggggaaacaagcacatcttaccacggcagagcagg

SEQ ID NO: 875127 - DNA, 630 bp, Homo sapiens
gagagtctttgtttcaatattttaaatgggaaaaaaatgataaagagtttaaagcctatccaaaaatctcaaaccaatttcatcgaacacgactaaaatcttcttaaacatacttaacaattcaccaaggttttctgcataatgtaaagcatttaagacactaattgcctaattatttaatgcttaatgaggttacatattttgtctgaagttaacaaccatacactaaggtattgaatatttttcttctatactacaacaaatatgtaatataaatgtacctaatgtattagaatatgttagaaaggtggatcacctactctccttataagtttttcacattcacataaacatttacatgtaataatttggcaaatataataatgataacgcccaagtttgaacaaggggaacaggggactccatcttgttgggagaactgmtaagatacccctgcagcatgctccacctttatgtgtaaacaacttaaacgttttgctgtcaatggctgcaagttacagtgagttttcaattaaactataaattttctgtaaatattttttggaaaacaatatagcttaaagttaaaacatcacacactaatattatcattttattattaacacttca

SEQ ID NO: 875128 - DNA, 668 bp, Homo sapiens
ttcttttgagaaatgtctgttctcgtcctttgtccactttttaatggggttgcttatttttttcttgtaaatttgttaagttctttatagatgctggatactagacatttgtcagatgcatagattgcaaaaatattctcccattctgtaggttggctgtttactcttgatagtttcttttgctgtgaagaatctctttagtttaatatgatcccttttgtctatttttgctttcgctgcaattgcttttggaaactttgtcataaaatctttgcccgtgcctatgtcttgaatggtattgcctagattgtcttccagggtttttatggggttttgcatttaagtctttaatccatcttgattaatttttgtatatggtgtaaggaaggggtccagtttcaattttctgcatatggctaaccagttatcccagcaccatttatgaaatagagaatcctttycccactgcttgtttttatcaggtttgtctaagatcagatagtcttagatgtgtagtcttatttctggattctttattctgaagaaccacttttaacacactatatttgtttgtctttgtctgcatcttgtctctatagctgtttttcttcctgtgttaatttcactattatatttaatataggttaggataacttaggttgactgtc

SEQ ID NO: 875129 - DNA, 580 bp, Homo sapiens
aacttattaacatttctaagttttcaatatacatgagcatgaattaacaaatttcagtgacattcatctttctatgtaagaaaaatgctgaagtaggtatgatgatttgtgagtattaagatatgtggttacagtaaagtcgcactcgctttttctactgtgtgatycacacttctttaaagacactttaggatcaagaacttaaacttacaaagttgggcaatttgaatcattgtgttaaagaaaaagtagaggggatcgaggggttatatttttataaagtttgaaaataacacaaagaaacattgtagatgttattatttacttaagcattcaatttttaaatcaaatagtatgggaaatggaccatggatgcatagctctgaattttgaactatcattttgaagtttgttttattacttattctacatctccaaaatattactacaattcatcagcttactccttatcatgactatccaacctgactttataactgatttctggtttttctgtttgttcttttctctcatttttcagaaatgaaatatcaaaacatctaaatacatgagttgttct

SEQ ID NO: 875130 - DNA, 578 bp, Homo sapiens
aattttcttggcaaattgaaataatttacttagcagctctcaaaatcttgcccttgatttgaatcaatgtatgcagaaaactcataaacatattttttccgtgatgtccatgaaagtacataggtgtaacagccactggtggggcacactctacatactgataaaagagaggggaagccaggatgtttcataaatttttactttataaatctacttgcaaaagttccatgcatatgattttaggtctgtgttgataagaacagtattttaaaatgttacacttacagatartatttgctattaaaataattgaacagagatgtcacattcagctttaacaacattcactatcttggcccagaagaatcacaccttaattacttacagcagctactctctcccctaatgtacattttctccaaaaacaatagtaacaagaagaatttacaatgttccttttcaatataacttgcagaccaagaatatccacacttaaaataaccataatatattagcaagggtttatgaatatttattttactctttggattatattttactagttttgttattttgtt

SEQ ID NO: 875131 - DNA, 620 bp, Homo sapiens
atttgaggaatgcattgtagtggggcaaaataataaaagaagtttatttagaaggctattatcacattccatgtagagataacaatagtttgaacaaggtagaaattttggagttgatgagaaatacttagaatacagatacattggacaaaaaccacatgactatctcaacagaaaaaaatattttacaaaagccaacactttctttttttwaaaaaaaaaaaatccaacatactagaaataaaagaaaactttcttaacctggtgaagggcatctatgaaaaacccatagctaacgtacatttaatggtgcaaaactgaaacctttgcctttcaggtagggaacaaggcaagcatgtcctctgtagtactggcttttgtttttgctgatttttcagatcaaaatgttcgtcaattagatagtggtgatgattgcccaactttgtgaatatactaaaaatcactaaattgtttttcagatcaaaatgttcgtcaattagatagtggtgatgattgcccaactttgtgaatatactaaagatcactaaattgtatattttgaaaggatatctattataatatgtgaattacatgtcaattgtaaaaattggtatatttaa

SEQ ID NO: 875132 - DNA, 557 bp, Homo sapiens
ctgtaaatgacttttttctttctgcatccagggttactcattttctgtcttgggacagtttgactataatgtgtctaggtgtcgatgttttttagcttattgaatgtagagatcagtttttctcatcagatttaggatgcttttagacattgtttctacaaatattctttctgtctatcgctctcctccccttgtgggactccattttgtgtatgttggcacttactggtgttccataatatctgaatctgtacatttttcttcaatatttttcctctttctgttcctcataccagacgaactcagataacctatcttcaaattcatgtatctgaagctcaaacctgcagtttaggctctctaatattttttgctttacccttacactaaaaacacactgtsgtagttatcatagaattgagatgtactttgatatttcctatgctaactcatcaaacttttgtgttatttgtattcaagattatatttgctgatcttgaccattctccttactctatgtacatttatatttgtatataagttttttgattcttcaa

SEQ ID NO: 875133 - DNA, 671 bp, Homo sapiens
atgcccctccactgttgtcttgcattgttgctgtcaaactctgatgtgaatctgctttccttcctttagcaagtgacttggtcattttgtttggaggaccaagtgtttaatattagtgtaattattttataggcatatgtcttagagttgattggttcagatcacagatayacatgggccctttcaaatgtggtttcaggctttcttttgtttctggaacattttcttaaattacagggtttttttgtttgtttatgtgggttttttttgagacaggatctcactctgttgcccaggctggagtacagtgatgcagtccagctcactgcaacctccaccttcagggctgaagcagtcctcccatctcagcctcctgagtagctgggactaacaggcacacaccaccatgctcagctgatttttgtattttttgtagagatggggttttgccatgttgcccaggctggtaagttacagtttttaatattgtgttctgctgtttttttcttctgagtctccagctatatgttggatcttctttgcctgtcttccttgtcatttttttcattttgacacatatttttcttttatttttgtcctcttagtttttcaagcttttcttcagtgtcccttattatattttcatttgggtagtttcccccttgccattt

SEQ ID NO: 875134 - DNA, 651 bp, Homo sapiens
aggagtaatgagagtgggcatcattgtcttgttccagttctcagcaggaatgcttccagtttttgcctgtttagtatgaactatttttcaaaatagctaaatcctaggttctttaaaagctatgtttgaaacttggtaaaataccagtcaaaaagtttaccagaatgtgtgcactgttgtgctttataaattgtgtataaaagaacttttagtaaatcactgaattttgtcctttggaaataaaaaatctgttttataaatgtacattttttagactacatttttaaaaattgaggtatatctgtgagttgtttttccagtatatattatgtgattaatatttgaagacaggagacaatgagaaatggaaaaaagtaaacatcctcttcaacataaagtaagtctcatgtttctcaaagttttgtaattggacttagtacatgtgtatagtcagtctcttttgacrttttcttttcctaggctttgacctgaacatgccctacctcacactttaatgtaatgctaatacattatatttttgttataattcacaaactttcacacatgccataatcctcataactgtgccctacataaggtaatggtattatgttatgcttcctttgtagagaagaaaaaaggctttaaact

SEQ ID NO: 875135 - DNA, 639 bp, Homo sapiens
gatgttttgaagaaagcaagaaatacaaataacgtgtgtgcttagatatttctttgtttataatttgacaggaagaaagaaggatagaggtttattgttgcataaagcctggaaaaaagctgaaagcaatacctacaatgattatttcagaggttttatttmgatggactctaaaacaatccaaatgtacctttgcagaagagattcgaatgaatgcattcgaatgaatttgtgaccagtggtaaaagttaataaaaaatatatttaaaaaatccacacaaggactatgggctcagatcttaaaaagtaaagaatttacttgtctctcaagataaaaaacactgacaacatgaggcattttctgaaggcaaatggatcgtgaaataattagtggagaagcatgaatatcaactacagcctttgatcagttgcagaaattaggactgtagtagctacctaatatccttttgataaattcattttcctggtgaataacaaataataagctgaagccaactgaaaacatcaaatcaatgtaatcataaagaaacaaatttttagatggaaaagactttcttggtgctgagtagaattttatcataaaattgtatcatatgaatacaaaatagaaagtcttaa

SEQ ID NO: 875136 - DNA, 621 bp, Homo sapiens
taaaaaatctcaatagttctttacttctgtcagaataaaaaccaaagtctttacacacatgaacccacaggtccacctgcagctctttaccagacctttgacctgatctcctgttactctacaccttgctcattctgttccagctaactgacctccatgttctctcttgaatgtgctagatatggtccacctcagggtctttgcacttgtcacccttaactataacaagcttcctccaaattgctgcttacttaatttcctcaccttctttaattctgaacttgggcataattttcagagtgaagactgtaacaaccctatttaaaattttaggcacctcccatatcccaatccatccagtmctctctgtgttattgctatgcagcacttactgctcttaaataaaatgtataatttccacattctagatcagtttagatatttcataattgtaaatcatttttattagtgtttaaatattattgtattcacttgtctttatattgtccaagatttccttatggaaaaagtttaacatacaacttagtggaacaaattttgtaataaacatcctaatactcatcacctatatttgaccatatacattttactgtacttgct

SEQ ID NO: 875137 - DNA, 635 bp, Homo sapiens
  misc_feature 634, 635: n = A,T,C or G
atcagggacaagataatggagaagacactttgtggcacaagtatacaagaatagctgcacatgaccagtaatacatataatacatatggacaatatatacccctgatgtgacacactaagaggagcacatcacttttgttgtattctggccaaaaatgcattacctcaagttaatcataataagcagcaggtaaacctaaattagggatactctataaaataactaatcaggacttttcaaacatgtcaaggtcatgaaaaatcaagaaaggcagagaaatagccacaagttgcaggagaccgaagacacatgacaaytaaacgccatgtgggaatatggattagattcttcaacagtaaaaaaaaaaaaaaaaaaaaaaaaaaaaaaggatgctaatagaaaagctggagaaatccaaatatgatcaaacagttaatagcattgtaccaatattaatttattagttttgataatagtgttatggttatgtaagatcataaccttagagaaatatgggggaaagtcatacagggactctccatagtgttttgcaactcttctgcaaatctaatattatttcaaagtaaacattttttaaaagaagtaaattatcagcgttagaaatgaaagttnn

SEQ ID NO: 875138 - DNA, 643 bp, Homo sapiens
acaatcctaagcaaaaagaacaaagctggaggcatcacgctacctgacttcaaactatactgcaaggctacagtaaccaaaacagacatatagaccaatggaacagaacagagacctcagaaataacaccacaaatctacaaccacctgaacttcaacaaacctgacaaaagcaaacaatggggaaagaatcttctatttagtaaatgatgctgggaaaactggctagccatatgcagaaaactgaaactggaccccttccatacaccttacacaaaaattaactcaagatgggttaaagayttaaatgtaaaaccccaaaccataaaaaccctagaagaaaacctatgccattcaggacataggcgtgggcaaagacatcaggacaaaaatgccgaaagcaatttcaataccagctaaaattaaaaaatgagacttaattgaactaaagagcttctgcacagcaaaagatactatcaccagagtgaacagacaacctacagaatgggagaaaatttttgcaatctacccatctgacaaaggtctaatatccagaatttacaaagaaataaatttacaagaaaaaacaaaccatctaaaggtgggcaaacaatatgaacagatgcttttcaaaagaaaacatt

SEQ ID NO: 875139 - DNA, 682 bp, Homo sapiens
gatgtctcactaagctctagctattttgtttgtgtgccccaaacagtggttcatggactggcagcatcaacacttcttggggacttgagggaggcaaattttcagtttgtaggttagccctactgaatcagaacagagggtgtgaggtcttggcatctatgttttaagaagccttccaggtgactcttacgcacactacagttagagaactattgcatttatctataattatctgtttttctcataatattcatgctgcttcacctgagtgctttgtttaattcacatttgctttcttacctacygttttctctcctacttatttcctcccttattctttctaaaactcctcttgtttgaagtctactcctctttcaagatgcagatcctgctctactcctttagggagcttttgtggtcactcccaggtaaaatgaggtacttcctcctttccagaccttctcaccaactgcataaatgtttcaaaactactacactttcttgagccatgtactcatttatcttttattagaaagaaatcacctcattctttatggtgtctctatcactcgctacagtgtcaaacaaatattaggcattgattacatgctacttgacataattaatggaaaaaattaaactgctatattatactaagttttgacttcatggaaatgataga

SEQ ID NO: 875140 - DNA, 682 bp, Homo sapiens
gatgtctcactaagctctagctattttgtttgtgtgccccaaacagtggttcatggactggcagcatcaacacttcttggggacttgagggaggcaaattttcagtttgtaggttagccctactgaatcagaacagagggtgtgaggtcttggcatctatgttttaagaagccttccaggtgactcttacgcacactacagttagagaactattgcatttatctataattatctgtttttctcataatattcatgctgcttcacctgagtgctttgtttaattcacatttgctttcttacctactgttttctctcctrcttatttcctcccttattctttctaaaactcctcttgtttgaagtctactcctctttcaagatgcagatcctgctctactcctttagggagcttttgtggtcactcccaggtaaaatgaggtacttcctcctttccagaccttctcaccaactgcataaatgtttcaaaactactacactttcttgagccatgtactcatttatcttttattagaaagaaatcacctcattctttatggtgtctctatcactcgctacagtgtcaaacaaatattaggcattgattacatgctacttgacataattaatggaaaaaattaaactgctatattatactaagttttgacttcatggaaatgataga

SEQ ID NO: 875141 - DNA, 625 bp, Homo sapiens
ttggctgtgtgtttgtctgttattggtatgtaggaatgcttgtgtttttgcacatcattttgtatcctgagactttgctgaagttgcttatcagcttaaggagattttgggctgagaggatggggttttctaaataaacaatcatgtcatctgcaaacatgggcaatttgacttcttctcttcctatttgaatacgctttatttctttctcttgcctgactgccctggccaaaacttccaatactatgttgaataggagtggtgagagagggcatccctgtcttgtgccagttttcaaatagagtgcttccagtttttgcccattcagtatgataatggctgtaagtttgtcataaatagctcttattattttgaaatacrttcaattgatacctagtttattgggagtttttagcatgaaggggtgttgaattttgtcaaaggccttttctgcatccattgagataatcatatgttttttgttattggctctctttatgtgatggattatgtttattgatttgtatatgttgaactagacttgcatcccaggtatgaagctgaattgatcatggtggataagctttttgatgtgctgctgagttcaatatttgccaatattttg

SEQ ID NO: 875142 - DNA, 643 bp, Homo sapiens
tttataaaatcaatttgtctatgggttccaagatggccgaataggaacagcttcagtctacagctcccagcatgagcgatgcagaagatgggtgatttctgcatttccaactgagttactgggttcatctcaatggggcttggcagacagtgggtgcaacccatggagcgtgagcagaagcagggcagggcatcgcctcacccaggaagcacaaggggtcggggaattccctttcctagccaagggaagacgtgacagatggtacctggaaaatcaggacactcccaccctaatacagcacttttccaacggtcttagcaaatggcacaccaggagattatatcccgcacmtggcttggaaggttccatgcccacggagcctggctcactggtagcacagcagtctgagattgaactgcaagatggcagcgaggctgggggaggggcatccaccattgctgaggcttgagtaggtaaacaaagtggccagggaagctacaactgggtggagcccaccgcagctcaaggagtcctgcctgcctctgtagactccacctctggggcagggcatagctgagcaaaaggcagcagaaacttctgcagacttaaacatctctgtctgatagctttgaggagagtagta

SEQ ID NO: 875143 - DNA, 660 bp, Homo sapiens
taccagctgttctctttttttggaaagccctttgtccagatatgccaattgcttattcatttttgtcatttaagactcagctcaagtgtcatcactcctgtcaccttgtccaaaggtcagccatgcaattggagctgatccaccaccaccagaatgaaacaaacaagcacatatacattataccacatcaatctgttttcctttttaaaaaacactttacatagctgatattatctcctttattttttgttcagttgtcttccccaggtggaacatttggctgcaataaagaaagagagtataagcctcatccaggcatttttagagatatacaattttttaaraattgtaagtactttgacacactatagatgcacagtgtcaagctgctttctcagcatggatattgtttttgagatttcaaacaagaggcccaactttcagtgggtagcctcagattgctctctgacaaccactctcagccctaattctgtcaaagtagttcattagaatcagcaaatctgtgtaaaagttcactgacttttatatatatggaaactcctacacagggaaatcagctgcagcttttggtgtcaccatgaccatttccaatttttatttttcttagccatccagttaaggccttttgcagagtaaacc

SEQ ID NO: 875144 - DNA, 626 bp, Homo sapiens
ctgaaaaggacaggatctcattcctttttttggctgaatagtactccatggtgtgaacatacgttttctttattcagtctgtcattgatgggcatttaggttgattccatgtctttgctattgtctctgcaatgaacatacacatgcatgtatctttgtaatagaatgatttatattcctttgggtattgtattagtccaattttatgctgctgataaagacatacctcagactgggcaatttacaaaaggaagagktttattggacttacagtttccacatggctggggaggcctcacaatcatggcaaaaggcaaagaggagcaagtcacatcttacgtggatgacggcaagcaaagaaaacttgtgcagggaaacttgcatttttaaaaccatcagatctcatgagattcattcactatcatgagaacagcatagagaagaccacccatcccatgattcagtcatctctcactgggtccctcccacaagatgtaggaattatgggagctacaagatgagatttgggcggggacacagagccaaggcatatcaggtatattcccagtaataggactgctgggtcgaatggtattgctgcctctaggtcttttaacttccagcag

SEQ ID NO: 875145 - DNA, 644 bp, Homo sapiens
actccaagaatccctgggtatattttgtggagaatgcattaagaaacccagatgtagatgccaggtaggcttgttgctagcaggagtcattataggtttgttcaatggacagaggtaggaaatatatttttaaaaaacatgagttcattcatattttaaaatctaagattttacgaggaatgttcagattaataaggacattctgttgacctgtggtgttatgtgagctgttccttctgcatcttttcccctcttagtccacctttcccatagactcttagccttgtctgcccttgagtttcttctgtgattcattttgtctcaaagttagttgtggaattcttggttctcaaagtcagcctaactgtgatttagtgttagtgactgggaaagagtagccacagacagacaaggataccaactccagaagaagtacagactagatctcaaggataygggaggcaacaacagcaaaaacaacaaaaattgcttaccagttagtatgtgccagccagcatctcacgctctctgagctgttcgtgcattgatcctcttggccaccctctgacacaggtgctgatgtgtcatactccccataccgatgagaaagctgagccaccgtgaggttgtccattgcccagtta

SEQ ID NO: 875146 - DNA, 599 bp, Homo sapiens
taagaaatgaaattaatacagagagatcttatatgccctctacccaatttcttccaatgaacgcattttgaaaaactgtagtgtaatatcacaacgaggatactggcagtgatacagtcaagatacagaacatttccatgagcacaataacccctcacattactctttcatagccacaacaacttctgtcccatccccatcccttccttaacttcargaatcctctaatatgttctctgtttctacatttttataatttcaagtattttattattatgtaacatccctttctgcctctagtaattttctttgctctgaagtctacgttattcaatattaatatagctactgcttttcttttgattaatatttacatgctatgtctttttcattattttactttcttttttggattttgttttggtttttttgagatggagtcttgctctgtcacccaggctggagtgcagtggcacaatctcggctcactgcaaactccacctctcgagttcaagagattcttttgcctcagcctcccgagtagctgggattacaggcgcctgccaccacgcccagctaatttttgtatttttagtaga

SEQ ID NO: 875147 - DNA, 638 bp, Homo sapiens
gagtttgtggcagtttttacagaagccctagctgactcacacagacttaactctagaatatcttcgttgagatcagttttgtctatggtgcatcctttaaggatgacaagagatgacttctgcatgccttggtacctatgagtgttatgactcctgaaataatacaaagaaaagaacacacacacacaccaaaaaatgtaactgtctttaagccacrtagtcatgtctagccatatagtcatgtcatgcatgactagccatatagttatgtgactctatttggctaggacaatgtagaactgaattactaggcaaggaaaaaataaatggcaaagtgtaagaaaatggaagggtccttgcaggattcactgtgggttggaagctttgtacaaggagatactctctcctctcctgaagagaatgaatggccaggcatcttcaggaaggggagatggagactgactcgttctggcctcttcagtcatgcgtctacagcaagcagcatgaaggtggattctcacgcattttaacccaagcagcataatcatagcttgcagaccagtctccccatctcatcccccacctaatgcctctgtccaccccaaggcaacacagcccttgggccgcctgcttggctc

SEQ ID NO: 875148 - DNA, 638 bp, Homo sapiens
gagtttgtggcagtttttacagaagccctagctgactcacacagacttaactctagaatatcttcgttgagatcagttttgtctatggtgcatcctttaaggatgacaagagatgacttctgcatgccttggtacctatgagtgttatgactcctgaaataatacaaagaaaagaacacacacacacaccaaaaaatgtaactgtctttaagccacgtagtcatgtctagccatatagtcatgtcatgcatgactagccatatagttatgtgactctatttggctaggacaatgtagaactgaattactaggcaaggaaaaaataaatggcaaagtgtaagaaaatggaagggtccttgcaggattcactgtgggttggaagctttgtacaaggagatactctctcctctcctgaasagaatgaatggccaggcatcttcaggaaggggagatggagactgactcgttctggcctcttcagtcatgcgtctacagcaagcagcatgaaggtggattctcacgcattttaacccaagcagcataatcatagcttgcagaccagtctccccatctcatcccccacctaatgcctctgtccaccccaaggcaacacagcccttgggccgcctgcttggctc

SEQ ID NO: 875149 - DNA, 553 bp, Homo sapiens
gtggggacccagagccttggtaccagcatggcccttaaagcccctgcatctcctccacatttgcagatgactaggtgggtctctcctgagtctcagatctcatactttgttgccaatgctgagttttattcagctagttatttacactccttgacaaaagggtaagttcttccatgagatcttttgtttcttaggaagggaaatttttgtccaggttccgtggttcatgcctgcaatctcaacactttgggaggccaaggaaggcagatctcttgagctcaggagtttgagaccagcctgggcaacatggcaaaacctcatctttacaaatacttcaaaaattagctgggagtggtggtgtccatctgtaatcccagctatttgagagamtgatgtgggaggatggtgtgatcctgagaggtggatgttgcagtgaactgagattgtgccactctccagcctgggggacagaggcagaccctgtctcaaaaaaaaaaaggaaaagaaaaaaaaagaaaaagaaagttcagagcttaaatgatcattactcaaa

SEQ ID NO: 875150 - DNA, 633 bp, Homo sapiens
aataaaattctttggctcaagtgatcgtctttcttgggtccccaagtagctggtactacagacacatgcaaatggattgggctcattatgttggtttttaaagttgtgtttttcaaataatttgttcatgtcatttaatttttcaaatatcttgacataaagtttttcttaatcacctttattcttttgatttatgcctttctcttttctattttttcttctattattttaaatgtattttgttctgctttttctagcttgctaaggtagaaattgattttaaacctttcctctgcactattaaaaatacttaaaactattgtgaatagtgccacaataaacatacgtgtccatgtgtctttatagcagcatgatttataatcctttsggtatatacccagtaatgggatggctgggtcaaatggtatttctagttctagatccctgaggaattgccacactgtcttccacaatggttgaactagtttacagtcccaccaacagtttaaaaatgttcctatttctccacatcctctccagcacctgttgtttcctgactttttaatgattgccattctaactggtgtgagatggtatctcattgtggttttgatttgcatttatctgatggcc

SEQ ID NO: 875151 - DNA, 587 bp, Homo sapiens
cctaaaggctcaactactctgagactcccatgctggagaagccacgggtatacacacttcaaccctgctctgagctcagccttccagcgacctccgccaaggcaccagacctgataatgaggccatcctgggcgctccagatcagcccatccaccacctgaacaccaccaagtgacctcagtcaatgtcacttaagaatcaccctgcccagccttgcccaaattcctgttccaccaaatgatgagataggattaaatagttggtttttaatttttgattgatatataatatacatatatatttatggggttatatgcatagaatgtataatgatsaagtcaagaagtttagggtatccatcaccatgagcattcatcattttcatgtgatgggaatatttcaagtccccacttcaagctattttaaaatgtgcaatccgttgttgttaactgttattttaagccactaagtttgaggtcattggtaatgcagtaaaacattaccagaacgctaagcttaacaatctcaggagagagagagaaatttactggttaatgctattttttgcttcgaggaaatgcttagtg

SEQ ID NO: 875152 - DNA, 604 bp, Homo sapiens
tcttctctcttttcttctttgttaatgtagctagtggcctatctatcttattaatgttttcaaaaaacaaactgctaaatttgttgatcttttcagtggtttcttcatgtcccaatctccctcagttctgattttggttatttcttgtcttctgcaagttttggagttggattgctcttgcttctttaatttttctagttgtgatgttaggttgttaatttgaaatmtttctaactttttgatgtgggcatttagtgctacaaattttcctccttaccactgctttagctgtatcccagagattctggtatactgtatctttgttcttattagttgcaaaaaactttttgattcctaccttaatttcattatttaaccaaaagtcattcagaaggaggttctttaattttcatgtaattgcatggttttgagcaactttttttagtcttaatttctatttctattgtgctgtggcctgagagtgtgttttatatgatttcagttattttgcgtttgctaaggattgttttatatccgattatgtggttgattttagagtatgtgccatgcagcaataagaagaatgtatatattcttttgtatt

SEQ ID NO: 875153 - DNA, 594 bp, Homo sapiens
tctaatgactagtgatgattagcttttcttcatatatttgttggccacataaatgcctttttatgagaagtgtctgttcataatcttcacctattttttgatggggttgttttattcttataactttgtttaagttccatgtagattctggatattagccctttgtcagatggatagattgcaaaaattatcacccattttgtaggttacctgttcattctgatgctagtttcttttgctgtgcagaagctctttagtttaagtaggtcccatttgtcaattgtggcttttggtgttttcatcatgaagtctttgtgcatgcctatgtcctgaatggtattgcctargttttcttctagagtttttatggttttagatcttatgtttaagtctttaatccatcttgagttaatttttgtataaggtgtaaggaaggggtccagtttcagttttctgcatatggctagccagttttcccagcaccatttattagatagggcatcttttctctattgcttgtttttgtcaggtttgtcaaaggtcagatggttgtagatatgtggtgttatttctgaggtctctgttctgttccat

SEQ ID NO: 875154 - DNA, 534 bp, Homo sapiens
agagttgaacgttcccttagacagagcagatttgaaacactctatttgtgcaatttgcaagtgtagatttcaagcgctttaaggtcaatggcagaaaaggaaatatcttcgtttcaaaactagacagaatcattcccacaaactgcgttgtgatgtgtttgttcaactcacagagtttaacctttctgttcatagagcagttaggaaacgctctgtttgtaaagtctgtaagtggatattctgayatcttgtggccttcgttggaaacgggatttcttcctattctgctagacagatgaattctcagtaacttccttgtgttgtgtgtattcaactcacagagttgaacgatcctttacacagagcagacttgaaacactctttttgtggaatttgcaagtggagatttcagccgctttgaggtcaatggtagaaaaggaaatatcttcgtatagaaacaagacagaatgattctcagaaactcctttgtgatgtgtgcgttcaactcacagagtttaacctttcttttcatag

SEQ ID NO: 875155 - DNA, 441 bp, Homo sapiens
gatttcttcatattgtgctagacagaagaattctcagtcacttccttgtgttgtgtgtattcaactgacagagttgaactttcatttagagagagcagatttgaaacactgtttttgtggaatttgcaagtggagatttcaagcgctttggggccaaaggcagaaaaggatatatcttcgtataaaaactggacagaatcattctcagaaactgctgcgtgatgtgtgcgttcaactctcagagtttaacttttcttttcattcagcggtttggaaacactctgtttgkaaagtctgcacgtggatattttgaccacttagaggccttcgttggaaacgggtttttttcatgtaaggctagacagaagaattcccagtaacttccttgtgttgtgtgcattcaactcacagagttgaacgttcccttagacagagcagatt

SEQ ID NO: 875156 - DNA, 423 bp, Homo sapiens
aaggatatatcttcgtataaaaactggacagaatcattctcagaaactgctgcgtgatgtgtgcgttcaactctcagagtttaacttttcttttcattcagcggtttggaaacactctgtttgtaaagtctgcacgtggatattttgaccacttagaggccttcgttggaaasgggtttttttcatgtaaggctagacagaagaattcccagtaacttccttgtgttgtgtgcattcaactcacagagttgaacgttcccttagacagagcagatttgaaacactctatttgtgcaatttgcaagtgtagatttcaagcgctttaaggtcaatggcagaaaaggaaatatcttcgtttcaaaactacacagaatcattcccacaaactgcgttgtgatgtgttcgttcaactcacagagttta

SEQ ID NO: 875157 - DNA, 552 bp, Homo sapiens
tcagctgggagggtccagaagatatacccttgaccaataccttgtgaaataaatttgtgagggcaggacctgcatctttgaagagccctgtaattgctcttctctgtatgtcagatctaacagtggaaatcacagtcactcaactacaaaatttaaatacaatgagaataatcggatcccgaggtggcaggggccatgtgacaacactaaacagtcaaaggcaaggtgggtatagctaccgtaatggacagcagaggcaaagtgacaatcataatagyctgacttgtgtagagctctggcattggctaatttatcatgctgttcctagaagtgaaattgataggaagcctactgcattcctacttaaattataaaaatagaaaatttccaggttgaatgaacaaaactgcccctcaatcaatttccagacttgagccagtttacagacccagaaccctttgaatgaaggggaggctaggtcaccttgaggaaggactccactacattaccaacactttatgcagtgaatcttttgcctatccttcccccgag

SEQ ID NO: 875158 - DNA, 663 bp, Homo sapiens
acctgtattcttggatattttattttttgttgcaattatgaatgtgcttatgttcctgatttggctctcagcttgggtgctcttagtgtataggaatgtgtctgattttgtgcattcattttgtatccctttgctgcagttgcttatcagctcaatgagcttttaggtggagactgtgaggttttgggggttttctagatatagaatcgtgtcatccaaaaacagcgatagtttgacttcttcacttttcatttggatgcattttatttctctctcttgtatgattgctctggccaggacttccaatattgtgttaagtatgagtgatgagagagggtatccttgtcttcttcctggttttaaagggaatgcttccagcttttgcctattcagtatgatgttggctgtggctttgtcatagatggtttttattattttgaattatgtttcttcaatgtctagtttattgagggtttttaacatgatgggatgatgaattttatmaaaagcattttctgcatctattgagataatcatgtggctttgtatttagttccatttatttgatgaatcacatttattgatttgcatatgttgaaccacccttgcatcccaaggatcaagcctacttgatcatggtgaattagctttttgatgtgctgc

SEQ ID NO: 875159 - DNA, 583 bp, Homo sapiens
tatttttatttatttattcattttgagatggagtctcactctgtcaccaggctggagtgcagtggcacgatctcacctcattgcaacctctgcctccctggttcaagtgattctcctgcctcagcctccctagtagctgggactacaggcgtgcaccaccatgcccagctaatttttgtatttttagtagagacggggtttcaccatgttggccaggatggtctccatctcttgacctcatgatccacccacctcagcctcccaaagtgctgggattagaggcctgarcgaccacgcccggccaaaaacctttacttattaagagggaagacttagctttccaaacaatctgtctcttgtcttttccttctttttttaatagtttgttgccaaggaaaacaaaaatcttccatcatcctttaacattacctgaaaatcttaatcagttttaccacgaggtaagattcttatagactttttataaccctatacacatttttgttaaatagcaggtcagtgcctcaagataaccttgttgtgctttgattcccaagttcaatttacagaaaaagccaattgtact

SEQ ID NO: 875160 - DNA, 657 bp, Homo sapiens
ctaatgggagttacatgaataaatctcaaaagcactgagaagaaggagttttgctattatagggaattcagagagctcagatatgatttcatttgaaatgttgaaatgttatcgaaaacgtctgtgagaaatgctcaataagcagaaaaatattttatatttggcaaaatgactttgtatgttattatagagttaaatatawagaatattattaatcttttaatagaatttttaaagacgtttaatttttttctgattctagtttaaactgaggaatgaagccaggtttaagagaaaatacataaatttgatcatgcctaactagtgtcctctaggttttatagaaagaaattaataacttttcaaactactgtaaacatatttatccctgaaggcctgctgtgatatatgcgttaacctttttctaaattgaaactgtcactaaatctttctttaatcaatttccacaacaagcatgtgaggtatctattgttttacaaatttttttatatttcaacgattagagagtctattaatgacatgcccaaattgcccagtaaactccgtagacaactcatgaagtcttctgagccctaatctcaggctccaagaagccacatttcacaggatcattttgcttagtgtatttaaatatat

SEQ ID NO: 875161 - DNA, 637 bp, Homo sapiens
cctagcttgctgatgggaagaatagggcactgaccctgacatttaccccgtgtgacagactgactcttggtctgccctgcaaggtttcccatatccttcttctggtaatagacacagattcttgtttacagagcctgtgatccaatgtaactgatttttgttgtctattacagcaaacttgaaagatccctttagaatttttataccagtctgtacaaatgactgttttataaatctagcaaataagatcagaaaactcaccatgaggaagggkaaaatctgatcctgggttgttattttgcagagcaagttcaaggcagaggctgacccagcctccgtgggaccttgagcaggcagaggggaaatgactgtgtagagcttaaacaaaaagagctgagaagccagagaactgaatgttggcagagaactgacctactgtagtgtggaacaaatgtaatggggcttaatatggtgaaatgacatgttcgctttctccccacgtaccttgaaaaactactacaagaatagcagatcatcagaccaagtattggtgactgccttgataagtatggagttagaagatgtctacctctgacttcaggaatgcttattttccataatgacactatgaggtagc

SEQ ID NO: 875162 - DNA, 344 bp, Homo sapiens
gagccctcaccatggatgactttgcccctagaaggaaggggggtcagtgcttcccttccttgagtcggggcctggggcagcaaggagattccgcttatctcagatccctgggatcagagagagctggaccagcctcttatctggaagcccggggmtcccacaagcaagtcacccaagcagttgatcacaagtctccccacaagaaaggggacgagacatggggggaatggaggagggagccttgtccagctgtggaacctaccaaagaccccagactccaagaagttaaacctccaggtctacaggcagggggaaggatgaaaagaattccagatggtctgact

SEQ ID NO: 875163 - DNA, 641 bp, Homo sapiens
atatcttcacacacaaaaaaaaactagacagaagctttctgagaaaattctttgtgatgtgtgctttcgtcttacagagttgaacttttcttttgattgaacagtttggaaacattctttttgtagaatctgaagatggatatttgcagcatttcaggcctatggtgaacaggaaatgtcttcacataaaaactagagagaagcattctgagaaagttccttgtgatgtgtgcattcatgtcacagagttgaaactttccttggattgagcagtttggaaagagtccttttgtagaatctgcaaaaggatgtttgtgagcacattggagcctatggtgaaatgggaaatgtcttcacataaaaactagacagaagttttctgtaaaacttctttgtgctgtgtgctttcaccacaaggagttgaacctctcttttgattgagcagtttggaaacactctttttgtagaacytgcaaacggatatttgtagtgctttgaggcctatggtgaaaaagaaaatatctgcatataaaaactagtcggaaactttctgggaaactttctgagaaacttctttgtgatgtgtgctttcatctcacagagttggatcttgctttcattgagcagtttggcaacaagtc

SEQ ID NO: 875164 - DNA, 609 bp, Homo sapiens
agattctacaaaaagactgtttccaaactgctcaataaacagaatggttcaaccctgtgagacgaatgtgcacatcacaaagaagtttctcagaaaactcccttctcatttttatgtgaagatatttccttttagaacataggcctaaatgcactcccaaatatacctttgcagaatctacaaaaagactgtttccaaactgctcaatcaaaagaaagtttcaactctgttagatgaatgcacacatcaggaagtagtttctcagcaagcttctcacaagtttttatgtgaagatatttccttttkcaatgtgggtctcaaagcactcaaaaaaatccctttgcagactctagaataacagagtttacaaactactcaatgaaaagaaatgtttacttctgtgagatgaatacacatatcttaaaacagcttctcagaatgcttatttctagtttttatgtgaagatatttcctttttcaccataggcttcaacttgctcctaaatatccctttgcagattctacaaaacgactgtttccaaactgctcattccaaagacaggttcagctctttgagatgaatgcacacaacacaaagaagtttctcag

SEQ ID NO: 875165 - DNA, 605 bp, Homo sapiens
aattcagtgaactgaatgtgcacatcagaaggaagtttcttagaatacctctgtgcagttattatgtgaagatatttacttttccaccataggccccaaggctctccaaatatccaattgcagattcaacaaaaagtgtgtttcaaaactgctcaatcaaaagaaaggttcaactctgtgrgaggaatgctcacatcacacacaggtttctcagaatgcttctgtcttttttctgtgtgaagatatttccttttccactagaggatgcaaagcgctcaaaatatccacttgcagattttacaaaagggtgtttctaaaatgctaaatcaaaatagattcaagtctgtgagatgaatgcatatatcccaaagaagtttctcagaatgcttctgtctagtttttatgtgaagatataaaattttccactataggccacaaagcgcttcaaatatccacttgcatattcttcaaaaagagtgtttcaaaagtgatgaatcaaaagaaaagttcaactgtgtgagatgaatgcacacatcacaaagaagtttctcagaatgcttctgtctagttttatgtgcagatatttcctctacaatagggaacaa

SEQ ID NO: 875166 - DNA, 594 bp, Homo sapiens
atatccacttgcagtttctgaaaaaataatgtttccaaactggtcaatcaaaagaaagtttcaactctgtgagttgaatgcacacatcataaagaagtttcacagaattctcctgtgtagtttctatgtgaagatatttccttttccacaataggcctcaaagcgttccaagtatccacttgcagattatacaaaaagattgtttcaaaactgctcaatcaaaagattggttcaactctgtgagaggaatgcacacatcccaaataagtttctcagaatgtttctgtgtagtttttatgtgatratatttcctttttccaccgtaggctgcaaagggttacaaatatacacttgcagagtatccaataagagaggttcgaaagtgctcaatcaaaaaataggttgaattctgtgagttcaatgcacacatcacaaagaagttgctcagaattctattgtgtagtttttatgtgaagatatttaattttgcaaaataggcctcaaagcacaccaagtatccaatggcagattctacaataagagcgttttaaatctgttcaatcaaaagaaaggttcaactctgtgagatgaata

SEQ ID NO: 875167 - DNA, 533 bp, Homo sapiens
aaaaccgtgtttcaaaactgctctaccaaaagaaaggttcacatctgtgagatgaatgcacacatcacaaagaagattctcataatgcttctgtgcaatttttatgtgaagatgttacttttccacagtaggcctcaaagtgcttcaaatatcaacttgaagattatacaaagagagtgtttcaaaactgctcaatcataagatagcttcaactctgtgtggtgaatgcacacatcaaatgaagttactcagaatgcttctttatagtttttatgttatcatatttacttgtccacaataggcctcaaagtgctccaaatatcctcttccagatttttcaaaaacagtgttwcaaaaatgctctaccaaaagaaaggttcaacactgtgagatgaatgcacacaaccaaaagaagattctcagaatgcttccgtgtagtttttatttcatgatacttccttttcctccataggctgaaaagggcttcaaatatctacttgcagattcgacataaagagagattcaaaactact

SEQ ID NO: 875168 - DNA, 637 bp, Homo sapiens
aaaactttctcccattttgtacattgcctgttcactctgatgtaatttcttttgctgtgcagaagctctttagtttaattagatcccatttgtcaattttggcttttgttgccattgcttttggtgtttaagacatgaagtccttgcccatgcctatgtcctgaatggtaatgcctgtgttttcttctaggatttttatggttttaggtctaacgtttaagtttttaatccatcttgaattaatttttgtataaggtgtaaggaagggatccagtttcagctttctacatatggctagccatttttcccagctccatttattaaacagggaatccttttccattgctggttttgttcaggtttatcaaacatcagatagttttagatatgcagcgttatttctgagggctctgttctgttccattgwtctatttctctgttttggtaccagtaccatgctgtcttggttactgtagccttgtagtatagttcgaagtcagggagtgtgatgcctccagctttgtgcttgtggcttaggattgacttggtgatgagggatcttttttggttccatatgaactttaaagtagttttttccaattctgggaagaaagtcattggtagcttgatggggatg

SEQ ID NO: 875169 - DNA, 581 bp, Homo sapiens
ccacaatgtcccactagggcaaaggatgacacttgctgggccctccccaaccttcaccccaggccccccaaactcagagctggttctgtagagaattccagagtaaactctaagcatcctacatcctacctgaggcttccttcctggtgtggcagccctctgtggcccagcattgggcataaaaaacagactgacccctccagcaggyttctttgctggagcttctagctgcttctccaggtttttgaccatcgactgcaccagtgttcctggaaggtgaaaaagtggctgtgtcagtgggagaagcctagaaaatgaacatctcagttttgtggctcatgtccaggctccagtgtggatagagggaatgagcagaagggccaggaggaagaaggctgagcaaccacaaaaaaggagacagagaaggccaggccaacaggtacacagtgaacagaggcttggcatattctgaaaatgtgactgtgcaaacttaatgacatggctagtgacagaggcttaggaagctgtgcttccctctaatgagaggctgaggcaggacctctgctcagtgtggggaatga

SEQ ID NO: 875170 - DNA, 586 bp, Homo sapiens
ctgtaatggggtccactggagccatacctggggcagcctaggagcccagtcacagggtatgggaaagtgaagctcatgatgtgaggtggcaccccctcctttgaaatctttttggccgctagctccttatattctgggcctgtgatgggaggggcatccctgataatctcctaaatctgctggggtcattcttccattgttttggacagtaggtcctggcttctctttaggtggctaattcatctccccattgtcatgataaatagcatctggcttcccttgagatgcctgatccctagtaaactctttacgaatggtcacttggccacacttccaaacagactttttcatgtttttcaatatggataggctgaggattttccaaaaattcaagttccgtttcctttttaattagcaattccatctttaaggcatttctcttttctyatattttactgtaagcagtcaggaggaaccagacgttctgtcaacactttgcttacatatttttcacccaaatattcaatttcatctctggcaagttctaccttccataaatcagtagggcatgaatacaactcagcca

SEQ ID NO: 875171 - DNA, 614 bp, Homo sapiens
agctaatcaagttttcagaaagttgtagaatgttttcttagctagacagagacaagtaattgccctgcgtgtctaagcatttggtcctcctttaaaccaacactacttacatatacaagatttttttccaacgttttttagctaggtggggagaaaataagtttctattaataaaaagtttgtgcttcttaatattcaaaactagaactgatatcaatgttataaaacattttcacttgaactgtgccttcagattttaattactatattattcacgatggaatagtttgcatcactcacatccaataaaagtaaaaatgagtataatttaaaagttcaggtctaaataactacaatttctycttttggctgacattctgggcagcaaatcttacctcacgtttctgcattcctgttttcagttcagtgttcttttgtatttgctttcgacccatgactgaagttgtcacattgatgctgccaattctctgtgcctttgtaagtgagaaaaacttttccttctcctcatatggggaaagtaataagtcatttacaaaggcctgtttgtaattgtggcctttagcgtctgtggactgcgttttaggtgcattatg

SEQ ID NO: 875172 - DNA, 598 bp, Homo sapiens
ctgaaggattttgtcaccaccaggcctgccttacaagaggtcctgaaggaagcattaaacatggaaaggaacaaccagaaccagccactgcaaaaacataccaaattgtaaagaccatcgtctctctgaagaaactgcatcaactaatgggcaaaataaccggctagcatcataatggcaggaacaagttcatacataacaatattaaccttaaatgtaaatgagctaaatgccccaattaaaagacacagaatggcaaattggatagagtcaagacccatcagtgttctgtattcaggagacccatctcatgtgcaaagacacatataggctcaaaataaagggatggaggaatatttaccaagcaaatggaaagcaaaaaaaaaaaaaaaaaaaagcaggggttgaggggttgcaatcctagtctctgatgaaacagactttaaacmaacaaagatcaaaatagacaaaggaaggcattacttaatggtaaaaggatcaatgcaacaagaagagctaactatcttaaatatatatgcacccaatacaggagcactcagatccataaagcaagttcttagagacctacaaagagact

SEQ ID NO: 875173 - DNA, 570 bp, Homo sapiens
ctgaaactattccaaacaatagaaaaagagggaatcctccctaactcattttatgaggctagcatcatcctgataccaaaacctggcagagacacaagaaggaaggcaaatttcaggccaatatccctgatgaacatccatacgaaaatcctcaataaaatactggcaaaccgaatccagcagcacatcaaaaagcttatccaccgctatcaagttggcttcatccctgggatgcaaggctggcttaacatatgcaaatcaataaatgtaatccatcacataaacaaaaccaatgacaaaaaccacatgattatctcaatagaggcagaaacrgccttcgacaagattcaacagcccttcatgctaaaaactctcaataaactaggtatagatggaatgtacctcaaaataataagagctatttatgtcaaacccacagccaataacatattgaatgggcaaaagctggaagcatttcctttgaaacctggcaaaagacaaggatgccctgtctcaacactcttattcaacatagtattggaagttctggccagggcaatcaggcaagag

SEQ ID NO: 875174 - DNA, 392 bp, Homo sapiens
aaatagtctctcagaccatgatgcaatcaaattagaattcaggattaagaaactcactcaaaaccacacaactacatggaaactgaacacagtgccatcaaattagaactcaggattaagacactcactcaaaactgcacaagtacgtggaagctgaatgactactgggtaaataatgaaatcaaggcataaataaataagttctttgaaaccagtgagaacaaagacacarcatacgggaatctctgtgacacagctaaagcagagtttagaaggaaatttatagcactaaatgcccacatgagaaagctctgaaattgacaccctaacatcaaattaaaagaaccaaagaagcaagagcaaacaatttcaaaagcctgcagaagacaaga

SEQ ID NO: 875175 - DNA, 392 bp, Homo sapiens
aaatagtctctcagaccatgatgcaatcaaattagaattcaggattaagaaactcactcaaaaccacacaactacatggaaactgaacacagtgccatcaaattagaactcaggattaagacactcactcaaaactgcacaagtacgtggaagctgaatgactactgggtaaataatgaaatcaaggcataaataaataagttctttgaaaccagtgagaacaaagacacagcatacsggaatctctgtgacacagctaaagcagagtttagaaggaaatttatagcactaaatgcccacatgagaaagctctgaaattgacaccctaacatcaaattaaaagaaccaaagaagcaagagcaaacaatttcaaaagcctgcagaagacaaga

SEQ ID NO: 875176 - DNA, 627 bp, Homo sapiens
aaaccccaagccttagcagcttctacatggtgttgagcctgccagttcacagaagtcaagaattgaggtttgggaacctctgcctagatttcagaagatgtatgaaaactactggaagcccaggcagaagtttgctgcaggggtgggtctctcatggagarcctctgctagggtagtgcagaaggaaagtttggggtcagagcccccacacagagtcctcactggggcactgcctggtggagctgtgagaagagggccactgtcctccagaccccagaatggtagatccaccaacagcttgcaccatgtacctggaaaaactgcagatgctcaacaccagcccgtgaaaccaaagccacaggggcatagctgcccctcttgcatcacctcttgcatcagcataacatagatgtgagacatgcagtctaaggagatcattttggagctttaagatttgactgccctgctggattttggacttccatggggcctgtagcccctttgttttggtcaatttcttccatttggaatggctgtatttacccaatgcctgtacccccattgtatctgggaagtaacaatctgcttttgattttacaggctcatgggcacaagggacttgccttg

SEQ ID NO: 875177 - DNA, 589 bp, Homo sapiens
gcttgacaaagattgtttgagcatctacttttgctgggacctgtgctaagccaatgcagtaataaataaataactgttgcactgtattgatagttctgctgttctgatgtctctaccaataataaaatgcacctgttggaggttgttagtttttctttctcaactgccacagatacccagagaaatcctgtcttggtctctatgtgaataataaaattagccaaagttcttargctaggatttcttagcttggaattcttaggacctgcagttatttgcccacaatctcaaagtataagctacaaagcttgaagatgttctatcagacaataaccccgatggtaattaaagaaaacaggaataaacagaggttgttaaggcagatgaaagcagttaattcatttttttacttgagatattctcaaggtcagtctagttatagtctcattctttgcacatatgtggggaagtaagcacccttagagaattcttttctagggactctccctccactgcaaccccctccccaacacacacacacacacacacacacacacacacacacacacacatacacacagagtagaag

SEQ ID NO: 875178 - DNA, 570 bp, Homo sapiens
ggtagacccggcggcccgcccgggtcacctgcgccggctgctaagggggcgcccttacctgcgcgcccggaaggggcttggtgactggcctcggttccctcagtccggagagtgtctctgccattccctgcagggctgacgccccagggctgggattcgraaggatctcggcacctctaccctacctgggattctcacctccaaccccgttggaggccccctggccttagtggaaactcatctccttgtctgcgcacccgcccccgaaatatgacctacttgaaatgtgacctactttttaaaagaaacccttaacaatcacgggaaaaccggatccaaaatttcgataagcatttttctttgaaatactattctattgcatcactgctcgaaagcttgaaaggtcaatggccacttttagttgaggccgcggctatgggaagttgggcgaggaagggggaggggtgggagggaggcgcgtcttgcaaactttgcctggtgccccccctgccggctctgggaggaaacgggaaccagctcccaaccttggggtctgcagccggggaccaa

SEQ ID NO: 875179 - DNA, 567 bp, Homo sapiens
ctcaaaaaacaattaaaaaaacacactatttggcatttttctgcccaggagatttttttcttttcctttattaatttatgtatatcaatatggacttatagatgtggattttatatgttaggttataatccaatactattttatttgctttattgctcaaatgttccagttttgaacattgggaactcttttagttttttacttggcccatctccctttgacatttgccatcattgcaggtatgattttgttctctgctccagtcctgcggtctgccatttctccaagaagcccttgttctttttactaaagagtaatgttaaaaactaagatctgatcactaggtgtttttatttctatgggagtatttttttttatttatgggagttttatttttttatgawtatttttattatcatcttttacttctctcttgccctcctcatgtatatcagttatcaaaatatcattcttttattcctactgctgttacccttatcccatctacagtacttgttagctatatagccttgggaatctaagtcttagttttctcatcaatgaaat

SEQ ID NO: 875180 - DNA, 605 bp, Homo sapiens
tctctggctgcccttaacactttttttttttcattttaaccttggtgaatctgacagttatgtgtcttggggttctcttctcaggagtatctttgtagtgttctctgtatttcctgaatttgaatgttggcctgtcttttgtagctggggaagttctcctgggatatatcctgaagaggtgttttccaacttggttccattctccccatcactttcaggtacaccaatcaaatgtaggtttggttttttcacatagtcccatatttcttgaaggctttgtttgttccttttcattcttttttctctaatcttgtcttcacactttatttcattaagttgatcttcagtctctgatatcctttcttctgcttgatcractcgactattgatacttgtatatgcttcacaaagttctcatgctgtgtttttcagctccatcaggtcatttatgtcctctaaactggttattctagttagcaattcctctaaccttttttcaaggttcttagcttccttgcattgggttagaacatgctcctttagcttggaggagtttgttattacccaccttctgaagcctacttctgtcaattcgtcaaactcat

SEQ ID NO: 875181 - DNA, 587 bp, Homo sapiens
caaagtaatttatacattcaatgctatccccatcaagctaccattgagtatcttcacagaattagaaaaaaactactttaaatttcatatggaaccaaaaaagagcctgtacagccaagaccatcctaagcaaaaagaacaaagctggaggcatcactctacctgactttaaactatactacaaggctacagtgaccaaaacagcatggtaatggtaccaaaacagatatacaggccaatgtcacagaacagaggcctcagaaataatgccacacatctacaaccatctgattttcgacaaacctgacaaaaacaagaaatggggaaaggattccacatttaataaatggtgttgggaaaactggctagccttatgcagaaaacagaaactggaccccttccttaarcctatacaaaaattaactcaagatggattaaagacttaaacttaagacctaaaaaccataaaaaccctagaagaaaacgtaggtaataccattcaggatataggcatgggcaaagacttcatgaataaaacaccaaaagcaatggcaacaaaagccaaaatagacaaatgggatctaatt

SEQ ID NO: 875182 - DNA, 574 bp, Homo sapiens
ttctgatcatttacttacagcttgactaaagttaagtgcatagtgccaactttattcccataggaaatgtaagttttctctgcacctgagaagactgtgtcacaaatggaatttcaggggtaatgcgacttttgcaggggcaagccccaaataataggggaaaggtctgaccatcctgatgagaccattgcattggttgtcttgaggacacaggagaatttggaagaaagaaggaaagtgacacctgaatgtggtgtgactactcatctgaagagaaaatatctgtcagaaatatacagaataaacataggcttctrtcaatgtgacttggctatcaccagggtgacataaatgcaataatggcttgctcttctccagggtaacccaatcagctgagtttaccccatttttaaaaaccacttaactttaaactgtgtactaggtgaaaacctttctcatcaattagtcacttactatttcaatgatgtgtctttctgcccctatttatccatggtagtgctgtcttaaatataagagcctaaaggacgtagacaagctctctgggattattatt

SEQ ID NO: 875183 - DNA, 631 bp, Homo sapiens
gaacttggttataaaatgaaattatgaaaaagttaaaaaatgctgggaggaatggagaagaaattagagatttaaaatatgtaacttctaaaaataataaataaaggcaattttaactaatttagctacttacgttgcttttgagaaacgatgattttcatttttcatgaagagtaaatttttggaagcgagacagtgckgctcacccagtcatggcctctgttctaccagacttttagtttttcatttgtttgtagtgatcttctggatttttagaacgctggagtcattgctgacatcttggtcctgtaaaggagaggaaaaatgtcagttctaaagctaatcccagtgtgttctctacacatattttttaaccttctggtatgggtatctattatgttttagagggcatctcacattatattagcatacctatttatcatattgtattagtattatattgtaatatatttacagaattcttggccagatacacaacagaaaaattatagagaatctaaatcattatttttgttggtctatcagttgccaaaaagtactcacttattatgtttcaataattagaatgtgaatgaaaaagaataaatatttgaatgttgttttaactttc

SEQ ID NO: 875184 - DNA, 631 bp, Homo sapiens
gaacttggttataaaatgaaattatgaaaaagttaaaaaatgctgggaggaatggagaagaaattagagatttaaaatatgtaacttctaaaaataataaataaaggcaattttaactaatttagctacttacgttgcttttgagaaacgatgattttcatttttcatgaagagtaaatttttggaagcgagacagtgcggctcacccagtcatggcctctgttctaccagacttttagtttttcatttgtttgtagtgatcttctggatttttagaacgctggagtcaktgctgacatcttggtcctgtaaaggagaggaaaaatgtcagttctaaagctaatcccagtgtgttctctacacatattttttaaccttctggtatgggtatctattatgttttagagggcatctcacattatattagcatacctatttatcatattgtattagtattatattgtaatatatttacagaattcttggccagatacacaacagaaaaattatagagaatctaaatcattatttttgttggtctatcagttgccaaaaagtactcacttattatgtttcaataattagaatgtgaatgaaaaagaataaatatttgaatgttgttttaactttc

SEQ ID NO: 875185 - DNA, 631 bp, Homo sapiens
gaacttggttataaaatgaaattatgaaaaagttaaaaaatgctgggaggaatggagaagaaattagagatttaaaatatgtaacttctaaaaataataaataaaggcaattttaactaatttagctacttacgttgcttttgagaaacgatgattttcatttttcatgaagagtaaatttttggaagcgagacagtgcggctcacccagtcatggcctctgttctaccagacttttagtttttcatttgtttgtagtgatcttctggatttttagaacgctggagtcattgctgacatcttggtcctgtaaaggagaggaaaaatgtcagttctaaagctaatcccagtgtgttctctacacatattttttaaccttctggtatgggtatctattatgktttagagggcatctcacattatattagcatacctatttatcatattgtattagtattatattgtaatatatttacagaattcttggccagatacacaacagaaaaattatagagaatctaaatcattatttttgttggtctatcagttgccaaaaagtactcacttattatgtttcaataattagaatgtgaatgaaaaagaataaatatttgaatgttgttttaactttc

SEQ ID NO: 875186 - DNA, 628 bp, Homo sapiens
ttgtagagatggtagtaacatggtaagggaaaaacaaataaattaaaataataaatttggcgacaggccttggcaagaagtggaataatatgttctcagaaacttgaagaggtacttctcattccaaaagttgataattaaacagcctccaaataaacttaatgctcactctctttttactagtgagtgattaactttgccgtggtgagaataatgacccagctactggcctagtattaataacagggacagattattgtgcaagtaaggcaaccctcaatcatttaaactctagaatttaaaatttaatgaagcatgaactttttttttttttgttggagacagagtctcactctgtcatccaggctggagtgcagtggcatgatcttggatcactgaaacctccgcctcctgggctcaagcaattcttctgcctcagcctcccaagtagctgggattacaggtggcagccmccatgcccagctaatttttgtatttttagtagagatggggtttcgccatgctggccaggctggtctcgaactcctgacctcaggtgatccacgtgcctcagtctcccaaagcactgggattacagacgtgagccaccatgcccatcctagaattc

SEQ ID NO: 875187 - DNA, 603 bp, Homo sapiens
tctgggaattctgggcctttagaaataatcattcccagtgatacagggatgtgcagcatccagacactgcttaatcacagtgagctgccgtcttccctgaataagttgtatcttataacattgaagtgaatgaaaatgtattaktatttgagaatttactattccttcacctccttgcacatgtaaattaaagatgttttggaaaatatgagaacttgatgttcactgccctagagcactattctccaaccttttagattcctgcaatctgttaataaaatattgtaggacaacaactctatagactgatacatgctgctctcaatccatatactacatattaggacagcttttcttttctaaatgagcatgaatataaatagaaattctagtattttcttcacctaccccagtgaatcatctttatattttacttgggaaactgctacagttggctagtgggtcttcacttttattgctttgagaaatggataaaagacatagactatcacccctccaaaaatgtgcatatggccccatacaagacacatgtactgccagagcttggggaactccctagaatctactcctagaccaccctag

SEQ ID NO: 875188 - DNA, 614 bp, Homo sapiens
aatccctcaggataagaaaccagaacttaatagccaagattttatacattttcaggcatgtgatatcattgctaggttgtcctccaaaagtgttgtaatagtatatgctccccacctacactgtatgacatcatcacttcctgaagctaaaccaaggagatgttatcatgtaacatgcaaaggttaactgagttggaattatgtactaattatgatgaaagataatttctcagaatttccttagaaaaatagtcttctgtgcttggaaaaggggaagacagtggcaggagtttaacttctgacttcgtttggaggatgtttgattacaatgctcttgactcagaaacataaattgccacaaaagaccttctgttggccattaaactgcagagcacaggcaggaaactacgtagcaygtcaggcttttgtttatttaacaccgtcggtgagatgtacttagcagttattatctgctcagtgctcttctaggcatgaaagcaagggggaaaaatgtaggtatgtttcttattctcaagaattttattaattgaagagaaaaaatatatatggcagccaaacaaggaaatatttgaaaagtaacaattgagttgcat

SEQ ID NO: 875189 - DNA, 587 bp, Homo sapiens
caaatgtagtttgtccttgactgaaacgttgctaggcaatgcatgactatatatgattctatatctattttgtggcaatcttattagataaagatagtattataataaagcgaatactttgggctaggatcttctatggcattaactttttgatcttccctcccagattgaaaagactgctcagagatttgtgtgtccttttccctgccaagactcatagatatggccaggatgttctgtaacatacgcattacagtgccacagtaatcaaacttactgtctgtgcaagaaacatatggtacaagaataataattctatatttagaaaaagtaacttcagccaaagctttcaatttcttgaacttcatattcaaaaagtcaggaaaacattatgttatgtccagaaaatgattacattcatccataaagaraagtaagcataataataattatgtccttattaaaaactcaaagaatatatgtttctgagtaaagaatagacaatgaaaacaaagttcactaatgccagaatattgaggaagacagcccctggaggagggaggagactttgtaatataactataatt

SEQ ID NO: 875190 - DNA, 616 bp, Homo sapiens
tttgtagccagtgagtatcaaaagccttggtagatccacagcaaagaattaaaaaaaaaaaaaaatggagggtggagccaagatggccgaataggaacagctccagtctacagctcccaacgtgagtgacgaagaagacaggtgatttctgcatttccaactgaggtaccaggctcatctcactggagagtgtcagaaagtgggtgcagggtgcaggacagtgggtgcagcgcactgagcatgagccgaagcagggcaaggcattgcctcacctgggaagtgcaaggggtcagggaattccctttcctagtcaaagaaatgagtgacagacaacacctggaaaatcaggtcactcccacactaatactgtgcttttccaacggtcttagcaaacggcacaacaggagattatatcccacgcatggctcagagggtcctatgcccayggagccttgctctttgctagcacagcagtctgagatcaaactgcaaggtggcagcgatgctgggggaggggcacctgccattgcaccgaggcttgagtaggtaaacaaagcagcccagagctctaactggggggagcccaccataactcaaggaggcctgcctgcctctg

SEQ ID NO: 875191 - DNA, 599 bp, Homo sapiens
cactaccttgccctgtgagtctttttttccccctagcttgcctactggtggtgactttcgatgtcttcagctttatgtgggtgcctcagctttaaaatttcacattgtacagctaacagcttttgtcttctaccttgtgttgaggcggtcaggtaaaacccaagatgctgggcaggaggaattggcaaattctcctaatgggttaccttcagtactatctgacagatcatcttttagtattaagtctttcttattgtttccaacttccaaagataatccttatttttcagagagttctctttcaataattttatgtctatgtgtctacatgtgtctgtgagggggagtgtgtttattactttcaaatactctctascaagagggttaatttggtcaccttattcactgtatgactggatctctatgcaattttatatcttaattttctacattcagttatttaatatatttggaaagtgtattaatccatggagtgaggtgggacactaagtgggaaaacattcagcttctcagttatttgtttagcaacactaactttttctttttatttgggatatttcttttattatgtacttcat

SEQ ID NO: 875192 - DNA, 638 bp, Homo sapiens
gtctcactttctttgaatctccagaatctagctccatgagcaagatattatagggatttattaaaatttgctaaataatggaataaacatcttaatgtccaattggaatacttgattctttatagatatccactcaacatagttttttgtgtgtgtacctactcatgccaggcattatacgtacatgagacagacacagcctgctatccatggtacttttggcataaggagttataaaaagcattaaggaggtaatttgcagccaagtgtaatattagagtggtgagaaggctcakgctgttttgacagtctatagcagggggggaaagttacctcatgcagttagttacttagatactcctttaaccaaatacataggattaaattgctagacgttttcgtagactcagaaagccatatggtgcaagtgccttcactgcctacattataatgaagtcttctcttcaacatcagaatactatgttttatgttttttgtttgtttgtttgctttttgagatggagtctcactctgtcatccaggctagagtgcagtggcgtgaacttggctcactgcaacctctgcctgctgggttcaagcaactctttgcctcagcctccccagtagcttggattata

SEQ ID NO: 875193 - DNA, 700 bp, Homo sapiens
tcttctttggagaaatgtttattcaagtcctttgctcaatttaaaatttggttgtgtgtctttttggtgttgttgtaagagttctttatatattccaaatactgtattcttgttaatatgcgatatgcaaatatttcttccattttataggttgtttcctcactttcttaataatatcctctgatgcccagttgattttaattttgatgatgtccaatttacctattttttccttgtgtttcttgtactttcagtggcatttctaagaatatgttgccaaatctgaggtcatcaagatttactccttctgtagttttagctattacacttacgtctaagattcattttgagctaattgtatatatagtatgaggtatgggttcaaccttatacttcatattttgcawgtggctgtctggttgtccaagaacatttgttgaagagaccattcttttccacactgaatggtcttggcatccttgttgaaagtcagttaaccgtaaatatatgggcttatctctgaactctcaattctatttcattgttctgtatttctgttcttctgtcagtacaccattttgattactgtttgatttgtggcacttttgaaattgagaagtgagagtgcctccaattttgttcttccttttcaacattgttttggtaatttgagattgtaattccatatgatttttagcat

SEQ ID NO: 875194 - DNA, 566 bp, Homo sapiens
atttatcaatttcttttagattttctagtctattttcatagtggtgtttttagtattatctgatggtagtttgtatttctgtgggatcggtggtaatacccctttttcattttttattttgtctatttgattcttctcttttttcttctttattagtccaactagtggtctgtctattttggtaatcatttcaaaaaaacacctcctggattcattgattttctgaagggttttttgtgtctcgatctccttcagttctgctctgatcttatttttttttttgtcttctgccagcttttgaatttgtttgatcttgcttctctagttcttttaactgtgatgttaggktgttgattttagatctttcctgctttctcctgtgggcatttagtggtatacattttcctctaaacacggctttagctgtgacccagagattctggtacattgtgtctttgttctcattgttttcaaagaacttatttatatgtgccttaattttgttatttacccagtagtcattcaggagcaggttgttcagtttccatgtagttgtggggttttga

SEQ ID NO: 875195 - DNA, 587 bp, Homo sapiens
attaaagaactagagaagcaagaccaattaaaagacacagactttgtcttttaattcaagttcaaaatctaggagaagataagaaataactaagatcagaacagaactgaaaaagatagagacatgaaaaactcttcagaaaatcaatgaattcaggagctggctttttggaaagattaacagaacagatagaccactagctagactaataaagaaaaaaaggaagaagaatcaaatagataaaatgaaaaatgataaaggggatatcaccagggarcctacagaaatgcaaactaccaccagagaatactataaacacctctacgcaaataaactagaaaatctagaagaaatggataaattcctgaacacatatacattcccaagactaaaccaggaagaagtcaaatccctgggtagaccaataacaagttctgaaattgaggcagtaattcatagcctaccaaaaaaagcccaggaccagacggattcacagccaaattctaccagaggtacaaagaggagctggtaccattccttctgaaaccatttcaaaccactgaaaaggagggacttctccctaactc

SEQ ID NO: 875196 - DNA, 587 bp, Homo sapiens
attaaagaactagagaagcaagaccaattaaaagacacagactttgtcttttaattcaagttcaaaatctaggagaagataagaaataactaagatcagaacagaactgaaaaagatagagacatgaaaaactcttcagaaaatcaatgaattcaggagctggctttttggaaagattaacagaacagatagaccactagctagactaataaagaaaaaaaggaagaagaatcaaatagataaaatgaaaaatgataaaggggatatcaccagggaacctacagaaatgcaaactaccaccagagaatactataaacacctctacgcaaataaactagaaaatctagaagaaatggataaattcctgaacacatatrcattcccaagactaaaccaggaagaagtcaaatccctgggtagaccaataacaagttctgaaattgaggcagtaattcatagcctaccaaaaaaagcccaggaccagacggattcacagccaaattctaccagaggtacaaagaggagctggtaccattccttctgaaaccatttcaaaccactgaaaaggagggacttctccctaactc

SEQ ID NO: 875197 - DNA, 604 bp, Homo sapiens
ttcaacttccttgataaaaacagtggcaaggtttgagagaattgactttcattttaaaagaagttctactgtgtataaaatgctatcaaatagcattccatgctacattaaaatctttcataaaaggatgagtcaatcaacgtggcaaactttactgttgtcttgttttttttcttgtttattttattttattttattattattatactttaagttttagggtacatgtgcactatgtgcaggttagttacatatgtatacatgtgccatgctggtgtgctgcacccattaactygtcatttaacattaggtatatctcctaatgctatccctcccctctccccccaccccacaacagtccccagagtgtgatgttccccttcctgtgtccatgtgttctcattgttcaattcccacctatgagtgagaacatgcggtgtttggttttttgtccttgcgatagtttactgagaatgatgatttccaatttcatccatgtccctaaaaaggacatgaactcaacattttttatggctgcatagtattccatggtgtatatgtgccacattttcttaatccattctatcattgttggacatttggg

SEQ ID NO: 875198 - DNA, 590 bp, Homo sapiens
ccccaattaaaagacaaggatgggcaaattaggtaaagggtccagacccgtaggtgtgctgtattcaggagacccacctcacgtgcaaaggcacttgggctcaaaataaagggatggagcaatatttaccaagcaaatggaaagcaaagaaaaaacaaaacaaaaacaaaacaaaaaaaaccagtggttgcaatcctactctctaataaaacaggctataaaccaacacagaaaaaaaagcaaaggagggcattacatagtggtaaagggatcaatgcaacaagaagagctaactatcctaaatatatttgcacccaatacaggagcacacatattcataaaacaagttgttacagacctacaaatagacttagactccagcataataatagcaggagacttttrcaccccactgtcagatagatcaacaagacagaaaattaacaaggatattcaggacttgaactgagctctggaccaagtgaacctaatagacatcaaaagaactctccactccaaattagagaatacacattcttctcagtgccacgtagcacttcttctaaaattgaccacataattggaagtaa

SEQ ID NO: 875199 - DNA, 648 bp, Homo sapiens
gattcaagcagaattctaccagacattcaaagaagaattggtatcaatccttttgacagcatttcacaagataaagaaagaaggaaccctccctagttcattctatgaagccagcatcaccctaataccaaaaccaggaaaggacacaaccaaaaaagaaaactacagactgatatccttgataaacatagatgctaaaatccttaacaaaatactagctaactgaatccaacaatatatcaaaaagataatccaccatgatcaagtggatttcataccagggaygcagggatggttcaaaatacaaaagtcaataaatgtaatacatcatctaaacaaaattaaaaacaaaaatcacatgatcatctcaatagatgcagaaaagcatttgacaaaatccagcatccctctatgaataaaactctcggcaaaattggcatacaagagacataccttaatgtaataaaagccatctatgacaaacccacagccaacattatactgaatgaggaaaagtttaatgcattccctctgagaatgggaacaagacaaagatgtccattctcaccactcctcttcaacatagtactggaagttctagacagagcaatcagacaagaaaaagaaaagggcatccaaatcagtaga

SEQ ID NO: 875200 - DNA, 648 bp, Homo sapiens
gattcaagcagaattctaccagacattcaaagaagaattggtatcaatccttttgacagcatttcacaagataaagaaagaaggaaccctccctagttcattctatgaagccagcatcaccctaataccaaaaccaggaaaggacacaaccaaaaaagaaaactacagactgatatccttgataaacatagatgctaaaatccttaacaaaatactagctaactgaatccaacaatatatcaaaaagataatccaccatgatcaagtggatttcataccagggatgcagggatggttcaaaatacaaaagtcaataaatgtaatacatcatctaaacaaaattaaaaacaaaaatcacatgatcatctcaatagatgcagaaaagcatttgacaaaatccagcatccctctatgaataaaactctcggcaaaattggcatacaagrgacataccttaatgtaataaaagccatctatgacaaacccacagccaacattatactgaatgaggaaaagtttaatgcattccctctgagaatgggaacaagacaaagatgtccattctcaccactcctcttcaacatagtactggaagttctagacagagcaatcagacaagaaaaagaaaagggcatccaaatcagtaga

SEQ ID NO: 875201 - DNA, 659 bp, Homo sapiens
tctcaaaagctgactcaagccccatttgtggcaaattaactaaaagagcaagggacagaagggaaaaagcaaaaacacctgttggtaattttccccaagcaacatttttgtctttcaaaagaccaaagcgaggctgaactttagagacaaggtttcccttgttggaaacagagcaggcsagtagcacctttaaacagttccctgtttttcaagcagctgagggagggaaaatctgcagagagctcagtgagggcggccccaggaaggccctgcagaggtgcttcattaacccgattaagcaggtggatggagagggcctcgctgataatttacaccttgctaatgaagcgtgtgactcttaatctcctccaaacaagatacactcatgaaactctggtacaaggaaaggggaaattaattaggtgaaaaaactatgagattatagcagagggattcctgcaaggcaactgtaacctgggtagttattcattttagcctttctgaaattaatggctgagctgtcaagtaaacaagttgtggtatcttttgggcttataagaagttcaaaagcagtacatcattatgtgtctgatttcatatttcatgcaatatctttaaaaatcaatctgatggactgacttctaatgtgtaattttaac

SEQ ID NO: 875202 - DNA, 559 bp, Homo sapiens
taggcatcaaaggaacaaaactcaaaataataaaaattatattcagcaaacccacagccaacagtatactggacaggatactgtttaaagcattcccctttaagaactggaacaagacaaggatgcccactttcaacactcctactcaatatagttagtactagaagttgtagctagagaactcaggagagacaaataaaacatawccaaattggaaaataggaagttaaattatttctgttgactgataagatgatcaaaaaaaaaaaaaacaaagactcctccaaaagactcctagatttcacaaatgacttcattaatgtttcaggatacaaaatcgacatgccaaaatcagtagcatttttatataccaataacaatcattctgagagctaaatcaagaagtgaatcctatttacaatagctgcaaaaagagtaaaatacatacaaataaacttaaccacggaggtgaaagatctctacaaggagaactacaaaacactggtgacacaatcatcgatgacacaaacaaaaatcctatgctcatggattgtaagaa

SEQ ID NO: 875203 - DNA, 609 bp, Homo sapiens
agggcagtgggtgcagcacaccgagcatgagccaaagaagggcaaggcatcacctcacccaggaagtgcaaagggtcagggaattccctttcctagtcaaaggagtgacagatggcacctgaaaaatcgggtcactcccaccctaatactgtgcttttccaatggtcttagcaaatggcacaccaggagatcgtatcccacgcctggctcacagggtcctgtgcccactgaggctcaatcattgctagcacagcagtctgagctcaaactstaaggcagcagtgaggctgggggagaggcgcccactattgctgaggcttcagtaggtaaacaaagcggccaggaagctcaaactgggtggagactaccgcagctcaaggaggcctgcctgactctgtagactccacctctgggggcagggcagagccaaacaaaaggcagcagaaacctctgcagacttaactgtccctgtctgacagctttcaagagagtagtggttcttccagcatgcagctgcagatctgacaatggacagactgcctcctcaagtgggtccctgatccctgagtagcctaactgggaggcaccccccagtaggggcagatggac

SEQ ID NO: 875204 - DNA, 607 bp, Homo sapiens
gcctcacacggccaggtactcctctgagacaaaacttccagtggagcgatcaggcagcaacatttgctgtccaccaatatccgctgttctgcagcctccactgctgatacccaggaaaacagggtctggggtggacctccagcaaactccaacagacctgcagmtgagggtcctgactgttagaaggaaaactaacaaacagaaaggatatccacaccaaaaccccatctgtacgtcaccattgtcaaagaccaaaggtagataaaaccacaaagatggggaaaaaacagagcagaaaaactggaaactctaaaaatcagagcacctatcctcctccaaaggaacacagcttctctccagcaacagaacagaactggatggagaataactttgatgagttgagagaaggcttcaaatgatcaaactactccaagctaaaggaagaatttcgaacccatggcaaagaagtttaaaaccttgaaaaacaaattagacaaatggctaactagaataacaaatgcagagaagtccttaaaggaccagatggagctgaaagccatggcacaagaactacatgacgaatgcacaaaggctcagtagttgattc

SEQ ID NO: 875205 - DNA, 646 bp, Homo sapiens
tgtcaggcatttttcctatgattgtacatggatggatattctctcaatcacccttacagcatttttttccccatagaaaaacagcagtaaaaagaggaggagcagaggcttgaattcctgtcaatttcctagtttcttttttttttcgttttttttttttttttarccactcatgttcatgaggctacggtgcagagtttgttattctggttatttttaacttgtttcagggtaactataaaacatcaggtgagttcactttgaaattaaggatgatgccaccacatttcagaatcaactgaactgagtgaatgtttgaggctgcagtaagatactccatggcagttagatttgagaatttatgccacatccaaacagaattgtctaagaatacaatcaaacacttctggaagcatatcctggaagaggataaaacagcatgatgcaaggcagcattccccagatgtatctgaaactttagaattcacttggagaactgtcatgtttagaattcagggcattttgcaaatcaaaacccaatttaaggatgactatgaaaaattatatggatctgtttagaaaacataattttaaggtgagggaaaaaaagcaccataatttattggacagagtgttttttagaatc

SEQ ID NO: 875206 - DNA, 603 bp, Homo sapiens
ccaaattagcatctgcttctcagagaaccaggactgatacagaatatataaggaaataccttataagataaacaaaataaagacagactaccatgtgagacttaaacaagcacttcagaaaagatggaaagtaaacatgtaagaaagttgggaggtggttcacctcttagttatctgaaaaaaatatgtaaaaccacaacaaaataccatggcaatgctctctgcatggctaaaattaaagactgtcaatacccagtatttgctgtcaatatagaggagtgggatcactcatgcccactggtagaaatgtatatttgttttttaagtgtatgttggaaaactattggatrttatctactaatgttgaatatatatatatatatatatatatatgcatgccatgactcagactccacttttaggtagaaatccaaaacaaaagtgtgcacttgtacattggaagacacatcataaagagtgttaataaagcattatttgtaacagcacaaaattggtaacaagccaaatgttcatcaataatagaatggatttaaaaattgatggtatattcatataacgagctaatatggcaatgaaaataat

SEQ ID NO: 875207 - DNA, 617 bp, Homo sapiens
cttcaggatctagaaaatagcctgaaaagggcaaatctaagaatcatttgccttaaagaggaggtagagaaggagacaggggtaggaactttactcgaagggataataatagagaacttccgaaacctagagaaagagatcaatatctaagtgcaagaaggttatagaacaccaagcagatttatcytaaaaactaccacaagtcatcttaaatcaagctcccgaaggtcaagaataaagaaaagatacttaaagcagcaagaaacaaaaaacagataacatacaatagagctctaatacacctggcagcatacttttcagtggaaaatttacaggccagaagagactggcatgatatatttttttcttaaatttttattttaagtcctggggtacatgtccaggatgtgcaggttcattacataggtaaacatgtgccatggtggcttgctgcccagatcaatccattacccaggtgttgagcccagcatccattagctattcttcctgatgctctccctcccaccagccccacccccaacaggccccagcatgtgttgttcccccaccactatgtgtccatgtgttcttatcatccagttcccacttataagtga

SEQ ID NO: 875208 - DNA, 583 bp, Homo sapiens
ttgtcatcgctggccatcagagaaatgcaaatcaaaaccacaattagataccatcttacaccagtaagaatggcaatcattgaaaaatcaggaaacaacaggtgttggagaagatgtggaaaaataggaacacttttacactgttggtgggactgtaaactagttaaatgattgtggaagtcagtgtggagattcctcagggatctagaagtaaacatatcatttgacccagtcatcccatyactgggtatatacccataggattataaatcatgcttctataaagacacatgcacacatatgtttattgtagcactattcacaatagcaaagacttggaaccaacccaaatgttgagcaatgatagactgtattaagaaaatgtggcccatatacaccatataatactatgcagacataaaaaatgatgagttcctgtcctttgtagggacatggacgaagctggaaactatcattctcagcaaactatcacaaggacaaaaaaccaaacaccacatgttctcactcataggtgggaattgaacaatgagaacacgtggacacaggaaggggaacatcgcac

SEQ ID NO: 875209 - DNA, 583 bp, Homo sapiens
ttgtcatcgctggccatcagagaaatgcaaatcaaaaccacaattagataccatcttacaccagtaagaatggcaatcattgaaaaatcaggaaacaacaggtgttggagaagatgtggaaaaataggaacacttttacactgttggtgggactgtaaactagttaaatgattgtggaagtcagtgtggagattcctcagggatctagaagtaaacatatcatttgacccagtcatcccattactgggtatatacccataggattataaatcatgyttctataaagacacatgcacacatatgtttattgtagcactattcacaatagcaaagacttggaaccaacccaaatgttgagcaatgatagactgtattaagaaaatgtggcccatatacaccatataatactatgcagacataaaaaatgatgagttcctgtcctttgtagggacatggacgaagctggaaactatcattctcagcaaactatcacaaggacaaaaaaccaaacaccacatgttctcactcataggtgggaattgaacaatgagaacacgtggacacaggaaggggaacatcgcac

SEQ ID NO: 875210 - DNA, 583 bp, Homo sapiens
ttgtcatcgctggccatcagagaaatgcaaatcaaaaccacaattagataccatcttacaccagtaagaatggcaatcattgaaaaatcaggaaacaacaggtgttggagaagatgtggaaaaataggaacacttttacactgttggtgggactgtaaactagttaaatgattgtggaagtcagtgtggagattcctcagggatctagaagtaaacatatcatttgacccagtcatcccattactgggtatatacccataggattataaatcatgcttctrtaaagacacatgcacacatatgtttattgtagcactattcacaatagcaaagacttggaaccaacccaaatgttgagcaatgatagactgtattaagaaaatgtggcccatatacaccatataatactatgcagacataaaaaatgatgagttcctgtcctttgtagggacatggacgaagctggaaactatcattctcagcaaactatcacaaggacaaaaaaccaaacaccacatgttctcactcataggtgggaattgaacaatgagaacacgtggacacaggaaggggaacatcgcac

SEQ ID NO: 875211 - DNA, 583 bp, Homo sapiens
ttgtcatcgctggccatcagagaaatgcaaatcaaaaccacaattagataccatcttacaccagtaagaatggcaatcattgaaaaatcaggaaacaacaggtgttggagaagatgtggaaaaataggaacacttttacactgttggtgggactgtaaactagttaaatgattgtggaagtcagtgtggagattcctcagggatctagaagtaaacatatcatttgacccagtcatcccattactgggtatatacccataggattataaatcatgcttctataaagacacatgcacacatatgtttattgtagcactattcacaatagcaaagacttggaaccaacccaaatgttgagcaatgatagactgtattaagaaaatgtggcccatatacaccatataatactatgcagmcataaaaaatgatgagttcctgtcctttgtagggacatggacgaagctggaaactatcattctcagcaaactatcacaaggacaaaaaaccaaacaccacatgttctcactcataggtgggaattgaacaatgagaacacgtggacacaggaaggggaacatcgcac

SEQ ID NO: 875212 - DNA, 620 bp, Homo sapiens
gattgaccaacatggagaaaccccgtctctactaaaaatacaaaattagcccaatgtggtggtgcatgcctgtaatcccagctactcaggaggctgaggcaggagaatcgcttgaacctgggaggtggaggttgcggtgagccgagatcgcaccactgcactccagcctgggcaacaagagtggaactccgtcaaaagaaaaaaaaaaaagaagtatcccatgtcccatgaaggacrtactgtaaacattcatgaccaaatctcctgcagtcccatcagagcagagttaaagtttacatccactctccatagaaaaatatcaagaccaaattagaaagcaaataattcaataaggtgattttgcatttttatttgctggaaaacattggtaataaaatatcaacaattgttacttaaaattgcaaaatactagatacttaacaaatatttatttgccaataagaaaattgacatttctcatctgaccacttactctaggaaacatttcactttaaaaattctgacagtaaatttttactggggctttacattctgaatagtaagactactcataaagatatgtatgtatttcttaagcttctgaaggctagtgtacaagg

SEQ ID NO: 875213 - DNA, 620 bp, Homo sapiens
gattgaccaacatggagaaaccccgtctctactaaaaatacaaaattagcccaatgtggtggtgcatgcctgtaatcccagctactcaggaggctgaggcaggagaatcgcttgaacctgggaggtggaggttgcggtgagccgagatcgcaccactgcactccagcctgggcaacaagagtggaactccgtcaaaagaaaaaaaaaaaagaagtatcccatgtcccatgaaggacatactgtaaacattcatgaccaaatctcctgcagtcccatcagagcagagttaaagtttacatccactctccatagaaaaatatcaagaccaaattagaaagcaaataattcaataaggtgattttgcatttttatttgctggaaaacattggtaataaaatatcaacaattgttacttaaaattgcaaaatactagatayttaacaaatatttatttgccaataagaaaattgacatttctcatctgaccacttactctaggaaacatttcactttaaaaattctgacagtaaatttttactggggctttacattctgaatagtaagactactcataaagatatgtatgtatttcttaagcttctgaaggctagtgtacaagg

SEQ ID NO: 875214 - DNA, 589 bp, Homo sapiens
tttgcttttaaatgatatttcaaaattgttcatattgcattgacaatctcagtgattaaagtttacatgagctgagaactttgaacatttcatatatatgtatgtaaagtatgtatgaaatagccattccatttagacaatcctcttttaagtatctagcatgtgtctggccctatgttgcataatcatatagatccacttttagctacatagttttaatacatacaaagatatgctaatagaaggtgggcttagaagcaaatacaatttagcacgagtataaagtaggacaatgtaagagaagccartttacacaaatattacacattttaatgccaaatcaggatttctaagctcttttggaacaacaaacttaaagcttagaatccttcacataaaactacagcttgaaggagaatttacaaagcagttttttttagttctactgattttaggagacagttctttgagacccaaaattattatgtgtacataattaactgaaaggaaacagatattgtatttagttaacaatgcaaaatgtttgtatttaagttactagaaattacagagtgtagtaaatgaccaa

SEQ ID NO: 875215 - DNA, 585 bp, Homo sapiens
gctcaaaataaaggaatggaggaaaatttaccaagcaaatggaaagcaaaacaaacaaacaaacaaaaaaagcaggggttgcaatcctagtctctgacaaaactgactttaaaccaataaagatcaaaagagacaaaaaagggaattacataatggtaaagggaataattcaacaagaagagctaagtattctaaatatctatgccctatgccctaatacaggagcacccagattcataaaacaagttcttagagacctacaaagagacatagaccacaataataytgggatactttaacacccacctgtcagtattagacagatcaatgagacagaaaattaacaaggatattcaagacttaaactcagctctagaccaagtggacctagtaaacatctacagaaccctctaccccaaatcaatagactatacattcttcttagtgccacatggcacttattctgaaattgaccacataattgggagtaaaacactcctcagcaaatgcaaaataactgaaatcataacagtctctcagaccacagtgcaatctaattcaaattcagaattaataaagtcactc

SEQ ID NO: 875216 - DNA, 541 bp, Homo sapiens
tgaaacaatttaacatatcaattatctcgcatagttagccatttcttttttttttttctggcaaaagcagctaaaatctactcatttagtatgaatcccatatacactacaattttattacctacattctatcatgttgtacattggatctctagacttgttcatcctgcatatttgctacttactttacatcctttgacctacatcttcctatttcctgcycgccgtctttgaccctactaaccactgttttattctctatctctgtatacttgacctttttttatttgtttgtttcggttccacacataaatgagatcatgcagtatttttctttccaggtctggtttattttatttagcataaattgtcaatcttgttgtgataaatggcaggatcacctcttttttaaaggctgaataatatttcactatatgaataaacaccacagtttctttattcatttgcctattgatattcattatgttaaataaaaacaacctaggttgttttcatagcttggctattgtgaataataatg

SEQ ID NO: 875217 - DNA, 590 bp, Homo sapiens
ttgataaatgtaattgaatttttctatgataagattaactagttgtaattgtgaatggggaggtctgacccactccaaatgagatgtatgacaagctgaaaataatcaatttttttctttatttgagcccagattttttaaaatggaaagagaaaatcggggccttgtaggatgaaatatttgtgtctgaaatgtttttatatacaccacttatctcccatctcctcagtgtgtctaattgtgctgagcttggtttaaaatgagatcaacacattgaaaccccagaaggcttaattaagggagggacttaatatgtaccaaaaagggttttttttttttgacaaatgtggcataaattttacctgtaacatccttatytaaaagcatcccaaaattgttaagcccattaaattgcctctttttaaaaaaaaaaaaaaaaaaaaaaaaaaggagagacagagaagagaaaaaggaagaaaataattttactttgaaaatcttaattactgtgatagcagggttgggttgtgcctttttacgattcctgtatgatttgcattttgagttgaagttttgttcttcacagcaca

SEQ ID NO: 875218 - DNA, 659 bp, Homo sapiens
ttgggagggtgtatgtatccgggaatttatccatttcttctagattttctagtttctttgcatagaggtgtttagagtattctctgatggtagtttgtatttctgtgggatcagtggtgatatcccctttatcattttttattgcatctatttgattcttctctcttttcttctttattagtctggctagcggtccatcaattttgtttatcttttcaaaaaaccagctcctggattcgctgattttttgaagggttttttgtgtctctatctccttcagttctgctagttctctccattgtgatgttaaggtgtcaattttagatctttyttcctttctcttgcgggcatttagtgctataaatttccctctaaacacggtttcagctgtgtcccagagattctggtacattgtgtctttgttctcattggtttcaaagaacttatttatttctgcctccattttgttatttacccagtagtcattcagcagcaggttgttcagtttccatgtagttgtgtggttttgagtgagtttcttaatcctgagttttaatttgattgcactgtggtctgagagactgtttgttatgatttccattcttttccatttgctgagaagtgttttgcttccaattatgtggtcaattttagaataa

SEQ ID NO: 875219 - DNA, 633 bp, Homo sapiens
agtgagtcatgatgcccagctgaaacataaattttaaaggcagaagaatgaagctatctatctgcagactttaaagtgagaaggaaaaaaaagaaataatgcttttattgtttttaaagataataaaacagtatattgatctcaagggtaaggggacagactttttaaacgaatccaaaaagcactacctataataggaaaataggtaaatttgaccacattaacattaagacagccaggctcaatggctcacgcctgtaatcccagcatttagggaggctgaggcaggcggatcacctgaggtcaggagttcaagaccagctggccaacatggtgaaaccccatctctacaaaaatacaaaaattagctgggcaaggtggtgcatgcctgtaatcccagctactcaggaggctaaggcaggagaattgcttgaacccgggaggcagaggttgcagtgagmtgagatcgcgccattgcactccaacctggtgactgagcgagattctgtctcaaaacaaaacaaaacaaaacaaaacaaaacaaaaacaaaaaaaaacattaagacttggttttatcaaattacaccattaaaagagttaaaaggcaagcctcacagatgattaagaaattta

SEQ ID NO: 875220 - DNA, 652 bp, Homo sapiens
ggccttaggaaacttacaatcatgacagaaggtgaagcagaaacaagcaccttgttaacatggtggcaggagaaagagagagaaagagtgaaggaggaagtgctacacatttttaaaccatcagatctcatgagaactcactcaatatcatgagaacagcaaggggaaaatctgctcccatgatccartcacctcccaccaggcctctcctccaattcgacatgagatttgggaggggacacaaagccaaaccatatcacaagcttttaaaaagtaacttataaatgatataaatgtatgtgtagaaaacaaaagaatttacagacaaagtgttagaatcagtaattttaaaagctaaggtcctgaaattattgtgacagaggaagcagatagcctaacatgtatattttattatgttttattgtatttttaattgacagataataattctatttatggggtataatatgttttgatacacgtatacattatggaatgatcaaatcaggctagttagcatatctcacttccaatatttatcatttctttgtgatgaaaacatttaaaattctcttttagctattttgaaacatacaatatgctattattaattatggtccatgctggtcaatggattgccagaacttattcc

SEQ ID NO: 875221 - DNA, 652 bp, Homo sapiens
ggccttaggaaacttacaatcatgacagaaggtgaagcagaaacaagcaccttgttaacatggtggcaggagaaagagagagaaagagtgaaggaggaagtgctacacatttttaaaccatcagatctcatgagaactcactcaatatcatgagaacagcaaggggaaaatctgctcccatgatccaatcacctcccaccaggcctctcctccaattcgacatgagatttgggaggggacacaaagccaaaccatatcacaagcttttaaaaartaacttataaatgatataaatgtatgtgtagaaaacaaaagaatttacagacaaagtgttagaatcagtaattttaaaagctaaggtcctgaaattattgtgacagaggaagcagatagcctaacatgtatattttattatgttttattgtatttttaattgacagataataattctatttatggggtataatatgttttgatacacgtatacattatggaatgatcaaatcaggctagttagcatatctcacttccaatatttatcatttctttgtgatgaaaacatttaaaattctcttttagctattttgaaacatacaatatgctattattaattatggtccatgctggtcaatggattgccagaacttattcc

SEQ ID NO: 875222 - DNA, 734 bp, Homo sapiens
gcgcttttcggactgcagcacaccatgagattatatcctgcacctggctcggagggtcctacgcccacggagtctcgctgattgctagcacagcagtctgagatcaaactgcaaggcggcacgaaggctgggggagrggcgcccgccattgcccaggcttgcttaggtaaacaaagcagccgcgaactcgaactgggtggagcccaccacagctcaaggaggcctgcctgcctctgtaggctccacctctgggggcagggcacagacaaaaagtcagcagtaacctctgcagacttaaatgtccctgtctgacagctttgaagagagctgtggttctcccagcacacagctggagatctgagaatgggcagactgcctcctcaagtgggtccctgaccctcgacccccgagcagcctaactgggaggcaccccccagcagcgcagcactgacatctcacacggcagggtattccaacagacctgcagctgagggtcctgtctgttagaaggaaaactaacaaacagaaaggacatccacaccaaaaacccatctgtacatcaccatcatcaaagacaaaaagtagataaaaccacaaagatggggaaaaaacagaacagaaaaactggaaactctaaaatgcagagcgcctctcctcctccaaaggaatgcagttcctcaccagcaatggaacaaagctggatggagaatgactttgacgagctgagagaagaa

SEQ ID NO: 875223 - DNA, 546 bp, Homo sapiens
tgttatatgagacatcctatttttgtgtctctctctgacttttatatatttaaattagatttttttaaagtttcagatatttaatttaaaatattgtctttatacaaattacacttataataagaaaagttgtttaattttacaatatgttaaaatattaaacattttgaatttatgccaaaattggtgacctgatttcagtgtgttgtttattagaaccaaatagatttaacctctcctaaagcataatataaaacttttgatattttatakgctcaaaataagtacaatagtttttttttaagatctaaaaatacagaattaacaagacaacgggccagaatatcgtgtaaagtagcagtaagtttcagcttgttaaaactctaattacaactttttgaggcagcagtaggtcttatttcattcagtacattcaaaggtgagtgctggatatgccaaaaaagaagacttattgtaaaaagtataagcaaaatgtgggaaacataatttttaaatttggaaataatatagaaaagtgatattcac

SEQ ID NO: 875224 - DNA, 614 bp, Homo sapiens
cctctgtttgtctattattggagtataggaatgcttgtgatttttgcacattgattttactcccacacaataacactgggagactttaacaacccactgtcaatattagacagatcaatgagacagaaaattaacaagtatattcaggacttgaactcagctctggaccaagcagacctaatagaaatatacagaactctccaccccaaatcaatagaatatacattctactcagtaccacrtagcacttattctaaaattgaccacgtcattggaagtaaaacactcctcagcaaattcaaaagaagggaaatcataacaaacagcttttcagaccacagtgcaatcaaattagaactcaggattaagacacttgctcaaaaactgcacaactacatggaaactgaacaacctgctcattcatgactactgggtaaatagcaaaattaaggcagaaataaataagttctttgaaaccagtgagaacaaagacacaatgtaccagaatctctgggacacatctaaagcaggattaagagggaaactcttagcactaaatgcccacaggagaaagcaggaaagatctaaaattgacaccctaacatcacagttaa

SEQ ID NO: 875225 - DNA, 614 bp, Homo sapiens
cctctgtttgtctattattggagtataggaatgcttgtgatttttgcacattgattttactcccacacaataacactgggagactttaacaacccactgtcaatattagacagatcaatgagacagaaaattaacaagtatattcaggacttgaactcagctctggaccaagcagacctaatagaaatatacagaactctccaccccaaatcaatagaatatacattctactcagtaccacgtagcacttattctaaaattgaccacgtcattggaagtaaaacactcctcagcaaattcaaaagaagggaaatcataacaaacagcttytcagaccacagtgcaatcaaattagaactcaggattaagacacttgctcaaaaactgcacaactacatggaaactgaacaacctgctcattcatgactactgggtaaatagcaaaattaaggcagaaataaataagttctttgaaaccagtgagaacaaagacacaatgtaccagaatctctgggacacatctaaagcaggattaagagggaaactcttagcactaaatgcccacaggagaaagcaggaaagatctaaaattgacaccctaacatcacagttaa

SEQ ID NO: 875226 - DNA, 586 bp, Homo sapiens
gagaacttcctcaacctagcaaagcaggccaacattcacattcaggaaatacagagaatggcacaaagatattcctcgagaagagcaactccaagacaagaattgtcagattcaccaaagttgaaatgaaggaaaaatgttaaaggcagccagagagaaaggtcgagttacccacaaaggaaagccaatcagactaacaggggatctctcagcagaaactctacaagccacaagagagtgggggccgatcttccacattcttaaagaaaagaatttttaatccagaatttcatatccagccaaactaagcttcataagtgaaggagaaataaaattctttacagacgagcaaatgctgagagwttttgtcaccaccaggcctgccctactagagcttctgaaggaagcactcaacatggaaaggaacaaccagtaccagccactgcaaaaacatgccaaattgtaaaccctatcaatgctaggaagaaactgcatcaactaatgagcaaaataaccagctaacatcataatgacaagatcaaattcacacataacaatattaaccttaaatgtaagtgggctaaat

SEQ ID NO: 875227 - DNA, 573 bp, Homo sapiens
aggctgggtgctgaagaaacatccgagctgctatgtccatctggtgccatgttgccatagctttctaggtggatatgaggggatgtcagtggggctctaggaatgtggagatgcaggggttgttgggccccaaggcaggatataatttaytggggactgagctctcaaaatggagcagtgcagcagctaatttgagtcttaagagatgtgtggaacgcaatgtgaactccctctctggaataatgtcatcgtgtggactccaggcagctccttatactagtcttggggcccatgagggctgaggggctatcccagggctaggattagaggagtccatggtgaaaatgtgtaccattgggaaactcttgcttaccttttccccacacttggttgggcttcttgctttactttcttcacctttcatgattcagagctttcatgccactttcctgctcaatttcagtgttctctcctagatgccctatccaacctgtgatcatctatctgctttgtgattcaatccttccttgtataggaagcaaatgtcaggtgcctctagtcagccatcctgaa

SEQ ID NO: 875228 - DNA, 601 bp, Homo sapiens
ttgtgttaatttggtcaggaaattcagggcccttaagtggctgaagcatgatctagaaagatatgtcatgggatctagttaggtatttcctgtcctcttggccctatatattcctctccctttgataagggacataatcatggaaagccaaggacaatggtccctttttcttgagtctgaacgctatgattattgatacatctagattttatcaagtcattttttcaaaatctcatattcatgggaccacattttaaaaatagaatgccaatgatctgttctttgaagttggcaagcatgatagaagggtagaaactaaccccttttctaarggtgctaatagatgtatattggaaacatattttcagcacactttcaagtgatacaaagccagctgaattttttgtcctttttaacattttcttgttcttatacataattgtcttaatactactgacaattttgatatcaaagccttcaccttgatccatattgtgaaagttttgtattgctatgtaacaaatttacacaaatttagcagtataaaaaaactatcatttattagattgaagccatattatggcttgattctctgattagg

SEQ ID NO: 875229 - DNA, 604 bp, Homo sapiens
aaaaaaatcccattttccgaggagaaattcaagccagctgcagaaatttgcataagtaatgaggaacctaatattaatcaccaagacaatggggaaaatgtttccagggcatgtcagagacccttgtagcagtcccttccacagagggccagaggtttagaaggaaaaattggttttgtgggccaggcccagggtccctctgttttgtgccgtctaaggacttggtgccctgcatcccagtcgctccagctgtgactaaaagggaccaagtcagaggctcaagctgttgtttcaaagggtggaagccccaagccttarcagcttccatttagtgttgaacttgcaggtgcacagaagtcaagaattgaggtctgggaatctctgcttcgatttcagaaggtttatgaaaatgtctggatgcccaggcagaagtgtgctgcagggacagagccctcatggagaacctttcctagggcagtgcaaaagggaaatgtggggttggagcccccatacagagtccctaatgaggtaccacctagtggagctgtgaaaagagggccaccatcctccagaccccagaatggtagatccactgacagcttgc

SEQ ID NO: 875230 - DNA, 604 bp, Homo sapiens
aaaaaaatcccattttccgaggagaaattcaagccagctgcagaaatttgcataagtaatgaggaacctaatattaatcaccaagacaatggggaaaatgtttccagggcatgtcagagacccttgtagcagtcccttccacagagggccagaggtttagaaggaaaaattggttttgtgggccaggcccagggtccctctgttttgtgccgtctaaggacttggtgccctgcatcccagtcgctccagctgtgactaaaagggaccaagtcagaggctcaagctgttgtttcaaagggtggaagccccaagccttagcagcttccatttagtgttgaacttgcaggtgcacagaagtcaagaattgaggtctgggaatctctgcttcgatttcagaaggtttatgaaaatgtctggatgcccaggcagaagtktgctgcagggacagagccctcatggagaacctttcctagggcagtgcaaaagggaaatgtggggttggagcccccatacagagtccctaatgaggtaccacctagtggagctgtgaaaagagggccaccatcctccagaccccagaatggtagatccactgacagcttgc

SEQ ID NO: 875231 - DNA, 599 bp, Homo sapiens
ttaagctacattcataagtctgtctccgttatcttcctccataaacttttatcaggccattgcttaacaattggtctttgacatattgtacatattattaatagttatgacattatacacttcaggagccctttaggattgctctaaattttcaggcaraaatggtctcacagcaaacctctgtcaaacccctgtattaattttttttttttttttttttttttttttttttttttttttggagaggcagtcccaccctgtggcccaggctggaatgcatggaatgcaagggggggatcttggctcattgcaacctctgcctcggtgatcaaagtgattctcgtgcctcagcctccgagtagctgggactataggcgcctgccaccatgcccggctactttttgtattttttgtagagacgggtgtttcactgtgttggctaggctggtctcaaactcctgacctcaggtgatccacccaccttgacctcccaaagttctgggattacaggcatgagccaccatacccggctcaacatcttgcagtgcacaatatggatattaggtagtaatcaataggtggctgaaatgagaaatcta

SEQ ID NO: 875232 - DNA, 585 bp, Homo sapiens
gttaaagaaaaatgaaaaacctcatgaattgtccttttaaaaattctctgtttcctgaaaaacaaacaaaacaccaaaacaaaaaactcagacgaaataaaaccctggtgaaaacctccaactgggagtacttgctgcctgatctcctggctgagggaaagggaagtagtgtttctaatccattattaccagacgctgagcttctgggaagaaagaaatgcatcttaaattgttattttcctcttcttcttttcccagtcttgactcctttttcttttgcattgtttggcagcttcagatttcataccaagggagcttgctcaagggactaagaggagtttgagggtgctctttctgggtttagatctgtaggtacctgctggcctctgacacccttaaaaccagtgagagaaaaragatgggggcccagtacccgggccctgctgggagctctcctcagaccggtgtgcacccagaagtccagattcactgggtgggggtgggaaggggcttctcaagttcccccagaagtaccctgaacaccccaaacaagtaaatgcctcaccctcacgtcacctctcctcc

SEQ ID NO: 875233 - DNA, 593 bp, Homo sapiens
acatatttatggggtacatgtgatattttgatacatgtgtacaatgtttaatcatcaattcagggtatttagaatatccatcacctggagcatatataatttgagtttggaacatttgaaatcatttctactagctcttttgaaatttacaatatgttattgtttataatagtcattctactgtgctatcaataattagaatttccttctatctaactgtatgcttgtatccagtgaactacctctcttcatctcacctctccccatacccacatatgcccttcctagtccctggtaagtatcattctactctctacctcccttagctytcatgtatgagtgagaacatccaatatttgtctttctaggcctggtttatttcacttaacataatgacctctagctccatccatgctgtgcaaatgcaagatgtcatcctttttatggctagatagtattccattgcgtatgtacaccacatttcctttatccattcatctcttgctagacacttaggttgattccataactttgctattgtgaatagcactgcagtagacgtggggatacaggttcccctttgatatgctgaa

SEQ ID NO: 875234 - DNA, 624 bp, Homo sapiens
agacttgttccgatcctaaagggaaatcctgcattggttgataatgaatatctcctttgcatcaactattttgtataaaaatctcacatggtctttggaacagtctgttacatttgtttatttatatagaccaattctccctctacactataagcctttctagcagagaaattctattttatccatttctctatcccatttacmtaggagagcttgacccatagtaggttctccaataacaattgttgaatgaaagaaagcatgtatactaaacttctacagtatgaaaaataagtaagtagtaatttcagactactttgagtcaaagtgattgctgtttgacttaccctgccttcttacattttgactttcagatactgagtattgaattcagttctaccatggtgttacttcattgggcctcttcgttaactgatatctaaggaggccacctactcttaatgcaccccaggatactatttagtacagctgaaaatatcacttttcaagaggagctagttcatgatattcaaacacacctgagaaagtgttcaggaaagaactagagaagggcttatttcataataaggaataaggaatttgacttattaagtcaaattatgc

SEQ ID NO: 875235 - DNA, 588 bp, Homo sapiens
tgccacagcctccttaccataataactgaagtttttagacactgatctgtagttccacctctatttctatattacaaaccatccttaatcccatccatctggccccatacaccacaatctactcacatggcatctgttataggttgaactatgtcccccagaaagatgtgctgaagttctaactcctggtacctgtgaatgtaattaaccttatttggaaagaagttctttgcagatgtgacttaagaagatgaggttatattggatcagggtaggattagggtccattgattggtgcccttataagaagaggaaatttggacacagaaataaaaaatacacagggagcaatttatgtggtaagtgacacagygattagaatgataaatctgtaagccaaggaacatcaaagattgtaagcaaccactaaaagctagggaagaagcgtggaacaaactcttgcatttctaagttgtactccagtagaactaacctgtgccagcctttcttcctctatttaactcattaaacacttactgatgactacttatgtgtcaagtagcagcctaaatattgttgttacatcaa

SEQ ID NO: 875236 - DNA, 699 bp, Homo sapiens
aagctctctcttctcttgtctgctgccatgtgagacgtgcctttcaccttctgccatgattgtgaggtctcccgccacgtggaaatgtaagtccaataagcctctttcttttgtagatttcttagtctcttgtatgtctttatcagcagcatgaaaatgaactaatacagcaaattggtaagattagagtgcattgctgaaaagatacccaaaaatgtggaagcaactttggaacttggtaataggcagaggctggaacagttyggagggctcagaagaagatagggaaatgtgggaaagtttggaactccctagagactggttgaatggctttgacaaaaatgctgatagtgatatggacaagaaagtccaggctgaggtggtctcagatggaaatgagaaacttgttgggaaatggagcaaaggtgactcttggtatgttttagcaaagaaacaggaagcattttccccctgcccaagagatttgtggaactttgaacttgagagagatgatttagggtatctggcagaggaaatttctaagcagcaaagcattcaacaggtgacttgggtgctgttaaagatactcagttttataagggaagcagagcataaaagtttggaaaatttgcagctgataatgggatagaaaataaaatcccattttctcagaagaaattcaagccagctgcagaaatg

SEQ ID NO: 875237 - DNA, 602 bp, Homo sapiens
ttgtcttagatgagactttagactgtggacttttgagttaatactgaaatgagttaagaatttgggggttgttgggaaggcatgattggttttgagatgtgaagacatgagatttgggagggggtaggggcagaatgatatggtttgactccgtgtccccagacaaatctcattttgtatctcccagaattcccacatgttgtgggagggtcccagtggaagagaattgaatcatgggggtgggtctttcctgtgctgttcttgtgatagtggagaagtctcacgagatccgatggttttaaaaactaagtttccttgtacaagctctctcttctcttgtctggcactatgtaagatgtgcctttcaccttctgccatgattgtgaggttttcccagccakgtggaactgtaagtccaataaacctatttcttttgtaaattgcccagtcttgggtatgtctctttttcaccagtgtgaaaatgactaatacagtttccatctgacggtactaatacagtttccatctgctgttgtcatagtgtagcaaagacaaagtcagaagacctggatttgatccaggatccaccactgaatagcttg

SEQ ID NO: 875238 - DNA, 553 bp, Homo sapiens
gggcgcctgtagtcccagctactctgggaggctgaggcaggagaatggtgtgaagccaggacgcggagcttgcagtgagccgagatcatgccattgcactccagcctgggcaagagagccagaatccatctcaaaaaaaaaaaaaaagataattttacttggacaaacacttcctcagctaagtaatcaaaacaacatcgacagtcataagtcatgctgaaagtatataaacttgctatagtgtaatggaaatggcactttacctctgttcatcctcttaaaacccacatctctactctaattatgagaaaaacaccaggcaaattgcaataaaggaacatcgtttaaaattacttagtagtagtccataaaactgtcaaggtcatcaaaaacagggaacatgtgagaaactataacyttaagtgaagcctaaggaaatatgataattacatgcaatagtttccaggatgggatcttggaaaacaaaaataatcttaggtaaaaaatgagaaaatcagaaaaaagaatggactttgatatgggttggctctgt

SEQ ID NO: 875239 - DNA, 662 bp, Homo sapiens
caacagaagacattgaggtttaaagattaagtagtcttcctaaaatgaccaaaaaaatgcagaattggggtgcctatctaaatctgtcataacgtttgtttttctccactacttgctgcaaatattgcattttacacattgcctggctggttaatttcaatgtaagtttctggttgaaaaaagattagycattatattgatactatttatgtgtagtgatttatactacaacctgtaatttttattacaactcttattttggatttctatgtgaaatttcaggaattttttaacagaaaaattttcttagaagagaatagttataaataagggtgaattagatacactattaaaaagaaatactattagtcatccatctcacaccttttagttcatatattttgaaacattctttacctccggttactttacactcagcatgaaattattcaattgctttgaaaacatcaaagaactaaagaattgctcccaatctgcaacttacaactgtgtcccctgattagtcagggaaggtcaaaggggctaatacattcacaaagtacaggaaagggcatactgaagaggatatacttaatcttcagagtcaaataatcattagcagtgttgatggataaagtcgaatatgcaattgccacagggac

SEQ ID NO: 875240 - DNA, 662 bp, Homo sapiens
caacagaagacattgaggtttaaagattaagtagtcttcctaaaatgaccaaaaaaatgcagaattggggtgcctatctaaatctgtcataacgtttgtttttctccactacttgctgcaaatattgcattttacacattgcctggctggttaatttcaatgtaagtttctggttgaaaaaagattagccattatattgatactatttatgtgtagtgatttatactacaacctgtaatttttattacaactcttattttggatttctatgtgaaatttcaggaattttttaacagaaaaattttcttagaagagaatagttataaataagggtgaattagatacactattaaaaagaaatactattagtcatccatctcacaccttttagttcatatattttgaaacattctttacctccggttactttacactcagcatgaaattattcaattgctttgaaaacatcaaagaactaargaattgctcccaatctgcaacttacaactgtgtcccctgattagtcagggaaggtcaaaggggctaatacattcacaaagtacaggaaagggcatactgaagaggatatacttaatcttcagagtcaaataatcattagcagtgttgatggataaagtcgaatatgcaattgccacagggac

SEQ ID NO: 875241 - DNA, 627 bp, Homo sapiens
ggaggagtaaatactgctagagctagatcgacattggcacaaaaacaaaaacaaacaaaacaaaaaaacacttggtctttcttctcttacagattgctacttcagagagaaagagctcccactgcctgcttacagccaaccagttagaggaaaggccctaattatccttccaagttctggcactcagactctgtctatttcttcttttggctccagaccaaacaaaatgtgaaaaggaaaaaaaaaaaaaaagtcaagaaaaaatgcaacagggcaataatgcttgtctgtgtggcacacaatcagaaaattacttcctctctacaaaatactgttattaactttcttccagtgatcagaagtttaagagttcatacaatgcttaaattaatgaataaaaccctattagcatactatgtttccttattacaacagaaagtcttttgaaggagatatatccatcttcagttgcaaaatsatgttacttctattaccagggatgaattttaagcatattgagatgcatataaaacatttactctgtattctttatgtttcccatcagggactacttttctactttgaaatcagaatttttgtcttttctctctttttggcattccttat

SEQ ID NO: 875242 - DNA, 662 bp, Homo sapiens
aaaattgaaaagttgacactgaaatccgatatgacttcttcgacatataaagccagagggagatggccccaagaacaccaggcaccacctgcatttacatcgtcgaaatgaaaaagtgaaaaaggaacaaatgtggtctcattactttccataaagggaaagctctttaccacaacaatgcctattataccagattatcaaacacagaatcacattgtaacttctggaaagtatggaatatgtatacacagaacagagccaaaagaactccagacaggtatgcctcaccctcagggactcatgtgttacagaaaatgttgggaaaactgaataatagggacaaaagaaactcgcyatgttaaggttttctaaactgaaattattcttacttgttttaatttacttttcttacaatgcttaattctcatattttttaagtaagttgcatttatacctttgttaaatgtaggccttttgatataagaagtcagtttggcagaattgcattgatacatatttgatgacattcgttcaaatattttcattattccaaatagggggaggattccataatagcccctggtttataaaaaatcctaggttcacagccgtggatgagaatgagtgaaagtacctaaaacctactattttcaagatccatg

SEQ ID NO: 875243 - DNA, 637 bp, Homo sapiens
gttgagttaatgaatgaatgaatgccactcttaggtgaagttattctttacccttttaactgaatttggcacttcatttgtactcttctggtcctttttctttgttcatatcttgttattttaaatttaattgttaatatatttctagctgactaatacgagtttcttgaggaaggaatggtgttttattcaccatgatgactctgacagtgccaagcasatagtagaggagcagcaattacatactgaataaacgaaggaaaattttagagcttcacaattcttttttgctccatccttggtattatttcccacaccacaatttatggggagatagatgtgagattttgagttccagaaatgctaaactgaactgatcatcttctagcatcttagaaaagaaactttgactttaccatcatgtttgtttctattgggtgcatgcatactattgtcctgtgttataatatttacaaaacaagagattaggaaatgtgtgcatgtgtgtgtatgtgtctgtctgtctgtcttgtctgtaaatttaaaaaaagagaaagttgtaaaatgtttttgcctaatctttgaagttgaagatgggtaaacttcataagccaatattttaatccttagatatgca

SEQ ID NO: 875244 - DNA, 638 bp, Homo sapiens
aacaaagttgaaacagacaaactgaatagttctatactcttaaagaaactgaacccttaataataatataaaagctcctgaaaaataaatctcctggccttgaagccttggagaattctatttaccatttaaagaagaatgttactctctcctcttctattttcagaaaattctatttccagaaaatagaagaggagaggtactccttgattattttagaaggctagtattactctgatactaaaagtagacaaagatagaagaaaaaaagaataaagctacatactagtatcactcatgaatgtagatacagaaatcttcaacaaaatattaacaaattgaatctggtaatgcacaaaatgaattacacatggcaacctagtggaatttatctctgatatgcaagtatgcttcaacattcaaaagtcaatcaaatgcaatccaccacatcaacagactaaaggcraaaaagtcacatgatcatgtcagtttacacagaaaaagcatttgacaaagtccaacaaccattcatgataaaaactcagcaaactaggaaagaagggaatttcctcaaattgaaagagtctacaaaaattatagctaacatcatgcttaatcgtggaacattgaatgctttt

SEQ ID NO: 875245 - DNA, 662 bp, Homo sapiens
tagatctttcttggatcagcctagtggcacttgctgcagttaactatgttggtagattttttcccatatcccactggggtagacctacatctctcacctctgctcatctttaaaagttaaaacaaaccacagagtaacataggcaaagtamaataagtgacccaacatttcatacagttaaaaaatgcttctaataggaaaaaatcccaaagcaaaagtattaggttaaattgtttatataaaaattaaaagtgtacatatttcaaaagcaaagctaaaactatgtcacagtagagacatccaaacaaatatgactaccaatggtttaatttttttaatatataaagagcttctataaataagtaagaaaaatgctaataccacagtatataaaagggcaagctatggacgatttgaagaagacatatacatagctaataattaatatgcatataagatagaaaaattattaataatcaaaaaaaggcaaattaaaatgagataatattttactttgttgaattagcaaagtcatttgaaaggaaaaatactcagctttggtaggaatgtattaagataggcaagttatacactgggagaaggaataaaaattgatataatctttctggagagtgagttggtgatgtgtgtcaagggcttta

SEQ ID NO: 875246 - DNA, 395 bp, Homo sapiens
tatcactatcagcatttttgtcaaagccattcaaaaagtctctaggaagttccaaattttcctacattttcctatcttcttctgagccctccaaactgttccaacctctgcctgttacccagttcccaagttgcttccacattttcgagtatctttttagcaatgccccactctgctggtattaatttactgtattagtccattttcaygctgctgataaagacatacccaagactgggcaatttacaaaataaagacatttattggacttacggttccacatggctggggaggcctcataatcatagtgtaaggcaaggaggagcaagtcacatcttatgtggatggcagcaggcaaagagagagcttgtgcagagaaactcccgtttttaaaa

SEQ ID NO: 875247 - DNA, 546 bp, Homo sapiens
tgcggtagaaatgtgtgtacttaaaatacacacgttacatgtgtaagtacgatgatcaagcattttaaacaagtacattagaaaaatatatctttaatgtgtgaaatctttatctaccctttgttagaagaccagagttttacttccaagtctactactacccgattgtagcaacccagacacatgcatataatgacttaaatttttcattagtaaaatgaagatattacccttgtggtcagataagctacatttcaactttaacttccagtgatgcttttgtagtagttttataaattaatgcaataacgcttccaaatatttaatttgctatcctgaaaaaaatttytgaatcatcctcaatttttaaatatatatttctttgttgcaagtcttcatccttcaaagacttgattcatggaactagctaaaaaccatctgaaatcaaaattcacaaatcactaggttgttgcagcagaatcctaagaccaatcatccaagaatttaacttttcttcagcaatgaaaacattctcctccaacaaaa

SEQ ID NO: 875248 - DNA, 581 bp, Homo sapiens
taatctcaggactcacttcaggtccctgtgatcagccccagcgatgaggctgctctcactcactgacatatttccttgtggcgcagacatgccttgccctttttggtgtctggattgttcatgctgctccacatagctgtgttgccacaggctgcatctgcccttggaggcttggctccagactcctctcccargaagcctcgttgggctgctctgccttgccagtcacactgcctggtgggctacgtggaaaatttgtgaaagtgaagccaattgcacaccagtggattctcgtatgaggtgggtcctctcaggtccctcccagccctaaaatcggggattcttacaaaaattagcctggcgtggtggggcatgcctgtactcccagctacttgggaggctgaggcaggagaatcgcttgaactggagaggcagaggttgcaaggagcctgcactccactgcactccagcctgggtgacagagcaagactctgtctaaaatcggggattctgagggcaaaggaaattgccccaaccaccacataggcatagcagcaaattcctcatcactccagtgctgg

SEQ ID NO: 875249 - DNA, 581 bp, Homo sapiens
taatctcaggactcacttcaggtccctgtgatcagccccagcgatgaggctgctctcactcactgacatatttccttgtggcgcagacatgccttgccctttttggtgtctggattgttcatgctgctccacatagctgtgttgccacaggctgcatctgcccttggaggcttggctccagactcctctcccaggaagcctcgttgggctgctctgccttgccagtcacactgcctggtgggctacgtggaaaatttgtgaaagtgaagccaattgcacaccagtggattctcgtatgargtgggtcctctcaggtccctcccagccctaaaatcggggattcttacaaaaattagcctggcgtggtggggcatgcctgtactcccagctacttgggaggctgaggcaggagaatcgcttgaactggagaggcagaggttgcaaggagcctgcactccactgcactccagcctgggtgacagagcaagactctgtctaaaatcggggattctgagggcaaaggaaattgccccaaccaccacataggcatagcagcaaattcctcatcactccagtgctgg

SEQ ID NO: 875250 - DNA, 581 bp, Homo sapiens
taatctcaggactcacttcaggtccctgtgatcagccccagcgatgaggctgctctcactcactgacatatttccttgtggcgcagacatgccttgccctttttggtgtctggattgttcatgctgctccacatagctgtgttgccacaggctgcatctgcccttggaggcttggctccagactcctctcccaggaagcctcgttgggctgctctgccttgccagtcacactgcctggtgggctacgtggaaaatttgtgaaagtgaagccaattgcacaccagtggattctcgtatgaggtgggtcctctcargtccctcccagccctaaaatcggggattcttacaaaaattagcctggcgtggtggggcatgcctgtactcccagctacttgggaggctgaggcaggagaatcgcttgaactggagaggcagaggttgcaaggagcctgcactccactgcactccagcctgggtgacagagcaagactctgtctaaaatcggggattctgagggcaaaggaaattgccccaaccaccacataggcatagcagcaaattcctcatcactccagtgctgg

SEQ ID NO: 875251 - DNA, 580 bp, Homo sapiens
atcccagctactcgggaggctgaggcaggagaatcgattgaacctgagaggtggaggttgcagtgaggctagattgtgccactgcactccagcctgggcaacagagcgagactccatctcaaaaggaaaaaaaaaaagaaaaaaaagaccacaggccctggtagaaggctagaaggccatgccaatgtgccccgcytgcagcatcatgtggtggaaggcagacagaagggcttccgtgcatatgtggccctggcccaacaccacccccgctccaaggatgaccagcaatgagaatactttggtagccatgcacacatttgtcagcatggtggccagcttcaagctccagcagttagccaccatcagcaggaggatgctggtgacagccacattcttgagcacagcagggggcagtgaggcacagccagggtaaaagggaaccattgcatgctcagcaaagctcagagaaacagaagcaatggtagctagtctggccaccagcaaatatgtgaagatgaccaggaaggctggcaaggagccaaagtttcataagatgtaggtatacttgccccagattcag

SEQ ID NO: 875252 - DNA, 702 bp, Homo sapiens
atgtttttaccctcaatctgtaagtgtgaccaactgtaatttttaaaggtttatcctcaatctgtaagtttgatcaaatataatttttaaaggtttactataatctcttcatcagaaaactaatggaaagatggaataaaatctaaagaaatgtccttaacaggtaaatatttctagaatgtatctactccatctaggtagtgtaagtattctaaactatgctagtataactgatttaaatcactgccttcttctgtaaatggtgtcacctttaaagtgttatcttgaagaggaagtgagtgatttgctcatgtctctgtactgaactaacactgttaacacccagtccagctctaccttaaacaagtttgagaaatacagacacaatccacacttatttgccaagactaaggtaaaataaagttggaactcatatcctcttatgactgatgtactgaaaacaatccatctctcactgttkcccaaatagcatagtcacaaagagctctaccctaccaagccactctgcaagtcccactctcaaaggaagactcacaggtgactgagaagataaactcgctattgtttccattatccttcagttcatctggcacctttgaagaaatagacttcgataagactcacaagtctcaaggccccttctttatgaaagaaatagctaaacctctacactcagaagca

SEQ ID NO: 875253 - DNA, 672 bp, Homo sapiens
gagttgaacctttcttttgattgagcagtttggaaacagtctttttgtagaatctgcaaatggacatttggagcggttagaggccaacggtagaaaaggaaatatcttcacataaaatctggacagaggcattctgagacgtctttgtgatgtgtgcattcacctcagagttaaacctttcttctggttgagcagttttaaaactctctttttgtagaatctgcaagtggacatttggagcgccttgaggcctatggtggaaaaggaaatatcttcacatgacagaatagttctgagaaacttctttgtgatgtgtgcattcctctcacasagttgaacctttctttttattgaacagtttggaaactatctttatgtagaatctgcaagcggatatttggagtgctttgcggcctatggtagaaagggaaatatcttcacataaaatctacaaagaagcaatctgagaaacttctttgtgatgtgtgcattcaactcacagaattaaaactttctgttgattgaggagttttgaaactctcttttcgtagaatctgtagttggacatttgcagtgttttgaggcctatggtggaaaatatcttcacataaaaactaggcagaagaattctgagaatcttctttgtgatgcatgctttcatctcacagagtt

SEQ ID NO: 875254 - DNA, 672 bp, Homo sapiens
gagttgaacctttcttttgattgagcagtttggaaacagtctttttgtagaatctgcaaatggacatttggagcggttagaggccaacggtagaaaaggaaatatcttcacataaaatctggacagaggcattctgagacgtctttgtgatgtgtgcattcacctcagagttaaacctttcttctggttgagcagttttaaaactctctttttgtagaatctgcaagtggacatttggagcgccttgaggcctatggtggaaaaggaaatatcttcacatgacagaatagttctgagaaacttctttgtgatgtgtgcattcctctcacacagttgaacctttctttttattgaacagtttggaaactatctttatgtagaatctgcaagcggatatttggagtgctttgcggcctatggtagaaagggaaatatcttcacataaaatctasaaagaagcaatctgagaaacttctttgtgatgtgtgcattcaactcacagaattaaaactttctgttgattgaggagttttgaaactctcttttcgtagaatctgtagttggacatttgcagtgttttgaggcctatggtggaaaatatcttcacataaaaactaggcagaagaattctgagaatcttctttgtgatgcatgctttcatctcacagagtt

SEQ ID NO: 875255 - DNA, 635 bp, Homo sapiens
atgtaaactactctaaggaattaataattactatcatacatggattgctttaagggatgggggacacaaacagcagggtcaaaacaaagtcttatggttaggaatactgtagagaatatacggccattgaatggggagttagactaattaagctgtatagacattttcaattgggattacaattgaatgagttatatgaaattgtatgagatactactgatatttaaggattattgtattactttccyatttgtcaggctaacaagagtgaaggcaatgcatgataaatgtggtatagtgaagattagtagatttcgagttggaaacacggagcttgaactcagaattcagttctatcacagacattagtaaactagaataaataagtaacttatatgagactcaattcatttattaaacataatgataattatactatatacctcacaagattattatgtgagttaaattaggtagcgtgtattcagtacaatgaacccttagaaatggcctaatatgtgcacttgtaactgtgacaagctgagtcacaaagagaggaaagtggcagttgcagcctaaaattttgctaggtttttatgacacatacagagatagctataattcaacagggtaaa

SEQ ID NO: 875256 - DNA, 407 bp, Homo sapiens
cccagccatgtggaactatgagtcaattaatcccctttcctttataaattgcccagtcttgggcagttctttataacaatatgagaatggactaatacagtaaattggtaccagtagagtggggcactgctgtaaagacacygaaaaatgtggaagaaactttggaactgggtaacaggcagaggttggaacagtttggaaggctcagaagacaggaagatgtgggaaactttggaacttcctagagacttgttgaatggctttgagtaacatgctgatagtgatatggacaatgaagtccaggcttagctgatctcagatggagatgaggaacttgttgggaattggaataagggtgactcttgctgtgttttagcaaagagactggtggcatttgccccagccct

SEQ ID NO: 875257 - DNA, 676 bp, Homo sapiens
gaaattgtaattggtccccagaaaattacttttatatgattagtgtggtggtggaagtcagcatacccttgggtaagttcacgagatatgcaatgtatattttgctgataaaggagaatattcagttcagatttatcatattcttttatttaattaatatttctattgtgcctactaggtactaggtactttgctaggatttggagataaaataatgggaaaaagaaaaggcaagttcctggttgtattagtctgttctcwtgctgctaatagacattcctgtgactgggtaatttacaaaggaaagagatttagttgactcagttcagtatggctggggaggcctcaggaaacttacaagcatggcagaaagggatgcaaacacgtcctttttcacatggcagcagcaaggagaagagccaagcaaaaggggaaaagcccattatgaaaccatcaggtcttgtgagaactcactatcaagagaacagccacatgggggtaacgcttccatgattcaactacctccttccaggtccctcccatgacacgtggggattatgagaactacaattcaagacgagatttgggtgggggcacagccaaaccatatcactcgtgatagagatttttcagccaaagtagaacccataacaatgtagggaactcaaactacatt

SEQ ID NO: 875258 - DNA, 676 bp, Homo sapiens
gaaattgtaattggtccccagaaaattacttttatatgattagtgtggtggtggaagtcagcatacccttgggtaagttcacgagatatgcaatgtatattttgctgataaaggagaatattcagttcagatttatcatattcttttatttaattaatatttctattgtgcctactaggtactaggtactttgctaggatttggagataaaataatgggaaaaagaaaaggcaagttcctggttgtattagtctgttctcatgctgctaatagacattcctgtgactgggtaatttacaaaggaaagagatttagttgactcagttcagtatggctggggaggcctcaggaaacttacaagcatggcagaaagggatgcaaacacrtcctttttcacatggcagcagcaaggagaagagccaagcaaaaggggaaaagcccattatgaaaccatcaggtcttgtgagaactcactatcaagagaacagccacatgggggtaacgcttccatgattcaactacctccttccaggtccctcccatgacacgtggggattatgagaactacaattcaagacgagatttgggtgggggcacagccaaaccatatcactcgtgatagagatttttcagccaaagtagaacccataacaatgtagggaactcaaactacatt

SEQ ID NO: 875259 - DNA, 659 bp, Homo sapiens
tatgatttattggtcaccaggcttatattcctaggccagaatgtgatagaaaaaatagttaagtcataggtgacactggcagcctcacttctctgtcctgttactctaagtggatgtaggtggtctcagtcccctgcttcacaggaacattcataagcttgagttaaagaagagatctattaatacctcattggttaaggcattgtgatcatgtaccaactttccagcaggtatgattgcagtctctaaaataagcatcgcattttcctgttctttttgttgggtgactatttttagaatcatttaatggatcagcagtgggacaatggcatttaaacttccagaaatcaccaatgaggactacatacacacaaatacataatgtttattattagcgtttgtagtcaccttctaatccagaagccaaaagtgtctacattaagtcaagagaccaaaattggtccccaatatgaagagytcacagaaatagctatgtaagtatattaatcaatgttctccaaagaaacagaaccaataggttggatacattatataaagagatttattatcaaaaactggctcatgcaattagggaagatgacaagtccccaaatccacagggtgtgtctgcaagctggagacccaagagaacagatgac

SEQ ID NO: 875260 - DNA, 542 bp, Homo sapiens
taacgtgcctgagaaatatagatgatcaatgtggctagactttggtgaatgaggaagagagtgatacaataagaggcaaaagctccaaatagacaagatgagattgtttaaggccttataagccatgaaaaggagtattaaatttaagttcaataaaaagcgattgaagaattttaaacagaagaacaaaataatatgatttcctttttttttttttttttttttttttttttttaagacggaacctcactctgtctcccaggctggagtgcagtggcgtgatctcgactcactgcaagctccgcctccygggttcacgcgattctcctgcctcagcctcccgcgtagctgggactacaggcaccccccaccacacccggctaattttgcttttgtatttttagtagagatggggtttcaccgtgataaccaggatgttctcaatctcctgacgtcgtgatccacctgcctcagcctcccaaagtgctgggattacaggagtgagccaccgcgcccggccaaatagtatgatttctatttgt

SEQ ID NO: 875261 - DNA, 542 bp, Homo sapiens
taacgtgcctgagaaatatagatgatcaatgtggctagactttggtgaatgaggaagagagtgatacaataagaggcaaaagctccaaatagacaagatgagattgtttaaggccttataagccatgaaaaggagtattaaatttaagttcaataaaaagcgattgaagaattttaaacagaagaacaaaataatatgatttcctttttttttttttttttttttttttttttttaagacggaacctcactctgtctcccaggctggagtgcagtggcgtgatctcgactcactgcaagctccgcctcccgggttcacgcgattctcctgcctcagcctcccgcgtagctgggactacaggcacccsccaccacacccggctaattttgcttttgtatttttagtagagatggggtttcaccgtgataaccaggatgttctcaatctcctgacgtcgtgatccacctgcctcagcctcccaaagtgctgggattacaggagtgagccaccgcgcccggccaaatagtatgatttctatttgt

SEQ ID NO: 875262 - DNA, 618 bp, Homo sapiens
cacttctccttccagccaccatatgaagaaagatgtgtttgcttccacttctgccatgattgtaagtcttttgaggcctctgcagccatgctaaactttgagtcaattaaaactctttcctttataagttgctcagtcttgggtatgtctttattagcagcatgagaatggactaatacagtaaattggcaccaatggaatagggtgctgctataaaaatacccaaaaatgtggragctactggaactgggtaacaagcagaggttggaagcatttggaggtctcagaagaagacaggaaaatgtgggagagtttagaacttcctagagacttggaggactcaggagacaggaaaatttggaaaagtttggaacttcctggagacttattgaatggatctgaccaaaatgctgttagtgttaaggacaatgaagtccaggctgaggtggtctcagatggagatgaaaaacatcttgggaactggagtaaaggtgactcttgctatgcaaagagaatagtggcatttccccagctgccctagagatctgtggaactttgaacttgagagagatgatttagggtatctggcagaagaaatttctcagccacaaagcattg

SEQ ID NO: 875263 - DNA, 624 bp, Homo sapiens
ggagacgacttttctaaaataaaaaattggaaagtaacctgttacgtgactcaaatctgtactccttcattcattcctaaagattgatgactgagcacctgccatgttccaggcactgtgctaggttctgggccactgtgatgaaagaacaagatgcgtccctgactctctggcactcagaatgagtagctggcgcttctctgatggtctggcccgacgtgagcatctactgaaggtgaagttgtaaaccgcatgtctatatgcaaaggaaactttctggaaatacatatataatggtacttctgggaaggaatatcsaatgggagagctaagagaagggagagtctcaccctcagtatacttttgtattattttatttttttttacagcaaatgtgtatttgtgtattacttttgtgactttaatcggccatagcagaaaactgtatttttacaaattaattttttattttaagaaatattaaactttggaaggctgaggcaggtggatcacctgaagtcgggagttctagaccagcctgaccaacgtggaaaaaccctgtctctactaaaaaaattacaaacttagtcgagtgtggtggtgcatgcccgtaatcccaggtag

SEQ ID NO: 875264 - DNA, 624 bp, Homo sapiens
ggagacgacttttctaaaataaaaaattggaaagtaacctgttacgtgactcaaatctgtactccttcattcattcctaaagattgatgactgagcacctgccatgttccaggcactgtgctaggttctgggccactgtgatgaaagaacaagatgcgtccctgactctctggcactcagaatgagtagctggcgcttctctgatggtctggcccgacgtgagcatctactgaaggtgaagttgtaaaccgcatgtctatatgcaaaggaaactttctggaaatacatatataatggtacttctgggaaggaatatcgaatgggagagctaagagaagggagagtctcaccctcagtatacttttgtattattttatttttttttacagcaaatgtgtatttgtgtattacttttgtgacttyaatcggccatagcagaaaactgtatttttacaaattaattttttattttaagaaatattaaactttggaaggctgaggcaggtggatcacctgaagtcgggagttctagaccagcctgaccaacgtggaaaaaccctgtctctactaaaaaaattacaaacttagtcgagtgtggtggtgcatgcccgtaatcccaggtag

SEQ ID NO: 875265 - DNA, 624 bp, Homo sapiens
ggagacgacttttctaaaataaaaaattggaaagtaacctgttacgtgactcaaatctgtactccttcattcattcctaaagattgatgactgagcacctgccatgttccaggcactgtgctaggttctgggccactgtgatgaaagaacaagatgcgtccctgactctctggcactcagaatgagtagctggcgcttctctgatggtctggcccgacgtgagcatctactgaaggtgaagttgtaaaccgcatgtctatatgcaaaggaaactttctggaaatacatatataatggtacttctgggaaggaatatcgaatgggagagctaagagaagggagagtctcaccctcagtatacttttgtattattttatttttttttacagcaaatgtgtatttgtgtattacttttgtgactttaatcggccatagcagaaaactgtatttttacaaattaattttttattttaaraaatattaaactttggaaggctgaggcaggtggatcacctgaagtcgggagttctagaccagcctgaccaacgtggaaaaaccctgtctctactaaaaaaattacaaacttagtcgagtgtggtggtgcatgcccgtaatcccaggtag

SEQ ID NO: 875266 - DNA, 621 bp, Homo sapiens
cttgtagtatagtttgaagtcaggtagcctgatgcctccagctttgttccttttgcttaggattgtcttggccatgcgggctcttttttggttccatatgaactttaaagtagttttttccaattctgtgaagaaagtcattggtagcttgatggggatggcattgagtctataaattaccaygggcagtgtggccattttcacgatatcgattcttcctatctatgagcatggaatgttcttccatttgtttgtgtcctcttttatttcattgagcagtggtttgtaattcttgaagaggtctttcacatcccatgtaagttggattcctaggtattttattctctttgtagcaattgtgaatgggagttcactcattatttggctctctgtttgtctattattggtgtataggaatgcttgtgatttttgcacattgattttgtatcctgaggctttgctgaagttgcttatcagcttaaggaggttttgggctaagacaatggggttttctaaatatacaacctgtcatctgcaaacaggaacaatttgaattcctcttttcttaattgaataccctttatttttttctcttgcctgattgccctggccagaacttcc

SEQ ID NO: 875267 - DNA, 656 bp, Homo sapiens
gctgcttttagtaaccatttcgaatctgttcccctcctttttttcttttttttgacagagctcactctgtctcccagctggagtgcgtggcgtgatctaggctcactgcaacctctgcctcccgggttcaagcgattctcatgcctcagcctccgagcagctgggttacagggcttgtgccaccatgcccagctattttttgtatttttaatagagacagaggtttcactgtgttggtcatgctggtcttgaacacctgacttcaagtgatccrcttgcctcagcttcccaatgtgctgagattacaggcatgagccaccacacccaagtctctttcatttcttaatacaaattattgcattgttgtaaacttgatatatgcttattatttttagtttttccacatttattgaggtataattaacaagggaaattgattatatttatggtgtacaatgtgatatcttgatatacctaaacactgtgaaatgattaccacgatagagctaattaacatatccatcacttcaaatagataacttatttttctgtgtgtggtgagaatatttaagatttactctctaagcaaattttgagtatacaattgctatggtctgaatgaatccccccaaatttatgtgttgaaacataatcgc

SEQ ID NO: 875268 - DNA, 656 bp, Homo sapiens
gctgcttttagtaaccatttcgaatctgttcccctcctttttttcttttttttgacagagctcactctgtctcccagctggagtgcgtggcgtgatctaggctcactgcaacctctgcctcccgggttcaagcgattctcatgcctcagcctccgagcagctgggttacagggcttgtgccaccatgcccagctattttttgtatttttaatagagacagaggtttcactgtgttggtcatgctggtcttgaacacctgacttcaagtgatccgcttgcctcagcttcccaatgtgctgagattacaggcrtgagccaccacacccaagtctctttcatttcttaatacaaattattgcattgttgtaaacttgatatatgcttattatttttagtttttccacatttattgaggtataattaacaagggaaattgattatatttatggtgtacaatgtgatatcttgatatacctaaacactgtgaaatgattaccacgatagagctaattaacatatccatcacttcaaatagataacttatttttctgtgtgtggtgagaatatttaagatttactctctaagcaaattttgagtatacaattgctatggtctgaatgaatccccccaaatttatgtgttgaaacataatcgc

SEQ ID NO: 875269 - DNA, 569 bp, Homo sapiens
agacatagttggttattacagcatctaaataaataaaatgaaaggtaacagttttacgagagacagaaggaagaattggggactgtttttaaatagagtacctgtaccgtagtttctgatttttttttttttttttttttttttgagatggagtctcgctctgtcacctaagctggagtgcagtggcgctatctgatctcggcttactgcaagctctgcctcccgggttcacaccattctcctgcctcagcctcctgagtagctgggactacaggtgcccgccmccatgcccagctaattttttgtatttttagtagagacggggtttcaccatgttagccaggagtacctgtactatagaagcatcatactcttacttgaaggtatatataaattagtttatatatatatatatatatatatatatatatactaaatatttaaactaatattttaactaaatatatatatttagactaaatatagatagatagatagatagatagatagatagatagatagatagatagaggtatataattagtagggcaagacaatagcagaggggc

SEQ ID NO: 875270 - DNA, 630 bp, Homo sapiens
tattacaatatcacccatctagtttctcaagccaaaaaatttaaagttttcctaaaccgctcttttttttctcatacccaatcctctacaccaggatattctattaactctgtcttcaaaatatattcagaacttgaccaatcttcactgtcttcatttccagcaccttagttttagtcaccatcttttctgctctgcttgtctcataatttcttccttcctccaattctattctcaacagagtcgggagagtgagtccattaaaataacagacagattatgttatggctcattattttacttgagtaaaatctgaaatcttacagcacagtctagttccatgtttgttctttggctttattagccactacttttactcaggtatgattacttcactgcagcaatgtcaatcacaaaagggccaggagtgctcccaaataaggraatttgtattggctcttcactctgactgaaaataatatccatctggctcagtacctctcatctatgccatctgtgcacaaaagttgcctttcaatgaggccaaacctaatcatgtatatagctttgcagttgcaatctatcaattctgccatgccagaaaatgttaatcatacccattacctcatt

SEQ ID NO: 875271 - DNA, 607 bp, Homo sapiens
ttgtgttaatttggtcaggaaattcagggcccttaagtggctgaagcatgatctagaaagatatgtcatgggatctagttaggtatttcctgtcctcttggccctatatattcctctccctttgataagggacataatcatggaaagccaaggacaatggtccctttttcttgagtctgaacgctatgattattgatacatctagattttatcaagtcattttttcaaaatctcatattcatgggaccacattttaaaaatagaatgccaatgatctgttctttgaagttggcaagcatgatagaagggtagaaactaaccccttttctaarggtgctaatagatgtatattggaaacatattttcagcacactttcaagtgatacaaagccagctgaattttttgtcctttttaacattttcttgttcttatacataattgtcttaatactactgacaattttgatatcaaagccttcaccttgatccatattgtgaaagttttgtattgctatgtaacaaatttacacaaatttagcagtataaaaaaactatcatttattagattgaagccatattatggcttgattctctgattaggattgta

SEQ ID NO: 875272 - DNA, 636 bp, Homo sapiens
gtgccatatcattacattttttattttttcagttttccaaagattattccaaagtgccaaaacattttaatggaaatgtctctaaaatttattagaacttaatgccttacttaaacaaagtagggtgaatatactttttaaaaaaattgttttgttttgttttgttttgtagagacagggtctttttatgttgcccaggctggtctcaaactcctggcctcagtgatcctcctgtcttgacttcctaaagtgctagaactataggtgtgagccacatgcttggcctgagtgaatatactttaacctttggtttatagcatcctctgactcaaactgaaggacaaacttaaattttgttttttgagacagggtcttgttctgtcacccagggtggagtacagtggcacratcatggcttacagcagccttgactgccctggctcaagcaatcctcccacctcagcttcctaaatagctggggctacaggtatgtgcccccactcctggctacttttttattttttgtagagatgggtcttgccatgttgcccaggatgatcttgaactcctggactcaagcagttctcctgccttggcttcccaaagtgctggaattacaggtataagccaccatgt

SEQ ID NO: 875273 - DNA, 624 bp, Homo sapiens
aaaatcaatgtaaaggagccccagttttcctcccttcagtgtccagggagtctccgtccctcactgggagttcaagatgagtgagcctcccacttcagttttaacccaaagacctccgagccaaaagccatggcgcgcacctgtggtcccagctacaggctgaggcaggaggatcgcttgagcccacacgttcaagaccagtctgggcgatgtaacaaaacccagtttctattaaaaagaaagaaatatatatatatatttaaagaagacctctggaaccaaagaaaaaatagataaataaattgcttccatttccagcatattctatgaccaaacactgccaagtccttggctgtcattatttgtctctttttgacccttcrgaattaccctgtgaggtaggctatgatccttattttgcagatgagaaaatcggggctcagagaggttaaatggcttgctcaaggccatcctgctggtcaggtgaggctaggatttcagcgcttgtgcagtctgcccctctgcccctctgaccttttttttttttttgagatggagtttcacactttttgcctaggctggagtgcagtggtgcaattttggctcactgcaatctctgcctcc

SEQ ID NO: 875274 - DNA, 519 bp, Homo sapiens
ccttgtttacttgggggccttgagccatgccagatagtctgattacaataatttgtggtaggggctttggggcacatgctatcagctcaacctccagagaagctggaggttaaggtcatccacatgggcagtcaactatgtytatgtggtgatgccccagtaaaaactttggacaccaaacttctctggttggcagtactccatgagtattgccacacactattgctgggaggcacaatggctggctctgactccaatgggagaggacatttagaagtgtcatgcttgaaactctcctgaactctgccccttgcacctcttcctttggtttattttaatttgtacacatcactgtaataacccataaccgtgagtgtagcagctttcagtgagttctgtgagtctttctagtgattattgaaactgagagtgttcttgggaatccttgcactttcatttggtgccagagtgagggtgatcttggggacacctgaactttggagttggtgttagaagtgg

SEQ ID NO: 875275 - DNA, 564 bp, Homo sapiens
aatttcatatccagtcaaactaagcttcataagtgaaggagaaataaaatcctttccagacaagaaaatgctaagggattttgtcaccaccaggcctgccttgaaagagtacctgaaggaagcactaaatatggaaagaaaaagccagtaccagccactgcaaaaacacaccaaaattttaagaccaatgacactatgaagaccctgcatcaactagtgtgcaaaakaaccagctagcatcatgatgacaggatcaaattcacacataacaatattaaccttaaatgtaaatgggctaaacaccccaattaaaagacacagactggcatattggagaaagagtcaagacccattggtgtgctgtattcaggagacccatctcctgtgcaaagacatgcataggctcaaaataaagggatggaggaaaatttaccaagcaaaggaaaagaaaaaaaaaatgcaggggttgcaattccagtctctgataaaacagattttaaaccaacaaagatcaaaaaagacaaagaagggcattatataatggtaaagggatcagtgcaacaa

SEQ ID NO: 875276 - DNA, 644 bp, Homo sapiens
tcaccgatcattagagaaacacaaatcaaaaccacagtgagattccatctcacatcagtcagagtggtgattattaaaaagtcaagaaacaatagatgctggcgaggctgtgaagaaataggaacacttttacattgttggtgggaatgtagtttagttcaaccattgtggaggacagtgggttgattcctcaaggatctagaaccagaaataccattgacccagcaatcccattatcgactatatacccaaaggaatatagatcattctattatraagacacatgcacacatatgtttattgcagctctatttacaatagcaaaggcatggaaccaacccaaatgcccatcaatgagactggataaagagaatgtggtactatgcagccgtaaaaaaaatgagatcatgtcctttgcagggacatggatgaaattggaagccatcatcctcagcaaactaacacatgaacggaaaactgaacagtgcatgttctgactcataagtgggagttgaacaatgagaacacatggacacagggaggggaacaacaataccagggcctgtcgggtgttggggggcaagggaagggagagcattaggacaaatacctagtgcatgcaggacttaaaacctagatgatgg

SEQ ID NO: 875277 - DNA, 543 bp, Homo sapiens
gggtatcaattttagatctttcctgctttctcttgtgggcatttagtcctataaatttccctctacacactgctttgaatgtatcccagagattctggtatgttgtgtctttgttgtcgttggtttcaaagaacatgtttatttctgccttcatttcattatgtacccagtagtcattcaggagcaggttgttcagtttccaagtagttgagcggttttgagggagtttcttaatcctgagttctagtttgattgcactgtggtctgagagacagtttgttataatttctgttcttttacatttgctraggagtgtattgctttaaaaatttctacaatgaaaagtgtgtttttaaattatttcataatatattacataggtatctattatgcctaacttaatgggagtctgcaggaaaaccaaatgcattgtgagcctactgtgcaatatgacaatattgccctccgcaagaatatatagatttgtgctcctcccccaagtcccttacaacaagccactataaacaacataccagttataaa

SEQ ID NO: 875278 - DNA, 560 bp, Homo sapiens
atgaaggagtcagtgagtgaaagctccaagcctgactcagcggaactggcagtcggccagggcctacaaagtgctgcctggccctcagtagggggtggcagatctggggatccctcttcaccaaatagagttgcatcatacaggtaaaggtcccaagtgcctattgttttcttttcatcattttccatgtgtgacaagagtatcacgcaatcatgtgaatcaatggacttagttttctcactagactaatgtgtctaggaattatctgtgttgtcatggggattttccaggtgtcatttacaactacctgtggacaagatgaggtgctaccctcatcttagaattagggatggtggcygggcatggcagcccatgcctataatctcagcactttgggaggctgaagcaggtggatcaactgaggtcgggagttcgagaccaacctgaccaacatggagaaaccctgtctgtactaaaaaacacaaaactagctgggcatggtggcacatgtctgtaatcccagctactcgggaggctgaggcaggagaattgcttgaacc

SEQ ID NO: 875279 - DNA, 612 bp, Homo sapiens
agtagagatggagtttcaccacgttggccaggctggtcttgaactcctgacctcagatgactcgcccacctcagcctcccaaagtgctgggattacaggcatgagccaccgcacctggcctattctacttttttttttctttttcttarggaaactccatgttgttcctcaaagtggctctattaatttacattaccaccaacagtgtacaagggttccatggggattacttcagattgagtggtcagagagggctcctttgagaagacttctgagaattggccatgggaaggtgtggggagaagccttctcagctgagggaacagcaaggtcaaagacccagaggtaagaaagcaagcttggaaccttccaggagcaacaaggcattggctctgataatgccttctcctgctaaaatgacagctctaggaaggcagggttcttatttcctgtctatctatctatctatctatctatctatctatctatctatctatcatctatctatctatcatatatctatctatccgtctgtctttatttatttatagaggcagagtcttgctctattgtccattgtattagtccattttcatgctgctgataaagaca

SEQ ID NO: 875280 - DNA, 633 bp, Homo sapiens
ccacctgtggctgtcacagaagggcggatgaaggaggggacactggagatagactcagcatctgcaggcttccaaagagaggggctaggagatccaccaacacaccagcacaaatacaccagcacacacagatacacacaattggttcatgtattgctaggttacagtttgctatgctacaaaggcagtaggccaaatttgattgaattgaataattccttattttcatcagcttctcctttttttttttttttttttttttttgagatggagtattgctgtgtcacccaggctggagtgcagtggtgtaatcttggctcactgcagcctccacctcccaggttcaagtgattctcttgcctcagcctcccgagtagctgggattaaaagtacccaccatcacgcccggttaatttttgtgtttttagtacagatggggttttgccatgtgggccaggatggtctcraactcttgacctcaattgatctgcccccctcagcttcccaacgtgctgggattacaggtgtgagccaccgcacccagccagcctctcagttttgaacatgcactaccaccacctccacaacacacaaatgtaaatgcactttcgtatataaaactgtataaataca

SEQ ID NO: 875281 - DNA, 612 bp, Homo sapiens
agtagagatggagtttcaccacgttggccaggctggtcttgaactcctgacctcagatgactcgcccacctcagcctcccaaagtgctgggattacaggcatgagccaccgcacctggcctattctacttttttttttctttttcttagggaaactccatgttgttcctcaaagtggctctattaatttacattaccaccaacagtgtacaagggttccatggggattacttcagattgagtggtcagagagggctcctttgagaagacttctgagaattggccatgggaaggtgtggggagaagccttctcagctgagggaacagcaaggtcaaagacccagaggtaagaaagcaagcttggaaccttccaggagcaacaaggcattggctctgataatgccttctcctgctaaaatgacagctctaggaaggcagggttcttatttcctgtctatctatctatctrtctatctatctatctatctatctatctatcatctatctatctatcatatatctatctatccgtctgtctttatttatttatagaggcagagtcttgctctattgtccattgtattagtccattttcatgctgctgataaagaca

SEQ ID NO: 875282 - DNA, 657 bp, Homo sapiens
tggtcatctcgccccaattaaaggcaacacattgcaaaaattctctaagcctggagttctgatggtctaaattgcactggggtatgaagggctggtcaaagtatttgcattttgaaggcactgttagagagaagccagtgctaaccggtgttgcaaatgtacatacttccagggaacatgaagtgggctgggtgggagacatcagggagtagtggagcctgtggctaactggagcacatgcccctcctaaagacattcacattcagatgtttccaaaatagcgttccatccaactaaatcacttgggccactagtataggagctctgaccaaggaaatgggtttcagcctggttagtggagctgtctgagtggcaaagaaggtcttaatcagaatgtaaaatagtgactcccaaactctcagatgtataakaattccctgagaaggggaacaccagctccttgaccctgccctcaaagactgggagtctatagctcttgggtggtacccaagaggctgtatttttaataagctctccaggggaaactgaggcaggttgtcttctggttctaagttggctaccctgagctggtaaggccaccccagtgtgctggactgggtccttacccttgctcagcagataactggagttcaatga

SEQ ID NO: 875283 - DNA, 628 bp, Homo sapiens
attgtgaatgggagttgactcatgatttggctctctgtttgtctattattggtgtataggaatgcttgtgattttacacattgattttgtatcctgagacttagctgaagttgcttatcagcttcaggagattttgggctgagatgatggggttttctaaatacacaatcatgtcatctgcaaacagggacaatttgacttcctcttttcctaattgaataccctttatttctttcttttgcctgrttgccctggccagaacttccaacactatattgaatagcagtggtgagagagggcatccctgtcttgtgccggttttcagagggaatgcttccagtttttgcccattgagtatgatgttggttgtgggtttgtcataagtagttcttattattttgagatacgttccatcaatacctagtttattgagagtttttagcatgaaggctgttgaagtttgtcaaaggccttttctgcatctattgagataatcatgtggtttttgtcgttggttctgtttatgtgatggattatgtttactgatttacatatgttgaaccagccttgcatcccaggggtgaagcccacttgattgtggtagataagctttttgatgtgctgctgg

SEQ ID NO: 875284 - DNA, 571 bp, Homo sapiens
taagaactgcaatcttcctggatcccagcactttggtaggccaaggtaggaggatcacttgagcccaggtgagcagactgggcaacatagtgagatcccatatcttttttttttaatttccttttttttaacaaaagaactgccgtcttctcaaagctaatcaacgttgctgcaaatggatttccttctcttttaggactaaataaataataataaataatacatactccattttatatatatacacacagacacacatatgtatatacacatatacatataaatctattcgctttatcarttttctttatccattcatccattgaatggacactgtgtttccatgtcttggctattgtgaataatgctgcaatgaacatgggagtgtaaatatctctttgagatactgactttgtttcctttggacatatgcccacaagtgggattaagaagacaaaaactgtatgatctcacttagatgaggcatctgaaaaagctgaactcatagaaaaaaagagcagaagtagaatgctgattgccaggggctggaggacgggggaaatggggagat

SEQ ID NO: 875285 - DNA, 551 bp, Homo sapiens
ggagcaaagaattccttcatttaactttccctgcttagctactgaagtgtgcttcggagcaatttctggaaaatctgatgtggcaggaggagggccagcccggagtagagtcaccggccctttcgttgcgaagtaatccagaaacgttggtaattcagttgttcctgaatgcatctactcatttactcccaggagttacttaggtactggggactttcaggtattagatgtaccaatgcgcrcgcgcacacacacacgaacatgcgcgcatacacagacgctcgtgcacacacgcgaacaggcacatacgcgaacaaacacgggcgcgcacacacacgaacacgggcatatgcatacttgggcgcacaagaagatctggctggctcagtctgggttaagaatccccctttggccttggcatcggggcccaccgggtatcgtgtgtattgggagtagttgccagagatgggggaattgtgttcagctcaactgctaaccgcaagtaactcacccaattagtaaatgatggaggatttttctttctttccaaa

SEQ ID NO: 875286 - DNA, 551 bp, Homo sapiens
ggagcaaagaattccttcatttaactttccctgcttagctactgaagtgtgcttcggagcaatttctggaaaatctgatgtggcaggaggagggccagcccggagtagagtcaccggccctttcgttgcgaagtaatccagaaacgttggtaattcagttgttcctgaatgcatctactcatttactcccaggagttacttaggtactggggactttcaggtattagatgtaccaatgcgcgmgcgcacacacacacgaacatgcgcgcatacacagacgctcgtgcacacacgcgaacaggcacatacgcgaacaaacacgggcgcgcacacacacgaacacgggcatatgcatacttgggcgcacaagaagatctggctggctcagtctgggttaagaatccccctttggccttggcatcggggcccaccgggtatcgtgtgtattgggagtagttgccagagatgggggaattgtgttcagctcaactgctaaccgcaagtaactcacccaattagtaaatgatggaggatttttctttctttccaaa

SEQ ID NO: 875287 - DNA, 658 bp, Homo sapiens
ctaatgggagttacatgaataaatctcaaaagcactgagaagaaggagttttgctattatagggaattcagagagctcagatatgatttcatttgaaatgttgaaatgttatcgaaaacgtctgtgagaaatgctcaataagcagaaaaatattttatatttggcaaaatgactttgtatgttattatagagttaaatatawagaatattattaatcttttaatagaatttttaaagacgtttaatttttttctgattctagtttaaactgaggaatgaagccaggtttaagagaaaatacataaatttgatcatgcctaactagtgtcctctaggttttatagaaagaaattaataacttttcaaactactgtaaacatatttatccctgaaggcctgctgtgatatatgcgttaacctttttctaaattgaaactgtcactaaatctttctttaatcaatttccacaacaagcatgtgaggtatctattgttttacaaatttttttatatttcaacgattagagagtctattaatgacatgcccaaattgcccagtaaactccgtagacaactcatgaagtcttctgagccctaatctcaggctccaagaagccacatttcacaggatcattttgcttagtgtatttaaatatatg

SEQ ID NO: 875288 - DNA, 636 bp, Homo sapiens
ctagcttgctgatgggaagaatagggcactgaccctgacatttaccccgtgtgacagactgactcttggtctgccctgcaaggtttcccatatccttcttctggtaatagacacagattcttgtttacagagcctgtgatccaatgtaactgatttttgttgtctattacagcaaacttgaaagatccctttagaatttttataccagtctgtacaaatgactgttttataaatctagcaaataagatcagaaaactcaccatgaggaagggkaaaatctgatcctgggttgttattttgcagagcaagttcaaggcagaggctgacccagcctccgtgggaccttgagcaggcagaggggaaatgactgtgtagagcttaaacaaaaagagctgagaagccagagaactgaatgttggcagagaactgacctactgtagtgtggaacaaatgtaatggggcttaatatggtgaaatgacatgttcgctttctccccacgtaccttgaaaaactactacaagaatagcagatcatcagaccaagtattggtgactgccttgataagtatggagttagaagatgtctacctctgacttcaggaatgcttattttccataatgacactatgaggtagc

SEQ ID NO: 875289 - DNA, 666 bp, Homo sapiens
gacccacagtgccaaacacattgctgagtgccccatagaagtccatgacaaaacgagtgacgtgcccctctgaaagaactgagtaaggctgcccaacaccatactcaagtccaggggttggcagactccaaaggccaaatccagcctaccacttgttgtaaaataaagttttattggagcacagcaattgcacattaatttgtttacatattgtctttgctgcttttgcacaacagagctgcgtgatcgtagtggcaactgtatggcccacaaagctgaaaatatttacaatctgtacctttagagaaaaaaacttgctgactgtaagcattcagtaccaatccattgaattggctttgaagatgaaatctagcggcagtcctggaactggataatatcaaacgtttcttcaaggtctaaaagtctcaattcgaactccccaagaatcctctgcagttatwtatttgcttgcttatgagacaaagtctcactttgttatccaggctggagtgcagtggtgcaatcttggctctctacagcctcaatctcacaggctcaagcgatcctcccgcctcaaccccgtaagtagctgggactacaggcatgtgccaccatgcctgactaattgtttttattttcatttttagtagagatgaggtatcacta

SEQ ID NO: 875290 - DNA, 527 bp, Homo sapiens
aaggagaaatttacagtcaagcaaatgctgagggattttgtcaccaccaggcctgctttacaagagctcctgaaggaagcactaaatatgaaaaggaaaaaccggtaccagccaactgcaaaaacaaaccaaaatgtaaagaccattgacactcttaagaaaccrcatcaagtaatgggcaaaataaccagctggcatcataattacaggatcaaattcacacataacaatattaaccttaaatgtaaattggctaaatgccccaattaaaagacacagactggcaaattggatcaaaagtcaagacccatcagtatgctgtattcaggagacccatctcacatgcagagacacacataggctcaaaataaagggatggaagaagatttaccaagcaaatggaaagcaaaaaaagcaagtgttgcaatcctagtctctgataaaacagactttaaaccaacaaagatcaaaagagacaaagaaggccattacataatggtaaagggatcaacacaacaagaagagcg

SEQ ID NO: 875291 - DNA, 527 bp, Homo sapiens
aaggagaaatttacagtcaagcaaatgctgagggattttgtcaccaccaggcctgctttacaagagctcctgaaggaagcactaaatatgaaaaggaaaaaccggtaccagccaactgcaaaaacaaaccaaaatgtaaagaccattgacactcttaagaaaccgcatcaagtaatgggcaaaataaccagctggcatcataattacaggatcaaattcacacataacaatattaaccttaaatgtaaattsgctaaatgccccaattaaaagacacagactggcaaattggatcaaaagtcaagacccatcagtatgctgtattcaggagacccatctcacatgcagagacacacataggctcaaaataaagggatggaagaagatttaccaagcaaatggaaagcaaaaaaagcaagtgttgcaatcctagtctctgataaaacagactttaaaccaacaaagatcaaaagagacaaagaaggccattacataatggtaaagggatcaacacaacaagaagagcg

SEQ ID NO: 875292 - DNA, 655 bp, Homo sapiens
catggaaacatttgttattttctaatcaaatgcagggtttttctcaggagctagagtaggaggtgaggagtccacatctttctactatttcttgaacatggaaacaaaaaaaaattactagactcacacttaactgaaggtcctaatttcaactcttactggtgacctagwgccatgggtatgtcagattatgtctctaagcttcaggctgatcatctgtaaacaagaaaagcagtgcctgtccctttcttgaatttcctaggaagatttaaggataaaatggttataacgtgctatgcaaatgtgtgatcaaacactacacacatatatacacatacttaatgcagtcagagttgtcagcaagtacacttggaaaatacaaagagctatttgccttggagaggttagggggtaaagaactagggcacagttgctactctcagggagattacagtcaaatagagaagatgtcacattttgtagatctgagacattgtttattttacattataacatctctcaaattgaggtatatctcatagctaatggcatatcttagaatgaagactttttctttcttagtggcgcatgagttaatggtgcctctttttcatacccagttgtgtcttagattccatgaaatttaataatatag

SEQ ID NO: 875293 - DNA, 630 bp, Homo sapiens
ccttcataaaggagactaaaactctctcctttagatcctatttgagtatatgctgctaagtttcgtaaagtggctcttctctgtgcttccatagactagttggtccctttctgactgacacattctttccttaagtrggttaatgcatttaatcaatttacagccaagaaaagctcatctgagaatattctgtctaaggaaaatttgcatatctctgatctgcttcatcgtgcatgaatctcataatgtggaactcacacagagggtagccaaatgcccacctcagccccatagccatcaccactgaaaaggtgagaaaatcatctatatccccatatcattatcacaggccaggccaaaagatctgtttggaacaactgttcctatctgcagatattatacaggatggggtcaaatttctatcagcctgggcacaactacagtcaacagcataaatgaccaccagcctgaaggtgagattttatgcagagtgtcttaaataattaaaaagatacttatggaatgaataaatgaaaaacttttgaggaagcattgcaaaaggcttcaaataatagagacagttaaataactgtaatttttatgcactgcacttttaatgacagataaaat

SEQ ID NO: 875294 - DNA, 591 bp, Homo sapiens
ctgtgattcacctataggtgcctgccagaggctccaaatagcatccctatctgccactgacacctcaagcacaattggatctgctgggtcatatggccaaagcggcaaagcagcttgcacagcagcctggacctgttgcagggcttttcctgttctggatcccactcaaaactagcagcattttgggtcactcagtaaatgggctgkagtaacacacccaaataaggaatgtgttgcctccaaaatccagataggcccagtaggtgttgtgcctctttcttcgttgtaggagggacctaatgcagcaaattatccttcgccttagaaggaatatcttgacaggccccacaccactgaacccctagaaattttactgcggtagaaggtccatgaattttagtcggatttatttctcatcctctggcacacaaatgtctcaccaataagtccagtgtgtttgctacttcttgctcattggatccaatcagcataatgtcataaatgtaatggatcagtgtgatatcttgtggaaacaaaaagcaattaagttctctccagataagattaagacacaaagctggagagttgata

SEQ ID NO: 875295 - DNA, 638 bp, Homo sapiens
ccagttcccaataagttcctcatctccatctgagaccatcttggcctggacttcattgttcacatcactatcagcattttggtccaaactattaaacaagtctctaggaagttccagactttcccacatcttcctgtctttttctgagccctccaaactgttccaamctctgcctgttacccagttccaaagttgcttccacattttaaggtatctttataggagtactccactcacttggtacgactttattgtattagtccattttcacactgttataaagaaatacccaagactgggtaatttataaaggaaagaggtttaattgattcacaggtcagcatacctggggatgcctcaggaaacttacaatcatggcagaaggggaaggaggcatgtcttacgtggtggcaggcaagagagtgaaaaatccaggggaaactgccatttataaaaccatcagatctcgtgagaactcactcattctcatgagaatagcatgggggaaaccacccccatgatccaattgccacccacccttgtcacatggggattatggggattacaattcaaaatgagatttgggcggaaaaataaagccaaaccacatcactccgtaaccccaatcatcaccctag

SEQ ID NO: 875296 - DNA, 714 bp, Homo sapiens
tgtgtagaagggcacagggtttatgagaaaatttaaaagataaaaagatgaaatatgattgagaatattgagtgacagagcaggggatgttcacatgagggacactgaggtcttgtcattcattgtaaaatatatatgagcaagtcagttggacaaarccataggagtcccagggtataccatgctgtttgttgctttgggatgtttagttggatcttgtgtacaatccagaaaagttaggtgtgaccatttttagaaagtttgggaatctgccttctgaccttcaggaggcatattgggcagagatgagccttacaacgtctctagccttcctatgatagaatattggatgaagaggtcaaagaaccagcaggcaatggttggcgcatgatagtgagattgattggaacgtcagctcttttcatctctccctagtagcgtactgagggacaccatttatattcctgaagaaaggtttttctggcactgggttaccatggggaaggataattttcaaggttggggaaacatctttcaaacttacatctcagtaaaggcttgtgaaggtatttttatgttttttaaaagttagtattgtaaaagattatggcctttttgagaacatgttctagggaattgtgtccaaattgtgtccaggaaaatctgagataagaggctaaagaggctcacaaagaggaaaactggatttaaaag

SEQ ID NO: 875297 - DNA, 618 bp, Homo sapiens
atgagcattcaccttcactttaagctaaatgctaaaagctgattcatcagccatatccctgtcctccttatatcttgcctggatgggttttgttatagcaattaattaggtttcacaaacaacttaggtggaaaatgatgacagaatattacagaaaaaaataatcaacaccctttgctttttattaagtgtgacatgttctaacaaaaccctcrgtttattccttgggattaggttttcccttcctctccagtgtcccaaagatagaatttcttgcaaaccctgaagggagtcattgcctccaacaggaggcaacttgcacagactccgggatatttaagtgaccaataagaggctgggtcagctcccctgaggcaggtagctgtccctgagggggtagcatagagcacagaacacggcagagtctgtaggctcaacttgagcaaatttgacctcggacaaattgctttccctctctgaacttcatttcctcctgggtaagagtgggggaacagaagcagccgcattatgaaatagggtgagaaattcatgacggaacatatatatcacttagcactgttcctggcacaagcaaatgctcaataaatgttagctctg

SEQ ID NO: 875298 - DNA, 638 bp, Homo sapiens
cagtacacctgttgcctcagtacactggttttgaagctgtggttgaagctagtcatgatgaccttattcctctgccagggattggttaagggtaaacataggacccagctctggtcaatggggagccatttcttaaaaagctgtctgttcttgaaaataggcatggctgggccaggtgcagtggctcacgcctgtaatcctagcactttgggaggccaaggcaggcggatcacgaggtcaggagattgagaccatcctggctaacatggtgaaattccgtctctactaaaaatacaaaaaattagccaggcgtggtggcaggcgcctgtagtcccagctactcgggaggctgaggcaggagaatggcgtgaacccaggaggcggagcttgcagtgagctgagattgtgccactgcacccyagcctgggcaacagagcaagactccgtctcaaaaaaaaaaaaaaaggcatggaggccaggtgcagaggctcatacctatgatcccaacactttgggaggtcaagatgggaggatcacttgagctcaggagttcaagaccagcccgggcaacatggcaagacccatctctatttaaaaaaaaaaaaaaaacatggtaaaaagaagtgatcctttttttt

SEQ ID NO: 875299 - DNA, 664 bp, Homo sapiens
gctttaaaagccttcactgtggtcttctcaagcaacttcctgaggaagggaagggaagccatgggccaagagatgcccagtggagcctggctcctcccttgtacgttctgatctcaatgcctgggaatctcagaattccctatccagactgtatacctgtttccaggccttcttttagggttattgagcatgttatgtgttcattttacctcttttgttggattattagctataactctttgttgtttccatggttactttagggtttatagtatacacatttttaacttatcaagtctaccttcaagatgatattataccacttcacatgtagcataagaatcttacagtagtatacttccatttctctcctctcagcctttatgcgattgatgtcatacaatttacttttagataagttacakatgcacatgacattattatttttgtgtaaatattcaattaactttaaagagatttaaacagtaccaaaagtcttacatatttacccatggagttagcatttctgttgctcttcattcacttgtgtaggttaatatttctgtctgttatgattctttctgcctggaggacttcctttagcatttcttatagtgtgggcatactagtggtgaattccttcagcttgtacctgaagacatct

SEQ ID NO: 875300 - DNA, 565 bp, Homo sapiens
ttagagccccgagagttaatgaggccgacctggaagggtgtggatagaggagcaaagaggcctgagaacccagcccttgaccagcaatggacagagagagggacagaagagggacccagagaggtagaaggaaaggccagtgtttccaggagkggcggggcaccagccggtcagacgccgtccagagggacgaggaataggatggggcgggtcaacgctgacttctgtcagaggcgtttgaaccaggacaactccatcttggatagggactgggtaaaataaggctgagacctactgggctgcattcccagacagttaggcattctaagtcacaggacgagatagcaggtcggcacaaggtacaggtcataaagaccttgctgataaaacagcttgcagtaaagaagccggctaaaacccaccaaaaccaagatggcgacaagagtgacctctggtcttcctcactgctacactcccatcagcaccatgacagtttacagatgccacggcaacgccagaaatttaccctctatggtctaaaaaggcgaggcatgaataatccacc

SEQ ID NO: 875301 - DNA, 599 bp, Homo sapiens
ggtgggaattcaacaatgagaacacatggacacaggaaggggaacatcacactctggggactgttgtggggtgggggaagaggggagggatagcattaggagatatacctaatgctaaatgacgagttaatgggtgcagcacaccagcatggcacatgtatacatatgtaactaacctgcacaatgtgcacatgtaccctaaaacttgaagyataataaaaaaaattgaacaaaaacaaaacaaaacaaaaaaataaattaaaatcttgattttgaacctggaaagtagtcttatgatatctctatctttttgtagttgctaaactgaaaagtactgtctgttctcagagatatcacaatctcatcagtagattccatgggctggcatatttgactgcagttaaatccattctttgtggtcttcatagtgaatcttatttcatgtagttccgaaaaggagaagagataattacatctaacttgaaggcttattgaagaatcctttaaattacctatgcctctcttcattaagaaaatacaagataatttgaatctagctaataaattaaggcttactggaaataacgccatacaaatta

SEQ ID NO: 875302 - DNA, 583 bp, Homo sapiens
acaggagaggacaccttgaaattggtttggtctcttataactagcaagagagaaaataaaatgaacagttttctcactcacagatgtctttgcataaaactatggttttcagaacaattttattttaatgttattgataagtgtgaccacctcttctggttatgtatatgatttacgaataaaatcacaaacagtgagggggaaaaaaaacagggaaataaactaatgcttagtctcctcagtaccaaagaatccatttgatagtgttagaagtttggtaagttggagtcatagctcattatgccttttgacagaatacaactttaaccccttccctccttagtgacaataatattcaaacayttttcttgctatcagcagtaattgaatatctattccaataaaagggtgtgtgtgtatgtatgtgtgtacatgtatgtatgtgtttgggaatttggatgaggcagatagtcatattcaaatgtggagtataactagaccaaaaaatcttacttcctgacatattttaaacaatgccctcatttttttccaacacctgagtccaagaacgctctaaaaggct

SEQ ID NO: 875303 - DNA, 541 bp, Homo sapiens
ctgtcccttctgcccattcttgccttcctagctttcctctcctcttcctcctcttcctttctcacacttgttcaaaacacagggccgttgctccaggtaaatctattcatttccttattggacatatttcgggctttccctgatttttcttttacagaytccttttacttctgtctattaatctttgctaatttctttcttcagaaactgttggtatttatctccaaaaattatcttctgatcaacgttatctcatttgggccacttttaaaaaatatcatattccttcttttcaaattcatttgcgtactgagatgtaagtgttaagactttttaaaagcatttgatctaaaatttcttagttgtaggactgtagttgttggattgtatttcatctaaaaaatttacaacaaaaatcctatgtttttttaaacattatgtaagttcattatgagcaggaggaaatagataaataaaaatcctcatgttccagacaaaatcttttttttttttttttttttttgagacagagtttcactgt

SEQ ID NO: 875304 - DNA, 640 bp, Homo sapiens
cttttgagatgctgtatggatgacctttcctcaccagtgattttccgttagatcgggaaacctctgagttagttaagcatgtaacctctctggcacacttccaacaggaattagcacaattagcaaaagctcaatcccagaaaagaggaccacttctgtttaacccaggagatttggtactggtaaaggctctctcctctttctctccttctctaggcccaagctgggaagggccttacactgttctttctcccaactcccttggcaataaaagctacaggaatcgactcctggatacatcacactcagattgaagmctggaaagctgagggaacaacccctgacagcccagaggaaggtcctgaatatcaatgtgaagaaagaagagatcttaagccgaaaatcccaaaagataagtaactgagtgagaactacttatcttactcacgcccctacctcaccaaatactttgtttctacctctccttttgagattcgtcaccaaatattagaccttctttttgatgcatatttgcaagggaatttttaattatccatagagttacattataacttcatagagctccaaagagaaattgtatatcttggcaaataacaattttagatggaaattacttact

SEQ ID NO: 875305 - DNA, 641 bp, Homo sapiens
gggctatgctgttctgaaagtctatgaaatgtattgtaggatgttttactctttttggttgggaaggaaggtagtatttcaatttccatgggggaacactttaagatttcagctggaagtcatcatcctcagcaaactaacacaggaacagaaaaccaaatactgcatgttctcactcataagtgtgagttgaacattgagaacacatgaatacagagaggggaacaacacataccagggcctgttgggggtggggggtgagggtagggaacttagaggacaggtcaataggttcagcaaaccaccatggcacacatatatctatgtgacaaaccatgcacattttgtacatgtatcctgttttttttttaagaaggaataaagaaaaaaaatttcagctaattgttccaattcagtgtgtagtgctacatgttttattctcctcagtcagtccttttgtcactttctycacttatctgtttttccaaaccagtatttctgtcagtcctagtcagaataggagcaactgctcattcagtttgcctttctttgaatctaagattatggtgagaggattcaggggatcatggcagacaggaggcaggactagacttgtagctctggacagagcagtatgtaga

SEQ ID NO: 875306 - DNA, 663 bp, Homo sapiens
gtcatctgttctcttgggtctccagcttgcagacacaccctgtggatttggggacttgtcatcttccctaattgcatgagccagtttttgataataaatctctttatataatgtatccaacctattggttctgtttctttggagaacattgattaatatacttacatagctatttctgtgarctcttcatattggggaccaattttggtctcttgacttaatgtaaacacttttggcttctggattagaaggtgactacaaacgctaataataaacattatgtatttgtgtgtatgtagtcctcattggtgatttctggaagtttaaatgccattgtcccactgctgatccattaaatgattctaaaaatagtcacccaacaaaaagaacaggaaaatgcgatgcttattttatagactgcaatcatacctgctggaaagttggtacatgatcacaatgccttaaccaatgaggtattaatagatctcttctttaactcaagcttatgaatgttcctgtgaagcaggggactgagaccacctacatccacttagagtaacaggacagagaagtgaggctgccagtgtcacctatgacttaactattttttctatcacattctggcctaggaatataagcctggtgaccaataaatcatacacc

SEQ ID NO: 875307 - DNA, 653 bp, Homo sapiens
tagatttttgcatttttttctccaaccacccagcatatcaaagaatgacatcctggactaaataaactcatggatgaagatacttcaaaagataaagtaaagaaattcttgatagtgtgatatgaacttaaaagtaccccaggctggcaaagtagtactgagatatacttacagagtgggtctgctcttttccattgttttccattctatcttagtttaattgatttttatggagcagaaatttgagggcttttgaatacaattaaacccatcagccttgtttataatatttttctattgctctaacaataagtcacagtcctaaagcatgccctgygctaaatattaggcaacagactagagggtctcattcaattcaacaaaggctctagcccagttgcccttcacaatgtgtgtaacaattctttttcatgtcttacaactttgtatcctttttgtaacctcacatcctctttgtttacagtatatggaatgacgcatggatctaagtttatgtatcgccataccagtaattagtatacctaagaaaaggggtctacaaactatggcttgtggatttggcccactgcctatatttataaataaagttttattggaacacagttcactcacttgtttccatactgtctgtg

SEQ ID NO: 875308 - DNA, 653 bp, Homo sapiens
tagatttttgcatttttttctccaaccacccagcatatcaaagaatgacatcctggactaaataaactcatggatgaagatacttcaaaagataaagtaaagaaattcttgatagtgtgatatgaacttaaaagtaccccaggctggcaaagtagtactgagatatacttacagagtgggtctgctcttttccattgttttccattctatcttagtttaattgatttttatggagcagaaatttgagggcttttgaatacaattaaacccatcagccttgtttataatatttttctattgctctaacaataagtcacagtcctaaagcatgccctgcgctaaatattaggcaacagactagagggtctcattcaattcaacaaaggctctagcccagttgcccttcacaatgtgtgtaacaattctttttcatgtcttacaactttgtatcctttttgtaacctcacatcctctttgtttacagtatatggaatgacgcatggatctaagtttatktatcgccataccagtaattagtatacctaagaaaaggggtctacaaactatggcttgtggatttggcccactgcctatatttataaataaagttttattggaacacagttcactcacttgtttccatactgtctgtg

SEQ ID NO: 875309 - DNA, 575 bp, Homo sapiens
attccccagccctgtatgattctagacatgaccgagtgaagcattacagtggtggtgtccatagggaaagtgaatcagagagaagcagctgatatttaaaagttcagaataaaggaaggaggttcctcccacaaactttattctgaatagtgggaatcgctagttcttggagacagcttttcaaacattcagaggcaactaattagcagacatctgaagaaagggagaatcattcaatctctctctaaaacaaatggctaaatctgtaacttctgccaatgaagctctgattttgacggtgctaggttgagattttaacccattttcacaagacgtagttgcctttcaaggcacctctatccatggggatggggaakgagtggtgaggacgtaagatttgtatataaaagtatttttaacacttttacctacagaaaagacttgaattccatgtatcttcaatgatcagttgaagcaaaagactaaaatatcaagttaacagtctaattaaatctctttttattattttcattgttaataaaaataactgaagatcagtgtagctttatcaaggt

SEQ ID NO: 875310 - DNA, 608 bp, Homo sapiens
agaggttccaaaacctccattcttgacttctgtgcacacgcaagctcaacaccatgtggaagctgccaaagcccggggcttccaccctctgaagctacagaccaagctctacattggcccctttcagccacagctgaagtggctacaacaggggaccaagtccctaggctgaacataggaaggggaccctgggcctcacccacaaaaccactttttcctcctgggcctctgggcctgtgatggaagggactgccatgaagttctctgacacggcctggagatattttccccattgtcttggggattaacattaggctccttgctacttatgcaaatttcttcagctggcttgaatttctcctcaaaaaatgagtttttgttttctactgcatcgtcagcctgcaaattttctgaacttttatgctctgtttcccttttaaaacagaatgmttttaatagcacccacgtcacctttggaatgctttgctgcttagaaatttcttccaccagataccctaagttacctctctcaagttcaaatctctagggcaggggaaaaatgctgccagtctctttgctaaaacatgacaagagtcacctttgctcca

SEQ ID NO: 875311 - DNA, 369 bp, Homo sapiens
cacccagtatctccccagatgcaatttctgtctctagtgtattgctaatataagtgatagatttctcttattttcagtactaatgtttttacctaatagcaaaccctagtgattgatacagattgttcatactgcttcttgcttaaaagaatagcctcctttccactctttctatgcaagakgcataatttgccactttcacgaccttcgagcatggctatatgacttcctttggcctcatggtgggtgggagttactccccctccctttgactttaggctcagccatgtgacttgctttggcctctggttcgtggcaagcatgaagcaagccacccggagacaggctggggtggatggaattgcttta

SEQ ID NO: 875312 - DNA, 678 bp, Homo sapiens
tgctagcataaactgctgctttacagcatgaggcccttctggaagaacattaactcttgcatctccccagagccccagttcagcatatttccaatcaatatttgctccgtaagcactgtgtgtacaggactagccattttattttacttatttcttaatctagatgcccactgactttcccagaagaaaccaggcaaccacagacttaacgttccccagaaatcgaaacgctgtgtcttgttgctgtcggtacactggttttcagctctgcacggttttttgaactaatttcagaaaagacgttttgtacacatacctttccccacatattagttacaaataaaatgaatatgaatagataaatgaatgaacaaatgaatgaacaaattggtagggcactaccaatgtgattgaaagttgacatttcaaacccttctggccttataaaatcttagagtgacttctattactgaatgtggtcatgatyctagggcccagaacataatcccccaaaatatggaactttggcgattgggaatactgcagaagcagaagcagcagcaagaatgccactatgacctcctcctcccattctcccctgagccacggtcataaaggaattctctgacctacctctccagagagaaggttgtaataccctcattccagaggggtcct

SEQ ID NO: 875313 - DNA, 541 bp, Homo sapiens
atgggtacagcaaactaccatggcacctgtatacctacgtaacaaacatgcatgttctgcacttgtatcccagaacttaaagtataattaaaaaaaaaaagaagactaaaactagcaaaaatgcatgaacaacgacaacaaaataatcaatttaggttagaatagagattgcagaaaataaaatgcagagactataacatttgcttaatagtttttcatgttgtggttctaagaaacttcagaattgtacgtaaagtgtcaaaacttatgtatagtacagtgtctgggaattctaaatgattagtatgctactaagaaacatttcttctcttggggaattttctcattaaaacaaatgtttttttcacagkgatatatttcacatttgaaataaactgcacatccagaagttagagaattactaatgggcttccgatgccttttcttactgcactcaaaattctgtattcaagaggaaatcttttaagaaagtaatagagtgctgtttgtttttgaaagacaaattatcttggtgtgagtt

SEQ ID NO: 875314 - DNA, 644 bp, Homo sapiens
ctggatttggtttaccagtattttattgaggatttttgcattgatgttcatcagggatattggtctaaaattctctttttttgttgtgtctctgccaggcttcaggatcaggatgatgctggccttataaaatgagttagggaggattccctctttttctattgattggaatagtttcagaaggaatgttaccagctcctctttgtacctctggtagaatttggctgtgaatcygtctggtcctggacttttttttggtggataggctattaactattgcctcaaattcacagcctgttattgatctattcagagattcaacttctttctggtttagtcttaggagggtgtatgtgtccaggaatttatccatttcttctaggttttctagtttatttgcttagaggtgtttatagtattctctgatggtagtttgtatttctgtgggatcggtggtgatatcccctttattattttttattgtgtctatttgattcttctctcttttcttctttattagtcttgctagcagtctatcaattttgttgatcttttcaaaaaaccagctcttggattcattgatttttgatgggttttttgtgtctctatctcctatagttctgctctgatcttagttacttctt

SEQ ID NO: 875315 - DNA, 703 bp, Homo sapiens
tacagaactacaatattgcagtcaggtttttttgtgttgtgagatggccacaagtttacaaagcatcatatatatatgaattccgtgtgtgtgtgtgtgtgtgtgtgtgtgtgtgtgtatatatctatatatatatacatatattctccatatagtcttcccaatctacgttttgagaggccaggcagaaaaaagatgagaaaataaaggatgtgtatttaattagtctctaatccaatgctggacatttgcccagtaacttcccatgcctcctctacccttaatccagcctctctctcttctagaatgacccttatcttctggagacattcgcaccagcatggccctgtgaaatctcaaatgtgccttggtttgggtaaaggaaagcagccttgctaggctgcctaacactttttccaggataaagacagaatcagatgtcccacaaggggccagcccaaaatccatttaagtacctcaataaattctayggcacatcagtctgtgaagctatataaaacatatttaactctgttttatgacctattttactacttttgagagcctttccaaactttagaatcactgttttctccaggaggaaggcgctgattggccccctgcagtcctggaaggccattatggagactggaattggtgtgctaaagtcattatgattatcatgaatcctctatttcaacac

SEQ ID NO: 875316 - DNA, 611 bp, Homo sapiens
tgattatgtaatttgtgattaatttcatctggatcctttggtacttgggcctccgcgtgtaaaaactcatctatggaatgaatatgggtaaaaatttgtgtcactgaagctgtccaatggggcatgaaattcaacagtcatcccaaaaacaccctctctaaccaaggtcacatacactcatctatctggggggctttcacgggcatatggaggatgtcttgctattaatcctagacgttaagcgcaggtcttcagaaaacaagaaaatgagattatcttttgggtgtttagatttttttttttaaccaatagactttattttttagagcaattttatgtttatagaagaaytggccaagcacagtggctgaagcctagaatcccagcactttgggaggccaaggcaggtggatcacaaggtcaggaaattgagaccatcctggctaacatggtgaaaccccatctctactaaaaatacaaaaagttagccaggcgtggtgatgggcgcctgtagtcccagctactggggaggctgaggctggagaatggtgtgaactcgggaggcggagcttccagtaagccgagatcacgccactcgactccagcctggg

SEQ ID NO: 875317 - DNA, 622 bp, Homo sapiens
gtttcaaaactgctctatccaaagaacggttccactctgtgaggtgaatgcacacatcacaaagcagtttctgagaacgcttctgtctagtttgtaggtgaagatatttccttttccttcataggcctctaatcgctccaaatatccacaagcagattcttcaaaatgtgtgtttcaacactgctctatcaaaagaaaggttcaagtctgtcagttgaatgcacacatcccaaagcagtttctgagaatgcctctgtctagtttgtatgtgaagatatttctttttccgtcttatgcctcaaatcgctccaaatatccacttgcagatacttcaaaaagactctttcaaaactgctctatccaaagaacggttcaactctgtgagatgaatgcgctcatcacaaagcagtgtttgagaatgcttctgtctagttttcatgtgaagatatcctgtttacagagattaactcaaagagctccargtatccactagtagaaactttaacagcagtttttcaaaacagctctatcaaaagaaaggttcaactctgaattgaacacacggatcacaaaggtgtttctgaaaaagcttatgtctgttttttatatgaaaatattttct

SEQ ID NO: 875318 - DNA, 619 bp, Homo sapiens
agaatgtttctgtctagtttttaggtgaagatatttccttttccaccatagccctcaaagtgctccaaatgtccacttgcagattctacattaagagagtttcaaaacttctctgtcaaaagacaggttaactctgtgagttgaatgtacacatcacaaagtagtttttgagaatgattctgtctagtttttaggtgaagatattcccgtttccaacgaaggcttcaaatcactccaattatccacttgcaggtcctacaaaaagagtttttcaaagctgttctatcaaaagaaaggttaaattctgtgagttgtaagcacacaacactatctggtttctcagaattcttctgtctagtttttatttgaagatatttctttttcttccatagacctcaaagcgctccaaatatccaattgcagattcaactaaaagagtgtttcaaaacagckctatgaaaagaaaggtccaactctgtgagttgaatgcaaacatcacaaagaagtttctgagaatgcttctgtctggtatttatgtgatgatattcccttttccaatgaattcctcaaagcagtcaaaatatccacttggagattctacaaaaatagtgtttcaaaa

SEQ ID NO: 875319 - DNA, 673 bp, Homo sapiens
tcttttaactaccaagaaggcatggatgaaaatccaaagacttgagatatgcatggacacatttcagagttgcaatagacatcacataaagtttgtatgctaagtaagggtattggctagcgaagagtatgatctggaatctggcatgaagaaatttgggtagacaaagatgaaatctgagaattttgaatgctcatatccgtctcgaagctcttctcataatctgagtaatccagtcttcttacgggaaaaaaaagaaaattgaaaaaattgtgaaatcactagaagcagttgacttacacatagataccctttctcatagccctccagtaccacttttcattgcttctagcactgtaagaaggtaaattccaaacatggaagtaaaacagtattctgggaagatgtaataaatgcattagaagagttgcaggatctttcaaattggattccaaaagggtagatcaggccaaatttattcagataggaggcacacccttaggagtcctcatttactrtatagttcaagtacctgggagtgttgttaactgctactgagttgcttacttaaagccttcattcaacaatgttccatagtcattttggttgaggtgtcagacttggggatgtatgcaggaaagaatctgaaggcttaaggagatgggatactgga

SEQ ID NO: 875320 - DNA, 611 bp, Homo sapiens
aggaaaccaaagagtctcagccccaaagctccttaagctgataatcaacttcagtgaagtctcagggtaaaaaaaacaaatgtataaaaaccactagcattcctatacaccaagcatagccaagccaggagcaatcccattcacagttgccacaaaaaatgaataaaatacctaggaatacagctacccagggaggtgaaagatctctacaaggagagttacaaaacactgctcaaagaaatcaaagaaaacacaaacaaatggaaaaacattccattctcatagataggttaaattaatatcattaaaatggccatactgctccgaacaatgtacagattctatgctattcctattaaactaccaatgacatttgtcmaataactagaaaaaactattttaaaattcatatggaaccaaaaaaaagagcctgaatagccaaggcaatcctaagcaaaaagaacacagctgaaggcatcacattacccaacttcaaactattctatacagtaaccaaaacagcatggtactggtccaaaaacaggcacatagaccaaagctacagaatagagaacccagaaataaggccacacatctatgaccatctaatc

SEQ ID NO: 875321 - DNA, 549 bp, Homo sapiens
tctttgaaattattatttggaaaataaaatacattaaataattatggccacaaagcaaatagtactgattaaaatccaggagagatctagagaaggaagatatttgggcaggagtattcagaacaggtttcctaaagaaaattgggtttgagttggattctacaggatgaaaactgtagaatgtagratgtgaaaactttttgaagttgtgacctcacgaagacatgatatctgtcccccaagaattttcagtctaaatagttgatataataggtttcttgtatttaaagaagaagggggttccacaggcagatattataattagtggtaaagatatgacattctttagaatttcaaagtaaagagatactttccaaagtaaagtgaattttgcttaatgaaaacttgtctcagctaaaggtatagaagagggatttctaagagagagataaatgcttaaagtgaagaaggagctactaataagagggtgtctatttagggctttttaattgaacgtagtctccaatcagtcacccaagcagagataca

SEQ ID NO: 875322 - DNA, 629 bp, Homo sapiens
gatataaaagtgattagagaaattatgataattaatatgttcctgattctacagagtcaagactagagagaaacctagttgcaacatttatcttaattgtgaaacattttattcagagacatcctatcaaccagggcaatcttattcatcccatggagttgcaactcttggtgctttacttcagaaggtgagccagtctaacattgtgttgatgtagctaataattgtgatttgcagttgatgttgggattttttcttcctaataaatatatttttaaagattattacaacttgaattatattaatggatataatttgttcacaggmagcttttaaaaacttgtatggaatcatcttatacaagaaatacttattttatgtaatagtgtataatctttgatgtatacaaccttgtttgatagctttgatatttgggatgttgagaaatataagactattttaggaatatgacactaggagaatatattctggtctaatatcagaaaaaccaatacttaagtttttatttttctaatgtgggtttttctatttttatacttagtagatgttctgattaatgatttaaaattataacttaatgacagttatttaaactgaactatatgaaa

SEQ ID NO: 875323 - DNA, 637 bp, Homo sapiens
catgccatgtctgttaactatatctgagaatgcattgatatatattaaaaactcattactaatatttctatgtttgtttgttttttggggggcgtgagctcggctcactgcaagctccgcttcccgggttcacgtcattctcctgcctcagcctcccgagtagctgggactacaggcgcccgcaaccaggccgggctaattttttgtatttttagtagagatggggtttcaccgtgttagccaggatggtctcgatctcctgatctggtgatccgcccgtctcggcctcccaaagtgccgggattacaagcgtgagcaccacgcccaacctaatatttctatgtttatgtgtgtattagtatctrcatgtaggtacaaacgtctaaatatatttatatgtaacatcatataaaccatatctgtaactatctaaaagatagactctctctatagcatactgttacacaggtaaatattatacaggcacacatacgtgaaaaaaatctacttaggtcatatttctactgtggcctgcatgattcttaaaagagaaaaagttacttaattaaatccttgtctctgaaaccaaaaaccaaatcgatttatttgccttctgaataatattttgattaaatta

SEQ ID NO: 875324 - DNA, 691 bp, Homo sapiens
ttagacatatattccaggagctagtctaagcactttatatattaattaatttaaccataaaaacaactctatgagaaggtactataattatccacatttcacacatgaagaaactgaggatagagaagttatgctcatatttacagagctagtaaacagcagagcaaggattaaaactcagatagcctactccatgacctatgttcttaaytattgttttttattttattttattatttttttgagacagggtctcactctgttgcccaggctggagtacaatgccacaattatggctcactgcaacctctgtctcctaggctcaagcaattaccctgcctcagcctcccaagtagctgggactacaggcatctgccatcatgcctggttaatttgtattttttaaagagatggagtttagccatgttgcccaggctggtctcaaatttcttagctattgtgatatcacctctctttacaatataattaacaacttggtctaaaatatatgtaaagaattatacgtccaacaagtagaggatacttacacttttcaaacacactcaaaatgtttaaaaaataataattgaccaaactggttggccaaagaagtctcaacaattaaaaaaaaaatacgtatatgtttggaaagcaaagaccacatttttttaatcaaaggtttattaaaata

SEQ ID NO: 875325 - DNA, 692 bp, Homo sapiens
atatagaattttatacttaactaaactactaatcaagaatgaaggtagtatacacagattctcaaataaagaccaaaaggatttcctatttgtatgtcatccctgaaaaaactactagagaatgtaaagaatgcatagggttggtgggggaataagaatccaaaatgaaggagtagggagctagaagcaacaatgagtaaagaaatcaacaaacaaattaaatctaaggaaacactgactatgtaaacaaaatgactaatttgggtgtgtttaaaaacaaagtgaaataaccatactacagaaagtaggaggaaggtgatcagaataaagccccctaaggtccttatattacacagaagtataaaaacagtgattaatttcaagacaaccaaatcaaggataaacatttttaacagagaaagagagatgcaatgtgtaatttctaagccaataggagggagggggggraaatagaattttaaaaaaactcaacagtaggaaaagagggggaaagatcaacaaaaatcacagtaaatagaaaacataaaataagatcatagaaataagtctatattaaaaatcacaataagagtaacaggattaaatttgactataaaaatagtttgaaaataaaggaagggaaaaagtatttgacaaataccaatcagatatggaacagtattattaatgcc

SEQ ID NO: 875326 - DNA, 574 bp, Homo sapiens
taaggaaatgaaaaatgtgatatctgaagaaattggaaaagagtatggctgtcaggaaaaaacaattaagaaaaagaaaatactaagtaatataaaatccttaaaatattataattatggtacttaatcctaaaaagtatgagagaaataatagacattaatagaacttttgaagtcattcatatattgtctctaatgctgcctatgaatctcatcatggtatttaatcataaaaatcaaagagacagataaaagaatgaagaaaattcaaagcaattgaaattgagttcaaaactctgaagaagttatcaatgaagactctgccaaaaaatcaaytaaaaaaatgtaagatcttcactggcaaacacactacttctgacacttttttataatttttaagtccctgctagctaatcatgccctgtacttgaagttgactatttaaagcctaattacacagttcacattgtatatagcccagttacttggtaaatttatatgatgtcttcttaataatgtaaatgtctgcccatctatacagtttagtataaaaaagctgaatatgtttgataga

SEQ ID NO: 875327 - DNA, 584 bp, Homo sapiens
taactattcaaaagtgccctttctgcctcatccttttctgtccattttttaaatgttgaaagaatatcttttgttagagacttacttttcaactcccttttttccctcaccacaaatcgttttggaaagtaaaactgactgggagaaaaaatgctattgaagaaaaaataatggatctttctgctcaaatgaccagatgttgcttgaattccacagataaatattcatctttgcttctatagacttaagttactatgatgaaagtttgtaatgaaactgtagtcataaagatgtcaaagctatatatttaaggtgtttattaaggttaaagtaagtttacaggaccttatctttcccttttttatcttactatatttactccccaaagtcaatttcctccttgttttgtttttttttttttttttgctttttttttttttttggktctgctaattttagtagaggcatttactaaaaaagatactttttcttctgtgaaggttattttgagggagactcaagaaattcacagagaattctgacaatcctctatgcatagatttgtgcaaataagcattcggatt

SEQ ID NO: 875328 - DNA, 586 bp, Homo sapiens
aagtgcctagataagaaaaggagaggccaggcgtcgtggctcatgcctgtaatcccagcactctgggaggccgaggagggcagatcacgaagtcaggagatcgagaccatcctgactaacatggtgaaaccccatctctactaaaaatacaaaaaatttgccaggcatggtggcgggcacctgtagtcccagctaytcgagaggctgaggcaagagaatggcatgaacacaggaggtggagcttgcagtgagctgacatcgcaccactgcactccagcctgggtgacagagcaagactccatctcaaaaaacaaacaaataaaaaacaaaacaaaacaaaacaaaaacaaaagaaaaggagaaaaatttcaaataaacaaccacaaaatgcatcttaaagaactagaaaagcaagagcaaaccaaacacaaaattagtaaaagcaaagaaataacaaagatcagagcaaaaatatataaaattgaaaggaaggaaacaaaacaaaaaatcagtgaaacaaaaagttttctgaaaagttaaacaaaattggcaaaactttagccagcataagaaaataaaaagggag

SEQ ID NO: 875329 - DNA, 586 bp, Homo sapiens
aagtgcctagataagaaaaggagaggccaggcgtcgtggctcatgcctgtaatcccagcactctgggaggccgaggagggcagatcacgaagtcaggagatcgagaccatcctgactaacatggtgaaaccccatctctactaaaaatacaaaaaatttgccaggcatggtggcgggcacctgtagtcccagctactcgagaggctgaggcaagagaatggcatgaacacaggaggtggagcttgcagtgagctgacatcgcaccactgcactccagcctgggtgacagagcaagaytccatctcaaaaaacaaacaaataaaaaacaaaacaaaacaaaacaaaaacaaaagaaaaggagaaaaatttcaaataaacaaccacaaaatgcatcttaaagaactagaaaagcaagagcaaaccaaacacaaaattagtaaaagcaaagaaataacaaagatcagagcaaaaatatataaaattgaaaggaaggaaacaaaacaaaaaatcagtgaaacaaaaagttttctgaaaagttaaacaaaattggcaaaactttagccagcataagaaaataaaaagggag

SEQ ID NO: 875330 - DNA, 648 bp, Homo sapiens
tggataatccaggctaatctccttatcctaaggtcagctgattagcaactttaatttcatcttcagccttaattcccccttgccatgtaacaacatattcacaggttggggattaaggtgttgacatctgttgggggkcattctcctgcctcccacagtgagatagagaagtagaagattcagaaagcaggagtaacaaacttagtgatagatgattttttggagaacactctgcctgctcggtcaattcagtttgttcctctcttctttccttcatttactcattacttagaggcttgcactattttttcttaaataggtggctgaccattctttacaagagggaaaatataaagagatcagagcagaagtgacttaagggaaaacctgagtaaatgaccaaggtttacctctagaaattgttctgggatctccaacgcaccaacaaagttgtgattcctgtgttttagtcatagtcttggtgactttactctgaaacactttcagggaatcattaccattcacctttaatagctctttagaaaaatcccagtaattacccataaaatatctagttttaaacaacgtaactccctggtgatatgtccaatataaattaccacatttcctcaattctaaatatatatt

SEQ ID NO: 875331 - DNA, 657 bp, Homo sapiens
ggctgttaaaggaaaaactttagacaaattcaatttaacagggttttttttggaacaaagaataattcatgaatcaggcagctctcagaatcagaaaaggttcgaaaaacctcactttgcagcatgagcagtaggcttttataggccaaatgcagaagcaaaataaataaattatttgattggctacagctaggcatttgccttatttggatataatctggtggaatgtcctcagagactagttagcagtttctcattgtttaaaattaaattttattttactgtttatgttggggttccatttgcttacataggaacccaaggcactggagtggtttcatcctaatggcctcccaattaaatgtttttaacaattcccctttttagtcagcctctcatctatgagagattgaccaaaacttggtcataagcacaactctctgtcaccatcatagctagtttgtcttygagtgttatgtctttgagtattatgtttctgagtgttaaattatgagggtggaacccataattcacaatgtcaggctcattaaagaaatattctttttgttgttcattttgtttttgtcactctagtcacagtgagaccatctggcatactgttggtggctatgaacatgcatttaagacccttgagag

SEQ ID NO: 875332 - DNA, 637 bp, Homo sapiens
gcctgtaattcctataaatttgagtgaatttctctcttcttgaggtcctcaaaatatttttaatcttcctagttcttccttattcaatctgtaaggctgggaaacccttaaagccaggtactaggccaatttttttccaaggggctttattgggtccataaagtccaccttagttccttaaagttgtctggtcatatctgaacatatgataatcataatcctgtctaaacattggtaatattcccagtggttccaattgtgtcctgttacaaagactgctgattgtcccagatccaagttgagacagtcagtaaaaaagtttaactcctagaattgattggaacagggtggggacctcactcaaatttgatcaattggagtccttcttgaatrctttgaatctcacctgggagagcaagttccagttaattctgatgacagtattatatgatgtaaggccatgaatgaagagctagcaacagccatatttcccagtgatggagaatgtaggctgactgaaagctgctattttcatgagtgtgtcccatgatcaactgcagtccttggcacatagtattcaataaatacttatagaatggatggtgccggctgtttatgtcatgtccattgtgtgcag

SEQ ID NO: 875333 - DNA, 637 bp, Homo sapiens
gcctgtaattcctataaatttgagtgaatttctctcttcttgaggtcctcaaaatatttttaatcttcctagttcttccttattcaatctgtaaggctgggaaacccttaaagccaggtactaggccaatttttttccaaggggctttattgggtccataaagtccaccttagttccttaaagttgtctggtcatatctgaacatatgataatcataatcctgtctaaacattggtaatattcccagtggttccaattgtgtcctgttacaaagactgctgattgtcccagatccaagttgagacagtcagtaaaaaagtttaactcctagaattgattggaacagggtggggacctcactcaaatttgatcaattggagtccttcttgaatgctttgaatctcacctgggagagcaagttccagttaattctgatgacagtattatatgatgtaaggccatgartgaagagctagcaacagccatatttcccagtgatggagaatgtaggctgactgaaagctgctattttcatgagtgtgtcccatgatcaactgcagtccttggcacatagtattcaataaatacttatagaatggatggtgccggctgtttatgtcatgtccattgtgtgcag

SEQ ID NO: 875334 - DNA, 624 bp, Homo sapiens
tatagaatggatggtgccggctgtttatgtcatgtccattgtgtgcagaacactacagcaggcattatgaaaaagaaaccaaataaattaaaatgggaactaatatagagtaaaatattcaataattaggtactgattgttttctccacattctgatgaagaaacagaggcatagctggrtaggtaacttgcctgtatttatacaggtgttaaatggcagagtgtgaatcacggacgtatactcaggtctatctggctccagagtctatgcttttttcactgcaccatggtttctgtcttctcaaagcttacttgtttattgggaagataaaccatacaccctttaattaacttgagaactgggtatgccttctggatgttcactgatcaaacagatattgaagtttagggtaaagctttcatgaaaagttgtcatgtcccaaggcctaccacagttgcagactgttaatcagatttaggtttaggtgattggcttaggcagtgctaattaataaggtctgctgaaaaatataactataaacagaaatgtctgactgtgatacaaaaagaaagtaatgcaatatatctcagcatttgttcagagtttgctgtttctctgatggc

SEQ ID NO: 875335 - DNA, 664 bp, Homo sapiens
atcccctgaggaatggtgccatatcggggactcagtgttggtctctgctgctggcaaattgggcactcagcagtggccatagccagatcagccttggtgagtggaagtccatgttgctgagcccatgcgtatcctccatccctggyaccatggacactttgttcatgggcccattgggagatgacaggagtggctggggaaagaagctgagtggtatccacagaaggggtcatcctatccacttgattattaaactcctcctctgctgaggtcacccattggtgagcactcacatgggatacaaatatcttcatagattttgaccattcagagaggtccatccacatacctcttcctcaaatttatttgccaccaattttctaatcatgcttcttctaagtccctgaccatctagtcaaaccattggctacagcccatgaatcagtatataattgcacatctggccagttctccttccatgcaaagtgcacaaccaggtgcactgctcgaagttctgcccactgggaagatttcccttcaccactgtccttcagggatgtcctagaaaggagcggtagtgctgcagctgtccactttcgggtggtgtctgcatatcatgcagaaccatttgtgaatcaggccctagtcttctcttcctctgtca

SEQ ID NO: 875336 - DNA, 664 bp, Homo sapiens
atcccctgaggaatggtgccatatcggggactcagtgttggtctctgctgctggcaaattgggcactcagcagtggccatagccagatcagccttggtgagtggaagtccatgttgctgagcccatgcgtatcctccatccctggcaccatggacactttgttcatgggcccattgggagatgacaggagtggctggggaaagaagctgagtggtatccacagaaggggtcatcctatccacttgattattaaactcctcctctgctgaggtcrcccattggtgagcactcacatgggatacaaatatcttcatagattttgaccattcagagaggtccatccacatacctcttcctcaaatttatttgccaccaattttctaatcatgcttcttctaagtccctgaccatctagtcaaaccattggctacagcccatgaatcagtatataattgcacatctggccagttctccttccatgcaaagtgcacaaccaggtgcactgctcgaagttctgcccactgggaagatttcccttcaccactgtccttcagggatgtcctagaaaggagcggtagtgctgcagctgtccactttcgggtggtgtctgcatatcatgcagaaccatttgtgaatcaggccctagtcttctcttcctctgtca

SEQ ID NO: 875337 - DNA, 664 bp, Homo sapiens
atcccctgaggaatggtgccatatcggggactcagtgttggtctctgctgctggcaaattgggcactcagcagtggccatagccagatcagccttggtgagtggaagtccatgttgctgagcccatgcgtatcctccatccctggcaccatggacactttgttcatgggcccattgggagatgacaggagtggctggggaaagaagctgagtggtatccacagaaggggtcatcctatccacttgattattaaactcctcctctgctgaggtcacccattggtgagcactcacatgggatacaaatatcttcatagattttgaccattcagagaggtccatccacatacctcttcctcaaatttatttgccaccaattttctaatcatgcttcttctaagtccctgaccatctagtcaaaccattggctacagcccatgaatcagtatataattgcacatctggccagttctccttccatgcaaagtgcacaaccaggygcactgctcgaagttctgcccactgggaagatttcccttcaccactgtccttcagggatgtcctagaaaggagcggtagtgctgcagctgtccactttcgggtggtgtctgcatatcatgcagaaccatttgtgaatcaggccctagtcttctcttcctctgtca

SEQ ID NO: 875338 - DNA, 577 bp, Homo sapiens
acaacaattttaagtgtaaatcaagcaaacttcttaggcaggtcaatattaaataaattaaaaatataacttataatcctgaaaacagaaaaaaaaccttcaaatttaccagaaaataaaaacctctgtgtgtaatcgaggttggtaaaataatgaaagtagaattttactgcaaggctgaaagtccactgggtaatgagaatgatgttatgtttttgcattaagcctaaaatttgtctttttattatttatgagtattcattatattcaagagtatatgtggttctgcccagatcataaagcaaatagaatcccttcccatatagggttgctttaaataaacagcagcaagaacattttagagagtgcctgatgtacaagcacattctatccattataaggtatagtaaacgtagttctataatgtatattaaayaagaaaagaaagagcaatgctggaggtttgttcatctataaaaagctagtgtctaccctgtttctgagtctagatttaaatgaaatttctgcatcatggtagaggaacatttcctcattgtagatttataaaagcttctat

SEQ ID NO: 875339 - DNA, 662 bp, Homo sapiens
gctgatcctgagtcatgcccactggtggctattctgcctctttgatgctaaagtcaattgcccaaaaggcttaagaagaaatctttctgattttgcatttatttttcagatctcatagcattttagagtcacatttaacataagaaagatttgcaagggatgccacctttggatatagaacaggattatggtcttactaattctctttttctttaaatttgcttacaacttcgaatatgtgaaataaacactttcatatcaatttacatttgaggttcactaaaattaaatctatcatattattgattgtaaaatatgacatctatcatttcttaaacrtaaatgaagacaaaaatatttattttttatcttttaaaaacttccatcttctgaaaagttttcaatagtaagatgaatgcaaagataagcaaaaagaaactgaaatcaatttcaaggtcactcaacttaaaacagtaacttttcagcaatgtggagttcaccaacttagaatcataatcattccaaggttaaggttcaattttgcattatctgagaaggttcggttaaaacttcagagtgttattgaagacataaatccattttaaaatatttagactttatttgcactgggaatacagtactaattataatagagatttatg

SEQ ID NO: 875340 - DNA, 661 bp, Homo sapiens
attgcagactgactctatgttggcttgggagcttttgtggagtcaatagatactgaagaccaacaaatttggttcacaccactttgaaagatgttaaaaaaaaattttctaaagaagtcatccatcccaagaggcgtgttgatggtaattgattatcttttaatcaaatgtttttaggtatatttacagacaataaatgtgtgcaattctgtatacagttccatgagttttcataaatagatatatacccatgtaaccgtcacctcaatcattcccatcaccccagaaatttacytatttactgtccattttctttctcccagataccatgcttagtgatctataatgtgtcacaattctcattaaacactttgaaatagacaatagtacttcctttccaaaataaaaaacgaaatggttagggagatcatagcatttgcccagtcgctgagctacttactcagtgacaacactgaaatgcctgactccagttccttaatcagacctgatcatattaacctattacaactccttgaccccagtgatctgcgcatagtggcaagtcaacaaatgtttgctaaatagataaaaaagagtgttacaattttgtatatttctaactcttagtatatctccctatataagttatcctgttttcaaa

SEQ ID NO: 875341 - DNA, 661 bp, Homo sapiens
attgcagactgactctatgttggcttgggagcttttgtggagtcaatagatactgaagaccaacaaatttggttcacaccactttgaaagatgttaaaaaaaaattttctaaagaagtcatccatcccaagaggcgtgttgatggtaattgattatcttttaatcaaatgtttttaggtatatttacagacaataaatgtgtgcaattctgtatacagttccatgagttttcataaatagatatatacccatgtaaccgtcacctcaatcattcccatcaccccagaaatttacttatttactgtccattttctttctcccagataccatgcttagtgatctataatgtgtcacaattctcattaaacactttgaaatagacaatagtacttcctttccaaaataaaaaacgaaatggttagggagatcatagcatttgcccagtcgctgagctacttactcagtgacaacactgaaatgcctgactccagttccttaatcagacctgatcatattaacstattacaactccttgaccccagtgatctgcgcatagtggcaagtcaacaaatgtttgctaaatagataaaaaagagtgttacaattttgtatatttctaactcttagtatatctccctatataagttatcctgttttcaaa

SEQ ID NO: 875342 - DNA, 650 bp, Homo sapiens
tggaaagcaatggcagtctctcaaaaagttaaacatagacttatttcacccaaaaattctactcctacataccccaagaaaacggaaagcatacatccatacaaaactttgtctatgaatgctcatagaagcatgattaataatagtcaaaaggtgaaagtaacccaaatatccagtatatccatacaatgaaatatgatatggcaataaaaagcaatggagtgtcagtattcatgctacagcacaaacatacactgaaamcatgatgctaagtgatagaagccagtcataaaggaccacccgttgtaagattccattgataagaaatgtgcagaatatataaacctatagacacagaacatagatttgtggttgcctagggctaggaaggatggggggacaatggagagtgatagctaacaggtatggtgtttttttcctggggtaccaaaaatattctaaaatagatagatagtggcaataattgcacagttctatgaatatactaacattactgaattttatactttaaatgaaagaattgtgtggtatgcaaattatatctcaaataacttctacaagaatcagaaacataagggcacagtaagtttaaaactaaaagaacaggaaattatatattttacaagctg

SEQ ID NO: 875343 - DNA, 617 bp, Homo sapiens
catgtgtagcggaggtgaggtctacagttcgtctgctcctcagcatcgtggacatggctcctatcctagggccacatgagagatcctcacctcctttgttggtggagctgtggcagctggcaccagggccctcaggagtccaaggcccttgtggctccccatgggcctgagtagtgactctgcccagactgcatgcagagtgtcagtctggaggtcccagggagaagaggtcaggggagatctcctgtgcccagaattgcaacagtccatggtagaagtgtaggtccccggggactctcacttaccaaaggaggtgggaagacaccgttgactcyatgccaatcccaggtgggtgggtgtcctgtcttgctcctctccactctctgtgagtcatgttgcttctttaatgaatctcaatgggtcctccagaactatccagttgaagagctggtgtttactggtcactctgtctcctttctgtaagagtgacgcacagtagctgcttctagtcagccgtcttgccattggttccccaagtttttgatttaaagtctgttttgtctgatattagtatagctaccctgctatcttttggttactatttgaatggaatatat

SEQ ID NO: 875344 - DNA, 472 bp, Homo sapiens
gtagatctactgacagcttgcaccatgtgcccggaaaagccaacaccagcccctgaaagcagctgagagggaggctgtaccctgcaaagccacaggggtggagctgcccaagactataggaacctacctcttgcatcagcatgacctggatgttagacatggagtcacggaacatcatttaggagctttaagatttgactgccccattggattttggacttgcatggggcctgtagcccctttgttttggccaatttctcctatttggaatgggtgtatttacccaatgcatgtacccacrttgtatctagaaagtaactaacttgcttgtgattttacaggcttgtaggtggaaggcacttgccttgtctcagatgagactttggactgtggacttttcagttaatgctgaaatgagttgagactttaggggactgttgggaaggcatgattggttttgaaatgtgaagat

SEQ ID NO: 875345 - DNA, 598 bp, Homo sapiens
tcttggagtgtaacaagctgtgtggtaggggccaatccaggcagctttctccagagacctaatggcctcaacaccttctgaacgtggatagtgccagaacacttaggagggtgtctttggaccaatgcatagttgcgactcctgtgctctcttttcagtgtcatggaactggttttgaagagacactctgaaatgataaagacagcctttaatccccctcctccccagaaggaacctcaaaaggtagatgaggtacaaggtcctaagtgatctctttttctgagcaggatatcaggttaaaaaaaaaaagttactggctggtttaatactttctaccttcttcacagagcagcctttgaatagactatgtcctagtgaagacatcaacctcygccttaagctatgtatgtatggaggccagtcgcagctttattatgcagacacacaagtggtctggacatgagggtacagtttctgcctaccaagacactacttgcactggatcttacgcaaaaaagaaccagaacacacagtgtggacaactgcccatatattctatctagattaggagagggtcctggctaggattttagtggta

SEQ ID NO: 875346 - DNA, 596 bp, Homo sapiens
ctttttatttagcttggaattttcctattggttcctaacaaactgtcccaatgtcatataaggaaacatgatctattacattcctttataacaatgtggagagactataaacctatgtaagtagtaaaactatatcagagactcaggagactgactaaaaggcctggatctgcagtgtattatctgtataaaaattggcagggggaagctaaaaggaaaggagattggagatctcaattctatcatggtgtatttcatacgcaaatcagagcatgcattgttttttgtttttggaaaragaagggaagtgtgttctgccccatgtttccttccgtgtttatagttcaaactctatatatacttcaggtattttttgtttagcccttcattataaatgggcaggaaattgtttatcaacctagccagtttattactagtgaccttgacttcagtatcttgagcattcttttatatttttcttttattatcctgagtctgtaactaaacaattttgtcttcaaatttttatccaatatccattgcaccacaccaaatcaagcttcttgattttcaaaaataaaaagggggaaatactt

SEQ ID NO: 875347 - DNA, 676 bp, Homo sapiens
ttaggatatttgccaaacttaaggaggagggagatgtctcagagctggctcaatctcagtaaactagggccactcaggagagatggtactgtgtaagaataagtataaacacttaggagtattttcaactcctttaagtagttatgggaattttgcttcaggcaatttaaacatttacagcaaaggatacgyccctctttgtaaattcagctgaataactgccccaaacaagactttgataacattccaattcaggagagaatgttattaagttgtttttaagattgttttactacagtgttttttttttcaacttacaaagtaatataaataggcctggtgcagtggctcacacctgtaatcccagcactttcggaggctgaggcaagtggatcaacctcaggccaggagttcaagaccagcctggccaatacagcaaaacctcgtctctactaaaaatattttcaaaattatctgggcatggtggcagttgccagtaatcccaggtactcgggaggctaaggcacgagatcgcttgagcccgggaggcagaggttacagtgagccgagatcacaccactgcactccagcctgggcaacagaatgagactccatctcaaaaaaaataaattaataataataataataaatagatttcagctccaactgagaacat

SEQ ID NO: 875348 - DNA, 624 bp, Homo sapiens
tcaggacactggaagaatgaccccaaagacatttcagagatctttgaggccaccagtcccatcaaaggacgaatgtgcaagagccttgggggcagaacagtttcaaaggaggggcccatggaaccttggactcactgtccagtgcttttttaaagttctgcttcctgatttccaccaagcacttcttcactatctcagctccagctccagctggcctaggtgcagtggtggttgcccctcaggacagtacaggcagaaaaccttggtaacacccatgtggtgccatttcacacagtgcatgagctggcaagacatggctatctccatctagatttcaaaggatggagctctcagagcytcaagcactaaactaaggcagagggctgctgagagggcagggcccctgcagagagtcttcaactatgacagtgcctagtatagccatgagggaagtgctaccccagagaccccagactggaagagccacttgcttgggattccagcctgggagagatacaggcacccaactgcaagccacccaactggaagccataaaaggagaagtgtgggctgtgcccagctaagccagaggagactaacttctgtccaagtgtgtccagaaga

SEQ ID NO: 875349 - DNA, 631 bp, Homo sapiens
tgaggccagctgtgctcttcaatgccccatccaagcccttccctatgtgactcccactgctgctcattccccttccacctcaccagtcaccccgctgtgtccctgacgtcttggctagatattcactatgtggctatttttcttggcttcggcttctgttgtattaagtcaaaatctcagtcaaatacaacacactgcaacattttaaaaaagtacccccatagccagtctttccatttgtaaaatgagattggggtagtctctatctctcgtggatgttatgaagattaagagacggaatgcaccaaattctcagcacggtgcctgacacaataataagcatcatctgagtgctaactattttgggattttgcttactgaaatggcccagaggtaatgttatattcattttgtggatgtgggacatggagcataagtggccaaaacaacttggcagaaggaaatcctgctagtaactgrcagagctggaggagcctgtgccttaatactcattgcctctctcagctccctgcaaacccctaacaactaaccacattgttgggcatcccattgcctttctgtttaggatttgggaggtcatttcatattctcagctaatttgaagagcaga

SEQ ID NO: 875350 - DNA, 577 bp, Homo sapiens
cacacgtatgtttattgtggcactattcacaatagcaaagacttggaaccaacccaaatgtccatgaatgatagactggattaagaaaatgtggcacatatacaccatggaatactatgcagccataaaaaatgatgagttcacgtcctttatagggacatggatgaagctggaaaccatcattctcagcaaactrtcggaaggacaaaaaaccaaactccgcatgttctcactcataggtaggaattgaacaatgagatcacatgaacacaggaaggggaacatcacacaccgtggcctgttgggggtggagggaagggggagggatagcattaggagatatacctaatgtaaatgatgagttaatggatgcagcataccaacatggcacatgtatacatatgtaacaaacctgcacattgtgcgcatgtaccctagaacttaaagtataatttaaaaaaataaataaaaataaataaaaataaaaagtaaaataaaataaaaataaaccatttgggaaagaaaaggtatgttattccagtcacaatcttcaatcacattcctttctcaagagact

SEQ ID NO: 875351 - DNA, 643 bp, Homo sapiens
agcttttctagtccatctatattgatttcgttttcccaatgagcagccctcttctcacagcctaaaagaggcccccaacctaatagtgctcaataaataattgtggaatgaatgaatgggaaaacaaatgattggatcatgttccaatgttgatgtgcacttgaggaagttctgacaaccaggaaggaaccctaaacatgtaagagtttatcttactggctgatattttttctttaaaaatagcaggaagagaatgttagctcccacacatctgtagcctaaataggagcacaacaaaaatgcaataatgaaaatgttaattgagctcctgacatttaatgcttcaagatgagaaattaaagccaggctacagcttgtcaagcttccatcagcatcaggragcacacagatagccaacttgttttgagactcaagatttcaaaaataacccctgggctcagggctcagggttcaggcagtaggtgtgggaggagtagggagaggcttggtgagtagatccatggagttctgtctggaatttggaattcaactccccagatacaggttttagaagacacaggtaaggaaagtaaagggaaatggggaggagaatatcaactcgagtcgcttagtggttgtgcta

SEQ ID NO: 875352 - DNA, 409 bp, Homo sapiens
gaagtcaagtctggcactgtcctctccatgctggcgggaggacaggggcaggagggctgggacacacgtgtgcaaggtgttccatatggacttccctctggggacaccctcccatcatcgtgagaacatggcgatcttctgatcacatcagatagtgcatgtttctctccctaagagacagtgggccctgaaggtagcttcccamaagcccaggccccaagagatcagtcctcagaggcaggcctccctggtttccccttccctgaatctgaggctcccaagctgcctggtgacccttctaatcttcccccaccgaggcctccaacctacctgtgcttgttgggagccagggaagagtccacataggagacgtggttggggctaaagagaaaagacagcagacaatgac

SEQ ID NO: 875353 - DNA, 568 bp, Homo sapiens
gactcaatagaggtgcctgaggaaaagctctgagtccttgtcttaagtccttttagagatgcccacgcactggctgtttagcaagtctggcgtagggagggcagctttcccccgtgaggcctgccaggtaaagcctttgaaattgtctgtgatcaaatctgaaaaatcacacacaggtttttatcgagggactggactccttaatttattatcattgtgaaaatttctggtatttatgccagttcagaatacacttgaattctccagattcttttctgaacagaatrtgcaacacctcccttagagatcagacctagagagtaaatcggtccaccttaccttctctctgatggttttctactggtatccagatatatgtggatgttgttttaatggcataattgacttctaatacagagtttttattgtattaaatacttacaaaccattattttatctatatacgctgccatattttttgtaggtaacatcaaactcagtgactcattgcagaatgcaatttcttccacctttaaaaaaaatagagttgcatttgtctacctaaatt

SEQ ID NO: 875354 - DNA, 628 bp, Homo sapiens
cccatgcctatgtcctgaatggtattgcctaagatttcttctagggtttttatggttttaggtcttacatttaagtcttttatccatcttgagttaataatattatactgaaggggcaaaagctggaagcatttcctttgaaaattggcacaagacaaggttgccctctctcaccactcctattcaacatagtattggaagttctcaccagggcaattaggcaagagaaagaaataaagagtayttaaatatgaagagaggaagccaaattgtctctgtttgcagattacatgtttgtatatttaaaaaaccccatcctcttagctcaaaatctccttaagttgataagcaacttcagcaaaatctcaggatacaaaatcagggtgcaaaaatcacaagcattcctatataccaataacagacagagtcaaatcatgagtgaactcccattcataattgctaccaaggaataaaatacctaggaatacaacttacacgggatgtgaaggacctctttaaggagaactacaaaccactgcccaaggaaataagagaggacacaaatggaaaaacattccatgctcatggatagaaagaatcaatatcgtggaaatggccatgctgccca

SEQ ID NO: 875355 - DNA, 570 bp, Homo sapiens
attgactgatgaacaaacaagacccattgatctcttgtctacaagaaacatacctcacattcaaagacacacctagattgataataaaagatggaaaaacaaattccatgccaaatggacacacagaaaagagcaggagtagctgtacttatattagtcaaaactgatttcaaaataaaaatataagagacaaagaaagtcactatgtaattattagagggtcaawtcagcaagaagacacaacaatgttaaatatatataccctcatcacaggagcactcaggtatagaaaacaaatattattagagctaaagagagagataaactccaatacaataataactgaagacttcaacaccccacttctgtcttctagacagaaaatcaacagagtaacattagacttaatctgcactactgaccaaatagacttaatagatatttacagaacatttcattcaagagctgcagaatacacattattttcttccacacatagattattctcaaggatagacgatgtattaggtcataaaacaagtcttaaaacattcaaaaagttgaagtaat

SEQ ID NO: 875356 - DNA, 570 bp, Homo sapiens
attgactgatgaacaaacaagacccattgatctcttgtctacaagaaacatacctcacattcaaagacacacctagattgataataaaagatggaaaaacaaattccatgccaaatggacacacagaaaagagcaggagtagctgtacttatattagtcaaaactgatttcaaaataaaaatataagagacaaagaaagtcactatgtaattattagagggtcaattcagcaagaagacacaacaatgttaaatatatataccctcatcacaggagcactcaggtatagaaaacaaatattattagagctaaagagagagataaactccaatacaataataactgaagacttcaacaccccacktctgtcttctagacagaaaatcaacagagtaacattagacttaatctgcactactgaccaaatagacttaatagatatttacagaacatttcattcaagagctgcagaatacacattattttcttccacacatagattattctcaaggatagacgatgtattaggtcataaaacaagtcttaaaacattcaaaaagttgaagtaat

SEQ ID NO: 875357 - DNA, 632 bp, Homo sapiens
acccaagagaatttcctgctcagcctcaagacaagccctgaccctggggactactgacatgtcccacctgtggctgggagggttttctgaggtgggaggtctagacagagcagggggcttgggagccctgatggaaagtgcagggaattcakaacacaaacatagggtaggttctacttgtgagaacacaacctagactctcgcctgcaaactaaaagggaaatctggtcttaccatgtgagattttccacagcagagtaaaatgcatttgggaaatcgaacagaagttatttaaattccctatggctggacttgaaattgacaagaaaaggcccaatagggaatgccagtgtgtccccaggtgtggaacatggcaccagggtagaccttaacatcggtatgtacaaccccacactggtgtattttacaatatttctctttttcttttccttttttttttttgaacagggtcttgctttgtcaccaggctggagtgcagtggtgcaatcatagcttactgcagccttgaactcctgggctcaagcaatcctttcacctttgcttcccaaagccctgggattacaggcatgagccaccgcgaccggcttacaacatttgtcttcgtagctatt

SEQ ID NO: 875358 - DNA, 642 bp, Homo sapiens
atgcagtttcaaattgagggaaccgccccagagatctctttgacagctgaagcaatgttactgcaaaatgatcacaatgatagatttccttagcttagtagcacaggaaagcctggcctttaagaattgtactaatctttaggttcctgtaggtttcttaaggttagcatgccctttgaagaataaaaatatactttagagatgcttttcctggagtcagttaaccaaattgcagttttcattaggcttggttccacagagcttatgtgtggaggcatatttacaracgttggtgaccctatttttacatagtggtacatcactagccagcagactaaggatgaaagagagctgaaaatgcttctctataaaatggatataaatttggacattagaacaagctgtacagagtgatataatctatatacagactctgattggacaaaatgtagatttctacacatttttgatggctggagcaactctattttgtaactctgtctggctctcctacattataaaggaatatggaagaaactcaattttctgaagttagtcattacactttaacttactgcctcttcttttccacttcagaaacctacattggattttacagatcagctaaccaagtgctgtgat

SEQ ID NO: 875359 - DNA, 627 bp, Homo sapiens
aataaaattctttggctcaagtgatcgtctttcttgggtccccaagtagctggtactacagacacatgcaaatggattgggctcattatgttggtttttaaagttgtgtttttcaaataatttgttcatgtcatttaatttttcaaatatcttgacataaagtttttcttaatcacctttattcttttgatttatgcctttctcttttctattttttcttctattattttaaatgtattttgttctgctttttctagcttgctaaggtagaaattgattttaaacctttcctctgcactattaaaaatacttaaaactattgtgaatagtgccacaataaacatacgtgtccatgtgtctttatagcagcatgatttataatcctttsggtatatacccagtaatgggatggctgggtcaaatggtatttctagttctagatccctgaggaattgccacactgtcttccacaatggttgaactagtttacagtcccaccaacagtttaaaaatgttcctatttctccacatcctctccagcacctgttgtttcctgactttttaatgattgccattctaactggtgtgagatggtatctcattgtggttttgatttgcatttatctg

SEQ ID NO: 875360 - DNA, 544 bp, Homo sapiens
gatttcctcctatctcaccgatgttctttctcaatctcttgttcctttgccagattctaaagtgttggagtccaccacagtctgagtttcccattttcctttctgtgtccttttttttttcctttgagacacagttttgttcctgttgcccaggctggagtgcagtggcaaaatctctgctcagtgcaacctccacctccctggttcaagcaattctcctgcctcagccacccgagtagctgggattacaggcacccaccaccacgtctggctaattttttatttttagtagagacaaggtttcaccatgttggccrggttgatctcaaactcctgacctcaggtgatcctcccaccttggcctcccaaagtgcagggattacaggtgtgagccaccttgcccagctctttctgtgtacttttaattttatattattcaattccatggatttaaatattctgtatatgatgttaactcccaaatataaatcccattttttatatccttcctctgaattccagaattatacttatagaagtttat

SEQ ID NO: 875361 - DNA, 602 bp, Homo sapiens
aaaattagcttatttattcaattcctacatatttattgtcgtttttttctctattagagtgtagttttcctcaaaattagaatcttgctttccttgttaacatctgtatccttcaatctctgaacagagtttggcactgagtgggttctcaatatggatgtattcaaagaatgaacgtacctgaagtagtaaactaatggtgaatatgtcaaaatgttggattttgaccttatttaaaaattataatgacaataacccataatatatatccaaatccttagattcytgaaatgtgtgaaaaataaggcattgtaatggataaaatggaagaattatgtatttatctagtcactgattagcttttgaattagccagcataggggtactgatttgaagttcatttattcattgccctggcaatgcactttcactaaattaattttccaaatgtcatgccccaagttagactgatttgcaacatatgaagtttaattgtgtccacaaatggacaatactctcaggcttgcagagctacaatgtatcaaggaaatgtcaaatacaattcagttttatttaggaatgaaaatttatattttcaagtg

SEQ ID NO: 875362 - DNA, 624 bp, Homo sapiens
tgatgggcatttggtttggttccaagtctttgctattgtgaacagtgctgcaataaacatacgtgtgcatgtgtctttatagtagaatgatttataatcctttgtgtatatacccagtaatgggattgctgggtcaaatggtatttctgtttctagatccttgaagagtcaccacactgtcttccacaatggttgaactaatttacactcccaccaacagtgtaaaartgttcctatttctccacatcctctccagcaactattgttatcctgactttttaatgattgccattctttttttttttttttttttttgagacggagtctccctctgttgcccaggctggagtgccatggcacgattttggctcactgcaagctctgccttccgggttcatgccattctcccgcctcagcctcccgagtagctgggactacaggagcctgccaccacgcccagctaaattttggtatttttagtagacacggggtttcaccatattagccaggatggtcttgatctcctgaccttgtgatctgcccgcctcagcctcccaaagtgctgggattacaggcatgagccaccatgcccagccctaatgattgccattctaactggtattt

SEQ ID NO: 875363 - DNA, 609 bp, Homo sapiens
aaagaatatgatttataataaaattacttttcacatagccagccaaatcttcacagtgatgaagaacaatatcataattctttccatgttaaaaataggccgggcgcggtggctcatgcctgtaatcccagcactttgggaggccaagaaggttggatcacctgaggccaagagttcaacaccagcctggscaacatggtgaaactccatctctactaaaaatacaaaaaaattagccgggtgtggtggtgcatgcctgcagtctctgctacttgggaggctgaggcaggagaatcacttgaacccaggaggcagaggttgcagtgagcagagattgcaccactgcactccagcttgggtgacagagcaagactccatctgaaaaaatgaaaaaataaaaaccctcagcaagaagaaaatgcacagtaacaatttagaatgtatgcaattattcataactgttgtctggtcagtaaaaaagaaagtttaaaaaaatagaacgtatgcaattagtttttacataacagaaaacagagatactggtcaatgaaatgggaggccagaggaagcattctatgcatttttatcttaaaaagcatcaataagtag

SEQ ID NO: 875364 - DNA, 629 bp, Homo sapiens
ccatactccctttcaacatttatcacagttgcaattccatgctcagttttttttccccactataatgtgagctctatgaaagcaggaacagtataagtcttagttactgctatagttcttggcacaaagtactcaaataatgactgaatgtagaaggtactctcctaaaacacatacttctttgagtcaagtaagaacctctgtctatgtgtaaaagggctctctaaatttgggaacactgccacgtatttctagatctagtatatgagccattgtcagatgtacatcctattccagttttgagccattactggctgcctttgggtgagtttgcttttcattctaatttcagaagccagccacctgccattatctaaaatcctgtccacatcaagtttacacagtaagcaaytcataaagctgtgactttaataagccctaaaatatatattaataaaatgaggtcagaaatataaaatattttgtaacttcatgcacaaaaataggcttacaataccttagggggattaaatgggtatgtttctggtatttttatctctagttggtatcttcctcctaaaaaaatggggaaaacaaagttaagaatgctgctcaattcaaatatataa

SEQ ID NO: 875365 - DNA, 638 bp, Homo sapiens
tttgaaacggtccctctttatctattatactttgatttttccatctcgtcagctgggagggcacctggatggcccttgttttcttagctgggacgcgggggtagcactgaattttgaactgcccttcctactggctgtggaggtgtcccgctgagactgagcggggtggcgctgggccgcaccctcggcaggaaaaggccttccgccccacacctgttgaatycataaatccagacgacttggttcacccttcctgggccctcgcttgaggtgagaccccggggaagttcccggggaaggctcccaggatcttaggtgagccgtaagggtgggatataactaaacaaaagttcagtgagaagctcttctagctagtggcaaggaagtccaaatatctcagggctcttgcaggccacttaacttctgggcctcagtttttccatctgaaagagatcacttttgtcacttcctctagggaaggaactatctattcagcatactatgccagacatgggtatttatttgttgagtggataagggaatactacgtggagacagaaaagtggaggagaaaatcagcaggttcttagccaaactactttaagcgtcacggaccttatagccctgctggttactca

SEQ ID NO: 875366 - DNA, 638 bp, Homo sapiens
tttgaaacggtccctctttatctattatactttgatttttccatctcgtcagctgggagggcacctggatggcccttgttttcttagctgggacgcgggggtagcactgaattttgaactgcccttcctactggctgtggaggtgtcccgctgagactgagcggggtggcgctgggccgcaccctcggcaggaaaaggccttccgccccacacctgttgaatccataaatccagacgacttggttcacccttcctgggccctcgcttgaggtgagaccccggggaagttcccggggaaggctcccaggatcttaggtgagccgtaagggtgggatataactaaacaaaagttcagtgagaagctcttctagctagtggcaaggaagtccaaatatctcagggctcttgcaggccacttaacttctgggcctcagtttttccatctgaaagagatcacttttgtcacttcctctagggaaggwactatctattcagcatactatgccagacatgggtatttatttgttgagtggataagggaatactacgtggagacagaaaagtggaggagaaaatcagcaggttcttagccaaactactttaagcgtcacggaccttatagccctgctggttactca

SEQ ID NO: 875367 - DNA, 600 bp, Homo sapiens
taaacagctatttaagatttttccatttcactcagcccagaggcatcgctagtgactctcagtttgctcagcagtgtcattaccaaaaagaaattctttagggaaaaacaaaatgaagtctaagaaaaacattagcaaaggtaagagagcagagaaaggaggaaataagagttctagtttgtttaatttaatattccccctaaaaacagccagaaaaaaaaatcataacactttgagtgtcttcacaaattttcaaataaaattttttcagattaaccctttgcaaaactactgtaatgaaaaatgcatataatgtatggatagccataaaagatacactagaagaaaagttacactggaaagttatattattggaaaaaagtaaatctatgttcttgtgggatagcctctcaagaatgatggtgacaccaacgatacctttgcagactccrtggtcagagtagaaaccctctccacagcggggcagacagtggccttgacgcagagccttgggggggctgcaggctgtacagtgagagggtgtgggcccagagcagctggcacatgagttatgacaaactgaggaagagagtgagaggg

SEQ ID NO: 875368 - DNA, 665 bp, Homo sapiens
atacaccctcccaaggctaaatcaggaagaagtcaaatccctgaatagaccaataacaagttctgaaattgaggcagtaattaatagcctaccaaccaaaaaagcccagtaccagaaggattcacagttgaattctactagaggtacagaaaggagctggtatcattccctctgaaactattcctaacaatagaaaaagagggactcccccctaactcattttatgaggccagcatcatcctgataccaaaacctgttagagacacacacacacacacaaagaaaatttcaggccaatatccctgatgaacctcagtgtgaaaatcctcaataaaatactggcaaacagaatccagcagcacatgaaaaagcttrtctactatgttcaagtcgacttcatctctgggatgcaaggctggttcaacatatgcaaatcagtaaacataatccattacataaacaggaccaatgacaaaaatctcatgattatctcaatagatgcagaaaaggcctttgataaaattcaacaccgctttatgctaaaaactctaaataaactaggtattgatggaacatatctcaaaataataagagctatttatgacaaacccataaccgatatcatactgaatgcccatcatattgaatgcccattcagtatgata

SEQ ID NO: 875369 - DNA, 665 bp, Homo sapiens
atacaccctcccaaggctaaatcaggaagaagtcaaatccctgaatagaccaataacaagttctgaaattgaggcagtaattaatagcctaccaaccaaaaaagcccagtaccagaaggattcacagttgaattctactagaggtacagaaaggagctggtatcattccctctgaaactattcctaacaatagaaaaagagggactcccccctaactcattttatgaggccagcatcatcctgataccaaaacctgttagagacacacacacacacacaaagaaaatttcaggccaatatccctgatgaacctcagtgtgaaaatcctcaataaaatactggcaaacagaatccagcagcacatgaaaaagcttatctactatgttcaagtygacttcatctctgggatgcaaggctggttcaacatatgcaaatcagtaaacataatccattacataaacaggaccaatgacaaaaatctcatgattatctcaatagatgcagaaaaggcctttgataaaattcaacaccgctttatgctaaaaactctaaataaactaggtattgatggaacatatctcaaaataataagagctatttatgacaaacccataaccgatatcatactgaatgcccatcatattgaatgcccattcagtatgata

SEQ ID NO: 875370 - DNA, 651 bp, Homo sapiens
cttccctattattcctatctttttcttttctttttctttcttccttttttttaaattatactttaagttctgggatacatgtgcagaacatgcaggtttgttacataggtatacacgtgccatggtggtttgctgcacccatcaacccgtcatctacatcaggtatttctcctaatgctctccctccccaccccaccccctgacaggccccagtgtgtgatgytcccctccctgtgttcatgtgttctcgttcttcaactcccacttatgagtgagaacatgaggtgtttggttttctgttcctgtattagtttgctgagaatgatggtgatggtttccagcttcatccatgtccctgcaaaggacatgaactcatcctttttatggctgcatagtattccatggtgtatatgtgccacagtttctttatccagtccaccattgatgggcatttgggttggttccaagtctttgctattgtgaacagtgctgctgtgatgatccctcaaggatctaaaaccagaactaccttttgacccagcaatcccattactgggtatatacccaaaggattataaatcattcttttttttatttttgagactcactatgtcaccaaggctggagtgaagtagcacaatctcagctcac

SEQ ID NO: 875371 - DNA, 626 bp, Homo sapiens
ctatattataataacattaaatgtaaagggataaaataatgaaaaggcaaaaattatcagactggatttaaaaacaaaaatatatcctattgtctgctgtctacagaaggcagactttagattcaaatacatgaataggttaaatataaaagatgaaaaaagatgtataatacaaagagcaaacataaaaatactgaggtggcgtatccaggcatggtggtgcatgcctgtagtcacatctgcttgggaggttgaggagcagggatcacttgatccaaggagttcaaagccagcctggaaaacagagagaccctgtctcaaaggaagaaaatwatactggagtggctatgctaacatcaggcaaaactgatttaaatttttaaataaattttaaattaaaaaattataaaatgttaaagataaaacatattgtagaatgaaaagagggtcatcagaaagttataacaactacaaccatatatgtaataaaagattgtaaactagtagtcactttggaaaaaagtctggcagtgacataaaataataaccatgaagttatcatttgacccagcaattccactccccaggcaaataacaacaataaatacttaaaaatgtatacgttc

SEQ ID NO: 875372 - DNA, 662 bp, Homo sapiens
ttgaatacaggccaaatgttactgaggtgatctgggcaaaagccttgagggactgaagcattcaaatgttcacaaactcctcctcctcttggactaaggtcaaagtatcaccagggctgtgtccttttctggaggttccaggagagaatctatttccttggttttgtttttgtttttgttttgtttttgttttttttgagacggagtctcgctgttgcccaggctggagtgcagtggcgccatctctgctcactgcaggctccgcccgctggagttcatgccattctcttgcctcaggctcccgagtagctgggactacaggcacccgcaacctcgcctggctaattttttgtatttttagtagagacggggtttcaccgtgttagccaggatggtctcgatctcctgacctcgtgatccgcccgcctcgrcctcccaaagtgctgggattacaggcgtgagccaccatgcctggctttccttggtttttatagcttctacaagtgaccctcatttcttgactaatggctacctcctttcatcttcaaaaccgcatttgttatatcattttacttccacctgaatatccagtgaccagaaatctttttttatacccaaaagatccaaataaaagacattacccatatgcttcctgaagtttt

SEQ ID NO: 875373 - DNA, 671 bp, Homo sapiens
tttcttcttcatgtatgaagcttagtttggttgaatataaaattttgagatggaattctgtttatttaataatgctgaatataggcccaaatattgttctgatgaaaggtctggtgttagtctgatggggttctctttctagatgaccttcccctgcctgtaatattttttytttaatattgatgttggagaatctgatgactgtgtgtcatggggatggtcaccttgtatagcatctcacaggggttctctgaattgcctgaatttgtatgtcaacctctctaaccaggatggggaaatttttgtggacaatatcctcaaatttgttctccaagttgcttgttccctttttctctctttcagggatgccaatgagttatagatttggtctctttacataatcccatatttctttaataatccccatatttcttggaggttttgatcatccttttttatttctttatttttgtctgactgatttgttttgaagaactggtctttgagctctaagattctttcctcagtttgttctgttctgctgttaatacttctaattctattacgaaattcttgtagtaagtttttcagttctatcagattagtttggttctttattaaattggctatttcaaatttcagctcctatatcattttattggattccttag

SEQ ID NO: 875374 - DNA, 671 bp, Homo sapiens
tttcttcttcatgtatgaagcttagtttggttgaatataaaattttgagatggaattctgtttatttaataatgctgaatataggcccaaatattgttctgatgaaaggtctggtgttagtctgatggggttctctttctagatgaccttcccctgcctgtaatattttttctttaatattgatgttggagaatctgatgactgtgtgtcatggggatggtcaccttgtatagcatctcacaggggttctctgaattgcctgaatttgtatgtcaacctctctaaccaggatggggaaatttttrtggacaatatcctcaaatttgttctccaagttgcttgttccctttttctctctttcagggatgccaatgagttatagatttggtctctttacataatcccatatttctttaataatccccatatttcttggaggttttgatcatccttttttatttctttatttttgtctgactgatttgttttgaagaactggtctttgagctctaagattctttcctcagtttgttctgttctgctgttaatacttctaattctattacgaaattcttgtagtaagtttttcagttctatcagattagtttggttctttattaaattggctatttcaaatttcagctcctatatcattttattggattccttag

SEQ ID NO: 875375 - DNA, 652 bp, Homo sapiens
tttgaacccagacactctggctccaagtctgtgcctataaccactattctacactgctagcaaatgtaagaaatacccagggaaagatatatggctgtgcattctgagatgaggcccagccccaggctttccaaacaatttttcgtaaaagatgttaawttcacgaatgctttatgtgaattcttgttgttgctgctattccggaaaccaagcagatttcatgtcagggtcagtgaggcacagttcagagatagctgctacaggaaactggggaccaggaggaagaaagactctgagaagtgagtatttccccttacctccccgccatcccctgcaggaagttaggaaaaatatagaagaaggctttgaacttcactaggtcttagaacaaagggcatgatgacaatcatttaggctttagaagtagggtggccaacagccgccatctcggtcacccaaactctaaagccagcaagcaaggggctcagcctcccatgccctgtagacccttcatatacacacagaagatcctggagcttcagtcagggctactacctgggaactgaacttacaaatttaaattttacgtacttacccagtcctgactccagtccaacacagtgctctgagcaggctgcagccccagaaggct

SEQ ID NO: 875376 - DNA, 461 bp, Homo sapiens
atgatagaatcaaagcaggtagctccccatttgcagctgtggggcagaaacagccatacctttttctgtaagaatctctataggatggccctgtctatttgagaccactgcaatttcagaaaagaatgtggcctccttagtccaagttccctggaaggctgggtcataggcctcagagaccctcctcatgtgggtgaagwttccagggactacaaaaggggcacagtctgacagccttatttctggtcttgcctgatgtttctgcattgcagcctccttaagggtgggagtcaaggtcatctgtcctggtccaattgctgtctcttctcttcccttctcttcccttctcttctcttctcttctcttctcttctcttctcttctcttctcttctcttctcttctctgatcctcaatgcccaactctaaaacaggagagttggagtttactacatggatttca

SEQ ID NO: 875377 - DNA, 461 bp, Homo sapiens
atgatagaatcaaagcaggtagctccccatttgcagctgtggggcagaaacagccatacctttttctgtaagaatctctataggatggccctgtctatttgagaccactgcaatttcagaaaagaatgtggcctccttagtccaagttccctggaaggctgggtcataggcctcagagaccctcctcatgtgggtgaagattccagggactacaaaaggggcacagtctgacagccttatttctggkcttgcctgatgtttctgcattgcagcctccttaagggtgggagtcaaggtcatctgtcctggtccaattgctgtctcttctcttcccttctcttcccttctcttctcttctcttctcttctcttctcttctcttctcttctcttctcttctcttctctgatcctcaatgcccaactctaaaacaggagagttggagtttactacatggatttca

SEQ ID NO: 875378 - DNA, 614 bp, Homo sapiens; identical to SEQ ID NO: 872119

SEQ ID NO: 875379 - DNA, 576 bp, Homo sapiens
atgttagcaaagtatgtgttttatatagtgttttctgtataaaaaactataatttctatttactaagttgaatctatgtggaatagtccataaaataaaccttacataccaactagttggatgtagtagtgaaaatcattcatggatatttcactctagtttgatatataaatctcttggattttcaacatagagtggggaagaaatcctaattacagttctcttcccattttaatttctcctcttttttttttttttttttttttttttttgctgtttttctcaactgtcagtggaattattgtcttcctgtctccatatttaggtagtgtcagtggctgagtatcaccgcaggatcgatgctctaaatactgaaraactgcgcacactctgcagacgcctccaggtgcccccttcagtagtttaaacccctccagagactaaatactccctgtttttagtgttctttgtcatggcaaatctcatttgaagaatttgctttgactgcagcactaaaattaaattcctttttgtattaaaggttatagtattgccgtgaagagctgtggattatct

SEQ ID NO: 875380 - DNA, 420 bp, Homo sapiens
tttaatctagttaagtacaacgaaaaagctaggaactcctgagcaatgtgagagatatcaccgattgcttatccaaaaatgatctctacttttttctagacttgagtaaaagccacaaaggccactccatgctctttytgtttttggtatttggggcagaccaggatggcatcctacaagataatggagtctcaatatggaaggaggttggatccctgaattgctgcatggaagagagctgcctaccaccctgaacatctactttggattactacagtagtaagaaataaaattacattgtgtttgggctattatacattggttggctgtattcaatacagcagtttagcatatattaaggaatacaatttatttattaaatgcaacatatggatattttgccctcctggagtcccatat

SEQ ID NO: 875381 - DNA, 621 bp, Homo sapiens
  misc_feature 579, 580, 581, 582, 583, 584, 585, 586, 587, 588, 589, 590,591, 592, 593, 594, 595, 596, 597, 598, 599, 600, 601, 602,603, 604, 605, 606, 607, 608, 609, 610, 611, 612, 613, 614,615, 616, 617, 618, 619, 620, 621: n = A,T,C or G
aggtatataccaggaaaaaaaggtcacagttgtggtttagatgcagggctatgaaagcctagaggaggagcacctgattctgcctgggctggtctaggaaggctttctgaaggaggtgagggatgatagagtagaatcttagagcttaattcttaaacaggtagacacagggcaatgagggaggtgactgaggagcaggcgacagcttgggcaaaggtacagaggacagagagcatatggcccatctgaaattggccctgaaacctgagtgcagacatatggggtaagaaaggaagggactctcctcatttttagaggaggacatgggctcatgcgccatgaaccaatggtgagccagcgctagaatccaggtctctccactctcagtgcccagccagaccacttcagagaacagttaatgttgcagargagtctttggttgcagacagatctgatgggatctcacaccttctgacgcccccacaaaggtgaggagctgaaattgcttacttctttgagcctgagattatcattacaagggtagggagagctattaacactgatcttacagattgatcnnnnnnnnnnnnnnnnnnnnnnnnnnnnnnnnnnnnnnnnnnn

SEQ ID NO: 875382 - DNA, 621 bp, Homo sapiens
aactggaaactctaaaaagcagagtgcctctccccctccaaagcaacgcagctcctcaccagcaatggaacaaagctggacggagaacgactttgaccagttgacaggagaaggcttcagacgatcaaactactccaagctacaggaggaaattcaaaccaaagccaaagaagttgaaaactttgaaaaaaatttagacgaatgtataactagaataaccaatacagagaagtgcttaaaggagctgatggagctgaaagccaaggctcgagaactacgtgaagaatgtagaagcctcaggagccgatgcgatcaactgcaagaaagggwatcagtgatggaagacgaaatgaatgaaatgaagcgagcagtgaagtttacaaaaaaaagaataaaaagaaatgaacaaaccctccaagaaatacggactatgtaaaaagaccaaaatctacgtctgattggtgtacctgaaagtgacggggagaatggaaccaagttggaaaacactctgcaggatattatccaggagaacttccccaatctagcaaggcaggccaacattcagattcaggaaatacagagaacgccacaaagatactccttgagaagaagcacaccaag

SEQ ID NO: 875383 - DNA, 621 bp, Homo sapiens
aactggaaactctaaaaagcagagtgcctctccccctccaaagcaacgcagctcctcaccagcaatggaacaaagctggacggagaacgactttgaccagttgacaggagaaggcttcagacgatcaaactactccaagctacaggaggaaattcaaaccaaagccaaagaagttgaaaactttgaaaaaaatttagacgaatgtataactagaataaccaatacagagaagtgcttaaaggagctgatggagctgaaagccaaggctcgagaactacgtgaagaatgtagaagcctcaggagccgatgcgatcaactgcaagaaagggaatcagtgatggaagacgaaatgaatgaaatgaagcgagcagkgaagtttacaaaaaaaagaataaaaagaaatgaacaaaccctccaagaaatacggactatgtaaaaagaccaaaatctacgtctgattggtgtacctgaaagtgacggggagaatggaaccaagttggaaaacactctgcaggatattatccaggagaacttccccaatctagcaaggcaggccaacattcagattcaggaaatacagagaacgccacaaagatactccttgagaagaagcacaccaag

SEQ ID NO: 875384 - DNA, 679 bp, Homo sapiens
ctttatctgtctattcaatatgatgctagtataacatcattttaaatataaaggctttgtagtatcttttaatgtttagtaaggtagtcttcctcttatttctttttttacaaaagtattttccttgctattcttgtatgcatgtgattccatgtgaactttagtcaatttacctaacttcataatttgttggtatttttattaggtttgaatgaattataagtcaacttatggagaatttaygtccttatagtgttgagtcattttatccaaaatacagggtattttcctaatttttaaagtcttctttagagtcctttgtgagtgttaaaattttcctttcacaaactttgtacatttttattaaatttatttctaagtatttagtgttcttattgcttattcttattatagtgttcttattcttattcttattatacatggacttactcttaagttctctaaatgttcgttgttaaagagtatataaaggctactaatttgttaatgttaattcagcattcagctaattcactagaatatttgatttcttgagatggttttatcattgaccctctggaattttcaaggtttattatcttaacaactgcaaatagaagtagttttacttcttctttaccaatttttatgcttttcaagaatttatctcatctaattg

SEQ ID NO: 875385 - DNA, 679 bp, Homo sapiens
ctttatctgtctattcaatatgatgctagtataacatcattttaaatataaaggctttgtagtatcttttaatgtttagtaaggtagtcttcctcttatttctttttttacaaaagtattttccttgctattcttgtatgcatgtgattccatgtgaactttagtcaatttacctaacttcataatttgttggtatttttattaggtttgaatgaattataagtcaacttatggagaatttatgtccttatagkgttgagtcattttatccaaaatacagggtattttcctaatttttaaagtcttctttagagtcctttgtgagtgttaaaattttcctttcacaaactttgtacatttttattaaatttatttctaagtatttagtgttcttattgcttattcttattatagtgttcttattcttattcttattatacatggacttactcttaagttctctaaatgttcgttgttaaagagtatataaaggctactaatttgttaatgttaattcagcattcagctaattcactagaatatttgatttcttgagatggttttatcattgaccctctggaattttcaaggtttattatcttaacaactgcaaatagaagtagttttacttcttctttaccaatttttatgcttttcaagaatttatctcatctaattg

SEQ ID NO: 875386 - DNA, 679 bp, Homo sapiens
ctttatctgtctattcaatatgatgctagtataacatcattttaaatataaaggctttgtagtatcttttaatgtttagtaaggtagtcttcctcttatttctttttttacaaaagtattttccttgctattcttgtatgcatgtgattccatgtgaactttagtcaatttacctaacttcataatttgttggtatttttattaggtttgaatgaattataagtcaacttatggagaatttatgtccttatagtgttgagtcattttatccaaaatacagggyattttcctaatttttaaagtcttctttagagtcctttgtgagtgttaaaattttcctttcacaaactttgtacatttttattaaatttatttctaagtatttagtgttcttattgcttattcttattatagtgttcttattcttattcttattatacatggacttactcttaagttctctaaatgttcgttgttaaagagtatataaaggctactaatttgttaatgttaattcagcattcagctaattcactagaatatttgatttcttgagatggttttatcattgaccctctggaattttcaaggtttattatcttaacaactgcaaatagaagtagttttacttcttctttaccaatttttatgcttttcaagaatttatctcatctaattg

SEQ ID NO: 875387 - DNA, 656 bp, Homo sapiens
aaaaacggcacttaaagattgtattcaaatgcaggctgtcatttaataggtctgagatagtgtcagaggttatgcttttaacaagcttctaattggtgtcaatactgataatccaagggccaaactttgacttttaagattctaagctatgccttacctagaagaactgctattgaaccagatctggaaggagcccgtgttcatattaagtaatatttttgctctttggttcgcctttttttttccttgtgtgtaggatgttagtaatggtggtaatagaactcacgaataaagcacgtgctttgtgaataaaattagaaataagtggactctatacaagaaaattttgggatatattttctcatkgttaaagtggtatatgtaatttaccactgagacagttaatcttaactaatgaactaagaagcaggataaaattatggagaggtggtatgtggatgagtgcatactcaaaaggatgagaagaaaaatttaaatttgtatatcaactaaaaaataaagaatatttcaaagatcaaaagaggaactgttaagaagtgagtttccactcaataaaaatatatccggtttttctattgtatgtctctcagtataactgaaactcatttttgcatgcagcatagtatattgacagc

SEQ ID NO: 875388 - DNA, 604 bp, Homo sapiens
caggggtaagcaacttctgtctcagctttaataccatcagtctaatttctcagattttctatagctgctgatcttgagaacctttgaagctttggggaaatcacatgggtgatttgaccttaaatctcatgccactcgcaaaagattaattgctaagacctggaaaggggccagacaattctgtgtagctgaatagcagcatcgtctagggatgtgactgtcctgacagatttagttagtacataattgataaatctagagtttgtatagcttcgcttcacagatagataacgcaatgggctccaagggttgacatttacagaagctctcccagtgttttgtaacactgaatctargttttctatcctcttcctctgagcattgctcattttctaaggctctgttctcagcaggcaataagatgagggcatctgacaagagtgccacctcacccagtataagcaagaagcaagaagcctcctaagtgtagcactgtcatatgactgctttgaaagtcttatttaccctgattcagtgcagggtgaggtcaaagagagatccagcacattacatagcagctaggaaattttcgtcacaatcggaa

SEQ ID NO: 875389 - DNA, 583 bp, Homo sapiens
tatgagaaatgctacgtacgctgtggcaaataaacccctcttggcaaacaggaacaggtccagttccaacactggccgagttccctggtacactttcactgtatccatgttagggtagaaatcacatttaaaaaaattgtaactattttatatacacccttaattataactcaagtaaagatgttttgtatttccatattttctaaggttttttttttttcatctaattcacaaagattcaaatagctcaaatggctttactttagcttcgcaagattccttgaaaagaaagcagaagagtaagccaggccaactaagagactaaatagtcatagagttcaagatgcacacagtccctggcaaattttataaaccagacytgaatggaacttaaaccaaaatagtgcttcatgaatcaattccctaatgaacggatatttctgattctatagcttatttctagaaaaccacttaccacatgttaagtaaatacaaaaatattaatatcattaaggtgatttatatctgagattttgggaaatgtggatattctggctagtagcattgttgcatgcctaaataa

SEQ ID NO: 875390 - DNA, 566 bp, Homo sapiens
ttgacaaagggctaatatccagaatctacaaagaaacaaatttacaaggaaaaaaaaaatcaaaaagtgggcaaaggatatgaactgacacttcttaaaagaagacatttatgcagccaacacacacatgaaaaaaatcctcatcatcactggtcatcagagaaatacaaatcagaaccacaatgagataccatctcacaccagttagagwggcgattaaaaagtcaggaaacaacagatgctggagaggttgtggagaaataggaatgcttttacactgttgggagtgtaaactagttcaaccattgtggaagacagtgtggtgattcctcagtgatctagaactagaaatatcatttgacccagccatcccattaccgggtatatacccaaagggttataaatcatgctaccgtaaagacacatgcacacgtatgtttattgcagcactattcacaatagcaaaaacttggaaccaatccaaatgtccatcagtgatagactggattaagaaaatgtggcacatatataccacagaatactatgcagctataaaaacagatgag

SEQ ID NO: 875391 - DNA, 662 bp, Homo sapiens
ataggagccccacatccattagcagacattccccattcccttctccccttggccctggcaatggctaatctactttctatttctgtggaattgcctctcttggacattttacattatttgaattatactatatgtgattgacttcttttgtttagcatagtgttctcaagatttttccatatagcactgtcatgtattagttcattcctttttattgctaaaataatataccactgcatgggataccacctaagcatcagtggattgacatataggctgtttcactttttggctattatgaataacactgctgtgaacatttatgtacaggttttgggtggccatgttctttcagtttccttcagtttatgtctaggagtgtaactgctgggttatgcagtaattctatattaaacattttaagaaactgccaaactattttccaaagtggctatacaatttttcaacctacargaaatgtacgagtgctccaatttttctgcatcctagccaacactaattatcatctgtcttttttattgtagccatcctagtgggtataaaatggtaatcacatcatggttttgatttgtatttccctaatgactaatcatgttgagcatcttttcatgtgcttattagccatttgcatgtcttccttg

SEQ ID NO: 875392 - DNA, 619 bp, Homo sapiens
taggaagaaagaagaaagaagctaggatatatctccccatccctctctgcccaagtggcctcaggtgtgaagcagcacttgccacacctttgtgcctccagctacctacagacagacctgccaggtgaccttggcccctgagctctgatagcactattagcttttgccctgcagcccaggggcagtagtgacttcttgctgttgctaatctcagttttctcactatttcctattgtcttcacagcaattccatttcctgtgtaatcaattaaacttcatctgttttgaatatttaaagcagtttgggttttcctaattggacctaactgacacaatatactttctgactggaatccagcttgccttgtttactgctacatcctagtacctaggagagtgccaagtgcacattaagtaatcagtgaaactgtgctggatgaatgaatggaaaayatgtcctttatttattccaatagcctcagacttcattaagcatcagaattacctggagggttagttatgacagattactacccctccacataccccttccccaagtttctgatttactaggtctgtaataaagcccccaaatttgcatttctaacaagttttcagt

SEQ ID NO: 875393 - DNA, 659 bp, Homo sapiens
aaaaagggggaataaaaatagataaatctcatcaccgtgaatactggaacacatagctcctatttttctaccctagtatatgacccagagtaataaagctttgttaatccggttaaaataaattatctacaggaatattattgttcagaaaatgttwttcccgtttcttgtccaaggatttatgctatctgcaaaaagagctgtcagtgatctctttcttcttttattctgcaatcaaacagcaattaccctttaattgactcatcttaaacatcccaatcacccctgccaggaaaacaaaaagactcaaaccatttactacccactactaaaataaaataaaacaatccagggctaagtagagaaaatggacaaagacagaattatagtctccttttagttacttgattgagaacactccacttatattaattcaacacagagaaactagaaatcaactctgctgaatgtctaaatctgcatatatttacctatgcaccaaaattctattacaacaaaacaattttgaattttggaattacaatggtaatctaatatttcattaagagaaaatctgtattttgtaaactcttgatcatttgtgtgaacacagggacatggtagcatgaataatttcagattaatttatatttgtcttt

SEQ ID NO: 875394 - DNA, 671 bp, Homo sapiens
caagctcttctggaaaacttgctgcagtttctacatcagcacttgctacctcaccttacacttttatgttatagagaaagccttgtttcttaaaccttataaatgaacctctgctagtttcaaacatttcctccgatgctttctacctttctcagacttcatagaattaaagagagttagggcattgctctggattaggctttggcttaagggaatgttgtggttggtgtgatcttctattcagacaactcaaactttctctatattagcaataaagctgtttagctttcttatcatttgtgtgtttactggagtagcacttttactattstgtaagaacttttcctttgcattcacaacttggctaactgtttagcataagaggcctagctttcagcctatctcagcttttgacatatcttcctcactaagcttaatcatttctagctttttatttaaagcaagagatatgtgactcttcctttcacttgaatacttagaggccattgtagagttattagttaccctaatttcaatattgttgtgtctcaggatatagggaagcccaaggagagggagagagatggaggaacaccagtcagtggggcagtcagaacacacacatttgtggattaagtttgccatcttatatgggcatagtttgtggtgcc

SEQ ID NO: 875395 - DNA, 584 bp, Homo sapiens
ggtggctgggcttctgggtcaggtggggacttgaagaacttttctgtctagctaaaggattgtaaacacaccagtcagcactcagtttctagctaaaggtttgtaaacacaccaatcagcactctgtaaaaacgcaccaatcagtgctctgtgtctagctaagggtttgtaaatggaccaatcagcactctgtaaaatggaccaatcagcaggatgtgggtggggccaaataagggaataaaagttggccacctgagccagcagtggcaacccgccagggtccccttccacactgtggaagctttgttcttttgctcttcacagtaaatcttgctgstgctcactctttgggtccacactacctttaagagctgtaacactcactgcaaaggtctgcggcttcactcctgaagtcagcaagaccacgaacccactggaaggaagaaactctggacacatctgaacatctgaaggaacaaactccagacacaccatctttaagaactgtaacactcaccgtgggagtccacggcttcattcttgaagtcagcgagaccgagaacccacttggaagaaaccaattc

SEQ ID NO: 875396 - DNA, 603 bp, Homo sapiens
acttgatgcactgaatatattatgtatgtgcttttcaacagtaagaaataaaaagtttctttaaccactgtgaggtgattactaaatgaagaatggaatttgtttcgaatattgatacaggatttcatgatgtgctgggcaatgaaagaccttctgcttacatgagggagcacaatcaattaaatggctggtcttctgatgaaaatgactggaatgaaaaactctacccagtgtggaagcggggagacatgaggtggaaaaactcctggaagggtaagtcaaaagattcaaamcaaacacctgcaatttcctacttcagtaagtcttgtagatggtaaagccttttagatcacacggctcacgtcatttccacgaatgacagtgctctcattaccaagtggggaggcacctggacttggcaatattttctttagcccaacactatcacttcctaaaccacaagtaatctccttagaaatttccacattggtagctcttggaatacttttgaagggtgagcagatttagctttaaacctatttagccaacctgggaatgatcatcttcagaaacccagtcaccccaaagccatttttactgtct

SEQ ID NO: 875397 - DNA, 593 bp, Homo sapiens
ttaaaccaacgaagatcaaaagagacaaagaaggccccattacgtaatggtaaaggggtcaattcaaccggaagagctaactttcctaaatatatatgcacccaatacaggaccacccagattcataaagcaagtccttagagacctacaaagagacttagactcccacacaataataatgggagactttaacaccccactgtcaatattagacagatcaatgagacagaaggttaacaagaatatccaggaggtaaactcagctctgcacaaagcggacctaatagacatctacagaaccctccaccccaaatcaacwgaatataccttcttctcagcaccacatctcacttattccaaaattgaccacatagttggaagtaaagcactcctcagcaaatgtaaaagaacagaaatcacagcaaagtgtctctgagaccacagtgcaatcaaattagaactcagggctaagaaactcactgaaaattgcacaactaaatggaaactgaacaacctgctcctgaatgactactgggtatactaacgaaatgaaggcagaaataaagatgttctttgaaaccaatgagaacaaa

SEQ ID NO: 875398 - DNA, 593 bp, Homo sapiens
ttaaaccaacgaagatcaaaagagacaaagaaggccccattacgtaatggtaaaggggtcaattcaaccggaagagctaactttcctaaatatatatgcacccaatacaggaccacccagattcataaagcaagtccttagagacctacaaagagacttagactcccacacaataataatgggagactttaacaccccactgtcaatattagacagatcaatgagacagaaggttaacaagaatatccaggaggtaaactcagctctgcacaaagcggacctaatagacatctacagaaccctccaccccaaatcaactgaatataccttcttctcagcaccacatcwcacttattccaaaattgaccacatagttggaagtaaagcactcctcagcaaatgtaaaagaacagaaatcacagcaaagtgtctctgagaccacagtgcaatcaaattagaactcagggctaagaaactcactgaaaattgcacaactaaatggaaactgaacaacctgctcctgaatgactactgggtatactaacgaaatgaaggcagaaataaagatgttctttgaaaccaatgagaacaaa

SEQ ID NO: 875399 - DNA, 794 bp, Homo sapiens
ttttgatgtaactcagagtgtaaaagaattaaaagtttacagttaaaaattaaggacattatttctttgatgtgagagaggctatgtgaggaccacttggaaaggctgatacgtgtttcctggagtttgagggcccagaaagcaggtcttgaaaactcgcctgaggaatcaaaacatacagctaaactacacgtatttccatgttcatgtacttacttgtaaatctgcaaggaaatatcttacactaacaaacaatagttactttggcatgggcttgttattggagcaaggagggtgtcagctttatttgagcagtttaaagacatactmtattgcttcatcaatgagtgagttacatactgaaaactcacttttttcatttatctatgtctgaagagaatataaaagctaggcccacaaattcattaacagacactacttttgttaacaaagtgtttcccaaaagttttaggacataattcacttctataaaaaggctttatttttgatctcataccattttcatgaaattttttaaactcttacatgtttatatcatgctcattataaaaattaaataatatagaattcaaataatatagtatcttattagttttaagaattaatgtagaataatgtaatttaagctaatgttccccttcacctctccttcctctagccaggggtaatcatcattattaattcagtaaatatctattgagataatttttgtgcatttacatttgtatttataacacattttcataaattagattaagccacacatattattc

SEQ ID NO: 875400 - DNA, 602 bp, Homo sapiens
aggacataagaaaaaaagaaaactacagaccaatatccctgacgaacatagatgcaaaaatctttaacaaaatactagctaaccaaatccaacagcatgtcaaaaagataattcaccatgatcaagtggatttcatattaggggtatagggatrgtttaacatatgcaagtcaataaaggtgatacaccacataaacagaattaaaaacagaaaccacatgatcatcccaatagatgcagaagaagcatttgacaaaattcagcatccctgtatgattaaaaccctcagcaaaatcggcatacagggacataccttaatgtaataaaagccatctatgaaaaacccacagccaacataatactgaatggggaaaagttgaaatcattccctctgagaactgtaataagacaaggatgaccactcaccccttcttttcaacgtagtattggaagtcctagccacagcaatcagacaagagaaagaaataaagggcatccaaatcagtaaagaggaagtcaaactgttactctttgctgatgatatgattgtatatctagaaaaccataaagcctcctccaaaaagctcctagaactgataaat

SEQ ID NO: 875401 - DNA, 602 bp, Homo sapiens
aggacataagaaaaaaagaaaactacagaccaatatccctgacgaacatagatgcaaaaatctttaacaaaatactagctaaccaaatccaacagcatgtcaaaaagataattcaccatgatcaagtggatttcatattaggggtatagggatggtttaacatatgcaagtcaataaaggtgatacaccacataaacagaattaaaaacagaaaycacatgatcatcccaatagatgcagaagaagcatttgacaaaattcagcatccctgtatgattaaaaccctcagcaaaatcggcatacagggacataccttaatgtaataaaagccatctatgaaaaacccacagccaacataatactgaatggggaaaagttgaaatcattccctctgagaactgtaataagacaaggatgaccactcaccccttcttttcaacgtagtattggaagtcctagccacagcaatcagacaagagaaagaaataaagggcatccaaatcagtaaagaggaagtcaaactgttactctttgctgatgatatgattgtatatctagaaaaccataaagcctcctccaaaaagctcctagaactgataaat

SEQ ID NO: 875402 - DNA, 638 bp, Homo sapiens
gtgatgggggtaaggggagcatcttgttagtcatagcaaacccctttcaaccttacctgagttatgctaatgaggtaactccaggtggcttgggactggctcccggaggaaccaactaggtcattagaggattggaagtttcagccccactctccaacctctgaggagggaagaggccagtgatttaatcaatcactcctacataatgaagcctccataaaaaccctaaacaatgggttcctagagcttccakgttggtaaacacatcagggtgctgtgagggagggtagcaccccaaaggcctggaagctctgcaccccttccacatacctgacctatgcacctcttccattgggttggtcctgagttgtatcctttacaataaaccagtaaatataataaactgttattctgagatctgtgagccattccagcaaattatcaaacctaaggagggggttgtgtggactactgagtcaggtagtcaagtcagagagaagtgcaggtgacaacctggggacttgcaattggcatctgaagttgggggcagccttgaaggactgagtcccttaagctgtggggtctaattccaggtcgttaatgccagaattgaattgaattattagacacccagttgg

SEQ ID NO: 875403 - DNA, 541 bp, Homo sapiens
ttaaaagaaaaacaaactcaatttacttgtaccaatcatagagctgcaaaactgaggctcttttataaaaaacagagattaactggcatgcatgaaactctgtttttcccccaagttgcacatctctttttcattaaccactttatattgtcctayctgcttatttgtctttttttctttttattttattttaagttccagtatacatgtgcaggacgtgcaggtttactacatagataaacatgtgccatggtgatttgctgtacctatcaacccctcacctaggtattaagcccagcatgcattagctgtttatcctgatgctctccttccccctaccccaccaccgacaggccccatgtgtgttgttcccctccctgtgtccatgtgttctcattgttcagcttccacttatgagtgagaacatgcagtgtttggttttctgttcctgcattagtttgctgaggataatggcttccagctccatccatgtccctgcaaaggacatgatctcattccttttgatggctgcagagtattc

SEQ ID NO: 875404 - DNA, 659 bp, Homo sapiens
cttctattcccaatttgttgagagtttttaatcatacaaaatgttgaattttgtcaaatgctttttctgcatctattgaaataatcatatggttttgtccttcatcatgttaatatggtgtatcacatttattgatttgcatatgttgaaacttccttgtatcccaggagtgaatcatgtttgattgtgataaattatctttttaatgtgctgttgaattcagtttgctagtattttattgaggatttttgtatctacattaattgggggcattggtctgtaattttcttttcttgtaatgtccttttttggctttggtatcagggtagtatgggccttctaaaatgagtttagaagtattttctccacttcaatgttttggaagtgtttgagaaggaccratattcgttcttcttcatgtggttggtaaaattcaccagtgaagcactaggttctgagaatttctttgatgagagactttttattactgatccaatctccttaatcattattggtctactcatattgtttctttcttcatgatttagtcatcatagtttgtaggttttaggaatatatctgtttcttctagatcaaccatttttttggcatataattctttatagtggtttcttatgaccctttgtatttctgtagca

SEQ ID NO: 875405 - DNA, 692 bp, Homo sapiens
aaggcaaaaggcatgtctcacgtggtagcagacaagagaagaagagaacttgtgcagggaaattcccctttataaaaccatcagatctcatgagacttattcactatcatgagaatagcatgggaaagactggcccccatgattcaattacctcctaccgggtccctcccacaacatgtgggaattgtgggagctacactgcaagttgagatttggatggggacacagacaaasgttattgttccatcactggcccctcccaaatctcgtgtcctcacatttcaaaaccaatcacgacttcccaacagtccctcaaaatcttaactcagcattaactcaaaagtccacagcccaaagtctcatctgagagaaggcaagtctcttctgcctatgagtctgtaaaatcaaaaagcaagttagttacttcctagataaaatgggggtacaggcattgggtaaatacagccattccaaatgggagaaattggccaaaacaaagggtccacaggccctatgaaagtccaaaatccagccaggcagtcaagatgccaaatgatctcctttgactccatgtctcacatgcaggtcatgctgctgcaagaggtggtttcccgtggtcttgggaagctccatccctgtggctttgcagggtacagcctccctcctggctactttcacaggctggcattgag

SEQ ID NO: 875406 - DNA, 692 bp, Homo sapiens
aaggcaaaaggcatgtctcacgtggtagcagacaagagaagaagagaacttgtgcagggaaattcccctttataaaaccatcagatctcatgagacttattcactatcatgagaatagcatgggaaagactggcccccatgattcaattacctcctaccgggtccctcccacaacatgtgggaattgtgggagctacactgcaagttgagatttggatggggacacagacaaaggttatygttccatcactggcccctcccaaatctcgtgtcctcacatttcaaaaccaatcacgacttcccaacagtccctcaaaatcttaactcagcattaactcaaaagtccacagcccaaagtctcatctgagagaaggcaagtctcttctgcctatgagtctgtaaaatcaaaaagcaagttagttacttcctagataaaatgggggtacaggcattgggtaaatacagccattccaaatgggagaaattggccaaaacaaagggtccacaggccctatgaaagtccaaaatccagccaggcagtcaagatgccaaatgatctcctttgactccatgtctcacatgcaggtcatgctgctgcaagaggtggtttcccgtggtcttgggaagctccatccctgtggctttgcagggtacagcctccctcctggctactttcacaggctggcattgag

SEQ ID NO: 875407 - DNA, 692 bp, Homo sapiens
aaggcaaaaggcatgtctcacgtggtagcagacaagagaagaagagaacttgtgcagggaaattcccctttataaaaccatcagatctcatgagacttattcactatcatgagaatagcatgggaaagactggcccccatgattcaattacctcctaccgggtccctcccacaacatgtgggaattgtgggagctacactgcaagttgagatttggatggggacacagacaaaggttattgttccatcactggcccctcccaaatctcgtgtcctcacatttcaaaaccaatcacgacttcccaacagtccctcaaaatcttaactcagcattaactcaaaagtccacagcccaaagtctcatctgagagaaggcaagtctcttctgcctatsagtctgtaaaatcaaaaagcaagttagttacttcctagataaaatgggggtacaggcattgggtaaatacagccattccaaatgggagaaattggccaaaacaaagggtccacaggccctatgaaagtccaaaatccagccaggcagtcaagatgccaaatgatctcctttgactccatgtctcacatgcaggtcatgctgctgcaagaggtggtttcccgtggtcttgggaagctccatccctgtggctttgcagggtacagcctccctcctggctactttcacaggctggcattgag

SEQ ID NO: 875408 - DNA, 692 bp, Homo sapiens
aaggcaaaaggcatgtctcacgtggtagcagacaagagaagaagagaacttgtgcagggaaattcccctttataaaaccatcagatctcatgagacttattcactatcatgagaatagcatgggaaagactggcccccatgattcaattacctcctaccgggtccctcccacaacatgtgggaattgtgggagctacactgcaagttgagatttggatggggacacagacaaaggttattgttccatcactggcccctcccaaatctcgtgtcctcacatttcaaaaccaatcacgacttcccaacagtccctcaaaatcttaactcagcattaactcaaaagtccacagcccaaagtctcatctgagagaaggcaagtctcttctgcctatgagtctgtaaaatcaaaaagcaagttagttacttcctagataaaatgggggtacaggcattgggtaaatacagccattccaaatgggagaaattggccaaaacaawgggtccacaggccctatgaaagtccaaaatccagccaggcagtcaagatgccaaatgatctcctttgactccatgtctcacatgcaggtcatgctgctgcaagaggtggtttcccgtggtcttgggaagctccatccctgtggctttgcagggtacagcctccctcctggctactttcacaggctggcattgag

SEQ ID NO: 875409 - DNA, 566 bp, Homo sapiens
ccatatccctgaggaacaccgatggaaaaatcctccataaaatgctggcaaaccgaatccagcagcacatcaaagagcttatccattatgatcaagtgggcttcatccctgacatgcaaggctggtccaacatatgcaaatcaataaacataatccagcatataatcggaaccaaagacagaaaccgcgtgattatctcaacagatgcagaaaaggcctttgacaaaattcaacagcctttcatgccaaaaactctcaataaattaggtactgatgggacatacctcaaaataataagggctatttagggcaaacccacagccaatatcatactgaatgrgcaaaaagtggaagcattccctttgcaaactgccacaagacaggggtgccctctctcaccactcctattcaacatagtgttggaacttctggccagggcaatcaggcaggagaaagaaataaagagtaatcaattaggaaaagaggaagtcaaattgtccctgtttgtagatgacacgattgaatatttagaaaaccccatcgtctcagcccaaaatctccttaag

SEQ ID NO: 875410 - DNA, 636 bp, Homo sapiens
ggtccaacatatgcaaatcaataaacataatccagcatataatcggaaccaaagacagaaaccgcgtgattatctcaacagatgcagaaaaggcctttgacaaaattcaacagcctttcatgccaaaaactctcaataaattaggtactgatgggacatacctcaaaataataagggctatttagggcaaacccacagccaatatcatactgaatgggcaaaaagtggaagcattccctttgcaaactgccacaagacaggggtgccctctctcaccactcctattcaacatagtgttggaacttctggccagggcaatcaggcaggagaaagaaataaagagtaatcaattaggaaaagaggaagtcaaattgtccctgtttgtagatgacaygattgaatatttagaaaaacccatcgtctcagcccaaaatctccttaagctgataagcaacttcagcaaagtctcaggatacaaaatcgatgtgcaaaaatcacaagcattcttatacaccaataacaggcaaacagagagccaaatcatgactgagctcccattcacaattgcttcaaagagaataaaatactgaggaatccaactaacaagggatgcgatgtgcgaaggacctcttcaag

SEQ ID NO: 875411 - DNA, 683 bp, Homo sapiens
ggagtgcagtggcatgaacgctgctcactatagcctcaacctcccgggcccaagcgatcctcctgcctcagcctcccaagtagctaagaccacaggggcatgccaccacacctggttatttttttatttttatttttttgtagcgacaagatctccctggtcttgaactcctggactcaagcagttctaccacctcagcctcctgaagtgctgggattacaggcatgagcgcccatgcctagccatctttgcccatttttttaatggggttgtttggtttttgcttgttaattcgtttaagttccttatagattctggatattcgagctttgttggatgcataatttgcaaatattttcttccattccayaggttgtctgtttactctgctgatagtttattttgctgtgcagaagctccttaatttaattaggtcctacttgtcaatttttgtttttgttgcaattgcttttggagtctttgtcatgaaatctttgccagggcctacgtctagaatctcatttcccaggttttcttctagggtttttatagttatacgtttcacgtttaagtctttaatccatcttgtgttgcttttttatatggtgaaaggaaggagtccagtttcaatcttctgcatatggctagccagttatctcagcaccacttatcgaatagggagt

SEQ ID NO: 875412 - DNA, 675 bp, Homo sapiens
agatttcatttctgtaagaatattaggctgagaagcccactcatgagatcagctattccaaactcgtatctgtctctctaaacatgagcccaaataatgtagaagataggaccacataactaatttgagacttgtactttaacttgattgtggtttgattaatttggatgagagcagaaaaactcactagtgtaaaatataatgattctaagtatgttattttcctaatgaatgcttgaagttacttaagtagtagaaacttaagttatttaaatttatcttgggcgtatttcgtggggttatattccaagcttattatcttctatcactttatattcttatatagtaacgtgaggcttatgttacttcttctggctactactctttaaactttttatttttaccttctctatgaacatttttamacttagattctttgtctttttttctgaactgaatatagatagacctgaattttccttcctattgtgaatattctctttgcttctcattcactatttgaaggactatatagcataatagttacaagctgggctctggagttggagccgcttctttgctgcatgaccttgagcaagttgtatctttctgatatttccttatctataaaataataattatagcacctgccttcctcacagagttttcgtgaga

SEQ ID NO: 875413 - DNA, 636 bp, Homo sapiens
gcctgttctgcacatgtatcccagaacttaaagtataataaaaaagtaagtaaaaataaataaagacaactctggctgtttcatttaaaataacacaggtgtgggagccgaggcagatggatcacttgaggtgagsagctcgagactggcccggccaacacggtgaaaccccatctctactaaaaatacaaaaaattagcagggcgtggtggcacgcgcctgtaatcctagctactcaggagtctgaggaaggagaatcgcttgaacctgggaggtgtaggttgcaatggtctgagatcatgccactgcactccagcctgggcaacagagcgatattctgtttcaaaaacaaaaaacaaacaacaacaacaacaataatacacaggtaagaaagcaagggctgcagctattgcaatagtacacttggaaataatgacattcaggggaaaggttgtggaggtttataggaacatttatttatttaacactaatttttcagtatatacctataactgcatgatccctctatatcaagggatgggatataattgagggcattatatttattctctaaccccacaaacatattttagtaggaaagaaaatattttaagcaagtaaaaccattgcataaaa

SEQ ID NO: 875414 - DNA, 636 bp, Homo sapiens
gcctgttctgcacatgtatcccagaacttaaagtataataaaaaagtaagtaaaaataaataaagacaactctggctgtttcatttaaaataacacaggtgtgggagccgaggcagatggatcacttgaggtgaggagctcgagactggcccggccaacacggtgaaaccccatctctactaaaaatacaaaaaattagcagggcgtggtggcacgcgcctgtaatcctagctactcaggagtctgaggaaggagaatcgcttgaacctgggaggtgtaggttgcaatggtctgagatcatgccactgcactccagcctgggcaacagagygatattctgtttcaaaaacaaaaaacaaacaacaacaacaacaataatacacaggtaagaaagcaagggctgcagctattgcaatagtacacttggaaataatgacattcaggggaaaggttgtggaggtttataggaacatttatttatttaacactaatttttcagtatatacctataactgcatgatccctctatatcaagggatgggatataattgagggcattatatttattctctaaccccacaaacatattttagtaggaaagaaaatattttaagcaagtaaaaccattgcataaaa

SEQ ID NO: 875415 - DNA, 619 bp, Homo sapiens
catagacaaaaatcaactcaaaaatggataaaatatttcaaaggcctgaaactccaagaagagaacataaagagaaagctccttgacattggtcttaacaataatttttgtgaatatgataccaaaagtaaaggcaacgtaaacaaaattaaacaggtgrgactacaacgaatttaaaagtttctgcacagcaaagaaaacaaccaaatgaaaaggtaatgtatggaatggaagaaaatacttgcaaaccacatgtctaataaggggttaacatccaaaatgtataaggaattcaaacaactcaacagcaaataataataataataacccaaatttttaaatgagcaaagaagacatacaaatggccaagagatatattttttaaaatgctcataatcactaatcatcggggaaaaccacaatgagatatcaccttatacctgttaggatggttatatcaaaaagtcaaaagataacaagtgttggggaggatacagggaaaagggagcctttgttcactgttagtggaaatataaatagtacattcattatgcaaaacagtttagaggttgctcaaaaaattaaaaataaaagtactctttgatccagcatcccactt

SEQ ID NO: 875416 - DNA, 643 bp, Homo sapiens
cttggatgtaaatgaacctactacatgtaactggttttggttttaactcttctcctgtttttctccataaatgtactgataaatgtaatgattcgtgtctactttattaattactgctatttcctgctttggtagatattccacctgaaatatatggaaattcaactgaaagaattgtttaargccctttttcttaggtctcatgaatcatatttcaagcaatatatgcatattactacataccattctaccgaataactcaaagatatcccaccttgtttttaggagatattgtcaaaaacactgacaaataccaaagatttcctagtcatgcttacgaatggataaaattgtttggagaactaaacaattctactatgtataattcaatgttgggattttgttaaaaaataaaattccttcaaatcttacccaatctttatttctgtgaaacatttttgggaggggaaaatatggataaaataggcctaatagtagaataatcaattaaatgaagcctagaaattatttacattatttttataagcatataaagtcttcaatagcctattttcttctgaggagaattaacaaaattccaaatgaaatacagtctcttccttcaatgtgtacttccagaaca

SEQ ID NO: 875417 - DNA, 686 bp, Homo sapiens
gtcaaatgaattaaatgtagagaatggttctttattctgaggttagtcctccctagtttcttcttattaaaatgtgatagtaatagtagatggcaattattttaaaatgttttgtgtattttttttttttcttggcacattttggaaaagactgtactaatgcaatcaaactcctaaactgatttatctatcaatttattargactcttatttgccagtggccaaaactgtttctgagaatatagctgcttgaagttttggactcattcatctgacatatattcttaagtgcttattttgtgcccatcactgtcttgcaataaataagactaagaatgtttttgttctcatgaaacccaaattgtagtaatccacattttttcaacttgatcaccaagaggtaaaaaaatctccacagctgcagtgagagtcattttcagggaaggattccaattggctcagcctgaactatgtgccttcccacccttgaaccaatccctttcccatcctgggtcacatgctcagccctgggggtccacatgacaggcctattgctaaaaggaggtgagagaaactgcatagacaaaaacagaagatgttgatgaccattactaaaggtcatcacaaaagtgtgtttttgtgcactacaagtgcatagcattcagttttggattttccctgttagt

SEQ ID NO: 875418 - DNA, 611 bp, Homo sapiens
agggttgctgataacctaagacaagttctatttacatatcactgtggtgatgggccctatatgacaagtgttgctatactgcccaaaacttttcaccaagtcagcatagtgacctgagaaagaaattacaagaggcaatctgggatcccaatatcaaatttaaatattcttatagtctccttttatggccttaaaaaatttcaggtgtaattaatccatgtgagaagacccgagtttagctgtaaaatcagaaaatgagggcagattgtacaatatagtctcctgggatctgaaattggtgatgatatcatggaagcttggcatccagaggacatctggagatttatttttcctggttttacaacccaaggttaacagctctgaactttgtagaaaccctgatactgtgactggtraagttattcatagttaacttaaaagccaagccaaataaagtaggcagggaagagcatcttttcccataattgctcaagggcaactttgaatattgggctctgattctgcccatatttatgtaagatcacagttctgtctcagtacacatagaatctcccttgttcagtttttttaaaaagataaatattttctaa

SEQ ID NO: 875419 - DNA, 642 bp, Homo sapiens
cttctagggcatcttcttgggaggtgttgggtctgtcctcaactaatcaaagaagactgtgatagctcagtgttatttgtagtggtagagacaagacagttgaactgtaggggccaggttgtttctttgccagagtggccagcagttcacaacttcgctactttaaacagtctcaaccaggcgtagyggctatgcctgtaatcccagcactttgggaggctgagacgggtggatcacttgaggtcaggagttcaagaccagcctggccagcatggtgaaaccccgtcttctacaaaaagtacaaaaattagtcggcatggtggcgggtgcctgtaatcccacctacttgggaggctgaggcacgagaatcatttgaacccgggaggcggaaattgcggcgagctgggagcacaccactgcactccaacctgggttacagagtgagactctgtctcaaaaaaaaacaaacaaatgaaaacccccaaaagctccatggagatctctaaaaatacagttgctcaagtaccatctctagagtttttttccccaaagttcaactttgctctctatctctaactgtatctgtaagataagctcccccaggacaaaaggagaagaatcttgcaataattgtctggttaa

SEQ ID NO: 875420 - DNA, 667 bp, Homo sapiens
tgcttcctacagggaatgcagagctgattgggaaattggaagagctgcgtctgcagggcatgtaaatacactaaggtctgctcttcccgggtgttttgggatcccaacatcaccagcagctgccttgggaagttttcactctggaaatttatttaaaattatttaaagcccatcccgcctccatgatcttcctatcattttctgaactgtggaaatgtatgcttttcaacactatgattgtggtctgtctccccagaaatgtgctgccaaacctcaacctggccaacactgaaacaccsaaaggggtttctgaaaggtagagattgaagcttctaatcctagaggccactagtgacttggaaagttgacatccagctagtgtctcagatcaaactccccagctcatgcaccaccccacaatgaggtctggatttggctcaaagtgggccaaagggtcttgcttgcttcgtatctatgaactttagtgggagtttgtcattattggcagctcaccacccattctccttccttttgggcttgattgctcttgcatagggcaggcattgtctgatggcaaatccagataactccaatcgtagttgggcagctgaagccagacagggagaaagcaggctaacttaagcaaattaagcagtccctcccggga

SEQ ID NO: 875421 - DNA, 666 bp, Homo sapiens
atatcagtaattgaagatcaaattaatgaaataaactgagaagaaaaggttagagaaaaaagaatacaaagaaatgaacaaagcctccaagaaatatgggactacgtgaaaagaccaaatatatgtttgattggtgtactggaaagtgatgcggagaattgaaccaagttagaaaacactcttcaagatattattcaggacaacttccctaacctagcaaggcaggccaacattcaaattcaggaaataaggagaacaccacaaagatactcctcgagaagagcaaccccaagacatataattgtcagatttgccaaggttgaaataaaggaaaaaatrttaagggcatccaaagagagaggttgggttacccacaaagggaagcccatcggactaacagcagatctctcagcaggaaccctacaagccagaagagagcaggggccaatattcaacattcttaaagaaaagagttttcaacccagaatttcatatccagccaaactaaacttcttaagagaaggagaaataaaatcctttacagacaagtgaatgctgagagattttgtcaccaccaggcatgccttataagagctactgaaggaagcaccaaacatggaaaggaacaacaagtaccagccactgcaaaaacatgccaaatggtaa

SEQ ID NO: 875422 - DNA, 666 bp, Homo sapiens
atatcagtaattgaagatcaaattaatgaaataaactgagaagaaaaggttagagaaaaaagaatacaaagaaatgaacaaagcctccaagaaatatgggactacgtgaaaagaccaaatatatgtttgattggtgtactggaaagtgatgcggagaattgaaccaagttagaaaacactcttcaagatattattcaggacaacttccctaacctagcaaggcaggccaacattcaaattcaggaaataaggagaacaccacaaagatactcctcgagaagagcaaccccaagacatataattgtcagatttgccaaggttgaaataaaggaaaaaatgttaagggcatccaaagagagaggttgggttacccacaaagggaagcccatcggactaacagcagatctctcagcaggaaccctacaagccagaagagagcaggggccaatattcaacattcttaaagaaaagagttttcaacccagaatttcatatccagccaaactaaacttcttaagagaakgagaaataaaatcctttacagacaagtgaatgctgagagattttgtcaccaccaggcatgccttataagagctactgaaggaagcaccaaacatggaaaggaacaacaagtaccagccactgcaaaaacatgccaaatggtaa

SEQ ID NO: 875423 - DNA, 641 bp, Homo sapiens
gaaggttttctcaccttttccctttcaattttcactgttctttctactgtattctcaaggatccacaactgggtttccaatatatattttcctttgtcatccaccagacaataatctagatgtgaggaaattctgggttaaggatcactaatctaaacaaataatctgccctcgccttcaatattcctccagattttttaattcttactatgcattttgttgtttttcttgttgttgttaagaaatagaaaatactctgtgggtgtgagtgtgggtgtacacagcattttatttagaaaattgatgtttatcatttaattctattgtgtgtgcaactgaagtaaatttttcaaagaactaggggaaaggataatatacagaccttagagaaagagaaacaataatagtgaygggaataatgagaaaggaaagaaaagacagagaaacagagacagactgggcaggctctgaagagcattgtaaccagaggccctccctaggagtgccctggctgagggctgctgagaattgctgtgcattgagatgttcatcagttagtctgccactcactgcaccagagctctattgctggatgacataatttttgttagagtctccactatattaaccagagcagccca

SEQ ID NO: 875424 - DNA, 593 bp, Homo sapiens
atcaaatagacgcaataaaaaatgataaaggagatatcaccaccaatcccacaggaatacaaactaccatcagagaatactacaaacaccgctatgcaaataaactagaaaatctagaagaaatggataaattcctcgacacatacaccctcccaagactaaaccaggaagaagttgactctctgaatagaccaataacaggctctgaaattgtggcaataatcaatagcttaccaaccaaaaagagtcctggaccagatggwttcacagccgaattctaccagaggtacagggaggaactggtaccattccttctgaaactattcctatcaatagaaaaagagagaatccttcctaactcattttatggggccagcatcatcttgataccaaagccgggcaaagacacaaccaaaaaatagaattttagaccaatatcctcgatgaacattgatgcaaaaatccttaataaaacactggcaaaccgaatccagcagcacgtcgaaaaccttcaggtgctcttttaaggctggtttggtggtgacaaagtttctcagtatttgtttgtctttgaaagattttatttctccttc

SEQ ID NO: 875425 - DNA, 685 bp, Homo sapiens
cagaagagttttgtcatggaagaatggaagaagaaaaagcctgtaagtattgaacagctgccatattcatctcaacctttcgtgtctcacttatgaaaactttcctccctctgaattttaatttttaatcctccaacatatttgcttttagaatttttgatattttcattttagatctatatttcgcctagaatttatttttattgatggtatgaggtagaaacctaacttaattcttttccaatatataaaacctgttgtccccaaaccatatattgagtactctcttcttcccaacagttggaaatgctgcattcattaaagctaaattctacatttctgtgggtctgtttcttgattatgcagtttgctccattgatctgttcttctatgcatgtaacaattccctgttgtttaaatattggttaacttctcttttttttggagatggagtctcgcttgcyctgtcacccaggctggagtgcagtggtgcgatctcggctcactgaaacctcctcctcccgggttcaagccattctcctgcctcagcttcctgagtagctaagattacaggcacatgccaccatgactggctaatttttgtattttttttttaatagagacagggtttcaccatgttggtcaggctggtctcgaactcctgacctcgagtgatctgcctgcc

SEQ ID NO: 875426 - DNA, 635 bp, Homo sapiens
aaaattagtttgcttttatttttatgtacactgagacttttaaaggagtatcttaacagagttcaatgaatatttcttaaataaatgaataaatgtgtttttaaactgtttctttttccactttggagaaaatgcttagagccaaatttatgagcctcttctaggaagtgtacagaaaccagaaacattattaaaatattctgagctgaactcacaataatagcttcttacttgtgcatttcaastataactgatcactggcttaaaccttacttgaaaatttgtataattgctgacagtctaaataagtagcactctgactaatgaatgagttataagtctattgaaaaatcctattttcatagattctgcagatgcagcaccagaagtcagctagaggagactaactaatgttaacaatccttctgaggtacttcttaattgacattttattgtattacaattacgcaaactgtgccaagctgactaggactaagacaaaggagacagtagtttatatatttatttacttttgctcctaaatgattcctgagaaggagtaataaaatcctaaaccagagtatacaggctttgaaatgatatatgtaaaatccaataaggccagtgagaatcat

SEQ ID NO: 875427 - DNA, 635 bp, Homo sapiens
aaaattagtttgcttttatttttatgtacactgagacttttaaaggagtatcttaacagagttcaatgaatatttcttaaataaatgaataaatgtgtttttaaactgtttctttttccactttggagaaaatgcttagagccaaatttatgagcctcttctaggaagtgtacagaaaccagaaacattattaaaatattctgagctgaactcacaataatagcttcttacttgtgcatttcaactataactgatcactggcttaaaccttacttgaaaatttgtataattkctgacagtctaaataagtagcactctgactaatgaatgagttataagtctattgaaaaatcctattttcatagattctgcagatgcagcaccagaagtcagctagaggagactaactaatgttaacaatccttctgaggtacttcttaattgacattttattgtattacaattacgcaaactgtgccaagctgactaggactaagacaaaggagacagtagtttatatatttatttacttttgctcctaaatgattcctgagaaggagtaataaaatcctaaaccagagtatacaggctttgaaatgatatatgtaaaatccaataaggccagtgagaatcat

SEQ ID NO: 875428 - DNA, 635 bp, Homo sapiens
aaaattagtttgcttttatttttatgtacactgagacttttaaaggagtatcttaacagagttcaatgaatatttcttaaataaatgaataaatgtgtttttaaactgtttctttttccactttggagaaaatgcttagagccaaatttatgagcctcttctaggaagtgtacagaaaccagaaacattattaaaatattctgagctgaactcacaataatagcttcttacttgtgcatttcaactataactgatcactggcttaaaccttacttgaaaatttgtataattgctgacagtctaaataagtagcactctgactaatgaatgagttataagtctattgaaaaatcctattttcatagattctgcagatgcagcaccagaagtcagctagaggagactaactaatgttaacaatccttctgaggtacttcttaattgacattttattgtattrcaattacgcaaactgtgccaagctgactaggactaagacaaaggagacagtagtttatatatttatttacttttgctcctaaatgattcctgagaaggagtaataaaatcctaaaccagagtatacaggctttgaaatgatatatgtaaaatccaataaggccagtgagaatcat

SEQ ID NO: 875429 - DNA, 635 bp, Homo sapiens
aaaattagtttgcttttatttttatgtacactgagacttttaaaggagtatcttaacagagttcaatgaatatttcttaaataaatgaataaatgtgtttttaaactgtttctttttccactttggagaaaatgcttagagccaaatttatgagcctcttctaggaagtgtacagaaaccagaaacattattaaaatattctgagctgaactcacaataatagcttcttacttgtgcatttcaactataactgatcactggcttaaaccttacttgaaaatttgtataattgctgacagtctaaataagtagcactctgactaatgaatgagttataagtctattgaaaaatcctattttcatagattctgcagatgcagcaccagaagtcagctagaggagactaactaatgttaacaatccttctgaggtacttcttaattgacattttattgtattacaattaygcaaactgtgccaagctgactaggactaagacaaaggagacagtagtttatatatttatttacttttgctcctaaatgattcctgagaaggagtaataaaatcctaaaccagagtatacaggctttgaaatgatatatgtaaaatccaataaggccagtgagaatcat

SEQ ID NO: 875430 - DNA, 617 bp, Homo sapiens
ttcccttgagatccagaacgtagacagtgatatctactctcaccagtcctattcaacaaagtactggaagttcatgccacagccatggggcaacagaaagtaaaaaagacatccaaataggaaaataagaagtcaaactatctttcttcactgatgatatgatctatacctagaaaactctaaagactccatcaaaaacctcctggaactgataaacaaytttaataaaatttcaggaaacaaaatcaacatacaaaaatcagtagcatttctaaacactaataacattcaagctgacagccaaatcaggaacacaatcccatttaaaatagccacaaaaaattaaaatatcctagaatacatctaaccaagaaggtgacagatctctacaaggagaactacaaaacactgctgaaagaaataaatgatgtcagaaacaaatgaaaaaaaaattctatgcccatggattgaaagaacaatattaaaataaccatagtacccaaagcaatacatagattcaactttatttctattaaaacactaaagtcatttttcacacaactaagaaaaactttctaaaattcatatggaatcagatatcagtccaagtagccaaa

SEQ ID NO: 875431 - DNA, 617 bp, Homo sapiens
ttcccttgagatccagaacgtagacagtgatatctactctcaccagtcctattcaacaaagtactggaagttcatgccacagccatggggcaacagaaagtaaaaaagacatccaaataggaaaataagaagtcaaactatctttcttcactgatgatatgatctatacctagaaaactctaaagactccatcaaaaacctcctggaactgataaacaactttaataaaatttcaggaaacaaaatcaacatacaaaaatcagtagcatttctaaacactaataacattcaagctgacagccaaatcaggaacacaatcccatttaaaatagccacaaaaaattaaaatatcctagaatacatctaaccaagaaggtgacagatctctacaaggagaactacaaaacactgctgaaagaaataaatgatgtcasaaacaaatgaaaaaaaaattctatgcccatggattgaaagaacaatattaaaataaccatagtacccaaagcaatacatagattcaactttatttctattaaaacactaaagtcatttttcacacaactaagaaaaactttctaaaattcatatggaatcagatatcagtccaagtagccaaa

SEQ ID NO: 875432 - DNA, 650 bp, Homo sapiens
aaataataaacttgccattcaactaaagagaatgattaactccttcaaaaagtaacatcttatattgatacccataaacatttatgaatatctttatgtagtcatatactattttagaattttttacagtaagaaatgtataagggaaatatagtgcctcaggttgtttgaatgaatgaagaaaattgtcatctatyaaagatacagaaattcagtcatcaatgttagaataattttttcatacatgttttaagtagcctttcaaaagccagcaggaaattgaaaactgacatcctgaaatatccacttatactgctgcacacatatacacacatgcatatacacacataatatgaagtgataaaaaaagacacccaagtgtgataattttctaaagtcaaacaatagtaacaatagatatatctatagaccgtttaatacatgctgaatattgttttaagcacttcatatgtacaggtatacctcagagatactgagttcagttccagaccactacaatgaagcaaatatcacaataaagcgagttacatgatttttttggtttccccttgcatataaaagttatatttacactgtactatagtctactaagagtgaaatagactattttttggtctaaaaatgtacgt

SEQ ID NO: 875433 - DNA, 650 bp, Homo sapiens
aaataataaacttgccattcaactaaagagaatgattaactccttcaaaaagtaacatcttatattgatacccataaacatttatgaatatctttatgtagtcatatactattttagaattttttacagtaagaaatgtataagggaaatatagtgcctcaggttgtttgaatgaatgaagaaaattgtcatctattaaagatacagaaattcagtcatcaatgttagaataattttttcatacatgttttaagtagcctttcaaaagccagcaggaaattgaaaactgacatcctgaaatatccacttatactgctgcacacatayacacacatgcatatacacacataatatgaagtgataaaaaaagacacccaagtgtgataattttctaaagtcaaacaatagtaacaatagatatatctatagaccgtttaatacatgctgaatattgttttaagcacttcatatgtacaggtatacctcagagatactgagttcagttccagaccactacaatgaagcaaatatcacaataaagcgagttacatgatttttttggtttccccttgcatataaaagttatatttacactgtactatagtctactaagagtgaaatagactattttttggtctaaaaatgtacgt

SEQ ID NO: 875434 - DNA, 671 bp, Homo sapiens
tctgcagcctcagcaacatctgtaattttttactttttaataacagccattctgactgttgtgagatgatatctaattgtggttttgatttgcatttctctaatgattagtgatgttgagcattttttcatgtgcttgttggccatatatgtgtcttcttttgagaagtgtcactttatgtactttgccctcttttaatttttttttattttttgctttctaatttgcttgacttgcttatagaattctggatataaggyctttgtcagatgcatagtttgtcaatattttctcccatcctttatgtgatctgtttactctgtggatagttacttttgctgtgaagaagctgctctttaatgtatttaagtcccatttgtcaatttttgcttttgttgtgattgctttaggtgtctttgtatgaaatatttgccagagcctatgtccagaatggtatttcttaggttttcatctagagctttttatagttttaggtttatttttaagactttaatccatctttagttgatttatgtatataatgaaaggaataggttcatgttcaatcttctgcatatagctagccagttatcccagcactacttattgagtagggaatcctttccccattgctcattttggtcacttttgtcgaacatcagttagttgta

SEQ ID NO: 875435 - DNA, 671 bp, Homo sapiens
tctgcagcctcagcaacatctgtaattttttactttttaataacagccattctgactgttgtgagatgatatctaattgtggttttgatttgcatttctctaatgattagtgatgttgagcattttttcatgtgcttgttggccatatatgtgtcttcttttgagaagtgtcactttatgtactttgccctcttttaatttttttttattttttgctttctaatttgcttgacttgcttatagaattctggatataaggtctttgycagatgcatagtttgtcaatattttctcccatcctttatgtgatctgtttactctgtggatagttacttttgctgtgaagaagctgctctttaatgtatttaagtcccatttgtcaatttttgcttttgttgtgattgctttaggtgtctttgtatgaaatatttgccagagcctatgtccagaatggtatttcttaggttttcatctagagctttttatagttttaggtttatttttaagactttaatccatctttagttgatttatgtatataatgaaaggaataggttcatgttcaatcttctgcatatagctagccagttatcccagcactacttattgagtagggaatcctttccccattgctcattttggtcacttttgtcgaacatcagttagttgta

SEQ ID NO: 875436 - DNA, 671 bp, Homo sapiens
tctgcagcctcagcaacatctgtaattttttactttttaataacagccattctgactgttgtgagatgatatctaattgtggttttgatttgcatttctctaatgattagtgatgttgagcattttttcatgtgcttgttggccatatatgtgtcttcttttgagaagtgtcactttatgtactttgccctcttttaatttttttttattttttgctttctaatttgcttgacttgcttatagaattctggatataaggtctttgtcagatgcatagtttgtcaatattttctcccatcctttatgtgatctgtttactctgtggatagttacttttgctgtgaagaagctgctctttaatgtatttaagtcccatttgtcaatttttgcttttgttgtgattgctttagktgtctttgtatgaaatatttgccagagcctatgtccagaatggtatttcttaggttttcatctagagctttttatagttttaggtttatttttaagactttaatccatctttagttgatttatgtatataatgaaaggaataggttcatgttcaatcttctgcatatagctagccagttatcccagcactacttattgagtagggaatcctttccccattgctcattttggtcacttttgtcgaacatcagttagttgta

SEQ ID NO: 875437 - DNA, 671 bp, Homo sapiens
tctgcagcctcagcaacatctgtaattttttactttttaataacagccattctgactgttgtgagatgatatctaattgtggttttgatttgcatttctctaatgattagtgatgttgagcattttttcatgtgcttgttggccatatatgtgtcttcttttgagaagtgtcactttatgtactttgccctcttttaatttttttttattttttgctttctaatttgcttgacttgcttatagaattctggatataaggtctttgtcagatgcatagtttgtcaatattttctcccatcctttatgtgatctgtttactctgtggatagttacttttgctgtgaagaagctgctctttaatgtatttaagtcccatttgtcaatttttgcttttgttgtgattgctttaggtgtctttgtatgaaatatttgccagagcctatgtccagaatggtatttcttaggttttcrtctagagctttttatagttttaggtttatttttaagactttaatccatctttagttgatttatgtatataatgaaaggaataggttcatgttcaatcttctgcatatagctagccagttatcccagcactacttattgagtagggaatcctttccccattgctcattttggtcacttttgtcgaacatcagttagttgta

SEQ ID NO: 875438 - DNA, 463 bp, Homo sapiens
agtaaagatctttcacctcttggttagttatattcctaggtatcttattatttttgtggctactgtgaatgggattgtgttcttgatttggctctcagcttcagtgtaggtgtataggaatgttactaacttttgtaaattgatttgtatgctgaaaccttgctgaagttctttatcagatttggagctttggggcagagactatggggttttctttgtttaatttccatataattgtatggtttcragtgattttcttagtatttatttctatttttattgctctgtaatccaagagtgtggttggcatgattttagtgtttttgactctgctgagaattctttatagctgattctgtggttgattttagaatatgtgccatatgcagatgagaagaatgtatatcctattgggttggaggctaagggttctatagatgtctgttaggtctgtttagtcaag

SEQ ID NO: 875439 - DNA, 463 bp, Homo sapiens
agtaaagatctttcacctcttggttagttatattcctaggtatcttattatttttgtggctactgtgaatgggattgtgttcttgatttggctctcagcttcagtgtaggtgtataggaatgttactaacttttgtaaattgatttgtatgctgaaaccttgctgaagttctttatcagatttggagctttggggcagagactatggggttttctttgtttaatttccatataattgtatggtttcaagtgattttcttagtatttatttctatttttattgctctgtaayccaagagtgtggttggcatgattttagtgtttttgactctgctgagaattctttatagctgattctgtggttgattttagaatatgtgccatatgcagatgagaagaatgtatatcctattgggttggaggctaagggttctatagatgtctgttaggtctgtttagtcaag

SEQ ID NO: 875440 - DNA, 630 bp, Homo sapiens
catggtgtgccagtattcctgatgtcccaatttctcagtgacagatgttccttctggctgtatctagtcagccatctgggatattctttaaaaaaaaaaaaaaaaaaaaaaagactacattcatccttcagtattcactggggattggttcctgggcctcctgtgtattccaaaatctagagatgcttaagtaccttatagaaaatggcatagtatttgcatataacctatgcacatctttatgaacactttaaatcatctcttggttacttataatacctaayacaatgtaaatgctatgtaaattgttgttatactgtattttaattttaattttattgttgtattttttttttcttttttaaatatttttcatctttagttggttgaatctatgagtgtggaacccaaggttatggaggactggctgtggatacctgaagaggtaaagatagtatttgccagaaaattcagttgaaacatttgttcaatgtttacaataaatatctacaggtatcatcctggggactttttaaataaaaattgaataaaaattctccaagtatagctcaaaagaaggcttactatattcatggtttagtaattaatcaggatattcatatcctaaat

SEQ ID NO: 875441 - DNA, 630 bp, Homo sapiens
catggtgtgccagtattcctgatgtcccaatttctcagtgacagatgttccttctggctgtatctagtcagccatctgggatattctttaaaaaaaaaaaaaaaaaaaaaaagactacattcatccttcagtattcactggggattggttcctgggcctcctgtgtattccaaaatctagagatgcttaagtaccttatagaaaatggcatagtatttgcatataacctatgcacatctttatgaacactttaaatcatctcttggttacttataatacctaacacaatgtaaatgctatgtaaattgttgttatactgtattttaattttaattttattgttgtattttttttttcttttttaaatatttttcrtctttagttggttgaatctatgagtgtggaacccaaggttatggaggactggctgtggatacctgaagaggtaaagatagtatttgccagaaaattcagttgaaacatttgttcaatgtttacaataaatatctacaggtatcatcctggggactttttaaataaaaattgaataaaaattctccaagtatagctcaaaagaaggcttactatattcatggtttagtaattaatcaggatattcatatcctaaat

SEQ ID NO: 875442 - DNA, 630 bp, Homo sapiens
catggtgtgccagtattcctgatgtcccaatttctcagtgacagatgttccttctggctgtatctagtcagccatctgggatattctttaaaaaaaaaaaaaaaaaaaaaaagactacattcatccttcagtattcactggggattggttcctgggcctcctgtgtattccaaaatctagagatgcttaagtaccttatagaaaatggcatagtatttgcatataacctatgcacatctttatgaacactttaaatcatctcttggttacttataatacctaacacaatgtaaatgctatgtaaattgttgttatactgtattttaattttaattttattgttgtattttttttttcttttttaaatatttttcatctttagttggttgaatctatgagtgtggaacccaaggttatggaggactggctgtggatacctgaagaggtaaagatagtatttgccagaaaattcarttgaaacatttgttcaatgtttacaataaatatctacaggtatcatcctggggactttttaaataaaaattgaataaaaattctccaagtatagctcaaaagaaggcttactatattcatggtttagtaattaatcaggatattcatatcctaaat

SEQ ID NO: 875443 - DNA, 728 bp, Homo sapiens
atatcctcattatccttcaatatgaaatatccattcccaaatctgcaccatttattagaatgtttcctccacgtgaattttcttcactgtcttcttcatgattacaaagacctattcatcaccctttcagtaagagattatatctctgccctgtcaaaaaaagtttccaattttctccagctaatatctttcttctctgaactgctctgaacttagaatttacattagtgtttacaaattttggcaacaaagagtatcaaggaacactgagagcacatcatagcatatttaagatcaaattatgactgcaacccttccatttaagggaagacccccaaaagattgcatagcatagaaatagatgcaaggtaccagtaagattcaatttcttaggttttaagatgtgttcattaggagggctggcaagatggccaaataggaacagctctggtctgcagctcccagcgagatcaacccagaaggacggtgatttctgcatttccaactgaggtacctrtctcgtctcattgggactggttagaaagtgggtgcagcccacggagaaagagctgaagcagggtgtgctgtcgcctaacccgtgaagtgcaatgggtcagagaactccctcccctagccaagggaagccatgagggactgtgccatgaggaactgtgcattccagcccagatattacaatgagatacagtctcattccagttagaatggtg

SEQ ID NO: 875444 - DNA, 610 bp, Homo sapiens
ttcttctctgaactgctctgaacttagaatttacattagtgtttacaaattttggcaacaaagagtatcaaggaacactgagagcacatcatagcatatttaagatcaaattatgactgcaacccttccatttaagggaagacccccaaaagattgcatagcatagaaatagatgcaaggtaccagtaagattcaatttcttaggttttaagatgtgttcattaggagggctggcaagatggccaaataggaacagctctggtctgcagctcccagcgagatcaacccagaaggacggtgatttctgcatttccaactgaggtacctatctcgtctcattgggactggttagaaagtgggtgcagcccacggagaaagagctgaagcagggtgtgctgtcgcctaacccgtgaagtgcaatgggtcagagaactccctcccctagccaagggaagccatragggactgtgccatgaggaactgtgcattccagcccagatattacaatgagatacagtctcattccagttagaatggtgatcatgaaaaagtaaggaaacaacagatgctggagaggatgtggagaaataggaatgcttttacactgttg

SEQ ID NO: 875445 - DNA, 602 bp, Homo sapiens
tacccattctatgcatgtaaaaaatactaatatgtgccccatgaatatgtaaaatattatacatcaataaaataataactacaaaatgtaatatgagttactttttttgtagatatataaaatgttattctaaaattcatatgaaatatcaaaggacccctgtagccaaaacaacttggaaaaaaccaagtttagtggcttcatgcacttcctgatttcaaaacttacyacaaacccatggtaatcataacagtgtggtaatggtataaagacagatacataggccagtagaatagaataaagagcccagaaacaaaccctcacataaatgtcaggaaacacacaacctcgattttattacacatttttcattcattacacacatattaatatttatacattacctcacattatcacaatgattttctacaaggatatcatgaccatttaatggggaaaggacaatttctttgacaaatggttttgggaaaactggatatccacagaacacatgcaaaaagaaattgggcccttaccttacaccatgtacaaaaattaactccaaattgatcagagacctaaacataaaagttaaaactaga

SEQ ID NO: 875446 - DNA, 602 bp, Homo sapiens
tacccattctatgcatgtaaaaaatactaatatgtgccccatgaatatgtaaaatattatacatcaataaaataataactacaaaatgtaatatgagttactttttttgtagatatataaaatgttattctaaaattcatatgaaatatcaaaggacccctgtagccaaaacaacttggaaaaaaccaagtttagtggcttcatgcacttcctgatttcaaaacttactacaaacccatggtaatcataacagtgtggtaatggtataaagacagatacataggccagtagaatagaataaagagcccagaaayaaaccctcacataaatgtcaggaaacacacaacctcgattttattacacatttttcattcattacacacatattaatatttatacattacctcacattatcacaatgattttctacaaggatatcatgaccatttaatggggaaaggacaatttctttgacaaatggttttgggaaaactggatatccacagaacacatgcaaaaagaaattgggcccttaccttacaccatgtacaaaaattaactccaaattgatcagagacctaaacataaaagttaaaactaga

SEQ ID NO: 875447 - DNA, 641 bp, Homo sapiens
aggcagtctgtgggatggaaaaaatacttgcaaatttaatatatgataagagattgatatctacaatacataaagaatttctgtaactggacaacaacaaaaaacaatcaacccaattaagaattggacaaaggactcaaacatatctccaacatatatatattcaaatgattaataagcrcatgaaaagattcttactgtccctagtcactagggaaaagcaaatcaaaacaaaatgagatatcacttcactctgttaagatgcctactgaagagcaaggtgcctggttaaaaacctatgtgtaatttttcaggccagactgtagacaacaacctgacaggcatcacaggggaaaattgccctctctacaccagatttaaggcagagccattttattacagtctctagagagagttgcaatcaagttctcagcctctcttgtctagtcatgctcatcacatatgtacactcctagccctggtgccttcattcttcaatctctttgtctgagaccttttgcaaaggttctcttcaagcccttctgccaaggcctcctaatgggagtaaggaggagaaaaatttgaaagcacttttccactctgactcagtacccagttcttttccacttctagctttccct

SEQ ID NO: 875448 - DNA, 641 bp, Homo sapiens
aggcagtctgtgggatggaaaaaatacttgcaaatttaatatatgataagagattgatatctacaatacataaagaatttctgtaactggacaacaacaaaaaacaatcaacccaattaagaattggacaaaggactcaaacatatctccaacatatatatattcaaatgattaataagcgcatgaaaagattcttactrtccctagtcactagggaaaagcaaatcaaaacaaaatgagatatcacttcactctgttaagatgcctactgaagagcaaggtgcctggttaaaaacctatgtgtaatttttcaggccagactgtagacaacaacctgacaggcatcacaggggaaaattgccctctctacaccagatttaaggcagagccattttattacagtctctagagagagttgcaatcaagttctcagcctctcttgtctagtcatgctcatcacatatgtacactcctagccctggtgccttcattcttcaatctctttgtctgagaccttttgcaaaggttctcttcaagcccttctgccaaggcctcctaatgggagtaaggaggagaaaaatttgaaagcacttttccactctgactcagtacccagttcttttccacttctagctttccct

SEQ ID NO: 875449 - DNA, 641 bp, Homo sapiens
aggcagtctgtgggatggaaaaaatacttgcaaatttaatatatgataagagattgatatctacaatacataaagaatttctgtaactggacaacaacaaaaaacaatcaacccaattaagaattggacaaaggactcaaacatatctccaacatatatatattcaaatgattaataagcgcatgaaaagattcttactgtccctagtcactagggaaaagcaaatcaaaacaaaatgagatatcacttcactctgttaagatgcctactgaagagcaaggtgcctggttaaaaacctatgtgtaatttttcaggccagactgtagacaacaacctgacaggcatcacaggggaaaattgccctctctacaccagayttaaggcagagccattttattacagtctctagagagagttgcaatcaagttctcagcctctcttgtctagtcatgctcatcacatatgtacactcctagccctggtgccttcattcttcaatctctttgtctgagaccttttgcaaaggttctcttcaagcccttctgccaaggcctcctaatgggagtaaggaggagaaaaatttgaaagcacttttccactctgactcagtacccagttcttttccacttctagctttccct

SEQ ID NO: 875450 - DNA, 585 bp, Homo sapiens
tttgtgagaatttgttacagcggcccataaaggtggggaaaaaggaagaaaggcatctatgtcaaagaagaaagcatgaactcacattctgtgcactttgcaaacaaatggtagctctttgtccaatagaaaacaataatgctgaagataataataggaacaactaataataataatgagcttaacacactttaaagtatttttaaagcttttaaatgatttgaagatgcagaatctcaatcattttctctttgtatatgtcagtaaattgacactgaagctagttacctctacccaatccaaaaattctgtagatagttaactggggggaggggaaagccaaacaatgccagacaatgcttagtracatattaaaaaaaaaaaaaaaaaaaaaaacaaagctagccacacaaacacaagtaaactaaccaacgtgtctcggtgtattagtttcctagggctgccattctcaagttattttatacgcttgcattttactgtgctttctctgtatttcctttgctaatgaattctctcttcctttcatcccacttgccccctcctaactcctattcatgctttatt

SEQ ID NO: 875451 - DNA, 585 bp, Homo sapiens
tttgtgagaatttgttacagcggcccataaaggtggggaaaaaggaagaaaggcatctatgtcaaagaagaaagcatgaactcacattctgtgcactttgcaaacaaatggtagctctttgtccaatagaaaacaataatgctgaagataataataggaacaactaataataataatgagcttaacacactttaaagtatttttaaagcttttaaatgatttgaagatgcagaatctcaatcattttctctttgtatatgtcagtaaattgacactgaagctagttacctctacccaatccaaaaattctgtagatagttaactggggggaggggaaagccaaacaatgccagacaatgcttagtaacatattaaaaaaaaaaaaaaaaaaaaaaacaaagctagccamacaaacacaagtaaactaaccaacgtgtctcggtgtattagtttcctagggctgccattctcaagttattttatacgcttgcattttactgtgctttctctgtatttcctttgctaatgaattctctcttcctttcatcccacttgccccctcctaactcctattcatgctttatt

SEQ ID NO: 875452 - DNA, 568 bp, Homo sapiens
tgtgattggggcagggggagcactaagtgggagggacttcctgtctcaggtccctgccatcttgactgacatgctgcagcccttgccaaaacccatgggtcagaatgaaagtaaagtgccgttgaaaaccttgcaatccacctttaaaactgccgggtgtagtaaaacaattgcttgccccaaataaatgacttatcattgctgttggttgtctgcgtttctctttaattataggmcctctttgaacgctcaaacacacagggcctttgtaagcttgaactccctgtctcacacacagtcctcccatacccatacactctctttcatttgcagagtataaacacccatctctcactcattcacataatgaatttcagctccttgtgtcccaatcaaggagaggcctcactggaattatgggcatctgagccatcttcatgttccaaggccccagggggcgcttccaagagtggatcctttatggggagaagataatgggcaaaaagtgctcttcactgatggaccagtcccagccttttctctccttggacaatagagttcttccctt

SEQ ID NO: 875453 - DNA, 675 bp, Homo sapiens
tgtatttccaagggttatttggaaccatagcataatggctgaggtcagatcagcctactcagtagagccctaatgatgtgactggaaataaatgaaaatatccaaaataatttgttattctcggattcagtgtgctcgtttatccactttcttagtttatattatcttatcagtatactattaattctactttaataataataataatactatctctgagcaccttttttcaaaagaagcatttcttcctgggactttgaacgaacgttcattcttagaaaggattttatttcaaacttataaaacagttatacaataaatcatctgtagatgtaaaattacatcatctggttatatttatattcatgactataatgtgtcttttttcacttcacataggtctgtgccgctgtcaacctcaacctttccaagcgacattttcatttagaatcttatcwttttataattattacttttcagaactcccagggagtgaacaaaagcttcctctttgtatttccattgttatgtttctttgaagaacaaattaaatttcaatcccagccaaaataaacttttaaatggcaaaataaatctagaattatgtgaaaaaaaatctagggaaagcctgactctggctatcacaagttcaggtgtatttaagataatttacta

SEQ ID NO: 875454 - DNA, 541 bp, Homo sapiens
gtatttgctgatcatttagaatagcttaccaagtaaaatatatgttagatggttttctacttacaacttacatagaagtaaacctgaaagaccagagagcaatttcttctaataataaattaaactattacctgcttctttttcatttttcagcttaaaggtggtcaaaatggacttaaaaaaagaaaatcagagaaagaaataacttccaattgcctgtttgcatgtattagtatggagatttgtcttttaacatttagagaaaaaattacttggaaawaaaagaggtgaaagcctttaatgtttctagacattctacttccatgcaacgtcctcagacagatgatggtgcttcccttttccacacagaaattgtaaactaaagagaaaactatttgggtataaagatcttcatgatgacctcttgctcttcttctcctcaaaatgctctcctcctcaaaaagttcaacttacacagtattgtgaaaatggggtgcccacccctctactttgttcatttttataatttatttaattatgc

SEQ ID NO: 875455 - DNA, 649 bp, Homo sapiens
taacattcagattcaccaggtctagctagggcctgagactcagcatttctaacaagctcccatgcaaacactgatgctgatgatcccaggaccatgcctagaataacaaggcactaaagcactaccaaatactagtcttcactttaaaggccgttttcttttccagctatatgagaatggagacaactatttgttgtccaaccattaggcaaaacaatgatgggaaacagggttatcaagaatcagtacaaagttctactatttacagtagagaactaaagattaaagacaaacattttcatacattcaatgccagatcatccaaaaatataaataagacataaacatgacaaaccactttgtacctttcaagttcatagttcwtaataatgataactggggagctgtgggggaaatcacctggaaggggagtgcttgccacatctgggcagtaacaatggggttaaatgaaagaatgcgatattcatgggcaaagaaacaaaagaagcctgcaaataataaagtcaggaatgagggaggcaacataaataagagtataaaaaaggatatgtattgaaaattgactgttctacaaataagaattttacaaggcaagtatcactttatttcatagatgaggacagtaagt

SEQ ID NO: 875456 - DNA, 659 bp, Homo sapiens
gacctttctctctggctgcccttaacattttttccttcgtttcaactttggtgaatctgacaattatgtgtcttggagttgctcttctcaaggagtatctttgtggtgttctctgtatttcctgaatgtgaattttggcctgccttgctagtttggggaaattctcctggataatatcctgcagagtgttttccaacttggttccattctccctgtcactttcaggtacaccaatcagatgtagatttggtcttttcacatagtcccatatttcttggaggctttgttcatttctttttattcttttttctctaaacttctcttctcacttcatttcattcatttcgtcctccatcactgataccctttcctctagttgatcacattggctactgaggcttgtgcattcatcacgtagctctcatgccttggttttcagctccrtcaggtcctttaaggacttctctgcattggttattctagttatccatttgtctaattttttttcaaagcttttaacttctttgccattggttcaaatttcctcctgtagctcggagtagtttgatcatctgaagtgttcttctctcaactcatcaaagtcagtctctgtctagctttgttccgttgctggtaaggagctgcattcctttggagga

SEQ ID NO: 875457 - DNA, 645 bp, Homo sapiens
aaaaacaaagattaatagattggacctaattaaactaaaaagcttctgcacagcaaaagaaataattggaagagtaaatagacaacccacagagtgggagagaatattcacaaattagcatctgacaaaggactcatccagaacctacaaggaactcaaacaaatcagcaagaaaaaaataataatcccatcaaaaagttggcaaagggcatgaatagacaattctcaaaagaagacatacaaatggcaaacaaacatatgaaaaaatgctcaaaatccctaattatcagggaaatgcaactcaaaaccacaatgagatactacctttytcctgcaagaatgaccataactaaaaaaattaaaaatcagatgttggcatggatgtggttaaaaggtagcacttttacactgatgacgggaatgtaaactagtacaaccactatggaaaatagtatggagattctttaaagaattaaagtagaactactgtttgatccagcaatcccactattggaaaagaagtcatatgaaaaaacacttgcatacgcatatttatagcagcacaatttgcaactgcaaaaatatggaatcaacttaaatgcccatcaaggggatgaagaaaatgtgatgtatatatagaccatg

SEQ ID NO: 875458 - DNA, 669 bp, Homo sapiens
ataaaaccctgagataaaacaggctatttaaattagatcatacaattattcaattgaggaagattttaaaataccctttataatagtatttttgcagccttaactcaatttaaagtcagcttcaaaaatttgtattctgaaagatattttaagaatttttaaatctaagattttattcctctgacattttcccctatgtgaagtgtcagtatacaagaaggcttttgtcctagcactcataaatagctaacaaagcaccttcaatgagccatgttaaagttgttttcccatgaggcttgtgcaataattttgcmattttgtagatgagaagactgggacaagaaacatttagcaacttgtctaaacctacaatataagaggtagatcccagactgaaacatacacagtctgactctaaagcctttgcaagtatcaaaaggcatctttctgatcctttagtgttcactccccagtacctttaatatttgccttcaaatttctttatttacttccatttttatcctacaataattaagtaggcatacttaaagaaaagttacaatataaataatattttaaaatatctacaactaatactaaaggggttactttattttatttaaaattttatttttagataagaatttaaaatatctgcaactaatatca

SEQ ID NO: 875459 - DNA, 582 bp, Homo sapiens
ccttaaccatctgtgattgcagcccagtaggtcttaacctcattttacccagcccttattcaagactgagttactctggttcagacgcctctgacaaaactagataaagtgattgagaggcatgatgatggctgagatgctttagagaatgtggtctgggaggctgtctccggagatgacattgaagctaagaccgaaaagaggctgtcactgagatctggagggatggtcccaggaaggaataatggtgagaacacaggtcctgagctgtgtgagaagcagaaaggcagccagggtcactggactatagagagtttggggccagtgctaggaaatragtcagagagagaggccaaatctggcttgtacatgtggtggggaaaacactttgtgcttaagaagtaattaccactaaaaaaaacaagaaaacaaaaaaagatggtgaaaccccatctctgctaaaaataaaaaatttagccagctgtggtggcacagacctgtaatcccagcttctcgggaggcagaggctcaagaatcgcttgaacctgcaaggcggaggttgcgtgagccaagatggcgcca

SEQ ID NO: 875460 - DNA, 579 bp, Homo sapiens
cctgggaggtagaggttgcagtgagctgagattatatcactgcattccagcctgggcgacagagcaagactctgtctcaaaaaaataaataaataataaagtaaataaataaaaagaaaacaacatcacctctaaccctacgccttaacgatgatcaacattaaaattttgaggamacagttccatattctgttaagacttaaaagcaatttagagatacttcaaatgaaaatctgactcaactatcttaacagacttgcctagtgtaatgtagcagagttagtctttgatactagatttgtaggtttaaaaatattttttgagtttctgtctacattttaatgataaaaattgaaattgagaagatgcatagtgtgcttatatatagatatttacaaatcatgtgaattcctatgggctactgatgtggacttggggaaaatgctggtaaaggtcaatgatttaaagatttagaaagtataattaagtggcaagtggcatcattagttgcataaattttcttatcaaaataaatattttggaattgtttaatgttcaaacggtttttgtgatatacca

SEQ ID NO: 875461 - DNA, 579 bp, Homo sapiens
cctgggaggtagaggttgcagtgagctgagattatatcactgcattccagcctgggcgacagagcaagactctgtctcaaaaaaataaataaataataaagtaaataaataaaaagaaaacaacatcacctctaaccctacgccttaacgatgatcaacattaaaattttgaggaaacagttccatattctgttaagacttaaaagcaatttagagatacttcaaatgaaaatctgactcaactatcttaacagacttgcctagtgtaatgtagcagagttagtctttgatactagatttgtaggtttaaaaatattttttgagtttctgtctacattttaatgataaaaattgaaattgagaagatgcatagtgtgcttatatatagatatttacaaatcatgtgaattccyatgggctactgatgtggacttggggaaaatgctggtaaaggtcaatgatttaaagatttagaaagtataattaagtggcaagtggcatcattagttgcataaattttcttatcaaaataaatattttggaattgtttaatgttcaaacggtttttgtgatatacca

SEQ ID NO: 875462 - DNA, 567 bp, Homo sapiens
aaataccatatgacctagcaaccccattactgggtatatacccaaagaaatataaatcattttattttaaagatacatgcacgtgtatgttcattgtagcactattcacaataaccaagacatggaatcaacccaaatgcccatcaacaatagactggataaagaaaatgttgtacatatatcccatggaatactatgcaaccataaaaaggaatgaggtcatgtcctttgcagggacatggatgaagctggaagccatcatcctcagcaaactaacacaggaacagaaaaccaaacaccacatgttctcactcataagtgggagctgaacaatgagaacayacagacacatggtggggagcaacacatactggggcctgtcgggggtaaggggaaaggaaggcataaggaagaatgctaatggatgctgggcttaatatctaggtgatgggttgataggtgcagcaaaccaccatggcacacatttacctatgtaacaaacctgtacaacctgcacatgtaacctggatcttaaaataaaagttggaaattaaaaaagtacaaaaa

SEQ ID NO: 875463 - DNA, 565 bp, Homo sapiens
aaagaggcaagagcaccttagggaatacaattttagatcaaaatattttcaaagcactcgattccgagacagagctcagagaggcttccagagcctccagcctgagcctgcttggtggcagggcttgcctcatcacccttcactttcagagcctctgaaagttcatctccttgtaaaatcaacatgacagcaaatgtgtctgctctgactgggaaaccctgagtaacttgttggaacccaggtggccataaatctctgtcctgagttatggccggagatgcaggaaacacgtggatgtggaggtccagtgmaagtcattctgctatttttagctcccactttctctcagagaaaactgggggctgacagccaggggctcggaagccatcagaagagccacgctgggcaggacagctcccctggggcacccggccggcctctgcagacataaactgggacaccttccccaaccctaagccagacacttctgctgtacacacactgtatttcctttgcaggaactactgcctcatgatagcatcttgtatactttatactcgcttct

SEQ ID NO: 875464 - DNA, 628 bp, Homo sapiens
aagtctaaaggtatttttacagaaatgaaaaaaaaaaccctaaaattcatatggaactagaaaagatctcaaatagccaaagcaatgttgaagaatgaagtgggagaaatcacacttcctgatttcaaattacgttacaaactccagtaaacaaaacagtttgatactggcataaaaataggcatatggatcaatagaaaagaataaaaagcccagaaataaacccaggtatacatagctaatggattcttgatgaggatgccaagaatacacaatggggamaggtcagtctcttaaataaatggtgttgggaaaactgaatatccacgtgcaaaataatgaaattgtatgctttcttatatgaaacacaaaaattaactcaaaatagattaatgatttgaatgtaatagctgaaaccatacaacttctagaagaaaacatgagggaaaagcttaagtgggacagcaaaggaaactatcaacagcgtaaaaagccaacttataggatggaagaaaatatttgcaaaccatatatctgataacgggttaatttccaaaatacataaagagattctaaactcaatagcaaaaacaaaaacaaaacagaagcaaacaaaaaacctggttaa

SEQ ID NO: 875465 - DNA, 570 bp, Homo sapiens
tactgagtatcaactaagaatatttggcatagacacatataagaatgactaaagcacttaaacgaagcggagacagtaatatttggattagaaattgcaaggaactggctgaattttctaatttataaatgaacttcatgttttatatacttgaaattaggtataattagcataattatcttgatgaggacattgaagatatgaaatgttaactttcytaagataacgtatataccaacttatttttgaaatttgattcaaagttttgaaacataaaaacacatgatctttcacctatcccacatatttcccaatagaaagccagggaactaagattcccagagtaaagatttgtgttcaatatgcagagtaaaacctataggttggtgctaaaataactgagtttttgccattactttcagtggcacaaactgcaattacttttgcaaaatcctattattatagaaaagattatgaagagaatttgtggcattatttttctcttattgccttagaaaagaagtgatttcagggatcagaaactgtttctacatgctcttgaggtctgtg

SEQ ID NO: 875466 - DNA, 690 bp, Homo sapiens
gatactgatttcatattttggatgtattgattttgaaatttcagtgagcctctaccttgatgtggctcaatcagcttttgaaagcagatctggatgtcaggagggagatcattttttcaaaattgtgagcagtcagcatgtacatgagccacatttatgcattatgtcatgcagagactgtagttatccacagagactgtatttattcctagagacaagtacaaaatcctgtaaaacaccaactccttttaaaggakttcatgaataaagagacattttctttttcattctgtgtaggagggtctcaagaagagactggtctcccaggagcccaggaaatacagagtttcaggaaggaaggtgaattcagtagtctgaagtgtagtagttgagtggagtttcacataggtgcactattttgagggtttgatgattggtagaaatttaataggacatttcaggggaattctgggaagagaatctaaacaggatttaggggtaaatgggattggggcattggtcatatacaccacagaccattcttaaagaaaatctggctttgaagggaagaacgatcataagcaatagttagaggtggatacaagaatgaatacaggttatacgggtgttttcttctcctatgtctaagaggtacacgaacatttttgtgttcttaagaaaagaaaaccg

SEQ ID NO: 875467 - DNA, 496 bp, Homo sapiens
catcagagcgaacaggcaacctacataatgggagactatttttgcaatctatccatctgacaaagggctaatatccagaatctacgaagaacttaaacaaatttacaagaaaaaagcaaacaacctcatcaaaaaatggtcaaatgatatgaacacacttctcaaaagaagacatttatgcagccatcagacctatgaaaaaacgcttatcatcactggtcattaragaaatgcaaatcaaaactacaatgagataccatctcacgccagttagaatggcgatcattaaagtcaggaaacaacagatgctggagaggttgtggaaaaataggaacgcttttacattgttggtgggactgtaaattagttcaaccattgtggaagacagtgtggcgattcctcaaggatctagaactagaaatatcatttgacccagcaatcccattactgggcatatatccagaggattataaatcattctactataaagacacat

SEQ ID NO: 875468 - DNA, 582 bp, Homo sapiens
tgaattgggtgtcagcagtagacaggatgagatgaggtaggatttgggatgtaatttgaatgtaatggtgacaggacttgctattgaagaagatgtttgaaaattcctatttttggtctaagaaataaagtaaatagtggtgctattccctgacatggtgtggactggcttgaaggagagttaatttgggagtaaaataaaatgagttctgttttagatgtcataagttagagatgcatattgaattgcaagtgagaatcatgtaggcttttatctatatctctctakaaagagtcaaggtagggggctataaatgtaaattctattgttatcaaagtatactgtagatcatattcaaagtcaggggactcgttgatattgtccatggtgagactatggacagagaaaagaagcagtctaaggactgagcccaagaacactccaacatttaaaagatggagaagaggattctgcaacaagattgtaagagtaggaagtcaattaaaagtagaacaaagcaagtatgtgatgctgaagccaacactaatatgtgtgatcccatgatcattaacaagctatgtt

SEQ ID NO: 875469 - DNA, 627 bp, Homo sapiens
gaattattcaggtcatcaaatgtaattttcaacttgcttaacctaatttaagtcagcatttgtagaatgtcacttgggtcaatacaagctcagaaggaaaaattaaaaatcaatgaacatcatagtgaacattttaattttcactttttaacctaatcctttttctgtatttggaggactgaatattaaagacccatttaaaaatatttagtttttcagaaacgtcactaatctatacaactattygcaataactacaggggaccggttgcactatttcctgtgtcaacagaagatctgaccttgttttccgatagcttagagattaagtgcagccctaatagaagaactgtacatcattttcaaaggaaggttttctggaggataatgctgagtttacagattcctactgtggttgaacctagtgtctatttaatcttatactccagatggccttttgtggccaaatgactgcaaatttaaaaatcaagaaatgtttaaatggaaagagttggccttggtaaggaagattggagatagaaggttattcatttttttttctgtgagtgaagcaaaagaatgcactgctattatgaatgttagcagattttaagatctttatggataa

SEQ ID NO: 875470 - DNA, 627 bp, Homo sapiens
gaattattcaggtcatcaaatgtaattttcaacttgcttaacctaatttaagtcagcatttgtagaatgtcacttgggtcaatacaagctcagaaggaaaaattaaaaatcaatgaacatcatagtgaacattttaattttcactttttaacctaatcctttttctgtatttggaggactgaatattaaagacccatttaaaaatatttagtttttcagaaacgtcactaatctatacaactatttgcaataactacaggggaccrgttgcactatttcctgtgtcaacagaagatctgaccttgttttccgatagcttagagattaagtgcagccctaatagaagaactgtacatcattttcaaaggaaggttttctggaggataatgctgagtttacagattcctactgtggttgaacctagtgtctatttaatcttatactccagatggccttttgtggccaaatgactgcaaatttaaaaatcaagaaatgtttaaatggaaagagttggccttggtaaggaagattggagatagaaggttattcatttttttttctgtgagtgaagcaaaagaatgcactgctattatgaatgttagcagattttaagatctttatggataa

SEQ ID NO: 875471 - DNA, 698 bp, Homo sapiens
ctgagattgtatatatgcccatttatagatatagatgtagatatatatagatagatgtgtaacattacacaaaggtaatttgaaaagaagtggaataggtgttctcagaggacgagattactaagagatgggagtagtttgaaagccttatgggacaaagtgcaagtttagctagggttgagaaatgaagtgagtacaggcagtctaggcagattaaagctgaatgtcatctaaatggagtgtgattaaatgcaagagggaagtgagatatagactgtacagtatattgcagtcctttctaaaagttttaattttttatggaaagaagacacaggtgtttgagaaagaagtgtgaatttcgagaagtttagaaatgcaaatcttttacatctcaccccawatctttctctatgtaatcttatgttttgtcttctactcatactctgtctgaactcctatctgaaccttcttcaaatatgcaggtttaaaaaaaaacagctctgaactgtttgagtattgtttttctcactgacatgtaactgggtttatttaaatgctttgcagacaaaactgtttttctctggaaactggtaaaggagttaagcacttggatgctggagccaaacttcctgaatttgaataattaattctctacaacttggctatgtgactatgggcaagttacttcacctctctct

SEQ ID NO: 875472 - DNA, 603 bp, Homo sapiens
aatcaaatactgaaatatatttaattaaccccaagaaaaacaggaaaagaagcaacagagaaaaaaatggtatacatataaaccaaacagtaagttataaacctaaacccaactattcaataatttatcaggaaaatgtaataattataaatgtctatgtgcctaataacagagcctcaaaaaactgaagcagattctgacaggactaaagaaggacatagaggttttaaacacctttctgagaattgaaagaacaaagaaaaatatatacatatgtacatacctatcttgattagattacagaatgaaatgattagtttytaagcagtgaatgttttaattttttccaataacatcacatttttaaaaagaaaacaatagtccatcctggctaacatggtgaaaccccgtctctactaaaaatacaaaaaaattagctgggcgtgggggcgggcgcctgtagtccagctactcgggaggctgaggcaggagaatggcgcgaacctaggaggcggagcttgcagtgagccgagatccagccactgcactccagcctggaggacagagtgagactctgtctcaaaaaaaaaaaaaaaaaaaaaa

SEQ ID NO: 875473 - DNA, 585 bp, Homo sapiens
ctggatcacatttttctataaatttccaaattgtggatttggcattcaagaaacatgctatgattgggctcctgcttaacttcatagtgttttccattcctagccccttaagaatccccatgctctgaccattttgtcaatcaacaacaaggacctcacatttgcagttgtctgttcatgtcattctttccttctttctagaattctgcttatcaaaattttaccccttattcagagccaagcatgggccactgtattctgctacccatctgatatggtttggctctgtgtcctcactcaaatatcatcttgtagctcccataattgctacgtgttgtaagagagacccagaggcagataattgaattattgaggtgggtctttctcatgctcctcttggatagtgaataggtctcatgagatccratggtttattattattattattattattattattatcataatactttgagtcctggtgtacatgtgcagaatgtggaggtttgttacataggtatacaagtgccatggtggtttgctgcacccatcaacttgtcatctacattaggtattcctaatgct

SEQ ID NO: 875474 - DNA, 683 bp, Homo sapiens
aaagcaggtgctggctcttaaaacttctgtctggaagagacacatgtcgcttctgctcacattttactgaccaaagcaaatcacagggccctgcctgagtgcagtagtgtggggaaatgccgtccttccacacagaggggcaccaaatayggatttggaaaaaggaatacagactaccataccatctgagaaaagtagattcttgaaagaatgatactagttaatgacaagtactctgcccagacctacccttatgtatttgctgggttgagagcctttcacagaagaaggggccaacaaacttcttgagcagaaaatgatagggtcaaagcaagaagtaagagttttggaaagttctagcttctgggaaaaaatgtggagcataaaagtacaaaagaattgagttattaactcaaggaaagtcagaaaatggctggattagaatagtggttggtacatagactttggagtcaaaccacctgttttcaaagtagaatgcactgctttccatttctctgatagtgggcaagttaattaatcaagtctcgcctcattcatctgtaaaacaaggaaagtgactgcatttacctcacagcattgttgttcaaatataatgcaagtgaagtggtcaggacagctggcacttggaaaataataaatgtcatctagtctaacataagagc

SEQ ID NO: 875475 - DNA, 640 bp, Homo sapiens
ctcaggagaaaagataatgaaattgaagccattgaaatagaaaccaacaaaaaattaatcacagaggggtaaaaaagattttaaaagaaataaagtaccagtaagctgtggaacagattcaagcagcttaatatayatatgccctgggagttctcaaaagaatggaaagaggggggaagatggaaaaaaaattttgaataagcaatatgcaaaaactttttggaatttgatgaaaactataagcccacagacacaataagattagaaaccaagcaccagaaaataataaatgtaaaacaatgcacatttataattaaattacttaaaactggtgattaagagaaaatcttaaaataagccagaggaagaaaagacacattgcataccactggggctcaggccacatcaccccaaaatatgccaggagaccagaatatgccaccgaggcatgttgattactttgagttaaatgaaactgagaaccagccaatacaggaaaagttcttcacctctcccctcaactttctaaaataaagcatacaactccccttttgtaaaggaaatttacatttataaaggacatttccattagtaaagttatctgtaccaatgacagagctgttcggagaaaacttttaac

SEQ ID NO: 875476 - DNA, 611 bp, Homo sapiens
aagtcattttccatccagctttgttctgttgctggcgatgagctgtgttcttttggaggagaagaggcactctgatttttagaattttcagcttttctgctcttgtttctccctatctttgtggttttatctacctttggtctttgacgatggtgacgtacagatrgggttttggtgtggatgtcctttctgtttgttagttttccttgtaatagtcaggaccctcagctgtaggtctgttggagtttgctggaggtccactccagaccctgttttcctgggtatcaccagcggaggctgcagaacagcaaatattgaagaacggcagatgttgctgcctgatccttcctctggaagcttcgtctcagaggggcacccagttgtatgaggtgtcagtcggccccttttgggaggcatctcccagttaggctactcgggggtcagggacccacttgagggggcagtctgttcgttctcagatctcaaactctgtgctgggagaaccactactgtcttcaaagctgtcagacagggacgtttaagtctgcagaagtttctgctgcattttgttcagctatgccctgccccagaggtggcgtctacagaggcag

SEQ ID NO: 875477 - DNA, 517 bp, Homo sapiens
aatagatatctacacaacatactactcaacaattacagaatatgcattcttcccacttgcacatgaacatactctaagattgaccatgtgcaatgtcattaagcaagtctcaataaatttaaaaaaactaaatcataccaagcatattctcagatcacagtggaataaaaatagaaatcaataccaaaaggcactctcaaaaccacacaattacatggaaactaaacaatttktcctgaataaattttgagtaaacaacaaaattagggcagaaataaaaaaaaatctttacaaaaaatgaaaatgcagacacaacataccaaaatgtctgatatgtagcaaaagcagtgttaagaggaaagtttatagtgctaaatgcctacatcaaaaagaaagatctcaaattgacaatttagccttgcatctaaaggaactataaaaacaagaacaaactaaacacaaagctagcagaagaaaaaaaataactaaaagcagagcagaattaaataaaactgag

SEQ ID NO: 875478 - DNA, 641 bp, Homo sapiens
gtgagggatagcattaggagatatacctaatgctaaatgatgagttaatgggtgcagcacaacagcatggcacatgtatacatatgtaactaacctgaacattgtgcacatgtatcctaaaacttaaagtataataataataatrataataataataaaaataaaataaaagaactagagaagcaagagcaaacaaattcaaaagctagcagaagacaaggaataactaagatcagagcagaactgaaggagataaagacacaaaaaaccctaaaaaatcaatgaacccaggatctggttatttgaaaagatgaacataatagacgtctagctagaccaataaagaagaaaagagagaagaatcaaagagacacaacaaaaaatggtaaagggaatatcaccactgatcccatagaaatacaagctaccatcacagaatactataaacacctatatgcaagtaagttagaaaatctagaagaaatggataaattcctggatacatacacccttccaaaactaaaccaggaagaagttgaatccctgaatagacaaataacaagttctgaaattgaaacagtaattaatagcctatcaaccaaaaaaagcccaggaccaggtggactcacagacgaattcta

SEQ ID NO: 875479 - DNA, 598 bp, Homo sapiens
tttgtagctgacaaaactaatgtcagtttctgagtcctgataaattttcattgcatccccaaagtaactatgcaataaaaaaataagtacacagcttctcctgatcttgatttttatgagttatacatgtttatttctttgtttaataataataataatagctaaycttgattgagcactaaaacccagaccctgttcaagctttttaaaaatttaatactcaacatcaatctgagatgttacaacaattaacctcagaaataatgaagaatttactgaagggcatctagttgatgatggctggaggcaggattttttttttttttttttttactgttattttaagttcaggagtacacgtgcaggatgtgcaaacttgttacataggtaaatgtgtgtcatgggggttggttgtacagattatttcatcgcccgtgtattaagcctagtatccattagttatttttcctagttccctccctcctcccaccctttatcctccaatagacctcagtgtgtgttattcccctctatgtgtctgtgtgttctcattatttagctcccacttataagtgagaacatgaagtatttcattttc

SEQ ID NO: 875480 - DNA, 624 bp, Homo sapiens
gccaacagtctggcctttaagggtattagaatctgactgatgctgctatagtttgcaggaagcccttgactttgcagatccaaaaatctactggacgttgatttgtttctaagggactgacacgtgataacccaatttcaaatcattaacgtgtaaaccatgctttcaaagcatttytgtacaaagaaagaattgtttctgttaactttgtttaagcccaagatagcttgggtgtataaattaggtctaggggaagaaatggtgataaggaattttcttcctggtccccatgatattagcatttacttcttttccccttcaggtgcagtgcagattatcaagaagtgagcaggtaaacactacatttttttctctttgaggttttttttactatatttcaccaatactatacacttatattaatattgtctttctataatacaattactatttcagcttctcattagtcagcttcagctatttcactctaaagcattagtttacacttcattgtgttacacctccagtgatataacagaactgagaacatgaggaaatggtccttgtccaggctctgcctccgattgccatgctgccttggacaaataatttaatctttctgag

SEQ ID NO: 875481 - DNA, 624 bp, Homo sapiens
gccaacagtctggcctttaagggtattagaatctgactgatgctgctatagtttgcaggaagcccttgactttgcagatccaaaaatctactggacgttgatttgtttctaagggactgacacgtgataacccaatttcaaatcattaacgtgtaaaccatgctttcaaagcatttctgtacaaagaaagaattgtttctgttaactttgtttaagcccaagatagcttgggtgtataaattaggtctaggggaagaaatggtgataaggaattttcttcctggtccccatgatattagcatttacttcttttccccttcaggtgcagkgcagattatcaagaagtgagcaggtaaacactacatttttttctctttgaggttttttttactatatttcaccaatactatacacttatattaatattgtctttctataatacaattactatttcagcttctcattagtcagcttcagctatttcactctaaagcattagtttacacttcattgtgttacacctccagtgatataacagaactgagaacatgaggaaatggtccttgtccaggctctgcctccgattgccatgctgccttggacaaataatttaatctttctgag

SEQ ID NO: 875482 - DNA, 624 bp, Homo sapiens
gccaacagtctggcctttaagggtattagaatctgactgatgctgctatagtttgcaggaagcccttgactttgcagatccaaaaatctactggacgttgatttgtttctaagggactgacacgtgataacccaatttcaaatcattaacgtgtaaaccatgctttcaaagcatttctgtacaaagaaagaattgtttctgttaactttgtttaagcccaagatagcttgggtgtataaattaggtctaggggaagaaatggtgataaggaattttcttcctggtccccatgatattagcatttacttcttttccccttcaggtgcagtgcagattatcaagaagtgagcaggtaaacactacatttttttctctttgaggttttttttactayatttcaccaatactatacacttatattaatattgtctttctataatacaattactatttcagcttctcattagtcagcttcagctatttcactctaaagcattagtttacacttcattgtgttacacctccagtgatataacagaactgagaacatgaggaaatggtccttgtccaggctctgcctccgattgccatgctgccttggacaaataatttaatctttctgag

SEQ ID NO: 875483 - DNA, 648 bp, Homo sapiens
tggattcatccgatgatagggcaaagtagtggactgcagaataagaaagtcccagcagaaaggctgagttgcagcctgctcaccagagcgagacattttctgttcaactttggagatttaataatagctttaggatggtcactactggttgcgtggctgaaatgctctggcctgggagctgtggggaatttacaaagtcatgagcttgatgggtgagaatcttaatagaaattgaaatttgactctgtcagaggttgaattgtgtcccctcaaaaaagatatgctggtgtcctaacctccaatacctcgggatgtgactttagygggagatagggtctttacagaagaaatcaagttaagatgatgccagggtattccctaactcagtgggactgacgtccttatagaaaggggaaatttgaacacaaagacagcctacatatacagggggaatgccatgtgagtgtgaagacagtttggaacagatatttccttcacagtcctcaaaaggaactcaccctgctgaccctcaggttcagctttctagcctccagaattataagacaataaatttctgctgcttaagctactcagattgtggcacattattacggcagtcctggaaaactaatacaggctcatgctcct

SEQ ID NO: 875484 - DNA, 648 bp, Homo sapiens
tggattcatccgatgatagggcaaagtagtggactgcagaataagaaagtcccagcagaaaggctgagttgcagcctgctcaccagagcgagacattttctgttcaactttggagatttaataatagctttaggatggtcactactggttgcgtggctgaaatgctctggcctgggagctgtggggaatttacaaagtcatgagcttgatgggtgagaatcttaatagaaattgaaatttgactctgtcagaggttgaattgtgtcccctcaaaaaagatatgctggtgtcctaacctccaatacctcgggatgtgactttagcgggagatagggtctttacagaagaaatcaagttaagatgatgccagggtattccctaactcagtgggactgacgtccttatagaaaggggaaatttgaacacaaagacagcctacatatacagggggaatgccatgtgagtgtgaagacagtttggaacagatayttccttcacagtcctcaaaaggaactcaccctgctgaccctcaggttcagctttctagcctccagaattataagacaataaatttctgctgcttaagctactcagattgtggcacattattacggcagtcctggaaaactaatacaggctcatgctcct

SEQ ID NO: 875485 - DNA, 596 bp, Homo sapiens
ataataataaataaaaattaaaaaaaagaataatcaatatcccctacccaagccaaaaaaatacgtacgtttaggggaagactggataaagtttgcggttctgttaggaagtaggagtaataaatatgaatgttgtaaaagcaactgacaatatcttccacatttattttgcaatttattttttgtgtagcgatagagaaaaatgcaagaaaaacatacatataactataacctaagatgtaacatagtaaatgcacagcctcaaaaatcagtcagagttgctgttagagttgaaacttgcctttttttcttgaattaaacttttacaattctggatgagtatgtcttgatcttcagaaattgttactttgtgagtgctagttttgtacagattcctgaattcctctggaatcatgttttattttggtttcatttctgcatatcctcacaatgyctgctaacctttaaaatcctattgaaaagttgtctctgatttatggccattttccacaaagaaggaaaagtttcaatcactatagaggaattaccatatattcagtgaagagagaataataaaagtgcattgagatgtgggt

SEQ ID NO: 875486 - DNA, 626 bp, Homo sapiens
agtttttagaagattcagtgagagccaagttttcttttctcactgtaatcatagggattggttcattaggtaaattaagaaaatgaaattaaaaattaaaacagaaaaggaactccaaaaacaaaaacaacaaaacaaaattcatttatcctcttcttagaatttcagccaaataaaggtatatccaagttgaacctcccaatctaaaaatctgaaatctgaaatgctccaaaatccaaaactttttgagcaccaatataacaccataagtgaaaaattccacatctgactgcatgtggcakggtgcagtcaaatgcattcgaaactttgtttcatgctccaaattatttaaaatcatgtataaaattaccttcaggctacctgtataaagtgtatataaaacgtaaatgaatttcgtgtttagacttgggtcctatcccctatcctgaagatacttcattgtgtttatgtaaatattccaaaatacaaaaacaaaaaccaaaacccaagtttaaaatacttctggtcagtcccaagcactgaagataagggagactcaacctgtatcacaaccagcattccaccttggcaaggccaacagcaagcttaaattacatatgctaata

SEQ ID NO: 875487 - DNA, 617 bp, Homo sapiens
tcataagcaagggagaaataaaatcctttacagacaagcaaatgctgagagattttgtcaacactaggcctgccctaaaagagctcctgaaggaagcactgaacatggaaaggaaaaaccagtaccagccactgcaaaacattccaaattgtaacgaccattgacactgtgaagaaactgtatcaagcaatgggcaaaataaccagctagcatcataatgacaggatcaaattcacacataacaatattaatcttaaatgtaaatgggctaaatgccccaattaaaaggcacagactggcaaattggatgaagagtcaagacccatcagtgtgctgtattcaggagacctatctcatgtgcaaaracacacataggctcaaaataaagggatggaggactatttaccacgcaaatggaaagcaaaaaaagcaggggttgcaatcctagtctctgataaaacagacttgaagccaacaaagatcaaaaacgacaaagaagtgcattacataatggtaaagggatcaatgcagcaagaagagctaactatcctaaatacttatgcacccaatacaggagcatccagattcataaagcaaggtgttagagacctacaaag

SEQ ID NO: 875488 - DNA, 582 bp, Homo sapiens
gtgtagtctagtttgggaatacttgaatttatttgtttctcctcctgtggtgatacacctttctgatttgtgtctccttgaaacttttaagctgtgtgtatatcttggaacctggtcatcttcatactctgaagcccccaaagtgttcagaacagtgtgttggttccctcagtatctccacctagttctgtatgattctccttgtgatttcaccatggtctctttttttwttttttttttttttttgcctcactgacctcagcagatctgctttgcctggacactaacaattaatttgctgtcttgttttaaaattagaaaaaaaatttaaagcaaagcccctctgctttgttgaggtagagacagaacattcagcaccagaatagattatcatgttagtttctcctcacagtggggctctgtgtagcttctctggactgagcaggtcttggttgaccagctctgtttttttttttttaatggattcatttctgaggatcatagcaagaaggaaatggaagtgaggagtgagaaaactcctcctgcagcagccttcactcaggcctatgggaagagttatag

SEQ ID NO: 875489 - DNA, 619 bp, Homo sapiens
tgatattagaagtcaggatagttgttgttctgggagtaataaagtgacaaggaggtgcttttagagcgctggtactgctctgtttcttacaggtgctggctacagggccattgttcagttaaagttaagtttattgaactgtatacttatgctttatgcaatttatgtacatatgttatagtatttctgtaacttttttytttaaaggcaaatgggcatttttcaagagacagggaactaatactcatcatttagatagaaattccctgctttcatcttttgttaggaaaaataagaattttggaagtgctcctcttttgtaaaatcttaatcaagtaatgaacgaaaatagtcaatacaacaggaaaagagaggaacagaagcctcaaaagatgaattcctatcaagcagtaaacagttcttttccagaactctttgtgacttataattctagaaggtccatcagaggcctcccatttctattcagaaatgcacttctaaagttagacagttgtcacagtcttagggagcaatgagttcacaatttcaatttattatcaaaatatttccatctgatgacaaacctgaaaagacaggagatgcagagctacataggtgc

SEQ ID NO: 875490 - DNA, 661 bp, Homo sapiens
atgtatgatatataacctctgaacacactaagtcatgtatgatatggcatcatattttggggtcatggtgctaaaaagtttagaaacctcccatctagtccaatcacacacataggagggaacaaactaatgcataggaaggtgaggtgatttttctaacgtcagaatttgtctgaaaacaacctcccaccaccatrctgctttcttggtatccatgacttcaacctggtgatatgatatgttcaggagttgaatctaacacatagcatggtgtgtttggggttatatatgatacacgacatgaggtgttcagggattatatacgaaatccctttttctggaacccagtttgaagatccctattattaccctactttaagcataaaagttgaaaaagtttggcgagggtatgcccaaaagtgagcattaatttatctatttcttattctaaaagatattacctaatcttaaagccatttgcaaagcaggtaataaaatatgctttcaacctaaatttttctatttccctaatattttaatgttgataaagacagacataaaaatagagtgttgtctcagtgtcattcttaccatagtgctcatgttcttcgagtctggtatcagcaatctcctctaaagcagaaacaaaaagtgttactac

SEQ ID NO: 875491 - DNA, 661 bp, Homo sapiens
atgtatgatatataacctctgaacacactaagtcatgtatgatatggcatcatattttggggtcatggtgctaaaaagtttagaaacctcccatctagtccaatcacacacataggagggaacaaactaatgcataggaaggtgaggtgatttttctaacgtcagaatttgtctgaaaacaacctcccaccaccatgctgctttcttggtatccatgacttcaacctggtgatrtgatatgttcaggagttgaatctaacacatagcatggtgtgtttggggttatatatgatacacgacatgaggtgttcagggattatatacgaaatccctttttctggaacccagtttgaagatccctattattaccctactttaagcataaaagttgaaaaagtttggcgagggtatgcccaaaagtgagcattaatttatctatttcttattctaaaagatattacctaatcttaaagccatttgcaaagcaggtaataaaatatgctttcaacctaaatttttctatttccctaatattttaatgttgataaagacagacataaaaatagagtgttgtctcagtgtcattcttaccatagtgctcatgttcttcgagtctggtatcagcaatctcctctaaagcagaaacaaaaagtgttactac

SEQ ID NO: 875492 - DNA, 657 bp, Homo sapiens
aaaaggtataaaactgaatctatttctttgggttgccagcttttaaccaatgacctgtcttttcatgccctagtaacactgtgttttaaatatttcagctttaaaatatgtttcataatctggggccaggagcaatggctcagccctgtaatcccaacactttgggaaccctaggggggcggatcacttgacgtcaggaggtcaagaccagcctgggcaacatggcaaaaccccatctctactaaaartacaaaaattagccaagacatggggcgaaaccccatctctactaaaaatacaaaaattagccaaggctgaggctgaggcaggagaatcacttgaaccttggaggcggaggttgcactgagctgagatcttgctgctgcgctccagcctgggcgacagagacaaaaatgaataaatacaataataaaatctgtatgccttgttccttttattattcttattttcataatgattttggctattctggcatgtttaactttccttttcaattttcaaatcaagttatttaatccccatccccacccctcacagaaaagaaggtgaaggaggaggaagtggagaaggaagaagactcctgttattaattctaactaacttgcatgaagtgtagagattaatttaggaatgagt

SEQ ID NO: 875493 - DNA, 676 bp, Homo sapiens
ggatgcaaggctggttcaacatatgcaaatcaataaacataatccatcacataaacagaaccaatgccaaaaacaacatgattatctcaatagatgcagaaaaggtcttcaataaaattcaacatcccttcatgctaaaaactaaattaactaggtattggtggratgcatcgcaaaataataagagctatttatgacaaacccacagccaatatcatactgaatgggcaaaagctgaaagcattccttttgaaaaccagcacaaggcaaggatgccctctctcaccacccctattcaacatagtattgaaagttctggccagggcaatcaggcaagagaaagaaataaaggtattcaaataggaagacaggaagtcaaatcgtctctgtttgcagatgacatgattgtatatttagaaaaccccatagtctcagcccaaaatctccttaagctgataagcaacttcagaaaagtctcaggatacaaaatcaatgtgcaaaaatcacaagcattcctatacaccaataacagacagagagccaaatcatgagtcaattcccgttcacaattgctactaagagaaaaaaatacctaggaatacaactcataaggaatgtgaaggacctcttccaggagaactacaaaccactgtttaaggaaataagagaggtcaca

SEQ ID NO: 875494 - DNA, 676 bp, Homo sapiens
ggatgcaaggctggttcaacatatgcaaatcaataaacataatccatcacataaacagaaccaatgccaaaaacaacatgattatctcaatagatgcagaaaaggtcttcaataaaattcaacatcccttcatgctaaaaactaaattaactaggtattggtgggatgcatckcaaaataataagagctatttatgacaaacccacagccaatatcatactgaatgggcaaaagctgaaagcattccttttgaaaaccagcacaaggcaaggatgccctctctcaccacccctattcaacatagtattgaaagttctggccagggcaatcaggcaagagaaagaaataaaggtattcaaataggaagacaggaagtcaaatcgtctctgtttgcagatgacatgattgtatatttagaaaaccccatagtctcagcccaaaatctccttaagctgataagcaacttcagaaaagtctcaggatacaaaatcaatgtgcaaaaatcacaagcattcctatacaccaataacagacagagagccaaatcatgagtcaattcccgttcacaattgctactaagagaaaaaaatacctaggaatacaactcataaggaatgtgaaggacctcttccaggagaactacaaaccactgtttaaggaaataagagaggtcaca

SEQ ID NO: 875495 - DNA, 676 bp, Homo sapiens
ggatgcaaggctggttcaacatatgcaaatcaataaacataatccatcacataaacagaaccaatgccaaaaacaacatgattatctcaatagatgcagaaaaggtcttcaataaaattcaacatcccttcatgctaaaaactaaattaactaggtattggtgggatgcatcgcaaaataataagagctatttatgacaaacccacagccaatatcatactgaatgggcaaaagctgaaagcattccttttgaaaaccagcacaaggcaaggatgccctctctcaccacccctattcaacatagtattgaaagttctggccagggcaatcaggcaagagaaagaaataaaggtattcaaataggaagacaggaagtcaaatcgtctctgtttgcagatgacatgattgtatatttagaaaaccccatagtctcagcmcaaaatctccttaagctgataagcaacttcagaaaagtctcaggatacaaaatcaatgtgcaaaaatcacaagcattcctatacaccaataacagacagagagccaaatcatgagtcaattcccgttcacaattgctactaagagaaaaaaatacctaggaatacaactcataaggaatgtgaaggacctcttccaggagaactacaaaccactgtttaaggaaataagagaggtcaca

SEQ ID NO: 875496 - DNA, 658 bp, Homo sapiens
gagtaaaataaaatactaagaagtagtattcattaatactaacaaatagataagttttaaataatgtgtttaggacagggcaattaagagtcattgacaagagagtgaagatacggttctggccttgcaaaactttttaagagtgcttcattctggagataaaagaaacacaacttgcaaatatataaaccggtgggaaaacctaagattaaaactatttcactggtataacaaatagagtagagttttataaggaacctcttcaaatgatcagtggctcagttttgaatcattttgggatragcaattctacatagatcagaaatcagctggctgttaatccagatcttatgttggttaatatgagaaagtattgggtgtttgtttgtttcttgaatcagtgaaaacctttataatcctgggatggcatcaacataaattctagtataattttcaggttaaattaaaacaaatatttttataaccctataaagctatttaaaaacatatgtaggaataataaagaaataaatcagagcatagattattttgaatagtataattataggaataagtttagtaaacattacaattatagttattttgtctactttaaggtatttatagtgttcaaacgtttcagccacattaaaattct

SEQ ID NO: 875497 - DNA, 612 bp, Homo sapiens
caaagcatgtactcagttcttagcagatataagggttattgtattcacctacttgtctcccccatttagtacaaggtcctcaggagaaggagccttgtcttatacatctttgtttcttggcatcttagaagtgtgtctggcatattaaatgaataactgctagataaatagctaaggaaagatttgatacatatcatatattatattgaaattgcacaggagtataaaggacagacttttggaaaaagtgaatgtcaagtgtaaaagacacataaatataatgtattagttcatttacatgctgcttataaagacatacccgagactgggaataaaaagaggttgaattggacttaacagttccatatggctggggaggcctcagwatcatggtgggaggtgaaaggtacttcttacatggtagcagcaagagaaaataaggaagaagccaaagaggaaacccctgataaacccatcagatctcgtgagacttattcactatcaggagaatagcacgggaaagatcagctaccatcattcaatcacctccccctgagtccctcccacaacatatgggaattctgggagatacaattcaagttgagatttggg

SEQ ID NO: 875498 - DNA, 671 bp, Homo sapiens
acagattataccatttttaagtgtagaatttagtggtagtaagtatagagagaaccttaaaagcagcaagagaaaagtgacttctcatgtgcaagggagcctctagaagattatcagtggatatttcagcagaaaccctgcaggccagaaggtggtgggatgatacattgaaagtactgaaagagtaaagcctgccaactgagaatactatatttgacaaaactgtccttcaaaagtgaaggagaaattaagacattcccagataaataaaagctgaaggagtttattaccactagacctgaccaataagaaataataaaggggccrggcacagtggctcatgtctgtaatcccagcactttcgggggccgaggcaggtggatcacctgaggtcaggtgttcaagaccagcttgaccaacatggcgaaaccccatctctaataaaaatacaaaaattagctgggtgtggtggcacgcacctgtaatcctagctactcaggaggctgaggcaggagaatcacttgtacccgggaggtagaggttgcagtgagctgagatcacaccactgcactccagtctgggcaacggagcgagacttcatctcaaaaaaaaaaaaagaaacaataaagggagtccttcaagttgatatgaagggatactagacagttgct

SEQ ID NO: 875499 - DNA, 620 bp, Homo sapiens
gatttaaaaaagttcacaaattagtagaatttaaacaacacactctcaaacaaccaatggatcaaagaaatcacaaagaaattataaaattcttaaagacaaatgaaaatgaaagcacactatatccaaacttatgggctgtggccagttgtggtggctcacacctgtaatcccagcactttgggagactgagggagtggatagctagaggtcaggagttcaatttcagccaggccaacatggtgaaaccctgtctctactaaaaacacaaaaattagctgggagtggtggtacgtgcctgtagtcccagctacccaggaggctgaggcatgaraatttcttgaacccaggaggcagaggttgcaccactgagctaacaccactgcactccagcctgggtgacagaatgagactctgtctcaaaaaacaaagaaacaacaaaaaaacacaacttatgagttgtggtgaaaggagtgctaaggaggaaatttatagctataaacacattaaaaaaagaaacacctcaattcaacaacataagtttacacattaagaaactagaaaaagaagaataaaactaaacccaaagttagcagaaggaaggaaacaatagagatcag

SEQ ID NO: 875500 - DNA, 619 bp, Homo sapiens
tacatgctccatttgaaagtcattccttatggcatttatatatagttttaaccattatatttttggtttatgtatatttttcagtacatgtatgctttcaggtattgtttctaatttctaggaattgaaccaaatttaacattgaaagaggttaggttttaccttgtttcttgtttagaattggtgatcctgacttttaataatcgccattctgactggtgtgagatggcatctcaytgtggttttgatttgcatttctctaatgaccagtgatgataagctttttttcatatatttgttggctgcataaatgtcttattttgagaagtgtctgtttatatcctttgcccactttttgatggggttgtttttttcttgtacatttatttaagatccttgtagattctggatattacatctttgtcagatgagtagattgaaaaaattttctcccattctgtaggttgcctgttcactctgatgctggtttcttttgctgtgcagaagctctttagtttaattagatcccatttgtcaattttggcttttgttgcaattgtttttagtgatttagtcatgaagtctttgcccatgcctatgtcctgaatggtattgttta

SEQ ID NO: 875501 - DNA, 595 bp, Homo sapiens
gctctacagctcaaaaagatttcacagaagtcatgctaaatgatttcactaaaggaaaacagcattggtaagtagattcagtctctccttaacatggtagctttttggacactctgctttggttttgaccttcaaaatttccttttagaaattagcactctactacttactaccaaactcctacatytagaacagtaggtactaggtgtcatagttttggcccagcaagcactactcaagcatgtccatcatggctaagaggatactgggataatatggaatttggaagaaagattgattagggaggcaaacaactgacaggcaatgataaaaaacattcccatcagaggacacggggatggagactgagaatattttcaatagatatttagatgattgaaagagcataaccagataccgtagttaccaacattttctccgagtattgagtatcgcttgctttcttttagtgctgatcattcccattaaagattaaatttcccagtatcccttgtagctgggtgttgacatgtaaccaagttcaggcctgtgggatacaagtagaagtaatgtgtgatgactttcaggtgaattc

SEQ ID NO: 875502 - DNA, 647 bp, Homo sapiens
agaggatcacagaaatgatagaaattttcaatttttgttgaatcccaagtaatcataggcaggggggatttctcaacaggttatgggaggattgtaccggaaatgaatgttgaagaaacttctttcctcccatttctattgaggtaatttctttctttagctcagttgtttaaatctatgacagctgcataggaactgagaactaaaataatcttttagcattgcagccagctattatttttccttcccctaaccctctcatattggaaaaataacctcattttttctcggttgctgaccacactcattctgcatgtatgctttgcgctggggcctctgagtgtccctaggaccgtaatcctggtcccaaaacaggcaccaaaattgagctgctcaaacccttttctgggaattttggagatgaggctggagggaatataatcttactctctttctagatgcagtgttcataaacattgtgtgtgtgtgtgcacgygtgcatgtgtgtgtatgtgtgtgtgacaaggatcacttaggtgaagtctatgaaccccttcttggaataatatttctataggaacataataacatacttgggattgtaaaggaccccatttttattaaaatttatcaaaatataacagaaa

SEQ ID NO: 875503 - DNA, 574 bp, Homo sapiens
actaaatgatattgttagtgatctatcattttcattcattcaacaaatatatatggagccactgtgtgccaggtatattctaaaagctatggattttgtgggtatgaaaatgaaagggacaagaatccttgcccttatgaaacttaaattccagtggagggagcctgacaggaagccaaatagagaagtaaaacatagagtgtgttgggaggtcacaagcagcaagaaragaaacagagcacagaagaagcggagtatgccacgcggagggcaaggtacaattttaaatagggtgggaattataggtgacatgtgcgcccccattaagaaaacgtttattgacatcctattttccagtgcctcagaatgtgatatttggaaacagatttgttgaagatgtagctagctatgataaggctatactggagtagagtgggctctgaaaccaaaatgactggtgtccttctaagaagatagggtgaagacacactgggagagcaccacgaccacagaggcagagactagaaggatacagagacaagccaaggaacaccaaggatgtctggctatcacc

SEQ ID NO: 875504 - DNA, 521 bp, Homo sapiens
ggaagaatcaatatcgtgaaaatggccatactgcccaaggtaatttatagatccaatgctatccccatcaatctaccactgactttcttcacagaattggaaaaaactactttaaagttcatatggaaccaaaaaaagaacctgtattgcaaagacaatcctaagcaaaaagaacaaagctggaggcatcacgctacccaacttcaaactatactacaaggctacagtaaccaaaacagcatggtactggtayaacagatatatagaccaatgaaacagaacagaggcctcagaaataacaccacacatctacaaccatctgatctttgacaaacctgacaaaaacaagaaatggggaaactattccctatttaataaatgttgctggggaaaccggctagccatatgtagaaagctgaaattgaaagccttccttacaccttatacaaaaattaattcaagatggactgaagacttaaatcttagacctaaaaccataacaaccctagaagaaagcctag

SEQ ID NO: 875505 - DNA, 701 bp, Homo sapiens
gggagcttataaaatttttttaaatttatgttttgattatcttattttttgaaagaattgtttctttggcaagaaataatctaccacactttttaaaccagactcagttttcagaattggaaattacaggaattccccaattgcagagttgaagacctaattccaaacaaagttctctaacttcaaactttttaaaaataaacaaatgtttttcactttgtttttcacaattaatactgatagaatgaatggttatcaaataaaccaagtagcattataatatgatactgacagcaaaatatgatggtgttagaaaattagatgtcttcaatgtcktgaaagtagttactctaaacataaaagcaaactatgtttggaagtaaacctatattaaaagcatgtgttctccgttatgagctaaaataaaacaaaatattgttctcatttaagggattcaaggccaaattctgtacatctattttaaagaggaatacaaagtctaatccatgttatatagaaaaaagatgttagttttctaattataaatcagaataattggagtttgaaaattttcagttaatctttttattttgaatttaatatataatccaaaatatcatatctgcttacattatgccatgcacttctaatttagttctaatttagtaaaaataaagactgtttgattctatttctggaag

SEQ ID NO: 875506 - DNA, 638 bp, Homo sapiens
acctgaacatcagccgtagcctctcccttgctttacttttatatccagtccctcctcaagttagattgcttttaattccttatcatctctcctataagctccttctagtggccctggttgcttctgccttgggtaggtcctgatcttgtctacactggacttctagcacttcactgagcagcccattcatcaggtggctgccagaatactctttccaaatgcaaatttcttcacattagrttcctactgaaggccttttatgagctctcctttacccataggagacattttaaagtcttcagagtggcattcagagctgtccacaatctggcccctgcatctctccagcctcagatctttacaccctcctagcatgcctcactccagctatacctgaccacttggagtgcttggaatcctgttttgcttcatgcctttcactttcactcacattagaattctctcccaccctttttgggggaggatctattaataattatctttcaatatttagttcaacaaacctggaagcatcacattacctgacttcaaagtatactacagggctacaataaccaaaacagcgtggtactggtacagaaacaggcacatagaccaatggaacagataagagagac

SEQ ID NO: 875507 - DNA, 638 bp, Homo sapiens
acctgaacatcagccgtagcctctcccttgctttacttttatatccagtccctcctcaagttagattgcttttaattccttatcatctctcctataagctccttctagtggccctggttgcttctgccttgggtaggtcctgatcttgtctacactggacttctagcacttcactgagcagcccattcatcaggtggctgccagaatactctttccaaatgcaaatttcttcacattaggttcctactgaaggccttttatgagctctcctttacccataggagacattttaaagtcttcagagtggcattcagagctstccacaatctggcccctgcatctctccagcctcagatctttacaccctcctagcatgcctcactccagctatacctgaccacttggagtgcttggaatcctgttttgcttcatgcctttcactttcactcacattagaattctctcccaccctttttgggggaggatctattaataattatctttcaatatttagttcaacaaacctggaagcatcacattacctgacttcaaagtatactacagggctacaataaccaaaacagcgtggtactggtacagaaacaggcacatagaccaatggaacagataagagagac

SEQ ID NO: 875508 - DNA, 645 bp, Homo sapiens
cctttacacttgttataaaaatgttttttcttttgtcttcatgctgttttataattattaatatttttattatacaaacatatattttggaaatattaaattcttaagaaaacaaaaaattaggccgggcctggtggctcacgcctgtaatcccagcactttgggaggcagaggagggcagatcacgaggtcaggagatcgagmccatcctggctaacacggtgaaaccccgtctctactaaaaaatataaaaaattagctgggcatggtggcaggagcctgtagtcccagctactcgggaggctgaggcaggagaatggcatgaaccctggaggcggagcttgcagtgagccgagattgcgccactgcactccagcctgggcaacagagcgagactctgtctcaaaaaaaaaaaaaaaaaaaaaaaaaagaaaaagaaaacaaaaaattaaaaccattatgcaaaaataatcgttttggcataaattctttctaatattttcctatgcatatttttatttcttccaaaaatgggattatactacatgaatagatctatgacctatttatttgaagtaattacatattaatttctcttatcaaatattattactttaaatgactagtattttagtgtatggaagc

SEQ ID NO: 875509 - DNA, 645 bp, Homo sapiens
cctttacacttgttataaaaatgttttttcttttgtcttcatgctgttttataattattaatatttttattatacaaacatatattttggaaatattaaattcttaagaaaacaaaaaattaggccgggcctggtggctcacgcctgtaatcccagcactttgggaggcagaggagggcagatcacgaggtcaggagatcgagaccatcctggctaacacggtgaaaccccgtctctactaaaaaatataaaaaattagctgggcatggtggcaggagcctgtagtcccagctactcgggaggctgaggcaggagaatggcatgaaccctggaggcggagcttgcagtgagccgagattgcgccactgcactccagcctgggcaacagagcragactctgtctcaaaaaaaaaaaaaaaaaaaaaaaaaagaaaaagaaaacaaaaaattaaaaccattatgcaaaaataatcgttttggcataaattctttctaatattttcctatgcatatttttatttcttccaaaaatgggattatactacatgaatagatctatgacctatttatttgaagtaattacatattaatttctcttatcaaatattattactttaaatgactagtattttagtgtatggaagc

SEQ ID NO: 875510 - DNA, 645 bp, Homo sapiens
cctttacacttgttataaaaatgttttttcttttgtcttcatgctgttttataattattaatatttttattatacaaacatatattttggaaatattaaattcttaagaaaacaaaaaattaggccgggcctggtggctcacgcctgtaatcccagcactttgggaggcagaggagggcagatcacgaggtcaggagatcgagaccatcctggctaacacggtgaaaccccgtctctactaaaaaatataaaaaattagctgggcatggtggcaggagcctgtagtcccagctactcgggaggctgaggcaggagaatggcatgaaccctggaggcggagcttgcagtgagccgagattgcgccactgcactccagcctgggcaacagagcgagactctgtctcaaaaaaaaaaaaaaaaaaaaaaaaaagaaaaagraaacaaaaaattaaaaccattatgcaaaaataatcgttttggcataaattctttctaatattttcctatgcatatttttatttcttccaaaaatgggattatactacatgaatagatctatgacctatttatttgaagtaattacatattaatttctcttatcaaatattattactttaaatgactagtattttagtgtatggaagc

SEQ ID NO: 875511 - DNA, 588 bp, Homo sapiens
atggggttcttggagatattatttgaggcgatgaaatgaaggcatcgacttcctcagaacttgaccaatgagagccgggcgtaggaacacaagcagcagtcattttcctcagtacctcttcaaaatatttcttggtgttcgtctgtgggctatcaaaactgctagattggtatttgataatctgctgaattggatttgaaattgcttctctcttgtggatggctctgatctttctacagatgctttccactgggttatgccgcttctcagttaccttccttggagaggccattgttgactttcctcctagtatacagatgaagtggctaaagtataggcaaaagtagatacatgtttaaaagtcagtattttcctaacaataatttagcaataggcaatttattcccaaatcaactttggcgggatcatgacaagatgytcagtttctctaagcaaattttccatgcatttaactttggccctcaaatttcaggaaaataacagctaacatgtataaagtatttatcaagtgccaggcatggtactaagctcttcacacccatcaactcatttcatccttaaaacaac

SEQ ID NO: 875512 - DNA, 588 bp, Homo sapiens
acttctacttgtcttcattcaagacttaccttaaattttacctccagagaatcctccgtctcctcagattaaatcagatgtccctccactatgctcttgtcattctgtttaattattataattgttgccttaaacactaaattatgatcttgagggcaagaatttcttgagagacttcatatttaagcagagagcatagagctcatgataagggctcaatgaatgtttattgaatgaaggaaggaagaagtgaatgaatggatgtttaaatgatgaaaagcaggccctgacttgggtctgatttgttgtgagcagcctacataaattgggcaatccaaccactatsctcctcaaagttatcctgtcttttgagagatacttaagatcctcttcattacagttgggtgtgctggagatcacttctgctacctttacggattctgcaagctggttactggggattcttgggactctctcctctgcagttctgatcctccacccctttagtgatccggcatagtatgtggtaataggaagactcttgctgtcactacttcagccttaggaaaggtgtgctcctcccattcc

SEQ ID NO: 875513 - DNA, 567 bp, Homo sapiens
gcttgagcccaggagtttgagaccagcctaggcaacactgcaagatcctacctctacaaaaaatttaaaaattagccaggcatagtggtgctcgcctatagtcctagctactcaggaggctgaggcaggaggatcacttgagcccaggaggttgaggctacagtgagccatgatcccaccaccatagtccagcctgggtgacagaatgagatcctgtctcaaaaaaaaaaaaaaaaaaaaaaaatctgtctacctrtctacctacctacctacctatctgtatgtatgtgcaacactgtaaccagagtactaacaaacacacttattattagtactaagaagatcacatgcatcactcagacatgcaactttaaatgcctcacaggatattagaaatacacaaaaacaagagagtggaaatgctggtgatgctttcactagaacagtggtggtggggtgaaaggcaaatgtagatagaggcagcgaggctaacaaggtgaacacaggagggagtatgattggacacagaccagggctctacaaggctggggtagagccctataaagt

SEQ ID NO: 875514 - DNA, 615 bp, Homo sapiens
tatcataaaccgggagcctaaagcagcaggaacttgtttctcacaattctggcatctggaagtctaagagcaaggtgttggtccatttggttcctctatgagggctctttcctggcttacagatggcttccttctccrtgtgctctcatgagagagagaaagagagagggagagagagagagacaaaggcaagcttctgctgtctctttttttttaggagcactaatcgcatcgtgagggctccaccttcatgacctcatctaaacctaattcccttccaaaagccccatctacaaacaccatcacattggaaaagttaggtcttcaacatacgaatctgggggatctcaattcagtctatagcaaagcatgaatgcattgtgagaaatggtggatccaagattctgagatacacagtttgggaatgacgtgatgaagtgatgcaagggtttttttctgctatttttgttgctgttaagttgatttgtgagacctgtttctgagcaaaacgctaagggtgaaattatattgagctcattactctgaagtggacacaaatctgactaaatacattattaggtaaataaaatatgggttacagatatcgataaacat

SEQ ID NO: 875515 - DNA, 620 bp, Homo sapiens
taagcttgttgcaaaccagaaacttcaaggatcccatgcaaacaatattactaccacttgcagcacgtactcatgcaggtatctaaagttagtactaagacgattaaaaacagccaatgctgctgtaattatattttctgaatccctagttgggacataagggccaatacattatagcacaatgaagctactgaaacagaatatttgacatcgaggctgtcttggaaaattgggaatataccaccttgcaataatagtaataataaaaaataacatttmttgaaaacttacattttgcaggagaatttcctaagtgctttacttgtattaatacatcaatcctcaatataaccctatgatgtgggtactactattgtccatattttacagagggaaaactgaggcactgagttgtcagtaacttgcctgagatcccacagctagtaactatgtaagtagagtcaaattgaagcttaggccatgctgaaccagaacccttgctcttaaccatcaatactctactacctctctcccattcttggcagcaaaatctctgttttaaccctcctaggaggatacttgaacttcaaatactatttccagaaatacaaatacatcaa

SEQ ID NO: 875516 - DNA, 504 bp, Homo sapiens
atgccaaaagcaattgtaacaaaaatcaaaattgacaaatgggacctaattaaactaaagagcttctgcacagaaatataaactatcagcaaagtaaacatcctagagaatgggagaaaatatttgcaaactatgcatctgacaaaggtctaatatccagcatctataaagaacttacacaaattatcagcaaaaaaaccacaaccccattaaaaagtggataaaagacatgaatggacacttttcgaaagaagacatacaggaggtcaacgagcatatggaaaaatgcttaacatcactcatgattaaagaaatgcaaatgaaaaccacaatgagataccatctyacaccaatcaaaatggccattattaaaaagtcaaaaaataatagatgctggcaagattgtggtcaaaagggaacacttgtatactgctggcaggaatgtaaattagttcagccattgtggaaagcagtttggcaatttctcaaagagtttaacagaat

SEQ ID NO: 875517 - DNA, 681 bp, Homo sapiens
aggtattcaggaaaagacaacttcagacagtgttttggaaagatcattctggatcagggctgtgtgtgccaagaaaagccatgaagctttctgttgaggccagtgcaggaggcttacggggaggtgacaacaatttcaagcaggaacttggcagcggagataaagtgaaataaatggttttgcgatctatttagcaggtgtgtttcccctatgcctaaattttctaccaatctttttacttagaaatggaagagctcttagaaaatgtcctattctattctctcatccacagatttagaaatgtagggacagtgtgggggaggtgacagttcattagtgctagttccagaatcagagcctgggtccccaaactcyaaggtcaatgcctttttgcctggatcacagacttttccccagtacaacaatgtgtgttttatctcaagtaaaatttatgctacttgagggagtggcccctcctctggtgattagcccattgctcagccagaaggcttgtaccgaaatgcctgctgccacactgataatatggaaatggaatccgatgttttatgttacaaattagattaaatggatttatgtgctaaaccactttcagttcctatttggcacataataggagagattaaagccacctaaatgagtcatactttatttaataaccat

SEQ ID NO: 875518 - DNA, 663 bp, Homo sapiens
tacaaaagcaaacacatacatggaagagttgttcattcctgtaagaacaagctatgggctgttctaggaaagatggggctcaataaactcaccaccatgtgtccagttggcttcccagaggaagtatgatattgggatcttaccttggttttgctgctgtyaggttgtatattcagaggcagcagtagctggatcaaccttcactagttggagccgaggcttttgggctcatttgtagctgctcctgaatggggctgtaaagccgatccctatctaccaagcataattcagaatgaaccaagctctgggtttggtcaaaacagatcctctatgtggccacaggtgtgaaaagcaggtggagtgctggtgcaaaattggtggataacattagggtctacacttcccctagccagtttaaccactggttcttaaaaaaagtgtgtgtgtgtgggtgtgtatacatatatatgcacatacataagtttataattttactgatatgaaggatatgtagtattcatttacaaataatagtaaaataaacaatattatttattttaaattccatatagccaatatattcttatagaatgcttttgctgatttttgacaaattattgtatctatagccaacctatgatagcaactgatgaatgaatgtag

SEQ ID NO: 875519 - DNA, 594 bp, Homo sapiens
aaccttgataaatgtaattgaatttttctatgataagattaactagttgtaattgtgaatggggaggtctgacccactccaaatgagatgtatgacaagctgaaaataatcaatttttttctttatttgagcccagattttttaaaatggaaagagaaaatcggggccttgtaggatgaaatatttgtgtctgaaatgtttttatatacaccacttatctcccatctcctcagtgtgtctaattgtgctgagcttggtttaaaatgagatcaacacattgaaaccccagaaggcttaattaagggagggacttaatatgtaccaaaaagggttttttttttttgacaaatgtggcataaattttacctgtaacatccttatytaaaagcatcccaaaattgttaagcccattaaattgcctctttttaaaaaaaaaaaaaaaaaaaaaaaaaaggagagacagagaagagaaaaaggaagaaaataattttactttgaaaatcttaattactgtgatagcagggttgggttgtgcctttttacgattcctgtatgatttgcattttgagttgaagttttgttcttcacagcaca

SEQ ID NO: 875520 - DNA, 613 bp, Homo sapiens
atctgttaagtgccttgtgtcttgaatatataaaaaacactttaagcttaataacagaaagacaaatagccagtttaatactaggcaaataatttaaaaagctacacaaatactcaataaacacaagaaaggtgtgatggtttcctttatatttcaacttgactgggttaaggaatccccagatagctggcaaaacattatttctgggtgtgcttgtgaagacgtttytgaaagagattggcatttgaattagtagtcggagtaaagaaaatctatcctcgccaatgtgggtgggcgtcattcaatctcttaagggctcaactcaaacaaagaggcagagaaaagatgaaattgcttttccttctttagctgggacaggcatcttctgcccttggacataagagctccgttgtccttcagacaccagaatgtatacaagaacccccttttcacccctttctctcagtcctttgactcagactgagaattacactattggctttcctgggtctcaggcgtttgtacagtacagaattatgccgctgccctttctagttttccagctcccagacagaatatcatggaacttccataattatgtgagccaattcct

SEQ ID NO: 875521 - DNA, 633 bp, Homo sapiens
tgcctttctagtcagagacatgtattttgacaagattctacatccacatatttcagactacataagtggactttaatcctttttcctctaagaccctactgtgcaggagtgaacttctgagaagactgggaaaaatccctgccagcaactgcttttgctcagatgtctgcaggacagagaggctcagcaggaagctgggcacatgtgtctctagtatatttcaagaacatccatagaaccaaaaaaaaaaaaaaaaaaaaagaaagaccaaattactgcgtcatgaggtgcttttttttttttaattctcctgaaaactatttttatttctgtgcttgcgtccttatgccatttccctttggaagaagagaggcagctaaagaaagtctaccagctgaaraatcaattgtaccagatattcctctgtcaacaccttgattccagcaaaggctgtttctgctcctcaaaccggcaccagggtttgtaagacaaacctaatagtgggacgcccagggctacatacctgaaaggaaactttatctttcctctaataaataagaaagaaaagaaggagagaaatcaggaatgtttgtattacatatcactggatcattttgattgatttattgctta

SEQ ID NO: 875522 - DNA, 575 bp, Homo sapiens
ctgtgggtttgtcatagagagctcttattattttgagatacgtcccatcaatacctaatttattgagagtttttaacatgaagtgttgttgaattttgtcaaatgccttttatgcatctattgagataatcatatggtttttgtctttggttctgtttatatgctggattatgtttattgatttttgtatgttaaaccagccttgcatcccagggatgaagcccacttgatcatggtggataagctttttgatgtgctgctggattcggtttgccagtattttattgaggatttttgcataggtattcatcagggatgttggtctaaaaatctctttttgttgtgtctctgccaggctttggtatccagatgatgtgctggcctcataaattgagttagggaggawtccctctttttctattgattggaatagtttcagaaggaatggtaccagctcctccttttacctctggtagaattcggctgtgaatccatctggtcctggacgttttttggttgctaggctattaattattgcctcaatttcagaacccgttattggtctattcagagat

SEQ ID NO: 875523 - DNA, 594 bp, Homo sapiens
agagaataatgcaggagctttgctatatatatatatatatatatatatatatatatatatatatatttaatatagtgggtgtcgtctagggggatatgatgttaaacacatctgggaaggttttataactctcctgaggactaaactctgactattttatttttctcttgcccaaacttctgtctaaaaggcttggggagtcatgccctacaaaccacaaaattccatcagatggctctttattgactctatataatgttaccccaaaatatatatttttctacctattttgaaatggctgccactgggccaacagattgaaacgtccctgcagattgtcttttgtggaaaaaatttgcatccctagagaatctccattaaagtagccagaattttccccttataggctgttcccagatctakgagagaataactgagagtctgacacatttaaagtctgaaaagagacatttattatctattctctctgagggctgtcacctatgagaattcatctacattaaaaaaaaaaaaccttggactccacaacccctttgtaacttaggaatccctttctgctgacttcaagcctcc

SEQ ID NO: 875524 - DNA, 550 bp, Homo sapiens
tgtaaattctggatattagccatttgtcagatgggtagattgcaaaaattttctcccattccataggttgcctcttcactctgatggtagtttctttttctgtgcagaagctctttagtttaattagatcccatttgtcaattttggcttttgttgccattgcttttggtgttttagtcatgaagtctttgcccaagcctatgtcctgaatggtattgcctaagttttcttctagggtttttatggttttaggtccaaaatttaagtcttcartccatcttgaattaatttttctataagttgtaaggaagggatccagtttcagctttctacatgtggctagccagttttcccagcaccatttattaaatagagaatcctttacccatttatactttttgtaagatttgtcaaagatcatagattgtagatgtgtggtgttatttctgtgggctctgttctgttccattggtctatatatctgttttggtaccagtaccatgctgtttttgttactatagccttgtagtatagtttgaagtcaggtagc

SEQ ID NO: 875525 - DNA, 642 bp, Homo sapiens
gggtcatagtttgggggagatttctgagtatatttatagaattgttgccagggaaaaggtagagggtgaggattcagaagagagagaggctgaggctcaaggaccagagcccaggagaggtggttaaaaaaccaaagaacaaagatattaaaaatgctggtagaaagataaggcttgaagcagaaagaacacatttctttctcagtctgttcatcaagaaacatttataggacattttctatgacctggggactgtaagatttcttagagacattcataaatcctacctcttgtcactatgcttctaccttaatccactgaccttcaaaatatttttattacattaaaacattattatatataatatagtatataatataattattatatattatataatatatattacactatatagtcaatatgactttgagatatccataactaatatatatcacatataactaatatatatyatatattatgtaattatattatataaatattacatataacatatataacatatattatataacatatataacatataacatgtataatatataacatatataacatatattatatataacatatataacatatataacacataacatatataacataacataacat

SEQ ID NO: 875526 - DNA, 709 bp, Homo sapiens
actaaagagcttctgcacagcaaaagaaactaccatcagagtgaaaaggcaacctacagaatggaagaaaatttctgtaatcaatccatctgacaaaggactactatccagaatctacaaagaacttaaacaaattacaggaaaaatcaaacaaccccatcaaaaactgggcaaaggatatgaacagacacttctcaaaagaagacatttatgcagccaacagacacatgcaaaaaggctcatcatcactggccatcagagaaatgcaaataaaaaccacaatgagataccatcttacaccasttagaatggcgatcattaaaaagtcgggaaacaacacatgctggagaggatgtggagaaataggaacacttttccactgttgatgggagtgtaaactacttcaaccattgtggaagagagtgtggcaattcctcaaggatctataactagaaaaaccatttgacccagccatcccattactgggtatatacccaaaagattataaaacatgttgctataaagacacatgcacacgtatgtttattgtggcactattcacaatagccaagacttggaaccaaccaaaatgtccaacaatgatagactggattaagaaaatgtggcacatatacaccatggaatactctgcagtcataaaaaatggataagttcatgtcctttgtaggcacatggatgaagctggaaa

SEQ ID NO: 875527 - DNA, 709 bp, Homo sapiens
actaaagagcttctgcacagcaaaagaaactaccatcagagtgaaaaggcaacctacagaatggaagaaaatttctgtaatcaatccatctgacaaaggactactatccagaatctacaaagaacttaaacaaattacaggaaaaatcaaacaaccccatcaaaaactgggcaaaggatatgaacagacacttctcaaaagaagacatttatgcagccaacagacacatgcaaaaaggctcatcatcactggccatcagagaaatgcaaataaaaaccacaatgagataccatcttacaccacttagaatggcgatcattaaaaagtcgggaaacaacasatgctggagaggatgtggagaaataggaacacttttccactgttgatgggagtgtaaactacttcaaccattgtggaagagagtgtggcaattcctcaaggatctataactagaaaaaccatttgacccagccatcccattactgggtatatacccaaaagattataaaacatgttgctataaagacacatgcacacgtatgtttattgtggcactattcacaatagccaagacttggaaccaaccaaaatgtccaacaatgatagactggattaagaaaatgtggcacatatacaccatggaatactctgcagtcataaaaaatggataagttcatgtcctttgtaggcacatggatgaagctggaaa

SEQ ID NO: 875528 - DNA, 598 bp, Homo sapiens
tcccaccccattcaacatagtattggaagatctggctagggcagtcaggaaaaagaaagaaataaagagttttcaattaagaatacaggaaggcaaattgtctctgtttgcagatgacatgattgtatatttagaaaaccccatcatctcaacccaaaatctccttaagctgataagcaacttcagcaaagtctcaggttacaaaatcaatgtgcaaaaatcacaagcataattatacaccaataacagacaaacagggagtcaaatcatgagtcaactcccactcacaagtgctacaaagagaatgaaatacgtaggaataaaacttacaagggatgtgaagcacctcttcaaggagaactacaagccactgctcagggaaataagagaggacacaaacaaatggaaaaacattccatgctcatggataagaaraaacattatcgtgaaaatggccatactacccaaagtaatttatagattcaatgctatccccatcaagctgccattgacattcttcacagaattggaaaaaactactttaaacttcatatggaagcaaaaaagagcctgcatagccaagacaatcctaagcaaa

SEQ ID NO: 875529 - DNA, 629 bp, Homo sapiens
tgatttaaaaaaaagcaagcttaattttctcgcttcaaataagctttgtttaactgcagtattagaagatttttttaaagtacaggcatatcttgaagatattcaggttcagttctagaccactgcaataaagtgaattacaataaaaccagtcaaataaattttttggtttcttggtgcacataaaagcaatgtttacattatgctgtagtctagtaagtgtgcaatagcattatgtctaaataatgttcataccttaatttaaaaatacttcattgataaaaatgctaatgatcatctgagccttcagtgagtcataatctttttactgatggaggagcttcctgcaatgttgatggctgctgactgagcagggtggtggtggaaggttggagtggctgtggcaatttcttacaataagataacaataatatttgcaacactgrtttgactcttacacaaaagatttcactgaggcatgagttgctgctttattcacattgaaacttctttcaaaattagtcaatcttctcaaacccttgtggctacttcatttatcaaccatgcttatgtaatattctaaatcctttgttgtcatttcaccaatgtttgtagcatctttaccagca

SEQ ID NO: 875530 - DNA, 618 bp, Homo sapiens
ctatagataataagggaacaagagtaaacaactttttgccaataagataaaatggacaaattccctgaaaggtataaactatgaaaacaattggacaattagaaatacataacctgaatggcttttttaatgatattgaatttgtagtttaaaactcctcttccctgtgcactctgctgccccacaaaaataaaaaaaacctccaagcccagatggctttattggttaattccaacacgtatttaaggaagagcatatcaagtctatacaaactcttcagtacaattgaagaagagggaacatatttcatctcattctataagattagtattactctggcactaaacccaaaagagagcattacaagaaaagcgaattatagattaatatattttgtgaataaagatgcaaaaatttctttaaacattttggaaaattgaattcaagtatatataaagaggataatatawaataaccaattaaatttattccagaaaagtaatgttgtcttaacattctaaaatcaatcaatacagttaaccatattaatggactgaaaaagaaataacatgatcaactcaatataaaaaagaaaaagctggcaaactgcaacattta

SEQ ID NO: 875531 - DNA, 629 bp, Homo sapiens
acgtcatactgatcaatttatcatgacaccttctcttctaaatgttctgtcctgcttctcagaaatgttgacctcaatctttgactctgtgtgttggtgttccctgccctggctttcaagtcagtgttttctgtaagattagtcacatttcaatggtgcgtgttatgcttcaattctcacaggggatttataacacttttctcagatttgttgaaagatttttcatgagattcaggatttagaaaatcataaatttcccagtaaatatgaagaaggaaatcctccatggaaacactatccaaatgagataagagaagttgtaactggatttccaactgtcgattttatcatgtataaaagaacgtagttacctaaatcagtgagagaaatagtaaggatggatacatgaaatatgacattagatctatgtttttcaaagtagggttccatatcagcaacttcagcatcaccttggaacttagtaaaaakgcacatttctgggcatctacccagacctatggaagcagaaaactctgagtatggagcctcgcaatctgtgtttcaacaagtcccacaggcgattttgatgcacattgaagtttgaaggtacctttattagattttctttc

SEQ ID NO: 875532 - DNA, 605 bp, Homo sapiens
atctgaaaagcagcataatcagtcttctgaacctactgcaatcaatatctatgcaaatggggtggttatggaatttacactgctttgtcaatcaatcactagtcaagttcccaccttacactcaatgtactaatagatttttttttctttttaaagagacagtgatttctgatttctttctttctttttctgtgtttttttttttttttttttttttttgagctggagtctcgctctgttgcccaggctggagtgcagtggtgtgatctcggcttactgtaacctctgcctcttgggttcaagcaattctcctgcttcaractcctgagtagctgggattacaggtgcctgccaccacacccagctaatttttgtatttttagtagggagggtttcaccatgttggccaggctggtctcgaactcgtgatctcaggtgatccacctgcctcggcctcccaaagtgctgggattataggcgtgagccaccgcacctggcccagtgatttcttttttctaagtatttgttatataaatgggtggtggtgttttgactgcctccccatccccacgttttccctgcatacgtacccatcttcactgtgt

SEQ ID NO: 875533 - DNA, 657 bp, Homo sapiens
cagagaactcacaccttgggctgaaatctgtgaactcttaactttgatatccaagagagttgtttgtggatcaaacttattttttagtttccaaaagctgtataatgctcttgtaagcctgatttcttgtctttattactttttatttgattttttatgagagaaaaaaatcactattttttataatgatatatgttcactataaaaaattcaaatgcaaaagagggattaaaaagttaccyctcaaataaccacaatacattagataaccagaaatagaattttcttccctttctaattcttcgctccttcccttccttctttccccccattgatctgctgatcatactatgcctgttattttattttttaatatatatatatatttttattatacttttaagttctagggtacatgtgcacaatgtgcaggtttgttacatatgtatacatgtgccatgttggtgtgctgcacccattaactcgtcatttacattaggtatatctcctaatgctatcccccatccccccaccccacaatgggccctggtgtgtgatgttccccttcctgtgtccaaatgttctcattgttcaattcccacctatgcgtgagaacatgcggtgtttggttttttgtccttgtgacagtttgctgag

SEQ ID NO: 875534 - DNA, 656 bp, Homo sapiens
gcagcttaagaaaattcagagaatggaataaaaaacaaggactgggagagtataacttgtctgtgtcttatgacttactgatgtgggggataagggtcagcagtagtggcatgatgggtagatgttgcagcatgacgaaccagactaagctggactaagccaatagctgttcagatggcttctgaattatgtggaagaataaaggcctggaaggagaaataaattatactaacattttatatctcactcatgggtatasatcaaagtaagttaactcttggaacctattttttgtgaaaaaatactcactagcaattactttgtactaggatctatttgcctatattctctgagcttatcttcaccttggttagtaatagtaccaattataattcacattggttagtaatagtaccaatttatagatgaggaaactaaggtcacatgtattggtggcagagttggatatcaactcaggcagtttgtccttagagtctgtgaagtctgtagtgacactaaccaccagtctccttctaaattcccaccactggtctcaaggcaggctgttcttatggcctgaggcttcttctgtgtaggatgtggcctacaatggatgctacatacagtagggcctcttcacggactgtgacttgggt

SEQ ID NO: 875535 - DNA, 621 bp, Homo sapiens
aagaggctgggcgcagtggctcacatctgtaatcccagcactttgggaggctgatgcaggaggattgcttgagctcaggagttcaagaccagcatgggaaacatggtaaaacctcatctctagaaaaaatttaaaaactagccaggcatggtagtgcacacctataatctcagctactccaaaagctgaggtgggaggatcacttaagcctgggaggtggaggctgcagcaagctgagatcgcaccattgcactccaacctggatgacagagccagaccttgtctcaaaaagaaaaaaaaaaaagaagagacagacacacagggagaacaccacgtgatgatgtgatggagtcagagactggagtgattcattgacaagtcaagggctgccatggattgacagctgccaccagaagmtagaaagaggcatggaagcattctttcctacaggttttgcagggatcacagccctactgacactttgatttcagaattatacatccttcagaactgtgaaacaaaacattcatattgtttcacagcagccctaggaaagtagtacacatttcctcatcaccctgcagctccctatataagccaccagttatagcttgcaatttt

SEQ ID NO: 875536 - DNA, 611 bp, Homo sapiens
ctatttgactttccacaacagagacatttgaaactgtgagggtgaaccgtgactgaaaagttacttattttactttgttctaattttcctcagcactactaaggagtgacttcttgcccttacatatgacagttccaaattaaatgaggaagatatttacagttctgtaaatatcactttggcattttacatttcgtargaaagggcttttacgttgcagttcatagcatagtttatggtttttaaatgccaacttgagaagttgaaaagagacctttcctggagaaaaagaccaagcttcagattcaacgttgaaaaatgtgcagaatttttagggattgctgtgaagagtgaagacgttacttgatgaaaagaacataaggctctggctcatttatttattggctcacagcagaaggggtgggacattagaatcagagagaagacgatggttctgtgctttacttcctttatattctatttacgtgaccacttggaagagtagtagacagtgggcaggaatcaaataggtaccccgggaaacagcaatgtctgtatatcttggtaaattgtgaagaatggaagtatccaattgcagatgtaaacatttt

SEQ ID NO: 875537 - DNA, 566 bp, Homo sapiens
tcaagtgattatcttgcctcagcctcctgaatagctgggactacaggtgtgcgccaccttgcccagctaatttttgtatttctagtagagacgaggtttcgccatgttggccaggctgatctcgaactcctgacctcaggtgatctgcccacctcagccccgcaaagtgctgggatacaggtgtgagctgctgcrcccacccacacaagttctaaataatatttatttggggattgtggcgttatagagaatgttttcctagatttctatagttattctaaattatttgtgtacttaaaattatttacaaaaaaagaaattgattgctttaattattccttgtctattaaatactgacaatgtttgatatacaaatagtgaaaaactcatcctggagaaatacatttcctttggggtgggaactacatgtattctgtaaataaaccgtgcctggtgcctgttttgactcatcctagcaggtgcttgactctagagtgtgcttggccacacagatgcttctggattgcctgcctatgccctcagtcttcacgggatcagcttgatca

SEQ ID NO: 875538 - DNA, 603 bp, Homo sapiens
actaggagaagagattgatggcacaaaggcatttgcgatagagaatgcttttgatgatcagtagaggtggagggctggggactacggaagtgatgttgactagtgaaagaggcacagccatgagtagacggccagggcttcactgcaggtactgagtgatgaagacaaggaaatgatgtacagtaggtttcactttcaacctactctgactggagtggattcttgagttgggyatgtcttttagttgcaaagcaaaggcatgcttccgtgatatggtttggctctgtgtccccacccaaatctcaccttgaattataatccccacgtgtcaagggagggacctagtgggaggtgattggatcatggaggcagtttccctcatgttgttctcatgatagtgaggaagttctcacgagagctgatggtttaaaagtggcagtttcctctgcgctctctctcccttctggtaccacgtaagatgtgcctggcttcccctttgccttctgctatgattaagtttcctgaggcctcccagccatgtggaactgttagccaattaaacttcttttgtttataaattacccagtgtcaggtagtatcttt

SEQ ID NO: 875539 - DNA, 603 bp, Homo sapiens
actaggagaagagattgatggcacaaaggcatttgcgatagagaatgcttttgatgatcagtagaggtggagggctggggactacggaagtgatgttgactagtgaaagaggcacagccatgagtagacggccagggcttcactgcaggtactgagtgatgaagacaaggaaatgatgtacagtaggtttcactttcaacctactctgactggagtggattcttgagttgggcatgtcttttagttgcaaagcaaaggcatgcttcygtgatatggtttggctctgtgtccccacccaaatctcaccttgaattataatccccacgtgtcaagggagggacctagtgggaggtgattggatcatggaggcagtttccctcatgttgttctcatgatagtgaggaagttctcacgagagctgatggtttaaaagtggcagtttcctctgcgctctctctcccttctggtaccacgtaagatgtgcctggcttcccctttgccttctgctatgattaagtttcctgaggcctcccagccatgtggaactgttagccaattaaacttcttttgtttataaattacccagtgtcaggtagtatcttt

SEQ ID NO: 875540 - DNA, 599 bp, Homo sapiens
tgggaggcacgtggtagcaagtgattagatcatgcaagtggttccctcatgctgttcttgtgatagtgggtgagttctcatgagatctgatggttttataaggggaattttctccctttcctttggtacttcctctccstgcactcaggtgaataaggatgtgtttgcttcccctttggccatgattataagtttcctgaggcctccacagccatgtggaactgtgagtcaattaaagctctttctttataaattacccagtctgaggtatgtcttcatagcagtgtgaaaattgactgatgctctgtctattgttgaaaataaaatattaaaatctcatgctattgttgtgttgcagtctatgtctctctttagatctcttaatgtttgctttatatatttatgtgttctgattttgatgcatatatatttataatttacatatcctcttagcaattgaccctttcatcactgcatcagtaatcttctttgtctctttttacagtcttgaactaaagtcaatttttttctgaaataggaatagctatccctgtctcttttggtttccatttgcatggaataatctttttatcccttaa

SEQ ID NO: 875541 - DNA, 601 bp, Homo sapiens
gcagcatggtattttttttttccatttgtttttgtcctctctaatttccttgagcagtggtttgtagttctccttgaagaggtccttcatgtctcttgtaagttgtattcctaggtattttattctttttgtagaaattgtgaatgggtgttcactcacaatctggctctctgtttgtctattattggtatatgggaatgcttgtgatttttgcacattgattttgtatcttgagactttgctgatgttgcttatcagcttaaaaagctttcaggctgagaygatgaggttttctaaatatacgatgagttatatgcaaacagagactatttgactttctctcttcctatttgaatacccttatttctttctcttgcctgattgccctgggcagaacttccaatactatgttgaataggagtggtgagttagggcatccttgtcttgtgcaggttttcaaagggaatgcttccagcttttgctcatgcagtatgatattcgctatgcatttgtcataaatagaaaagcatttatttctatacagacattcccagggtgctgtgagaagaaggcatctgggggagtgaacactaatatatgc

SEQ ID NO: 875542 - DNA, 650 bp, Homo sapiens
gtaaggcaggtagagtgtgggcatgaagtttgacacatatagagtgctcagtaagctgttcaaaaggaaggagtaggaagagaaatcatagctacagctcactaaatacacaagaaaaatcacattcgatgagcacctgctctgtaaaaggagttcatccttgtctacactgtattgtcacttcagcatccaatgagctctccaaatgctcaacaacaggctggaggaaggaaaaggcaccatggcaatgagaaccagcttttctaagacacaggggtttagaggtgagcagattttagacagtgaattgactaytctgagcagaggaaatgcaaggaagaagccaccccagggagagggaatgggccagcctggccacagggatagctgaagcagcccttttaattattctacctctatgacccaatggccagaatagagaatatgttcagggctttggcattagactggctggagttacaatcctggtctgccacttcagacaatggggcctagagcaagttactcagcttcctcatctgtaaaacaggatggccttatttatagggaccatgctgagcacatgctagacatagagtaaatgctcagttaatggtagtttgttactaatatgagcagggtctataaaa

SEQ ID NO: 875543 - DNA, 591 bp, Homo sapiens
tgtggtggctcacgcctgtaataccaacactttgggaggccgaggtgggtggatcatgaggtcagaagattgagaccatcctggccaacacggtgaaaccctgtctctactaaaaatacaaaaatcagctgggcatagtggcgtgtgcctgtaatcccagctacttgggaggctgaggcaggagratcccttgaaccagggaaacagagattgcagtgagccgagatcacgccactgcaccccagcctggtgatggaacgagactctgtctaaaaaaaaaaaaaaaaagataggacatgttaatgtaaaagctgtcagaacactcaagacacacaataaaagatagtcctatccaggataagataagcaggcaatcttttgcccacatcctattatgctgttcttattatatttgccagtggcccaagaaatcttacaggtggaccatagggcacatgtccaaggaccagtgtgggggagttaatgctacagctctggaccaggaatctgaaaagaatattttcttctccaactcatcactggcacaaatcagcaaccctgtacaaagctctttctcaacctccaatttga

SEQ ID NO: 875544 - DNA, 667 bp, Homo sapiens
ggtgtggagaaaagggaaaactggtacagtgttggtgagaatgtaaattagtacagccatgatggagaatagcagggaagttcctcaggaaactaaaaatagaactaccatataattcagcaaccccactgctgggagtataccaacaaaacaaacaaacaaaccatcaaaataaattggtatattaaaagatatctgcatttccctgtttattagagctctacttacaatattcaaaatttagaagcaacctaagtttccatcaacagatgaatggataaagaaagtgtagtacatatacacaataaagtactactctgtcataaaaaattgagacsctgtaattttcattaacatgaatgaaactggatgccatcatgttaagtgaaataaaacagccacaaaatacaaacttggcatgttcgcacttatttgtaggggttgaaaattaaaacacttgaattcatggtgatacagagtaaagtatgtttacaaaaatgtctgaaggatagtggagtttgggggaaaaagtggggatgattaataattatcaaaataattagaataaatgaataagatctagtctttgatagcacaacagggtgactacagtcagtaataatttacttgtacattataaaataagggtataattgaaaaaaaagag

SEQ ID NO: 875545 - DNA, 695 bp, Homo sapiens
ttctaaactctcagggttggcttcagtaatctcttaagtcccatgctttccattgcagccccagatagttccccaggccaacagaagactattcatggggttttcaagcatggtagaaaaggcccattgtctctcaaccccagaacatccctctcttctgccaataagagccttgttcctgattcatgtgaaacatgaaacagccacccttaccacgctggcaatgtctgttgaagaactgcttgcagtagaggaagaagagccccaggaaggccagggtaaacaccactagcaggctgctcaccagtgcaacaagtgtggcctcctgagggggcactgtgggtgyatctgcctccactaagctcaactggaaggcacctgtgagacaaaaaaatgggggaggtcagttagcatgggcagtaaacagtcaccctgaccctggacctggacttcctcaggctgtcacccttctccctagggccttccccaattagggtggctatgctggttttacttctttctagagcaggcaaaattataaagaacaaggcaaaataatttgtatatagtgctggtatgtagaaattagtacaattaatcgaagatgcacatatcctgtgatctttctgtgccacatctaattatataatccagatcaatggaaacaagctaaaaaattcatcagtagagcacaa

SEQ ID NO: 875546 - DNA, 594 bp, Homo sapiens
gcaagactgagtgattcctaaatagaagatttctataaccccactttcttccccagacttaatgaagtaagagggaaaaaaaccaaagcaataccaaaggcaaaagagaaggagaatctacacccctagtctgatgatgcagtgaacgtccttgtgcttgaccaatgcacttgagaactcctgcgcagaggaggcagcctgtggtgctagagaggtgtgatgagctccccctaggagccagtagtgggckctgctgcttctcaccaggtaaatgtggtggcagcagaccaaagtgttacctacatctagctcagcaacttgaatggagctggaggctatttttctaagtgaagtaactcaggaatggaacaccaaatactgtatgttctaacttgtgagtgggagctaagctatgaggacacaaagacatacagagtgatataatgaactttgaggacttggagcggggaagttgggaagagggtgagagataaaagacagcatattgggtacaatatacactgcttgggtgacaggtgaacaaaaatctcagaattcactactaaagaactcatccatgtaaccaaaaactac

SEQ ID NO: 875547 - DNA, 633 bp, Homo sapiens
acatttttcataatctcaaatgctatgtaagaatgagtttatttgaaccaatatgaaaccaatatgaaaaagatgagaagtttatgagaaaagaaaccaaaatcttcacactaacaaactcaaatggaaacacatttagtaattacttatgttttaaaccagaattattgacccagtttttccaaagatttaccttaactatgtgaacttggattcttatattaatgtttctaagctaacatttttagtaagagggatttttttaaaccttccattttaaagtgttagtttccttattttctgtaaatttgagaaatatgagatttatataagtatcaatttgtgaaaactcatcagatcactgctcctttaagatatttaataatataatcyggaggtaataaaacatttcatatttgtacaatgagatatcaagggggtttctgaatcacagacacacagccctccagacacagaaagctcatagcttcagtctcaagttaaaaataatcccagaaacattaaaaaaaaatcactggtttagatctcaaagggctgtccttctagggaacataaaattcgtaattgattcgtgctcacaaatagacaaacatacaaacaataaaaaaaaag

SEQ ID NO: 875548 - DNA, 598 bp, Homo sapiens
ggacataaaaacggaaacaatagacattggggactactagaggagggagagaggaagagggcaaaagactgaaaaactacctatttggtactacgctcattatctgggtgatgggatcattcataccccaaatctcagcatcatgcaatatacccatgtaacaaacctgcacaggtaccccctgaatccaaaatagaagctgaaattaaaaaaaaaaaaaaatgccagcaaggctgggagcagtggctcatgcctgtaatcccagtactttgggaggccgaggcaggtggattacaaggtcaggagatcaaraccatcctggccaacatggtgaaaccccgtctctactaaaaatacacaaattagctgggcatggtggcacaggcctgtagtcccagctactcaaggaggctgaggcaggagaatcacttgaacctgggaggcggaggttgcagtgagctgagatttcgccactgcactctatcctagcaacagaacaagactccatctcaaaaaaaaaataagataaaataaaataaaaaataaaaaatatgccagcaaaagttgcttaaaaaaaaaggagctaggtgatttggtt

SEQ ID NO: 875549 - DNA, 598 bp, Homo sapiens
ggacataaaaacggaaacaatagacattggggactactagaggagggagagaggaagagggcaaaagactgaaaaactacctatttggtactacgctcattatctgggtgatgggatcattcataccccaaatctcagcatcatgcaatatacccatgtaacaaacctgcacaggtaccccctgaatccaaaatagaagctgaaattaaaaaaaaaaaaaaatgccagcaaggctgggagcagtggctcatgcctgtaatcccagtactttgggaggccgaggcaggtggattacaaggtcaggagatcaaaaccatcctggccaacatggtgraaccccgtctctactaaaaatacacaaattagctgggcatggtggcacaggcctgtagtcccagctactcaaggaggctgaggcaggagaatcacttgaacctgggaggcggaggttgcagtgagctgagatttcgccactgcactctatcctagcaacagaacaagactccatctcaaaaaaaaaataagataaaataaaataaaaaataaaaaatatgccagcaaaagttgcttaaaaaaaaaggagctaggtgatttggtt

SEQ ID NO: 875550 - DNA, 598 bp, Homo sapiens
ggacataaaaacggaaacaatagacattggggactactagaggagggagagaggaagagggcaaaagactgaaaaactacctatttggtactacgctcattatctgggtgatgggatcattcataccccaaatctcagcatcatgcaatatacccatgtaacaaacctgcacaggtaccccctgaatccaaaatagaagctgaaattaaaaaaaaaaaaaaatgccagcaaggctgggagcagtggctcatgcctgtaatcccagtactttgggaggccgaggcaggtggattacaaggtcaggagatcaaaaccatcctggccaacatggtgaaaccccgtctctactaaaaatacasaaattagctgggcatggtggcacaggcctgtagtcccagctactcaaggaggctgaggcaggagaatcacttgaacctgggaggcggaggttgcagtgagctgagatttcgccactgcactctatcctagcaacagaacaagactccatctcaaaaaaaaaataagataaaataaaataaaaaataaaaaatatgccagcaaaagttgcttaaaaaaaaaggagctaggtgatttggtt

SEQ ID NO: 875551 - DNA, 564 bp, Homo sapiens
ttagaaatttcaacaggaatttccagcatggtctcagaggattggaatctcatattcaactctgtattcccagcacctagtaaaatgtagtaagtataaagaatacatctgtgatgaaaagatgaattagtaggatrgtcacataatttatagtctaaatcaggatccttttgagaatgaaaggagatattggccaggtgggtcaacagagtaacagaagtaaaacaggacatgtgaaaacatatccagaaaaccaggatatgtgatcaccctatgcatagggaaacagagaagaaagagaagtgatggggtgaaagaatgatagagaaaaaatatgcctcagctgggcacagtggctcacgcctgtaaccacagcattcaggaggccgaggtgggtggatcacttgaggtcaggaattcaagaccaatctggcccacatggtgaaaccctgtctctactaaaaatacgaaaattagctgggcatggtggtgcacacctgtaatcccagctactcgggagactgaggcaggagaattgcttgaccctaggaggtggaggttgca

SEQ ID NO: 875552 - DNA, 577 bp, Homo sapiens
gatatggatattaaggagtgctcacaggttaaaaacaattttttaggccaggttcactggctcttgcctataatcccagcgctttggaaggccaaggcaggcagatcacctgaggtcaggagtttgagaccagcctggccaacatagtgaaatcccacctctactaaaaatmcaaaaaaaaaaaaaaaaaaaaaaaattcactaggtgtggtggtgcacacctgtagtcccatctagctgggaagctgaggcaggagaatcagttgaacctgggaagcggaggttgcagtgagctgagatggcgccactgctctccatcctgggcaacatagtgagactccagctcaaaaaaaaaaaaacaaaatttaaaaaagagtaaactattcactgtcaaattttacttagcagcactacacacaatatagctagaaaaagatttatttcttgtttaaaatatttttaattgttttccatctcataaaaggtaggcaaccttttactaagttagtcatctaacagccaatatgtgttagtcacagtgttaactactagggaaagattcaaacttgcatatgag

SEQ ID NO: 875553 - DNA, 582 bp, Homo sapiens
tctgtattccttttcacatatcattagcacaaatgtgaaatatcagaacaaaatttttcacacaacttcaaaatttttagaacaatactcaagggaaaaggtgtttatttagaacaatgaaaacaatgagacattaacttccagcttaaataaagttgattgtgtgcataaaaatggtgaaaatattggactttcttggcaaaagaagaaaggggaagactttatattttctgacataatattcatcatttgtctttggtttgtgtattatgtgtatgattttgaaaaaaatgcatcaaagatataactttctggtgtttgctttgatattatccttgcaaacagaaaagttggcacatgtttctgtataaaactggtcaaagttggcctaggaatgatcttacattgtactttcactttacatcataytgtaagagtttaataatagctaaggcatcagcattgatgtggacttattatacctattcaagaggtggtgtgaggtttaggagagttatgtgccctttatcataaaacaaatctatgaagcatttatataaaaacccagtatttctggtttca

SEQ ID NO: 875554 - DNA, 554 bp, Homo sapiens
caattatgtcatggcttctctggagaacccaataaacaaattatcttgaagagaatgtcacctgttgggttctgcagcttaataaggctgcagtgccatcagcacagagtcctaacgcgcctcacaggagaatgtcttggacacactcctataaattaattttctaattctggctctgccaccagctmatttggtttctctggattaatgatgccacacctaaaaatgctgggattagactagatgttccctggcatctcttacatctctcacattttttagttctctaatttttattctgtttcaaaatgaaattaaaatattctacatccacaaagtcatcttatgtgtgatttataacagtgtgcattggggaaaaaaaaaggctatagcagaattctcagaataagttgcagttaaaataaggcattattaatgtccttagtacaccatacaatatatcctcagacaagataagaaagtataagttttcaattgttattaattactgcatactacgcacctgcaagaaatgttcaaaaactgcagaaata

SEQ ID NO: 875555 - DNA, 554 bp, Homo sapiens
caattatgtcatggcttctctggagaacccaataaacaaattatcttgaagagaatgtcacctgttgggttctgcagcttaataaggctgcagtgccatcagcacagagtcctaacgcgcctcacaggagaatgtcttggacacactcctataaattaattttctaattctggctctgccaccagctaatttggtttctctggattaatgatgccacacctaaaaatgctgggattagactagatgttccctggcatctcttacatctctcacattttttagttctctaatttttattctgtttcaaaakgaaattaaaatattctacatccacaaagtcatcttatgtgtgatttataacagtgtgcattggggaaaaaaaaaggctatagcagaattctcagaataagttgcagttaaaataaggcattattaatgtccttagtacaccatacaatatatcctcagacaagataagaaagtataagttttcaattgttattaattactgcatactacgcacctgcaagaaatgttcaaaaactgcagaaata

SEQ ID NO: 875556 - DNA, 601 bp, Homo sapiens
  misc_feature 1, 2, 3, 4, 5, 6, 7, 8, 9, 10, 11, 12, 13, 14, 15, 16, 17,18, 19, 20, 21, 22, 23, 24, 25, 26, 27, 28, 29, 30, 31,32, 33, 34, 35, 36, 37, 38, 39, 40: n = A,T,C or G
nnnnnnnnnnnnnnnnnnnnnnnnnnnnnnnnnnnnnnnnaaaagtgttcctatttccccacagccttgccagcagttattgtttcttgactttctaataatcaccattctgactggtgtgagatggtatctcatcgtggttttaatttgcatttctctaatgattagtgatattgaggtttttttcatgtttgttggccatgtaaatgtcttattttgagaagtgtctgttcatatcttttgcccactttttgatggggttgtttgtttttttcttgtaaatttgtttaagttccttataaattctggatattagacctttttcagatgggtagatttcaaaagttctctcccattctctaggctgcctgttcactctgatagttccttttgctgtgcasaagctctttagtttatttagatctaatttgtcaattttggagaccattattctaagtgaagtaactcaggaatggaaaaaccaaacattgttcttacttataagtaggagctatgaggattcaaaggcataagaacgatacaatggactttggggacttagggaaaagggtggaagggaggttagggataaaatactgca

SEQ ID NO: 875557 - DNA, 620 bp, Homo sapiens
gatttgcatttctctaatgatcagtcatgttgagctttttttcatatgttttttcactgcatatatgtcttctttagaaaagtgtctgtttatgtcctttgcccacatttttatgagttttttttttttgtaaatttaagtttcttattaatgctaggtattagtcctttgtcggactcatagtttgcaaaatttttcttccattctgtaggtggtctgtttaccctgccgatagtttctatggctgtggagagctctttagtttaattstattacatttgtcaatttttgcttttgttgcaattgcttttggtgcctttgtcataaaatctttgcctgttcctatgtctagaatggtattgcctagcttgtcttccagggtttttatagttttgagttttacatttaattatttaatgcattttgagtcagtttttgtatatggtttaagaaaggggttcagtttcaatcttctgcatatggctagctatttatcccagcaccatttattgaatagagtcctttcccctttgcttgtttttgtcagctttgttgaacaccagacagttgtaggtatgcagccttatttctggaatctctattctgttgcattggtctat

SEQ ID NO: 875558 - DNA, 628 bp, Homo sapiens
gacctagtgatcctattactgggtatatacccaaaggattataaatcatgctactataaacacacatgcacatgtatgtttattgcggcactattcacaatagcaaagacttgtaaccaacccaaatgtccatcaatgatagactggattaagaaaatgtgcacatgtacaccatggaatactatgcaaccatagaaaaggatgagttcatgtcctttgtaaggacatggatgaagctggaaaccatcattctgagcaaactatcgcaaggacagaaaaccaaacaccacatgttctcactcataggtggaaattgaacaatgagaacacttggacacagggcagggaacatcacacactggggtctgttttggggttgggggatgagggaggaatagcattaggagaaatgcctaatgtggatggcgagttgatgggtgcagcaaaccaacatggcacatgtayacatatgtaaaaaacctgcacattgtgcacatgtaccctagaacttaaagtataattttttttggtgccagtttcatgagtctaaagtaataagtgtctatatttcttttaaatactttatataattaatttttttaatgtgaaagacctgcagtgagctaca

SEQ ID NO: 875559 - DNA, 613 bp, Homo sapiens
ccatcctccagactccagaatagtagatccactgacagcttgcatagtgcacctggaaaaaccacagacactcaacaccagcttatgaaagcagctggggcaggggggcaagggagtagctgtaccctgcaaaaccaccagggcagagctacccaaggctgtgggagcctacctctcacatcagtgtgacctggacatgagacatggaatcaaaggaaattatttcagagctttaaggtttaattactrcctcattggattttggaattgcatggggcctgtagcccctttgtttttgccaatttcttccatttggaatgggtgtatttacccaatgcctgtacccccattgaatccaggaagtaactaacttgcttttgattttataggctcataggtggaagggacttgccttgtctcagaggagactttgaacttgaacttttgggttaatgctggaatgagttaagactttggggaactgttgggaaggcatgattggttttgaaatgtgcacacatgagatttgggatggaccagggatggaatgatatggtttggctgtgtccccacccaaatctcatcttgaattgtagttcccataagtcccact

SEQ ID NO: 875560 - DNA, 613 bp, Homo sapiens
ccatcctccagactccagaatagtagatccactgacagcttgcatagtgcacctggaaaaaccacagacactcaacaccagcttatgaaagcagctggggcaggggggcaagggagtagctgtaccctgcaaaaccaccagggcagagctacccaaggctgtgggagcctacctctcacatcagtgtgacctggacatgagacatggaatcaaaggaaattatttcagagctttaaggtttaattactacctcrttggattttggaattgcatggggcctgtagcccctttgtttttgccaatttcttccatttggaatgggtgtatttacccaatgcctgtacccccattgaatccaggaagtaactaacttgcttttgattttataggctcataggtggaagggacttgccttgtctcagaggagactttgaacttgaacttttgggttaatgctggaatgagttaagactttggggaactgttgggaaggcatgattggttttgaaatgtgcacacatgagatttgggatggaccagggatggaatgatatggtttggctgtgtccccacccaaatctcatcttgaattgtagttcccataagtcccact

SEQ ID NO: 875561 - DNA, 613 bp, Homo sapiens
ccatcctccagactccagaatagtagatccactgacagcttgcatagtgcacctggaaaaaccacagacactcaacaccagcttatgaaagcagctggggcaggggggcaagggagtagctgtaccctgcaaaaccaccagggcagagctacccaaggctgtgggagcctacctctcacatcagtgtgacctggacatgagacatggaatcaaaggaaattatttcagagctttaaggtttaattactacctcattggattttggaattgcatggggcctgtagcccctttgtttttgccaatttcttccatttggaatgggtgtatttacccaatgcctgtacccccattgwatccaggaagtaactaacttgcttttgattttataggctcataggtggaagggacttgccttgtctcagaggagactttgaacttgaacttttgggttaatgctggaatgagttaagactttggggaactgttgggaaggcatgattggttttgaaatgtgcacacatgagatttgggatggaccagggatggaatgatatggtttggctgtgtccccacccaaatctcatcttgaattgtagttcccataagtcccact

SEQ ID NO: 875562 - DNA, 579 bp, Homo sapiens
actgtgtgagataatcaatgtttattgttttaagctgctaagctttggggtaatttgttatatagcaatagataatatactctgcactcaaattatttcctgtgagaactagaggtgaaaggtaaggtatctctgtcatgtcagagtggctaaggcttttaaagcaatgaccaaggacaggaattcttagtttgagaagcttggcccaggggcagataatagaacttgtttgatttctgtttacactcccttctcaaagaaggtgcaacaacctacaacaaaaatatgttcatggaagccatggtaaataggaaagaggaatatggtaaatagsaaagaggaatatggtaaatagcaaagagaaataggaaagagaaaaccacaaccagataaaagaaatggtaattgttaagcataacggtcaacataattgcaacagttgaactttaatcatgactccgagccatggtaaaagggaaaacttagcaagttctatagctcttattactggaaaggaagcaaagcttttcccagctttagatgtttaaaaaaattatcttgtggactttaatatagatg

SEQ ID NO: 875563 - DNA, 579 bp, Homo sapiens
actgtgtgagataatcaatgtttattgttttaagctgctaagctttggggtaatttgttatatagcaatagataatatactctgcactcaaattatttcctgtgagaactagaggtgaaaggtaaggtatctctgtcatgtcagagtggctaaggcttttaaagcaatgaccaaggacaggaattcttagtttgagaagcttggcccaggggcagataatagaacttgtttgatttctgtttacactcccttctcaaagaaggtgcaacaacctacaacaaaaatatgttcatggaagccatggtaaataggaaagaggaatatggtaaataggaaagagraatatggtaaatagcaaagagaaataggaaagagaaaaccacaaccagataaaagaaatggtaattgttaagcataacggtcaacataattgcaacagttgaactttaatcatgactccgagccatggtaaaagggaaaacttagcaagttctatagctcttattactggaaaggaagcaaagcttttcccagctttagatgtttaaaaaaattatcttgtggactttaatatagatg

SEQ ID NO: 875564 - DNA, 620 bp, Homo sapiens
cggaggccattattcttaatctatacaacaaactgccatggcatgagtttacctatataacaaacccgcacatgtacccctgaaactaaaagttagtgtttttacaaaagttgccatgtccaagaaaagttctttccagagtcatgagccaaaataggtcccacattatcattctctatatgaagaagctgcagcccasaggcatgaccagcatggctcaggatgacccatctacttatagaataccacatcctgcgagggctgcccagaaggccctcatggccacagacatacagttatcctagatatctctctttctcatgcaaatttccgtgctcagctctgattaattgtgtgctcagctctggcttctctgctgagctgtggatctactgaccaccctgacatttttaggagactgtctcaaaaaagcagcaaacccaaacttcccaaacaaaatcgtgatacccaatccccatcccactggagtttcctctctcagtaactggcatctccatatgttccactgtacaagccagaatcttggggattgtccctaatgcctttatgttctccactgttcacatccaatctagcaccaatatccttgattttgtctc

SEQ ID NO: 875565 - DNA, 637 bp, Homo sapiens
catcgtggctggcttcgagagagaaagctaaaattctgaaattgatatgcaaatgcacaggacctaaaatatcaaaacaaacttgaaaaagaataacaaagttggaagactcccagtatctaattttcaagactcactatagtaatccaaattagaatcattgtagcaaaaagatagacacatagatcaacaggaaaaaatagagtccagaaatagacccaaacatagtacccttaattgattttcaacaaaagtgctaatgcaatttaacggggaaaatgcattctttctctattgctgcataacacattatcacaaatttatcagaataaaacaacactgatttattatttgacatataattatatatttcacatttttctatatgtcagaagtctttgcatagtgtaagtgagttctcggcttatggtctcaaaaggctaaaaccaaactgtcagcctgcatgtgctctcatatggaasttggattcctcttccaagcaagctccttttggtcataggattgaagccctcagttcctggagaccgctccctgttccctgccatgtgaccttctccacgacaagctctcacgctttgaatttctttgacttcttttaaggtcaggccaagaaagg

SEQ ID NO: 875566 - DNA, 538 bp, Homo sapiens
gatgcctataattcttaactttttaccagggcataacaagttttctgacagggcatctgtgcagatgcagtctgaccaagggatgggtcgctccctgcttcatccttgctgatgtacaagttaagcattccactaaaaggcttatcaagagtgggagacttggccggatgcggtggctcacgcctgtaatcctggcactttgggaggccgaggagggcggatcacctgaggtcgggagttcgagaccagcctgaccaacatggagaaaccccatctctactaaaaatacaaaattagccgggcgtggtggcgcatgcctgtaatcccaggtactcaggaggctaargtaggagaatcgcttgaaccctggaggcggaggttgcagtgagcagagatcgtgccagcctgggcaacaagagtaaaactctgtctcaaaaaaaaagtgggggggcggtgaggagacttggctaggtgcgatggctcacaatcttagagcactttgggaggccaaggcaggtagatcacttgagcccaggag

SEQ ID NO: 875567 - DNA, 650 bp, Homo sapiens
aactctttgaatatgttatgattccaagtgattttacactctagctggaagaagacacagttctgcaagaaactaagtaattcaagttgctcaacaacaacaagaaacttgtcacctcttaaataatattttcttaaagaaactgtagaaagcaagcaagaagatatttatgtagttctgtgagatttagtatataattagatatatattgtcacatatatatgcatgtgtttaaatcagatatatctcctgagtggagtctgtatttcccatacactatattttctatgmacctccatccatatatcatacttcaagctgtgttctgctagacaatttaaagccctacaaatttagaaagtaatgttttaataaaaatgcatgctattattgattgctgtcataatataaccattgttttgctaactctctgatttacatgactgaaaactctcctataattagttatttcctaaaatttaaggataatagagcagagggccacaagtgtttttttgtttgtttaattcctatgaacatgattttcccttgaataagactttgtgctataatagattttctcctaatgttaatatgatttatgaaactggtattgaatattttccttcaaatttatggcccgatggata

SEQ ID NO: 875568 - DNA, 572 bp, Homo sapiens
tagtaatagccattctgaatggggtgagatggtgtcttattgagtttttgatttgcatttctctaatgattagtgatgttgagcattttttcatctgcttgttggcctcatgtatgtcttcttttgagaagtatctgttcatgtcctttgccaacttttaaatagggttgtttttgcttgttaatttatttaaattccttatagagtctgaatcttatactyttgtcagatgcatagtttgcaaatattttctcccattctctaggttgtctgtttactctgttgatagtttcttttgctatgcataagctctttagcttaattaggttccatttgtctttttttttttttggtcacaattgcttttggcatctttgtcatgaaatattttccagagaccgtgtacagaatggtatttcctaagttatcttccagagtttttacatttaagtcttcagtagttttaggttttacatttaagtctttaatccatcttgagtttatttttgcatacattaaaaggaaggggtccagtttcagtcttctgcatatggctagtcagttattcaagc

SEQ ID NO: 875569 - DNA, 664 bp, Homo sapiens
tgctgtgcactggtccctgtggtagggttaactcccttcctaaataccatcggctgtgcaatgcaatgtgtttccagaatgtggaacaagaaatgcatttctagaatctgaatccctagaaataaaagaaaaaaaaaactggccaagggtgatatgtttgataagattcagtaacaaataataataattttaaaaacctcgttgaggcttaagtataaaacagactattatggactcctgcaagggggaagtccagggaaagatctgggtcccaaagagactggatttaggagctgagatgatgccactagaaccataggctgcttccatcagcatgggctttatgcttaggaaagacggccacctgcagctccaggactcacaacccaggtgtaaagagaagcactgtttcctaaytgttgcagataaagtccaaggacagacattccttgcctctgaatggccccactttgaatacctgcccagccctgtgcctctcattcccatggaatgtaccacgctcattggacaggcctagggaaggaatcccaccctaagggactgacagtcagggaggggcagctcccctaaagtaaagcagggtgttggcccattgcaaggagggcaatgacttcttggggtgaagagactggtgggagtgggg

SEQ ID NO: 875570 - DNA, 611 bp, Homo sapiens
ctcaaggttcttctggaatgacagaatgcactgaatatgcttgtgattgctttatgctgagaagcaggaaagagtttaatgtcagtgaaattttcaagtaaatatagtttggataatatgattttgcataagtagatagggagcagaatagggtaattatttaggagttgttactcaaaagtggcccactgactcacaacatcaagatcacctggaggcttgggagaaatgcagaggagaaggccccacccctagcacctaaatcagaagttgcattttaacaagttcccttggtcacgtgtatacacaggcaagtctgagaactgtctatttagagcaaggagtctatggtgggagagttgagtttgaataccagctctgccaattagttgttccgtgacattgggtaagtctcytaaactctgtatctcaattttctcatgtgtaagtggggttaataacaaaagtaatgtcataggactgttgtgaggattaaatgagtccacacctgtcaaagtacttaagacagtgcctgggacagagtaaggaatctgcaagtgttagagatgatgatgatggtgatcgtgatggtgatggtgatgataatagta

SEQ ID NO: 875571 - DNA, 638 bp, Homo sapiens
aactcagaaaatatataagcattactcctgtcttgaaaatgaaaacctattttattttattttattttgtttttcagcaaatggagacaaagctagaatatcctactgtttagtcttcaagttataatttatatgtgtgtgtatgtatgtatatatatatataaagaaactaccagtttcaaggattattaagtcttcccttaattcttaacctggccctccaactcygtaacatcgttaggcagtgcctcccagtgagcgccaaggcctgtggtctgcgcctggggatgtggtgctttctctcactgggccggttctgtttctgctcttttccctaaccagaaaggcttctaaagagaaaagatttccaattctgagaaagaaatggtggaatctacctattattttcattttcaaaataaaaataactatttcttttcttttctttttttttctttttttgcttttaccatgtctcatatatttttctcagccacatcatgggataaaacaataacaagctaaccagatctgatgtgaggttggtaaaagaaaaaaaacacaggggggatgagccaagatggccgaataggaacagctcctgtctacagctcccagcgtgaccgatgcagaagacg

SEQ ID NO: 875572 - DNA, 579 bp, Homo sapiens
ctgttgccactgtctgagttctctgtctagctcaaactgtgaagtttttgagggcagggaccaaaatacattcccagttctctctgctgggcttaaaagagtgtctagcatgctgaaagagctcactaatttctgtcatgaagcactatttcttcttttctaaagcacattaacaatttcagataaataactccaggcataaccaaaactactatgttatcattctgcgcttctaacattcaggggaacatttgacgaggaatttggtgcagcttatttttctttattcctaattttatgtgtctgtggtaatatattttccacttgccccttatctctccttttcagggaaaaatgtctagaaaaaaatatctaaaaatgttcattttcttactcasttatgccttacttgttcttatttggaaacaattcccaactctactcttttcagcagtaatcagctttcatgtgtgatggtttctcttttaaatatttttcactaaaataacgcttcataccataatagttgtagaaaattgctatttcatatatgaggtgtatctttaaatcaatgtatga

SEQ ID NO: 875573 - DNA, 586 bp, Homo sapiens
gaatgcctgtgtgtcagagagaaatagcttagataaacggatcagattagaagcattgatgaagaaagggaacaggggatgagaagcaaatgttgatgggacaattgataaaatccatcttaatatgtttgaggtctgggaaatttaggtctaaagccaaagagggagtgaaaagtgaagatcaactattaaaagccatatacagagtggttcaagaatcagatgaaatagctgaagaggcgaatgtagagaggaaataaaacacaaacaagaacagaygcttaagaaatgcctacatttagaagttgttggaaaaaattccagacaaaggcaaagatggcaaattaaaatcaacacgattcaacctcgaaagagaaagcactgtgaaggagttctgtgtaacaaaatcaaatgctgcaaagaaagttgtgtaaggtacttgaaaaaagcaattgttattgttaacgaagacaaatgtgattagaataatgatggtcaaagctggaatctaaaaaggttttttgtttttaggtgagtgatgaggaagtgggagcagcaagtgaaatcgtttattccaagaatgtta

SEQ ID NO: 875574 - DNA, 659 bp, Homo sapiens
tttacaaattgtacacatgtctagaggattccagagatagaaaagattattctttgccagaaaatgtaaagaaaaactattggaggggtatcgtcaactattttaacttgtttgtgggttacatttacttaatattctcagtttgtttgttcttattgttgttttactatctcccttatttggtagtaaatacaagcatgtgtaaaattttaggagtcagaaactagacctgatttctgatcaggaatttaaatccatgttgtaagtgaatctcacaaaaagtaatatttatttcyctggggcaaaatgtcacattagagcataataagcgatggtgagctattttaattctcctaaaatgcaacacaactattgaattaaaattcgttacattcttgagagtttataactttttcatatactccattagataacaacactgagtcatttcaaatgtagttacattaaaaggcatgttggaatgtactttaattaccatgataatagtgacaatgcttaccaggaaaagaaaagcatattgttcaattagtgttcaaataaaaacaactgtatatcttttagaagaaaatgttccagattctgcaacttcaaaaaaaaaaaaaggtagttaccatgtgccaactacttttttgatgttc

SEQ ID NO: 875575 - DNA, 718 bp, Homo sapiens
agctagagaacatctcagaattattaatagatcaaagtgctctttacctggaagttatgtattgtatctagtcaaggccaaaagtaattaaagaatattgccctgtgtttagtgaatactagttgaggtttgtttgcaatgttcctatattataaaacattttattatagtggaaacttttttattggaaagggtgactaaggctctaataataagtgatacttatgaggcaatgcttttattttttttcttattgtcataaaatayctttacagagcaatattgtatccagatatctctcttttttaatatagccctaccataactgttatgttgagatattaagttgcttggtgtttgtaattttgtatgtgcactgttgccctgaaaatcatgggtcattcattttaggatgctaactctattcttgtaaacccaaactataacatctccactgatttatttaataagtatatattaaatagtttttatttcttttgaaatgcacccctaggtctctaatataaaatgatgtaacaatttcttataaactgcatgtttttacattaaacagcttaaaatacattctcgaaataaaagtaaatgagattatatatttaattcaattttgacataaaactgtataaagaaaagttttttgtcaatgctctgctgtggttttgttaataaaaacagattattatctaatgaaagttaa

SEQ ID NO: 875576 - DNA, 718 bp, Homo sapiens
agctagagaacatctcagaattattaatagatcaaagtgctctttacctggaagttatgtattgtatctagtcaaggccaaaagtaattaaagaatattgccctgtgtttagtgaatactagttgaggtttgtttgcaatgttcctatattataaaacattttattatagtggaaacttttttattggaaagggtgactaaggctctaataataagtgatacttatgaggcaatgcttttattttttttcttattgtcataaaatacctttacagagcaatattgtawccagatatctctcttttttaatatagccctaccataactgttatgttgagatattaagttgcttggtgtttgtaattttgtatgtgcactgttgccctgaaaatcatgggtcattcattttaggatgctaactctattcttgtaaacccaaactataacatctccactgatttatttaataagtatatattaaatagtttttatttcttttgaaatgcacccctaggtctctaatataaaatgatgtaacaatttcttataaactgcatgtttttacattaaacagcttaaaatacattctcgaaataaaagtaaatgagattatatatttaattcaattttgacataaaactgtataaagaaaagttttttgtcaatgctctgctgtggttttgttaataaaaacagattattatctaatgaaagttaa

SEQ ID NO: 875577 - DNA, 631 bp, Homo sapiens
gccactagccacatgagtgatggggctttggctaatccaaattgagattgtgaagacttaataggaaacaaagaatgtaaaatgtcacattcataactcttacactgattacatggtgaaatgataatattttcataagctgggttaaataaaatacattacttaaagtaaattcacctgtttctttttaatgtttagaatatggctactaaaaaaattaaaattatrtatgtgactagcatttattgcttaaattctattttcttagatagctttgtttcaatgaatggattaatcaacaatgtattttaggtataaatttcaatattaggttgctcttgattttttcttttttaagtataattctgtttattttatagattcttaatgataggagacccttgaaattattttcagctttttaagcaagtacttttaggttattaagtttaattgatagaaattatatacagttatgttaggcagcataatgttttgatatatgtttacctcatgaaattattaaatcaagctaagtaatatattcatcacctcacatactaattttttttatggtgagaatatttaaattctactctgttggcaatttccaggtatgaattataccatc

SEQ ID NO: 875578 - DNA, 633 bp, Homo sapiens
actgcaacttcttgcctctcgggttcagccattctcctgcctcagcctccctagtagctggaacaacaggcctgcaccatcacacccagctaattttttgtatttttagtatagatagggttttgcaatgtttggccaggctggtctcgaactcctgacttcaggtgatccacccaccttggcctcccaaagttcctggataacaggtgtgagcctgttatcayggtaggcagtatgactatttctttaaaagttaaatacacaattaccatatgatccagcatttccatctctgggtatatacacagaataatttaaagcaggcacacaaacaggtatttgtactgtcatgtttctagtagcattatttacaatagccaatagttggaaacaaatgtctgtaaatggttgcatagataaaaatgtctctgggcatatacacagaataatttaaagcaggcacacaaataggtatttgtacagtcatgtttctagcagcattatttacaatagccaatagttggaaacaaatgtctgtaaatggttgcatagataaaatgtggtgtatgcatataatgtaatgttagccttaaaaggaatgaatttctggtacatgctagggtgtggataaat

SEQ ID NO: 875579 - DNA, 584 bp, Homo sapiens
tctgctgcccagtaatttataacagataaagaaaattcaggttgaaaacagccttgttactaacagatcccaggcaatttaattgaatatgagtcaatactaccaccctattggaattgttaaaattaaatgaagtacataaaatgcctgagacctagtaggcaccactacattttttagtgggtgtgtagagagaggatagtgtacagaataaagttccaccaaagtaacactaactttcttggaattagaatagtaaggtcattctttcaaaaacatcagtttaaamaaaaatcaaaggtaaagcaaaataatacaatttaatcctaatattgaatattcagttgatgtactgaaatattttacattatatacttctaaatgtaattaaagcaattttattttaatatttattgcttttttttattcattcgtttttttttttttgtgctataggcaatcctacttatcaggggtttaatgtgagacctgtcttgttccagtacatactattgtggaaaggactttagaaagggagaggaagaagtacacttagaattttataacttatgatagtatatagt

SEQ ID NO: 875580 - DNA, 674 bp, Homo sapiens
caagttattaatattaagttaaattgcctctatgtttaaattatggttatgaagaaacaataatatgtttcataaaattagtgtacttatttctcataatctatgcttcattcacctaataattaatttacttgtataaaaggaattttattatggtgtatactctattatcaactgtctggacttgtcttaattagactagctataaaaagggaaaactaaattctgacagctttatgtagttatttacattgctttacttttcgtatgcttttaaaaattaggttactcattcaatggatttaatgataaaaaatattatgaaattacccttattaattaaaatcatgctttgtgtaatttatccatgtctttataagctttgtatttttaataaaaggcacattgcccatattgtctgtgcccttttgtctggtaactttagaatatagtctatttgtctaatawcattttcttctaagttaattagataatttacaaaatcaggatcattaaaaatactctagcaatgtcctctggatcagtttctctcagtaattttgaataattctatggtgttcagggattccttacaaataagttgaattaattgagaatgaaagaatatagaggggaacaattaatttcaagaaaatgtgtaaatgctactctta

SEQ ID NO: 875581 - DNA, 606 bp, Homo sapiens
aaattttttagttcatataaaaatatgtattttctgtaccctgataattctatttttaatattttagtttaacttaatttattgatctattttatctgtccattatctttctatctatccatctatccatccgtctatctatctacccttgtgttcatgtacatatgtataaatgtgtgtatatactatggttataactgtaacagtttgcaataacttaaatacatgaaattattttttcaacaaaatcttttttaaaaaataatacaaaataggttcaaagatcagaaaggcaagtgatattttttgctcacctagagatggtcatttgttaatctcaatgtctctttcccatctatacagacaatactatttatcttatagaaacgttttaaagataaaagagttaagattaattataccatgggatcaaagatatgaaacgcyttctaagaagtgttgttgatactcatagttttatacaggaaatgaatattaagtaccttaaaacattaatatctctgagacctttgaactattttctctttaaacataatttattttatgtaaaattaaaaaaataaacatgtattcttaatcccactc

SEQ ID NO: 875582 - DNA, 616 bp, Homo sapiens
tttaaatttgtaaactgtaattatagcttcaaaattataaaaatagaagtctctagtaaccctattgatagtatttgcaggtagggtaaaatgttttttcggttcacaaactttttaagaggctgttgagctgccagtttttcttccacaaaattgtgttgtggtaaaacaatatcttacatgattaaattgttgattgctgataataatgacaaagttagaagttttgatttagctggccattgttttttatttaatttttttattaattatgtaaactatttcaaattctggttgtagaagagggaaagcaacgaagcgtttgctggttaacacatacataacacaaatatctttttctcattctacacatctgttcgagtattattttccactattctcttatggccacacytaagctgactcagcattctttgttcattcaatattcacaaagtactttttttgttttaagcacttagaagatgtaaatgcaaaataagataaggcccttgttctcaagacacttcccttttaaataagtcatttagaaaagtaaataagcaattctactgtaaagtcatactgccatgctagggataaaacacagggtgct

SEQ ID NO: 875583 - DNA, 636 bp, Homo sapiens
tgaatgcccttctgtataaagaactcttctgttgagaaaatgcaaaatatatgctaagcacttgaagaatacaaaaatgattaatataatgcctgccaacaagaaaccttgattttgtcggggaaaaacaagtatatcgsacattctgttatttgactgaggtaagataattgtcaaaagggaagtaaaagaaagtgttttgtggtttcaaggaagagggtcatcaaatggcctcttacaaggagggaaaggacacatttatgaatgaaggctcctttgggctaggtcttaaaggatgattaaggttttcaaaggggtgaactagaatggagtgtttcaggtggagggcatgaaactagcaggaatgcgaaggcctggaatagggaattcacaaaattgtcatgcttgggtgaaacttaatgagtaggtgtgatatgattataaaagcatccttcaggtgtagtaggaatgatttttaaatactagtttgaggacttagtgcttcatttggaaggaaatggagatcaattttgagcaatgaagagatgagcagatttgtgcttaggttaatccagcaacatatatctgaatgaattataataggaaaagaagggtgaacattcattaggtgaaaag

SEQ ID NO: 875584 - DNA, 636 bp, Homo sapiens
tgaatgcccttctgtataaagaactcttctgttgagaaaatgcaaaatatatgctaagcacttgaagaatacaaaaatgattaatataatgcctgccaacaagaaaccttgattttgtcggggaaaaacaagtatatcggacattctgttatttgactgaggtaagataattgtcaaaagggaagtaaaagaaagtgttttgtggtttcaaggaagagggtcatcaaatggcctcttacaaggagggaaaggacacatttatgaatgaaggctcctttgggctaggtcttaaaggatgattaaggktttcaaaggggtgaactagaatggagtgtttcaggtggagggcatgaaactagcaggaatgcgaaggcctggaatagggaattcacaaaattgtcatgcttgggtgaaacttaatgagtaggtgtgatatgattataaaagcatccttcaggtgtagtaggaatgatttttaaatactagtttgaggacttagtgcttcatttggaaggaaatggagatcaattttgagcaatgaagagatgagcagatttgtgcttaggttaatccagcaacatatatctgaatgaattataataggaaaagaagggtgaacattcattaggtgaaaag

SEQ ID NO: 875585 - DNA, 636 bp, Homo sapiens
tgaatgcccttctgtataaagaactcttctgttgagaaaatgcaaaatatatgctaagcacttgaagaatacaaaaatgattaatataatgcctgccaacaagaaaccttgattttgtcggggaaaaacaagtatatcggacattctgttatttgactgaggtaagataattgtcaaaagggaagtaaaagaaagtgttttgtggtttcaaggaagagggtcatcaaatggcctcttacaaggagggaaaggacacatttatgaatgaaggctcctttgggctaggtcttaaaggatgattaaggttttyaaaggggtgaactagaatggagtgtttcaggtggagggcatgaaactagcaggaatgcgaaggcctggaatagggaattcacaaaattgtcatgcttgggtgaaacttaatgagtaggtgtgatatgattataaaagcatccttcaggtgtagtaggaatgatttttaaatactagtttgaggacttagtgcttcatttggaaggaaatggagatcaattttgagcaatgaagagatgagcagatttgtgcttaggttaatccagcaacatatatctgaatgaattataataggaaaagaagggtgaacattcattaggtgaaaag

SEQ ID NO: 875586 - DNA, 618 bp, Homo sapiens
agattttacttatacttagtttttgttattgctgttgttggagggttttgttgttgtttttgttctgtttgtttggacctgcttcagctaagaaaacctctctagtatttgtacttattacctcagtagggctggtttgcagggtattttttccctttaatatgtcttctatcttatcaaacatgctttttatttgtgatttctcaggcaatttttctcttttccttcttcctgaaacagggctatatagaytgcaccaattttatgtttttttctgcctgctctatcagttttcccagtaggtttattactagtggtatagattggatttcttgtttcatgagtctagaggaaaaaggtctcggcccctctctccttccttgaattgggattataaaaattcaaaccaccattttattcaagccaagaatatgaagcatctgttattatttagaactatacttataactttaaacattcagggtaaaagttgatgtgtacattaatgtttcaacatggaaaaatttctgtcactcctaaataaaatacatatatgaatattccatgcctttttagttacccatttttatcatttttttaaaatttagtgttctgtgc

SEQ ID NO: 875587 - DNA, 581 bp, Homo sapiens
tcattttgctatttctataaccactgtaactctgaatcttattttaatctagaaaagatactgtattcttccctaaaccccaggttaaatcagacagggttggacttctcctcattgcatggcatcatcggaatgaatcaccctaacaaagcgacatgcttgtgtccctctgtggaaaattgcatttcatgcattgtgagaaaaaaactacatccagatttcatgtgagtgtttatcttgcagaaattcttggatacagttstgcttcatgattcattttccactctttattcatgttgagtcctctctagtgctggaatcatagcgaccagaggccatctctcttcaaatgtaaaaagtggttgattttcaaacagatgataaatgtgaaatcatctaaactactaagtaataaaaattaactggtagtttatcacctttctaattttgttttttttttttagagtttcattttccagtctctagagcagcagttcacagttgcagttttaccacacccggagtaactaacacatattatcccagtgggcaccacaggctttatttgaattcaccatagt

SEQ ID NO: 875588 - DNA, 655 bp, Homo sapiens
gcaaccaagtcttttgctttgtcagtctgccatctatcctcccctgccttatctacaagtaaagtaaataagagcccttttcttttagagacctgtgtaccttgcatctcttaaaaataagcacatcacaccatctctaaggcactagattattgattattggcccaaagacatcatgagcaatgataatagagagctagctattccacatatggttctatctgctggctatattctctttcttcattattttattttcatggaacaggactggataatattgttatactggaagctactgctttctctgtaactagcccctgatggkagacacattcaaacccaagcaacataagcaaggagtaaatggagaaatggcccagctgtgaacataacagtccactatttttacagggctctcaagggagcactcccaacatcagacaatcagaagcaaccatctggttgctttattccccaatgtacctccctgtatctctctcaaaaatttagctcatatcccacatgtttttaaagtattatgagtcaaatgaaagagttagaactatgtactcaagacaatttctaaagtctctttatactcagtgggattgtagtggatgatgtctagaggaaaccttattaatggtactgt

SEQ ID NO: 875589 - DNA, 652 bp, Homo sapiens
agcaattgctgttttatgattatgtttttcacatattcccaatcccactgaggtgctaatacatttggttcatctttccattttaaaagagacaatggctttgataatttgttcatggttactgcttagggagataatgacactcaaaattcccctaactgaatattataatattacgtctttggctctgctatttttaacagcttttaaagacaatagtgtcatttgggtttaaaaaaaagttcactgttcctactcattaaaggaatactaggttataaagacgagctgtaagagtcctagcagggcttcagattatatcatgtatttagtttatgaatctcattytgttatgaatctataactgaaacaactcccaatgcttcccccaggaagtaattaattggaaaccaaacaaacaaaccacatggaaaagactgaaatactttgtattactgtctgaaaatccaatggtaattttcaagttcattcccacctgagtcctacaaaaatatgctataagtgtgtgttcttcagctacaattctacctctctgtgtatttacaacagctaataagaacaccacccctagaatcaatttaaaacattttctttatgttttgtgaattgcaggaagcctcaacatgcaaat

SEQ ID NO: 875590 - DNA, 584 bp, Homo sapiens
ccgtgggcgtaggaccctctgagccaggtgtgggatatagtctcgtggtgcgccgttttttaagccgttctgaaaagcgcaatattcgggtgggagtgacccgattttccaggtgcgtctgtcacccctttctttgactcagaaagggaactccctgaccccttgcgcttcccaggtgaggcaatgcctcgccctgcttcggctagcgcacggtgcgcgcacccactggcctgcgcccactgtctggcactccctagtgagatgaacccggtacctcagatggaaatgcagaaatcacccgtcttctgcgtcgctcacgctgggagctgtagacgggagctgttcctattcggccatcttggctcctccccctatatatatatttttttttaatttcaacttttattttagatttgtrggggtacatgtacaggactgttactagggtatatgaaataatgctgaggtttgggatatgaatgatctcattacccagatagtgagcatagtacccagtaggttttcaacccttgcctcccttccttcatccctgctctattagtccccagtgtctattgttgcca

SEQ ID NO: 875591 - DNA, 658 bp, Homo sapiens
accaaattgtaaagcaggcaagttgagcagttctcaaaggctaaagaagcagcttataaccttaaaacatttagcaaacctagtatctgacctgcatactttagaccacatatttacattttgaagacatttgtattttaccaataatctttaagacttttatttctcaaagattaaagtcacatgaactaaaaggcattatagcttttatttttccttcaaaaaatatttgatctaagtrcttatttttctttaagccaattaattagagctctatttctatataaccatcacacatctaacacatatatgattacacagacagaagaagatccaatagttgtaagaattttcatttgcctatctcctaattgaaattactggactcagggtatagctctccaagaagcagggctagggaaacatgtagtttcccaggccaaaaagcaggcatacctggaagacaaaaacaaattttgagagggacctatttgcttttaattcctggggttccatgaggaaaacaaatatttttttcccaaaatggagtctgtggcaccttctctgtttttccccaggcatcccaggccatcagaagttatcttagggcctctgacttgtgcattaagagtggcaagacaaaatggagaaaagtaat

SEQ ID NO: 875592 - DNA, 650 bp, Homo sapiens
tgcctatcctcctattaagtagattatgattttgcttacataatattgggagaaaaccagggctaggaaattggaaaatattttaataaattctgtgtcatatgtaagttaataaaattacagaatctttgtcttcagaaatacacatacaaatacaatgttctaacyacttttattttctggctcaatggcagaatagccctagcatgtagtgaattgaaatgatattcctaaatcctaggccttgggagaacagcagttaatagtagctgtttcttgaagatggtgtggaaagctatacctaggtggaagaaaaaaaaatcctcatttagctgttctctaaaggaactgtggtacatcaaattaaaatgtaaatgagtccccaggtgttcaggtgaggcttgcctgcccattctccataacctctcaggttatattgctataatgtactttttcaaaaagttaagaacaatgccccaatatgatgttgaatgaatataccacattctcttgaccttatttccaactttgggtaatgtgtgactgtgtctcttttccagctcattctgaggttcaatttaacccagctgtgttatgtaaaagtgctagtgagagaaagagacacacagtaagtgtcatcttccccaagc

SEQ ID NO: 875593 - DNA, 634 bp, Homo sapiens
tagaagaaagtgtgggtttaagtctttatgaccttgcattcttaatatgacaccaagaaaaaaaaatcaaaaaacaagtaaccaaacaaaaagaaaagatctagaatagatgaattagatttattcatccaattcataaatatatgaaaatagatgaattagatttcatcaaaattagatgagttggttttcatccaattcaaaaaatcatagattaatttcatcaaaattaaaaacttggctgctatggtggctcacgtctgtaactccagcactttgggaggccaaggtgggtggatcacctgatgtcaggagttgaagaccagccttgccaacatggtgaaaccctgtctctactaaaaatacaaaaattagctgggaatgatggcggacacctacaataccagctacttgggaggccgaggraggagaatcacttgaacccaggaggcagaggttgcaatgagctgagattgagccactgcactccaacctgggggacagagtgagattctgtctcaaaaacacaaaaattaaaaactcgtgtatttcaagggagacaatcaagaaagtgaaaagacaacccacagaatgggagaaaatatttgcgaatgtcatatctgataaaggtcta

SEQ ID NO: 875594 - DNA, 688 bp, Homo sapiens
taggctgtaatccatgccttcagaggttctgatttttcaacaggcaccctagagttggaaaacactaattaaatactagaaaatttataaatgtttctattttgcaataattctggactgtgttttaattaacaaagatsatgttgaaggaattagttgcattgcaaggccgggaggaaagcaaggtacttaactatagcaacaatgcaaagggctaaaggcatgaataaagtgaaacaataaagtcacagtacctgggcataaaaccgcttttcagaaatagaacataaatgctaaagtcaattatagatcaacagagtcagaaataagaagatttctgaaaaaatattaaatctttcttgtctcaaaattgtctttaaaaattaattttgatataggaaagatgttaatttcatcaaatggtttgagtttggaatatctaactctctattcctctgtacctcttgtattttctttagtgttgagaggcaatatttttgacattgtaccaccataataataattataagtaatacttaaatcgtgcttactatgtaccagggaattcagtgagagatttgtgtagactaaacaatttaatcctcagaacaacctcatgaagtaggcacaatcattatcccagttttacagcaagacagactaaggcacagcaaatgtttggtaaatt

SEQ ID NO: 875595 - DNA, 577 bp, Homo sapiens
aaagatactcctcgagaagagcaactccaagacacataattgtcagattcaccaacgttgaaatgaaggaaaaaatgttaagggcagccagagagaaaggtcgggttaccctcaaagggaagcccatcagactaacagcggatctctcggcagaaactctacaagccagaacagagtgggggccaatattcaacattctcaaagaaaagaattttcaacacagaatttcatatccagccaaactaagcttcaaaagtgaaggagaaataaaatactttacagacaagcaaatgctgagagattttgtcaccaccaggcctgccctacaagagctcctgaaggaagtgctaaacatggaaaggaacaactggtaccagccgatgcaaaatcatgccaaattgtaaagatcattgagactaggyagaaactgcatcaactaacgagcaaaataaccagctaacatcataatgacaggatcaaattcacacataacaatattaactttaaatgtaaatggactaaatgctccaattaaaagacatagactggcaaattggataaggagtcaagacccatc

SEQ ID NO: 875596 - DNA, 577 bp, Homo sapiens
aaagatactcctcgagaagagcaactccaagacacataattgtcagattcaccaacgttgaaatgaaggaaaaaatgttaagggcagccagagagaaaggtcgggttaccctcaaagggaagcccatcagactaacagcggatctctcggcagaaactctacaagccagaacagagtgggggccaatattcaacattctcaaagaaaagaattttcaacacagaatttcatatccagccaaactaagcttcaaaagtgaaggagaaataaaatactttacagacaagcaaatgctgagagattttgtcaccaccaggcctgccctacaagagctcctgaaggaagtgctaaacatggaaaggaacaactggtaccagccgatgcaaaatcatgccaaattgtaaagatcattgagactaggcagaaactgcatcaactaacragcaaaataaccagctaacatcataatgacaggatcaaattcacacataacaatattaactttaaatgtaaatggactaaatgctccaattaaaagacatagactggcaaattggataaggagtcaagacccatc

SEQ ID NO: 875597 - DNA, 621 bp, Homo sapiens
aactcattcaattacaggtttacaggtgagtacaaatgctcaacaccattgccttgaataagacaaattttaaatgaaatctgagcttcagagctcaccattgagtcagctgagcctcctgcgttttttctatagttcaatttctttttctgtctaaccttacttctytcacacctttacaggtatttttttcacaagagcactgcctagcaaggtccatgaatgcaaatttctgcctcaaagtctgtttcccaaggaatctaacctatagggttgataacaatgttgatcctagaaagcagaatttaaaatgggattttagaaatgcactattcactgggctcctggcaatgaggaccctaattaaaagtagcagatagaatactaatagctgtgacatggcatagaagtgcaattgttaaaacgtacactggtgattaactggtctggaatactagtcaaaatgaatgcatttggtgggcacactatctgaagtatttgagacatatggaaaaataataagtactatggaattggatggggttaaccatgcattgaagaaaaacactgaaaggtttacagtgattaatcaccaatttaaggtgacatgtttggaagtat

SEQ ID NO: 875598 - DNA, 629 bp, Homo sapiens
ccaaattcaggttttctgactccaagtacagtgattttttttccattaattaaaaaacgtcattgactataaagaaatttaaatttatttttactaacaccaaatgttagggtttatattcaatgttttgactatattcatctgccagtctctgtttaccattatttttaatgataacattgatatttaaaagttttgtagtctcctaaatttttaataatataaaatctgcctcttctctttctctaggaagwcttttaatagtcgattattgtgtaaatcaatatgacaataaataaaaggacattttaaatggtcaggttaaaaattaaaagatggctgaatcacacacaaaatgcataaattcaccacacataaatcaaccaagttgactgtagagcgatttcaactatgttctttcaaaataagaaacactgaacctgtaagagagtatactcggataagatagtgatgcttcttttaaataataagatgaaaacattctctaaagcacacaggtgctctaaatatgagacccactctaaaatttttcttcttttgtgtagatttgccattctgagcttttgtgaccctctcttttcattttcttaccttccaaatggcctagc

SEQ ID NO: 875599 - DNA, 568 bp, Homo sapiens
aaaagttctgaaataaaattgttgattttacatgcttttttaaaaaattattttactttaagttctgggatacatgtgcagaatgtgcagatttgttacataggtatacatataccatagttgtttgctgcacttatcaacccatcatctaggttttcagcccaacgtgcattaggtatttgtcctaatgctgyccttccccttgcctcccatcccctgacaggccccggtgtgtgatgtttccctccctgtgtccatgtgttctcattgttcagcccccacttttgagtgagagcatgcagtgtttggttttctgttcctgtgttcgtttgctgctgctgatggcttccagctttatccatatccctgcaaaggacatgatcccattcctttttatggctgcataatattccatggtgtatatgtaccacattgtctttacgtagtctatcattgatgggcatttgggttggttccatgtctctgctattgtaaacagtgctgcaataagcgtatgtgtgcctgtgtctttatatattcctttgggtatatacccagtaatgggatt

SEQ ID NO: 875600 - DNA, 630 bp, Homo sapiens
ctgtttaatttttaggtgctgttctctagttgttaataaaaactatgttccacttacttttatgggactacataaaagaaatgcaaacagagattgggctttaggtcatgggcttttagaagtttcaaggatggacatgtttacataaaatgaaaaaaacattctaaaggtagagatagcataaasttaatacctttattataaaccaatataacttaatttttgaaacatcttaatttcctaatatgctgtctcccatgccataaaatcaactagacttttgtttaatatagttagtagataacaagtatcaaagaaacacaaccacaatgtagttggatgagtttatatgacatgttatatattttccttgactttatggtggagtcagggattgccaatactaatgttcacatacatggcgttagtctgggttttaatgtcatgttgtcatagaacttaattttttaaaccttatattttactgtttttatcaaaaagatgagtttagaatctatacatttttattacttcataaatatagctctctattttttatcatttccaaaacttctactacatgaagcaataaaattgaaacatgggaaattatagtattaaacatgaaaa

SEQ ID NO: 875601 - DNA, 630 bp, Homo sapiens
ctgtttaatttttaggtgctgttctctagttgttaataaaaactatgttccacttacttttatgggactacataaaagaaatgcaaacagagattgggctttaggtcatgggcttttagaagtttcaaggatggacatgtttacataaaatgaaaaaaacattctaaaggtagagatagcataaagttaatacctttattataaaccaatataacttaatttttgaaacatcttaatttcctaatatgctgtctcccatgccataaaatcaactagacttttgtttaatatagttagtagataacaagtatcaaagaaacacaaccacaatgtagttggatgagtttatatgacatgttatatattttccttgactttatggtggagtcagggattgccaatactaatgttcacatwcatggcgttagtctgggttttaatgtcatgttgtcatagaacttaattttttaaaccttatattttactgtttttatcaaaaagatgagtttagaatctatacatttttattacttcataaatatagctctctattttttatcatttccaaaacttctactacatgaagcaataaaattgaaacatgggaaattatagtattaaacatgaaaa

SEQ ID NO: 875602 - DNA, 651 bp, Homo sapiens
tgagttggaatcttaaaattaaaaggtatataatttggtttacaaatcaaatcgatcttttccatgtttatagtacttgctattttgtcaccaaatgttgctacaactagaaaggtagatctttacctctttaaccacatgcaatacacctaacatgaaataaatgtaaggtacatttatgcagatggatcatactaggaacttatggcaaaaattttatggcaaaaaaaatgaatgggcactgggagaacctaaaacatacactttcctgctctggaaatatttcattagcattctgtctggcttttacatttctcagaccttctctttcaatctttagttaccaaatttttgactcggtcagtgtctttgtctgataggagygccataacaaaatgccacagactgggtgtcttaaacagcatgactttattttctcgtagttctggaggctggtggtctaagttcaaggtgccggcagtggtggtttctccggaggcctcttcctagcttgtagacggctgtattcccattatgtcctcacagggccttttctctgtgcatgtgcattcctggtgtttctctgtcttcgtgtaaggacaccaggcacactggattacagcccaagcttatgacctcatttaaccttaa

SEQ ID NO: 875603 - DNA, 651 bp, Homo sapiens
tgagttggaatcttaaaattaaaaggtatataatttggtttacaaatcaaatcgatcttttccatgtttatagtacttgctattttgtcaccaaatgttgctacaactagaaaggtagatctttacctctttaaccacatgcaatacacctaacatgaaataaatgtaaggtacatttatgcagatggatcatactaggaacttatggcaaaaattttatggcaaaaaaaatgaatgggcactgggagaacctaaaacatacactttcctgctctggaaatatttcattagcattctgtctggcttttacatttctcagaccttctctttcaatctttagttaccaaatttttgactcggtcagtgtctttgtctgataggagtgccataacaaaatgccacagactgggtgtcttaaacagcatgactttattttctcgtagttctggaggctggtggtctaagwtcaaggtgccggcagtggtggtttctccggaggcctcttcctagcttgtagacggctgtattcccattatgtcctcacagggccttttctctgtgcatgtgcattcctggtgtttctctgtcttcgtgtaaggacaccaggcacactggattacagcccaagcttatgacctcatttaaccttaa

SEQ ID NO: 875604 - DNA, 602 bp, Homo sapiens
aaacatataccatggtggtttgctgcacctatcaacccatccctaggtattaagcccagcatacattagctctttttcctgatgctttccctccccctgcttcccccagcagcagaccccagtgtgtattcttcccctccctgtgtccatgtgttctcattgttcagctcccgcttataagcgagaacrtgcagagtttggttttctgttactgcattagtttgcagtaacagaggataatggcttccagctccatccatgtccctgcaaaggacatgatctcattcctttttatggctgcatagtattctgtggtgtatatgaaccatattttctttacccagtctataattgatgggaatttgggttgattccatgtctttgctatggcgaatagtgctgcaatgaacatatgtgtgcatgtatctttaaaatagaatgatttatactcctttgggtatatacccagtaatgtaactgttgggtcaaatggtatttctggttctaggtctttgaagaatcaccacacacagtcttccacaattgttgaactaatttacattccaaccaacagtataaaagcattcctatttctccacagc

SEQ ID NO: 875605 - DNA, 560 bp, Homo sapiens
tgtattttagggtaaatagaaacttattatttttgccaataccaagaaatccaaggtaaaatgcagaaaagattaagttcttagactgacaaaatattcttcagccccatatcaggctgcataaatacacattatctaatgtattataatattcataacaatcctctgtgttatctatagcccatttcacaggtaagaaaaaagactaaaagacatttaagtgacttgattaatgacaaaaatargcagtcaacctgaacatcaacccaaatattcttattacatcaatacagcctctcagcaaccaattaactccagagaatgaaagaaggggaagaaggaataaagattctgagtgagggaaataaatatgtataagacgtggcaggtttaactttaaggaggtggtatattacttttgtctaaaaaaaaaaagatgaaattggttgaggataactaaaaataagaagaaatgtgaagtttaagattgagaaacaagtttacatttgaaattcaccaactcacctgtaaattaatcacgaaaagtaatttgcagagtg

SEQ ID NO: 875606 - DNA, 639 bp, Homo sapiens
tttcagagaccttcaggccagcccctcctatcacaggcccagagtgctaagaggactgaatggtttcttgtaccaggcccagggccctgccaccctgtgcagtctcaggacattgcttcttgcatcccagtcactccagctccagtccaggctcaaaggggtccaggtgcctctcaggccactgcttcagaaagtgcaagacataagccttggcagcttccacgtggtattaagcttgtgggtgcatagaatacaagagatgaggtttgggagccttcacctagattttagaggatgtatgaaaaatactgggtgcccaggcagaagcytgctgcaggagcagagccctcatggagaacctctactagagcagtgaagaggggaaatatgggatttgagcccctacacagagttcccactggggcactgcctagtggagctatgagaagaaggcactgtcctgcagaccacaaagtggtagattcactgacagtttgcattcctgcacctggaaaagccacaggcactctagatcaggccttaaaattagcaccaggggctgaaccctacaaagccataggggcagagctgcacaaggctttggaaacccaccctttgcaccagcattctctggatgtg

SEQ ID NO: 875607 - DNA, 639 bp, Homo sapiens
tttcagagaccttcaggccagcccctcctatcacaggcccagagtgctaagaggactgaatggtttcttgtaccaggcccagggccctgccaccctgtgcagtctcaggacattgcttcttgcatcccagtcactccagctccagtccaggctcaaaggggtccaggtgcctctcaggccactgcttcagaaagtgcaagacataagccttggcagcttccacgtggtattaagcttgtgggtgcatagaatacaagagatgaggtttgggagccttcacctagattttagaggatgtatgaaaaatactgggtgcccaggcagaagcctgctgyaggagcagagccctcatggagaacctctactagagcagtgaagaggggaaatatgggatttgagcccctacacagagttcccactggggcactgcctagtggagctatgagaagaaggcactgtcctgcagaccacaaagtggtagattcactgacagtttgcattcctgcacctggaaaagccacaggcactctagatcaggccttaaaattagcaccaggggctgaaccctacaaagccataggggcagagctgcacaaggctttggaaacccaccctttgcaccagcattctctggatgtg

SEQ ID NO: 875608 - DNA, 623 bp, Homo sapiens
caagttcaagataatcaaccttctataacaaaaataattctacagaggagcataacagaacatattatctctgtaaagtatcatctactgtgttcattaaaattataagacacatatttaaaacccagaaaactgggatgcatagtcaagaggaaaaaaaatctattgaaatagaccctgggattacttagttttttttttttttaatttagcagaaaaaatgacaaaatacattgaataactttaaagtggggggtagtcataattaaaacaaaaggatgaatgggaaatctcagaagagaaattgagacccttaaaatatagaaattctaacacttaaaaactataccagaaacttaaaagtcactggatgaattattaacaaatgagacacagcacagaaagaattagttaacttgaagacagagcaataaaaagtatacaagctaaagaacagatagwaaaagactgaaaaaagattaacacatcttcagtaacctgtgtgaataatgttaagcagtctagcatacataaaattgaagttccaaaaaaataaaagtgataatagaacaaaaatagttaatcaattaatagaccaaatgtttcaaaatttgttggaaaaa

SEQ ID NO: 875609 - DNA, 647 bp, Homo sapiens
cagatacttactaggtgactctccagagaacaagaattaattttcttgtgatgctagtatttgagaaagaattagtataattcctcttctaccaaagaactattgcatattatttaaagactagagcaatgtggtcatttgagacatttgcgggagagtcagtaaaggtgactatttcagttggaaaggstggttttatcacatcatatttaactaaggcaggaatggcaaataactagcatgcatgctgctactcctcctattattaattcatgatagacatgccttggatttggccataatacccttttattatagcacatcaggcagataaaaccaaaaagccacttttgatgttggtcatagtgtcttgatcttggatggatacacccaaaccacagcattgtacaactccaggagggactgtttacataggctgcactgtgaatgatatccactggagttttacaataggatggccttgttactgtaccttcaccccaactctctctccaccccttcttcctcttcccaataagaatagatataatatggttatttacattagtagctaaatagatcatatgtttggcttttttggcattggtttttaagctgactaaaatactattttcataatattacaa

SEQ ID NO: 875610 - DNA, 635 bp, Homo sapiens
ctttttttccatccttttactttcaatctacctatgtttttgaattcaggatgagttctaataaactagttcattagactgtggttgtttttgtttgttttgctttgccacttctgcctttagctgttatattaattccatttacatttaaagttattgaaatgttagggcttgcaactaccgttttattttctgttttctgtttgattcctccaattctcatttctctggttctttattgcattcttttgggttatcgcttttctttggcatttcatctttacttgtctatatctatataycttttctgtatctatatatatttgtctatatctatgtatatttgtaaagcttttgttagttgtttttctggattttacaatatatagatgagacttataacaatctatcaatataagcattttaccagtttgaataaagtatggaaagtttacttccatttaggttccatatcctctcacttttaaagatcattgtcttgtgtatcagatggtgtcataatttttgttttaatcatcagatatggcatagaaaactcacgaggagaggaatattctagtgttattaatccttatttctgctcttttcatttttatgtcttctttcctgacact

SEQ ID NO: 875611 - DNA, 620 bp, Homo sapiens
ttccctttctgtaaaagcaggagggaaggtgagaccaaatgatccctaaccctttctcctttttggagactcagattagtatccagagtgcactttccagagggagacaccaggcatgtcgtccactccacattggtctagcccttcctagaccactgtggaaacacctagaccctttcctgaggttgtctgggggaggggacagggaaggagtttccagtagggaagggcttagtggcagccagcctcccactctcatcagcaacttcttctcctccaccatcccacactgccctgctccctcccagttcccacatccttgaccagaggagaaacacaaattakttgctcagtaggaaaaggcaggagcccctgccccttctacccatcccatctgcaatgggagaggggaagtggggaagagggctgggttcacagtcaaaactggcctcctcattttacagatgagcaaacccacacctagagagaggcactgagtacccactcaagggcatacagcaagacagtgggagtgccaggattgaacccagcgtcctataagcctttccatatcatcaggctgcccctctgaggagggtctctaactaattcccacatcc

SEQ ID NO: 875612 - DNA, 546 bp, Homo sapiens
gccctgcagtacagtttgaagtctggtagcatgatgcctccagctttttttttttttttttttttggcggagtctcactccattgcccagactggagcgcagtggcatcatctttgctcactgcaagctccacctcccgggttcacgccattctcctgyctcaacctcccgagcagctgggactacaggcgcccaccactgcgcctggctaagttttttgaatttttagtagagacagcgtttcaccatgttagccaggatggtctcaatctcctgacctcaagatccgcccatctaggcctcccaaagtgctgggattacaggcgtgagccaccacaccaggcctgatgcctctagttttgttatttttgcttaggattgtcctggctatttgggctttttttttttttttggttgcatatgaattttaaaatagttttttctagttctgtaaagaatgctgttgatagtttaagaagaatagcattcaatctataaattgtttggtcagtatggccatttaacaatattgattcttactattcc

SEQ ID NO: 875613 - DNA, 620 bp, Homo sapiens
ctttcaggagcaggttcagtttccatgtagttgtacagttttgaatgcgtttcttagtcctgagttctaatttaattacactgagagactgtttgttatgatttctgttcttttgcatttgctgaggagtgttttacttccaattatgtggtcaattttagaataagtgtgatgaggtgctgagaagaatgtacattatgttgatttggggtggatagttctgtagatgtctattaggtcctcttggtgcagagctgagttcaagtccwgatttctttgttaaccttctgtattgttgatctgtctaatattggcagtgggatgttaaagtctcccactattattttgtgggagtctaaatctctttgtaggtctcaaagaacttgctctatgaatctgggtgctcctgtattgggtgcatatatatttaggatagttagctcttcttgttgcaattctccctttaccattatgtaatgcccttctttggtttgaagtctgttttatcagagactaggattgcaactcccgccttttttttttttctttttttttgctttccacttgcttggtaaatattccttcatccctttattttgagcctatgtgtgtctttgcac

SEQ ID NO: 875614 - DNA, 729 bp, Homo sapiens
ttagataatatattgtaacaactctgcacgcccatttttatcccctttatcccaaggcattttgttgttttgtgtctgtttctctagctacttggttagattatttctctggagtctcttttcctgccatgtacagtctctggtgtcactcctcacaagtcacagccttgagcctgtgtacagtcaccctgggatatcaatggttttaatagarctcttttgactctttctttccttcattgctaatattaggttcgtgcaaaggtaattgcagtttttgccattaaaggtagtggcataacctttaataaaaggttaatttaactttgggaggctgaggtgggcagatcgcgaggtcaggagattttgaccatcctggctaacacggtgaaaccccggctctaccgaaattacaaaaaattagctgggcatggtggcgggcgcctgtagtcccagctacccaggaggctggggcaggagaatggcttgaacccgggaggcagaggttgcagtaagccgagatcacgccaccacactccagcctgggtggcagtgccagactccgtttcaaaaaaaaaaaaaaaaaaaggttaatttaattaaaggaaaaaatccacaattacttttgcaccgacctaatattatagcaggctgttagcgtccactaatttcaggataatttcacaactatattcaaaaatgctctgggcataaattgttccactgtct

SEQ ID NO: 875615 - DNA, 713 bp, Homo sapiens
gatgatgagcattttttcactgtattttggctgcatagatgtcttcttttgagaagtgtctgttcatacccttcacccacttgttgatggggttgttttttttttcttgtaaatttgttagagttcattgtagattctggatattagccctttgtcagatgagtaggttgcaaaaattttcttccactctgtaggttgcctgttcactctgatggtagtttcttttgctgtgcagaagctctttagtttaattagatcccatttgtcaattttggcttttgttgccattgcttttgatgttttagacatgaagtcctcrcccatgcctatatcctgaatggtattgcctaggttttcttctagggtttttatggttttaggtctaacattgaagtctttaatccatcttgaattaatttttgtataaggtgtaaggaagggatccagtttcagctttctacatatggctagccagttttcccagcaccatttattaaatagagaatcctttcctcatttcttgtttttgtcaggtttgtcaaagatcaggtggttgtagatatgcggcattatttctgagggctctgttctgttccattggtcaatacctctgttttggtaccagtaccatgctgttttggttactgtggccttgtagtatagtttgaagtcaggtagcatgatgcctccagctttgttcttttggcttagga

SEQ ID NO: 875616 - DNA, 623 bp, Homo sapiens
aatttaaacaatcaattaaatcaaccttagtaagcatagaattaaatacagcagagaaaagcttctttgctgacaaggacggatagcccctgattagcataaccctcacacggggggtttgttttaatcatctaacaaaaagggggcattttctgaaacacacacgacaggtattgtttctgcagaaaaaagaagcacgtgtttcaccacatttgtctaaggaaaagggaaacttcatttaccataaccttaagcaacgttttcacatggactgaaaagcaaaagacccccttaaaaattagcctcaagcagcagatactctctttttaggtttgtgtgtctccgtgaggtcagatggattccccaaacacggttttagagagaatcacaacctttaatagrtcctctgttaaaaaagactgttagagaaagttgaccaagggcttcgttccacggcgaccgtttcctgcgtgtgcagctccacacagcgaccgcggcctgcaatgtgcggagcacagcgcggccccttccagccggagctcgcgagccgcggtggcggctggtggccaccccagggaaataaagccgttgctgctgcagcaaaatggctcaaagtccaacca

SEQ ID NO: 875617 - DNA, 649 bp, Homo sapiens
tgcaaatgttctggaagtacacattgaaggaagagactgtatttcatttggaattttgttaattctcctcagaagaaaataggctattgaagactttatatgcttataaaaataatgtaaataatttctaggcttcatttaattgattattctactattaggcctattttatccatattttcccctcccaaaaatgtttcacagaaataaagattgggtaagatttgaaggaattttattttttaacaaaatcccaacattgaattatacatagtagaattgtttagttctccaaacaattttatccattcgtaagcatgactaggaaatctttggtatttgtcagtgtttttgacaatatctcctaaaaacaaggtgggatatctttgagttattcggtagaatggtatgtagtaatatgcatatattgcttgaaatatgattcatgagacctaagaaaaagggcyttaaacaattctttcagttgaatttccagatatttcaggtggaatatctaccacagcaggaaatagcagtaattaataaagtagacacgaatcattacatttatcagtacatttatggagaaaaacaggagaagagttaaaaccaaaaccagttacatgtagtaggttcatttacatccaag

SEQ ID NO: 875618 - DNA, 680 bp, Homo sapiens
aaaaattatatacttggtttatcttccactttcctttccctcaaaactaaaagtcttttagcacatgtaccacccctagaatttcctgtaaaccaccaccagctggaagatcacattctcatcaaaggtggaaagaaggaagactcaagccagcctgggaaggaccctaccttgtgctgctaaccactgagactgctgttcatacagcaaaaaagggattggattcatcacacccaagtcaagaaagcrccacccctctagagtcatgggctgtagtcccaagggaaaattctaccaaactaaagctaagaaaaatttaattcatctattctattagtgttccttcttttcttgctctattgctgaccatctagttattaacataacccagtcaattccacctcaaactattgaatttaatgcttcccttgttataccctgtgagggcttgccaagtcaaagacagctctctacttcagaaaagtacctctgtccctcctgactctcctcagactagtcattaataaattaggaccatttaatctcaggagaatttgataaagaccccagtgtcaactaggagtcttgcgcccagatgtagagcttttatgctgtagttggcccaacattctgtgaaccactaaagagcaaggatggactgccccaactggtttttgtta

SEQ ID NO: 875619 - DNA, 622 bp, Homo sapiens
atttagttcttacttataagtgagagcatgtgatgtttggttttctattcctgtattagtttacttaggataatggcctccagctccatcaacgttcttgcaatgaacatgatctcatttttatggctgcacagtattccatggtgtatatataccatgttttctttatccaatctatcattggtggacatttaagttgacttcatatctttgctattgtgaatagtgctggaataaacatacatgtgcatgtgtctttatgatgaaacactttatattcctttgggtacatacccagtaatgcgactgccgagttgaatggtagttctgtttttagctctttgaggaattggcacactgttttccacaatggttgaactaatttatattccyatcaacaccatggatttttcataataaaaagtttaatgtattcataatttaattctttccttttttaattcctatgctacttaataaatcctaacataattaaattattcaaatattttcttattttcttctggcaaacttatacatatattaatgttttcacttatttatatttctacttttatctgtaatgtattctgatattggaaaacaagaattcagctttttc

SEQ ID NO: 875620 - DNA, 625 bp, Homo sapiens
tatgcaaaagaatgaaactggatcccttccttacacctgcacaaaaatgaactcgagatggattaaagacttaaacgtaaaacctgaaactatgacaatcctagaagaaagcctaggcagtatcattctggacatagcaactgatgaagatttcatgatgaagacaccaaaagcaattgtaacaaaagcaaaaattgataaatgagatatacttaaacttaagagcttctgtacagcaaaagaagctgccaacagagtaaagggacaaagggagaaaagatttgcaaaccatacatctgaaaaagatctaatatccagcatctatmgcaaacttaaacaaatttacaaaagaaaaccaaccccattaaaaagtgggcaaaggacatgaacagacacttctcaaaagaagacacacatgtggccaacaagcatagggaaaaaaaggacactatcactgatcattagagaaatataaaacaaaaccacaatgagataccatcttacaccagtcaaaatggctactattaaaaggtcaaaaaataacagatgccagccaggttgtggagaaaagggaacccttacacactgttggtggaagcataagctagttcaaacattgtggaaa

SEQ ID NO: 875621 - DNA, 466 bp, Homo sapiens
ctcccagtagatctctagtggttcatatcccttcctggctgccacttctagggagaagttaaattaatacaccttgtataaaacatgaaagactcactctgacatctaagtaaaatgataatgttgctatggagtttatactcaaatcatcatgaatttgtctgaacaatgctcaaataataatagtattttccaagatttaataagcatttactctgtgccacatactcttttaggcactttgcatcatcatttcctttcatgctcacgtctaccttatgaaatagtaatagtagtattcctgtcttrgagctgaagtaaatgaggcttaaagattttaggtatctcgtggctcatgcctgtaattctgccactttgggaggccgaggtgggcgggatcacttgaggccaggagttccagaccagcctggccaacatggtgaaaccccatctctactaaaaatat

SEQ ID NO: 875622 - DNA, 632 bp, Homo sapiens
agagtgttatgaccagaagaattcataatcagcaggccagtgcaatggacatcattccacgtgttatgattgggaaaggaaaagcaagctcaccttttctggccatcttccatgttctgaggatgtattctaaatgattcatggattctcatggctacaaccattgcagtggatatgaaaggatttattccagctacaaactacaaataatttccataaggctcctcttacctaactcatgggcagcaagtgcatgtgcaagttcctgaygcagtataaagtgcaatagtctttgagtcacttcatttataccatcattaactcgccttgggcagcaagccacatgcatggtccttgccacaatacagcagtctctgtggcaccttatatatgccaacactgagcctcctccccttgtgattatggcgcccgcacagccctgaagtttgaagttattcagcatttgatagtgcctctatcctgtaagtcaagcccaagcttatagtcactgagtcatgcagccatttgaccaataacagcaatcaattcaaacctgagtattgctcactcagtgccgttgttctaattctattattatatggaagacaggggccttgctaggtattcaatac

SEQ ID NO: 875623 - DNA, 636 bp, Homo sapiens
atcagggacaagataatggagaagacactttgtggcacaagtatacaagaatagctgcacatgaccagtaatacatataatacatatggacaatatatacccctgatgtgacacactaagaggagcacatcacttttgttgtattctggccaaaaatgcattacctcaagttaatcataataagcagcaggtaaacctaaattagggatactctataaaataactaatcaggacttttcaaacatgtcaaggtcatgaaaaatcaagaaaggcagagaaatagccacaagttgcaggagaccgaagacacatgacaaytaaacgccatgtgggaatatggattagattcttcaacagtaaaaaaaaaaaaaaaaaaaaaaaaaaaaaaaggatgctaatagaaaagctggagaaatccaaatatgatcaaacagttaatagcattgtaccaatattaatttattagttttgataatagtgttatggttatgtaagatcataaccttagagaaatatgggggaaagtcatacagggactctccatagtgttttgcaactcttctgcaaatctaatattatttcaaagtaaacattttttaaaagaagtaaattatcagcgttagaaatgaaagttga

SEQ ID NO: 875624 - DNA, 637 bp, Homo sapiens
ctaagcaaaaagaacaaagctggaggcatcacgctacctgacttcaaactatactgcaaggctacagtaaccaaaacagacatatagaccaatggaacagaacagagacctcagaaataacaccacaaatctacaaccacctgaacttcaacaaacctgacaaaagcaaacaatggggaaagaatcttctatttagtaaatgatgctgggaaaactggctagccatatgcagaaaactgaaactggaccccttccatacaccttacacaaaaattaactcaagatgggttaaagayttaaatgtaaaaccccaaaccataaaaaccctagaagaaaacctatgccattcaggacataggcgtgggcaaagacatcaggacaaaaatgccgaaagcaatttcaataccagctaaaattaaaaaatgagacttaattgaactaaagagcttctgcacagcaaaagatactatcaccagagtgaacagacaacctacagaatgggagaaaatttttgcaatctacccatctgacaaaggtctaatatccagaatttacaaagaaataaatttacaagaaaaaacaaaccatctaaaggtgggcaaacaatatgaacagatgcttttcaaaagaaaacatt

SEQ ID NO: 875625 - DNA, 624 bp, Homo sapiens
tggctgtgtgtttgtctgttattggtatgtaggaatgcttgtgtttttgcacatcattttgtatcctgagactttgctgaagttgcttatcagcttaaggagattttgggctgagaggatggggttttctaaataaacaatcatgtcatctgcaaacatgggcaatttgacttcttctcttcctatttgaatacgctttatttctttctcttgcctgactgccctggccaaaacttccaatactatgttgaataggagtggtgagagagggcatccctgtcttgtgccagttttcaaatagagtgcttccagtttttgcccattcagtatgataatggctgtaagtttgtcataaatagctcttattattttgaaatacrttcaattgatacctagtttattgggagtttttagcatgaaggggtgttgaattttgtcaaaggccttttctgcatccattgagataatcatatgttttttgttattggctctctttatgtgatggattatgtttattgatttgtatatgttgaactagacttgcatcccaggtatgaagctgaattgatcatggtggataagctttttgatgtgctgctgagttcaatatttgccaatattttg

SEQ ID NO: 875626 - DNA, 603 bp, Homo sapiens
aaactgccatcgaagattaacacaaactgcatggcttaacaagagaaatttattctttcacatttctggaggctggaaatttgaaatcaagatgtcagcaagtttggttctttctggaggttttgacgacaaatttgttcatatttctttcctagctcctggtgttcctgagcaatctctggcactccttagctggcagtgacatcattccaagttttctctctcttataacatgacattctccctggwcatctctgtatccatgtgtcttcacatagccttcttataaggacaccagtcattggtcaccctaatctagtataacctcatcttagctggatcatatctacaaatatattatttgcaaataatgtcacattcacaggtaccagaggtgagagcttctaacatctctttttggaaagccaattcaactgaaaacatatacatacaacaaaatctacaaattataaaaatgctatgtttgaactctggcaaagaaaaaccttgatataagtgccatcctatttatgttatggaatactttaatcacccccaacactcctgacactttgcaatcagtgtgccacctccaaccaccgt

SEQ ID NO: 875627 - DNA, 603 bp, Homo sapiens
aaactgccatcgaagattaacacaaactgcatggcttaacaagagaaatttattctttcacatttctggaggctggaaatttgaaatcaagatgtcagcaagtttggttctttctggaggttttgacgacaaatttgttcatatttctttcctagctcctggtgttcctgagcaatctctggcactccttagctggcagtgacatcattccaagttttctctctcttataacatgacattctccctggacatctctgtatccatgtgtcttcacatagccttcttataaggacaccagtcattggtcaccctaatctagtataacctcatcttagctggatcatatctacaaatatattatttgyaaataatgtcacattcacaggtaccagaggtgagagcttctaacatctctttttggaaagccaattcaactgaaaacatatacatacaacaaaatctacaaattataaaaatgctatgtttgaactctggcaaagaaaaaccttgatataagtgccatcctatttatgttatggaatactttaatcacccccaacactcctgacactttgcaatcagtgtgccacctccaaccaccgt

SEQ ID NO: 875628 - DNA, 675 bp, Homo sapiens
taaaacaacaactttttctttttttttcctttttttcttgaaatgaggtcttattttgtctcccaggctggagtgcagtggcactattaccagaaagtggtcctgatccagaccccaagagagggttcttggatctcacacactctatgactccatagagtaaagtgaaagcaagtttattaggaaagtaaaggaagagagaggggctactccataggctaggcagcagcataggctgctcagctgcttatacttactgttactttttgacatatgctaaactagcagtggattatttatgagwtttccaggaaaggggtgggcaattcccagaactgagggttccacacctttttagaccatatagggtgacttcctcatgttgccatggcatttgaaaactgttatggtgctagtgggagtgacttttagcatgctaacgcattataattagcatataatgaggagtgaggacaaccagaggtcacatttgttgccctcagtgattttggctggcttgggctggcttctttacaatatgctgtttcatcagcaaggtctttgtgctctgtaccttgtgcggacctcctaactcatccgcaactaagaatgccttaacctcctgggaatgcagctggcttcagccctattttacccatcccctattcaagatag

SEQ ID NO: 875629 - DNA, 650 bp, Homo sapiens
aaacccttgtaaaaagaacatttcaagcagcatttataatgtaacactaggagctgagacaactaaaatagaagcagtccctataagaaacaaaaaacatttaatagagatcatacctgcaattccccaatggccagaaccacaaggtctcgaacaccgtcttcatccaagtctggcagtaccacaactggggcagccaaggtaccgttggacaagtagtttgggtttaaagtccaaatggctttccctgaggaaggacacataggctggtcactatgacaacttcttgcctttggaaaaggcagatgccatgttcccaggccagaaaagaaagacgcaakgggctgaacaacagacagcaactcctacctacttattgcctttcgtttttgtcttactgaggaggaggaagcaggcagtgtgatccgaatcctaaagtatctggcaaacaaatccatgcaatgatttctcacctagatttttttagataaaatggaggtgctaaatcctttccaacaaagaagggctcacttgcctggggtgagggaactgtctgttagagattataacaactattaaggaacccccaggggcagccgaccagaccactctgctttcgcttcccccacacggtccacataagctaagcc

SEQ ID NO: 875630 - DNA, 675 bp, Homo sapiens
gataggcttcaataatgtcttatatggtttttgaagagtgttactttatgaaaatggttttaacaatataaatgttctcaaagcattaaaatatggaaatagtatagttcacctcataaaagactttttattagaagtctgcatatgttatatactttttcaaccaaatgaggctcccggaaactatgaagtaaaatttcagaattaatgagttccccagagacattaaatctaataatttaaaaagttgagtgagctgctgcttagatggtataatatctgtatgtggaaactcttctttaaaatatgcatagtaggtaacttgttcctaaaacacattayaaaaatctttgaatattctatgaaaatgaaaggaatatccttgccgtcctgcaaaaataatgtctggctgttggttctacctttgggttctactgactttgggtcacttagtaggctttctaataatttttttcaccccctcaaaaccataaaataccttttcctattcactttttaaaagttgatataattaattagcggataccaaaattttgttttggtttctttgaagaaaactattatcttggaaaataaaaatgcagccctaatctcaatatatactgaaattaattttggagattaaaatttacattttaacatatgcattccaat

SEQ ID NO: 875631 - DNA, 446 bp, Homo sapiens
tgcattagttttctactgctgctgtaacgaagtatcacgaacttaaacaatgcaaatgtattatctttgggttctcaatattgcttataggttagaagtctgcaatgggtctcactgcgctaaaattaaggtgtcagcagggcacttasgggagaatctgtttccttgccatttttagtctacggaagacacagctttgagaggccaccaatattccttggcttatagccatcttccttcatcttcaaagccagccatattgcatctcttgaaccattcatccatagtcacattgcccactgattctaacctcagctgggaatgtttctctgctcttaaggagaagattcaggtgattaggttgagtccatccatacaacctatccaggttaatctcctcatctcaaggtccttaatcttaatgatatctgcaaagttcctttgtc

SEQ ID NO: 875632 - DNA, 658 bp, Homo sapiens
ttagttttctactgctgctgtaacgaagtatcacgaacttaaacaatgcaaatgtattatctttgggttctcaatattgcttataggttagaagtctgcaatgggtctcactgcgctaaaattaaggtgtcagcagggcacttaggggagaatctgtttccttgccatttttagtctacggaagacacagctttgagaggccaccaatattccttggcttatagccatcttccttcatcttcaaagccagccatattgcatctcttgaaccattcatccatagtcacattgcccactgattctaacctcagcygggaatgtttctctgctcttaaggagaagattcaggtgattaggttgagtccatccatacaacctatccaggttaatctcctcatctcaaggtccttaatcttaatgatatctgcaaagttcctttgtccacatcatgtgacatattcacaggttccagaaattaagacacagacatcttttgggaggccattattctgcctaccacaggatacgagagagcactaattaaaaaccatatctaaatatacaaaatttaatctcttgacttttggtggagtcagtatgttggctgtggtagattatcattatgttggagacagagaagatttgctattttagtgct

SEQ ID NO: 875633 - DNA, 658 bp, Homo sapiens
ttagttttctactgctgctgtaacgaagtatcacgaacttaaacaatgcaaatgtattatctttgggttctcaatattgcttataggttagaagtctgcaatgggtctcactgcgctaaaattaaggtgtcagcagggcacttaggggagaatctgtttccttgccatttttagtctacggaagacacagctttgagaggccaccaatattccttggcttatagccatcttccttcatcttcaaagccagccatattgcatctcttgaaccattcatccatagtcacattgcccactgattctaacctcagctgggaawgtttctctgctcttaaggagaagattcaggtgattaggttgagtccatccatacaacctatccaggttaatctcctcatctcaaggtccttaatcttaatgatatctgcaaagttcctttgtccacatcatgtgacatattcacaggttccagaaattaagacacagacatcttttgggaggccattattctgcctaccacaggatacgagagagcactaattaaaaaccatatctaaatatacaaaatttaatctcttgacttttggtggagtcagtatgttggctgtggtagattatcattatgttggagacagagaagatttgctattttagtgct

SEQ ID NO: 875634 - DNA, 650 bp, Homo sapiens
gggggtatttccagctcaattccagttgtctatgacaatcaagaagagacaggatgcaataaatattttcacaatgaaaagaagtatcctggcggactgggaaagaaaagcattaggaactttgtgatgctgctgaggtattagacaagacaatacatagagttgatctctacatatttctctaatctttcagattagagaatggtagtggttaaaaaaaggaatggaacacttttatcaaataatatctagtggaaccccaatgtataaataagctgaaagtggagctattctgcttgaggtaaggtatgtcagatctcctctaataaacctcctttctgctgacatctgagcctcttcagaacacagtttggagatcagtgcctacytgaatacaaaataaccaacaggagatgtgtgataaaaatgtagatgcctgggttccaaccccaaatatttcagttcagtagctctgatgtggggtatggagatgtttattactgaaatgccctcctagagatcgggatgtacaatgaggtttggggagtgctcataagacaacctagtacaacctgttaagctaaggcagttgaataaatcctacagataatgtgcctctccgggtatttaacaaggcacagccatgttac

SEQ ID NO: 875635 - DNA, 650 bp, Homo sapiens
gggggtatttccagctcaattccagttgtctatgacaatcaagaagagacaggatgcaataaatattttcacaatgaaaagaagtatcctggcggactgggaaagaaaagcattaggaactttgtgatgctgctgaggtattagacaagacaatacatagagttgatctctacatatttctctaatctttcagattagagaatggtagtggttaaaaaaaggaatggaacacttttatcaaataatatctagtggaaccccaatgtataaataagctgaaagtggagctattctgcttgaggtaaggtatgtcagatctcctctaataaacctcctttctgctgacatctgagcctcttcagaacacagtttggagatcagtgcctacttgaatacaaaataaccaacwggagatgtgtgataaaaatgtagatgcctgggttccaaccccaaatatttcagttcagtagctctgatgtggggtatggagatgtttattactgaaatgccctcctagagatcgggatgtacaatgaggtttggggagtgctcataagacaacctagtacaacctgttaagctaaggcagttgaataaatcctacagataatgtgcctctccgggtatttaacaaggcacagccatgttac

SEQ ID NO: 875636 - DNA, 650 bp, Homo sapiens
gggggtatttccagctcaattccagttgtctatgacaatcaagaagagacaggatgcaataaatattttcacaatgaaaagaagtatcctggcggactgggaaagaaaagcattaggaactttgtgatgctgctgaggtattagacaagacaatacatagagttgatctctacatatttctctaatctttcagattagagaatggtagtggttaaaaaaaggaatggaacacttttatcaaataatatctagtggaaccccaatgtataaataagctgaaagtggagctattctgcttgaggtaaggtatgtcagatctcctctaataaacctcctttctgctgacatctgagcctcttcagaacacagtttggagatcagtgcctacttgaatacaaaataaccaacaggagatgtgtgataaaaatgtagatgcctgggttccaaccccaaakatttcagttcagtagctctgatgtggggtatggagatgtttattactgaaatgccctcctagagatcgggatgtacaatgaggtttggggagtgctcataagacaacctagtacaacctgttaagctaaggcagttgaataaatcctacagataatgtgcctctccgggtatttaacaaggcacagccatgttac

SEQ ID NO: 875637 - DNA, 666 bp, Homo sapiens
cagtagaatcgcttacacaacacagcatttcaattctaagcaaatctccatttgtttccatattaattggggcaatagctattatatagcaatgaaaaaaatgaacacttccaggtataaccaaagaagaatccctgatttttccttaacaaaaatcaaatgggtcttatttagctgcctctagaaattaatcaatgctactgggttttagttgaaatatttgtaaaaccctttcatgacctaattactcatttttaaacattaagcaaaagtaagtttgtttgaggacagagatcatgtatttctgagcctggagcttgttcaatacctggtatgcaagggctactcaaaagtgagttaagaaaatagtatgagccttagaagatrcagagagagaagaatgccaaaaagagaatattttaatttctaaaagtagattcccatatatctcaaacactgtcttagagctagagaaaatactttctttttgaagtattactacaaaactttataaaacttttggccacaggcattagccaaacattctgtgcaaggacttactctctcattttgcagggaagtaaatagtaattaggttaacacctaaacatagcctgaactaagaagaaataaaagtctcttctcttcaaaacccatcaacccctt

SEQ ID NO: 875638 - DNA, 666 bp, Homo sapiens
cagtagaatcgcttacacaacacagcatttcaattctaagcaaatctccatttgtttccatattaattggggcaatagctattatatagcaatgaaaaaaatgaacacttccaggtataaccaaagaagaatccctgatttttccttaacaaaaatcaaatgggtcttatttagctgcctctagaaattaatcaatgctactgggttttagttgaaatatttgtaaaaccctttcatgacctaattactcatttttaaacattaagcaaaagtaagtttgtttgaggacagagatcatgtatttctgagcctggagcttgttcaatacctggtatgcaagggctactcaaaagtgagttaagaaaatagtatgagccttagaagatgcagagagrgaagaatgccaaaaagagaatattttaatttctaaaagtagattcccatatatctcaaacactgtcttagagctagagaaaatactttctttttgaagtattactacaaaactttataaaacttttggccacaggcattagccaaacattctgtgcaaggacttactctctcattttgcagggaagtaaatagtaattaggttaacacctaaacatagcctgaactaagaagaaataaaagtctcttctcttcaaaacccatcaacccctt

SEQ ID NO: 875639 - DNA, 660 bp, Homo sapiens
aggaatctgcaaataataaagaatgtgtctattgccagcaaaatacaattattccatgccctctcaacatacaaatatagagttcttcacaccagatggctctggtgtaacaaagccattttagatgtttaattgtgcttctacaaaaccttcagagcatgaggtagtttcytttacctacgatattttccacatttccattattacacttttagtgagctaaaatccttttaacatagcctgcggatgatctttcacaaaagccaagcctcatttacaaagggtttatttctttctactcaatttttcttaaaaagaatttcaagaatcactacacagctaagatatctgagacttgcaatggctggagtctatcagtacaatagtaattgcaatcagattcagatacaagagaacaggttctaacaatttcataattaagttgatattctgtttctatctataagctcacatttaaaaactacttcctcgaactacttatttttcctcagccacaagtaagcgcaaatccttaaaaacagtgggttgagccccagctccatgtattaggtagctaggtatattgtgggattattccttgttaagtcaccccaggaaacatttgcagaatttagaaatgcatccagatttgtgagttta

SEQ ID NO: 875640 - DNA, 600 bp, Homo sapiens
gcctccaagtgttcaagactgcttggatttgaggcaagcaagaccacttgcttaggtaaattttatgaagcaacaaaactaatatggtgaagaattttaacccaaggtgtaacttaggtttcccatgtcttcaagagagctgacattgcatgttaccatctagctgatgttacgctctgctttcttgctactgcctgcctctgcctctgtttgttttttttttttttttttgtcttacattttttcttacarcaatcttttgagaaaagaatagagaatgtttaccaggtagaaaaaacctgattccttaacaagacttctcagtcacttgtttctctttccctttcacttttcctttgtgcttttgaaaacaaaggctaaagcaggtgttataaatttattcattcctgtgctagagagcatggaacacatctctgaagtcaactcttcttttggtgtatcacgagttgaatccttaataaatgactgccacaaagaaaatttctaacagcaaatctttttaggaactgctcaggttttgcctttgtcttgacacttcattttaaaatcttggtttctactgatgtgttttcaaaaaag

SEQ ID NO: 875641 - DNA, 620 bp, Homo sapiens
actgagtacctactatatgtcagccatgggggatacaaagatctataaggcacaagaccctcagtcttgtagtcgcctgacagccagccagctacaacataatgtggaaaggacaatggtgggaaatgcactcaggtcttcctaatgcacagagtatgctcaggctgtgacatcaggaagaaaacagatatttaccttaacacggacttggaggaccttcaaaaaacagtgatgggaggaaatccagttttaaaagtcttgatttaaaaaaaagaaaacactttctgtggataaagataggctgcaggaaatgtaacctatgaaattttctcaaattagctttcaaacacacacaaaaaattgcatttgkttgaggagcagaatgtaacttatattaaagaataaactactatttagtatctgagtgaagtacaaaaggaggcactaaaatcattgaggaaaatcccatgttatatggcttacattaatgtttttctaggtaaggtaaggtaagttactactaccaagttatgaaacaccatttgatgattgcaattcattttctctggcatgaagaaacaatcactcttgtaacacattgatactacaaactacattat

SEQ ID NO: 875642 - DNA, 596 bp, Homo sapiens
tggaaatggagttattttgacactttcatgttgtggataccagggttcaatgctcggatctccctttcaagactaaggttcctacctcccctccccactactgtgagtgatgcctaatcatggagactctctgcacgaatcgcccttggccaaagcgagccaccagttcccaaggttatgarcctccataggaagcagcccatgtacaaggactggtctatgccccttgcttcactcagacacaactttgatggccatcccaactccagaactcccattagatcaggtgtagctctgttgcatcagaactcattctctccttttgcctaattctgtttccctttctcttcctgcacacaaatctcccacctcaaatctgtttccagaaaacctgacctaagacacctcctaaggcatagaaacttatcaaagctttgccattaagtcactcaacccatctctgtctttgttttacccattcttgtcattaccaaccaaatttgtcacccttgaccaaatgccttttctttactatctcctggtttctatttttatagcttctgcatacacataactttggcttactcacagcttta

SEQ ID NO: 875643 - DNA, 639 bp, Homo sapiens
gagatgtcttcttgacattatgtttcgtccccttgatagtcctgtcattatctatatttctagtctgtggtcttagaatttcagagcattaaatgttcagttcccatgagtttgtggtttttctgagtgggtatgtatttgcgtgccttcactttcagttgaaagatattcatccttcagggctgtgtttgcttttattcagaaaataagtatatttaatgtactgtttttgaaaaaggaatgaaaacagtgattgagctgatattgagatcatcaagtgtttctaaatctctccaaacacattgctccctacatgcccagaaggcaccatcttttcctcttaatataatgggtttgcttgagtatcaaaatgctgcattatacaacacgaatcatcacactgaagatatcaatcacttgttttattaaattagagtaagagaatttagtacagaacagaggcaaaaaaaaaaaattatygctgggcatggtggctcacacctgtaatcacagagcttttggaggctgaggcaggaggatctcttgaggccaggtgttcatcacaggcccaggcaatatagtgaaaccctgtctctacaaaaaaaaaaaaaaaaaaaattaaattaacccattatgttg

SEQ ID NO: 875644 - DNA, 659 bp, Homo sapiens
ataatcaataaatagacaacctacagaatgggagaaaatattcacaagctacacatctgaccaaggtctaatatggaatctatagggaacttcaatagctgaacaaacaaaaaacaaattgccctgtttgaaaaatgggcaaaagrcatgaacatacacttctcaaaagaggacatacaagtggccaacaaacatgaaaaaatgcttcacatttttttattatactttaagttttagggtacatgtgcacaacatgcaggtttgttacatatgtacacatgtgccatgttggtgtgctacacccattaactcgtgatttacattaggtatatctcctaatgctatccctcccccatccccccaccccacaacaggccctggtgtgtgatgttccccttcctgtgtccaagtgttctcattgttcaattctgctccacattattaatcatcagagaaatgcaaatcaaaaccacaatgagataccatctcacactactaagaatggccattatgaaaaagtcaaaaaacaacgcatgctggagaggctggaaagaaaagtgaatgtttatacactgttgatagaaatgtaaattagttcagccactggggaaagcagtttggagatttcccaccaaacttaaaacagaactactatttga

SEQ ID NO: 875645 - DNA, 610 bp, Homo sapiens
tacttccaagtatggttccaccacaggcgctggagagagaataaaattagaaaagacaatatttgctgaaggagttctatataccaaaccactgctttcaaacacattgtctctgtctatcttcactacaaccacaactccatggaatagctattattaccccaaatgacatgatgaggaagctgaggcttgcacaggcacagtagcctgcccaargacaggtagttggaaagtacaattcatttgttaattcaccaactatttatttggtactgcggaattcacgtctctgtgtattttaacttctgtccccaagcaaacatatgcagacaccaaaataccagtttgagataagagtgggcttggctttcgcacgtgtgactgtcttgttagattattattattggttgtggtagtagaaatagtaatagtatttatgtcaaagatagaggtaagcaaatatctctttgagcttgttttcagtattaaattataccactattacgctataaataaccacttctatatattgagcactggcctggtatatgttcttgatctatgagctttacgtggtcacctcacttccattctaagcaaataagtcact

SEQ ID NO: 875646 - DNA, 614 bp, Homo sapiens
tgcacgttctgcaagcctgcaattttactacctagctctttactaaaatgttttctgatgactgatcaaggggatgatcagataattttccaaacttttcattttgttttctgtatgtagctagcatactattgttgaatagctacctgtgcagtttctaccctctagtaaattgattggagacatgcatctcattttgatgtctccctgtgcctataacctttggtagtgccctacacagtttgtggcttgagcatgtgacctgttttggacaatggggtggtaacaaactcacttcagacactggaaactgtgttttgttttgtcgttttttttttttttttctgctagtcaccaccatgacaacaccctctactggaaaggtatgagtcatcccagctgaggacatcytaaaccagccagcccccagccaacctatccgctgaccacagatgcatgagtaagacagctgtacctagcccacatcagtagaactagacaacttgtctctagacaactagacaactagactcaagtaagatggttgttgctttgagccaccaagttctgggttagtttgttacacagcagtaactaacatatgtatacttaac

SEQ ID NO: 875647 - DNA, 614 bp, Homo sapiens
tgcacgttctgcaagcctgcaattttactacctagctctttactaaaatgttttctgatgactgatcaaggggatgatcagataattttccaaacttttcattttgttttctgtatgtagctagcatactattgttgaatagctacctgtgcagtttctaccctctagtaaattgattggagacatgcatctcattttgatgtctccctgtgcctataacctttggtagtgccctacacagtttgtggcttgagcatgtgacctgttttggacaatggggtggtaacaaactcacttcagacactggaaactgtgttttgttttgtcgttttttttttttttttctgctagtcaccaccatgacaacaccctctactggaaaggtatgagtcatcccagctgaggacatcctaaaccagccagcccccagccaacctayccgctgaccacagatgcatgagtaagacagctgtacctagcccacatcagtagaactagacaacttgtctctagacaactagacaactagactcaagtaagatggttgttgctttgagccaccaagttctgggttagtttgttacacagcagtaactaacatatgtatacttaac

SEQ ID NO: 875648 - DNA, 543 bp, Homo sapiens
atgatcgccattctaactggtgtgagatgctatctcattgtggttttgatttgcatttctctgatgaccagtaatgatgagcattttttcatgtgtctgttggctgcataaatgtcttcttttgaaaagtgtctgttcatatcctttgtccactttttgatggctttgtttttttcttgtaaattggtttaatttctttgtagattctggatattagctatttgtcaaatgggtagattggaaaaattttctcccattctgtaggttgcctgttcgctctgatggtagtttcttttgctgygcagaagctctttagtttaattagaccccatttgtctattttggcttttgttgccattgcttttggtgttttacacatgaagtccttgcccatgcctatgtcctgaatggtattgcctaggttttcttctagggtttttatggttttaggtctaacatttaagtctttaatccatcttgaattaatttttctataaggtgaaggaagggatccagtttcagctttctacatatggctagcca

SEQ ID NO: 875649 - DNA, 699 bp, Homo sapiens
aaagtactagatggttttagtgattttgccatggtcttaggcaaatgagtttgcttcctttctagattttttttttcttttcttttctttcttttttttttttttttttttttttgagacagagtctcactctgttgcccaggctggagtgcagtggcaagatctcagctcactgcaacctctgcctcccgggttcaagcgattctcctgcctcagcctcccgagtaactgggattacaggtgtgtgccaccacacccggctaatttttgtgtttttagtagagatggrggtttcaccatgttggtcaggctggtctcgaactcatgacctcaggtgatctgcccacctccgcctcccaaagtgctgggattacaggtatgagccacctcacctggcctctttcttcttttatgaggatattaatcctatcataagtttctcaccctcaagatcaaatctaaccttatttatctcccaaaggaaatctcctttgggagataaataaggttggaaaactatggctaggagatcaactgtgaccagctgcctgttcttgcaaataaagttttattgaaacacagccatgtttattaattacatatggcatatcactgttttcatgctacaaagggagagttgaagagttgcaacagagattgtatagcctgcaatgtagaaaatattttctacctggctct

SEQ ID NO: 875650 - DNA, 587 bp, Homo sapiens
ggattttgccatggcaaatgcttactggatgactcacttgtgttttgtcttgcaaccactttgaccttgatgccaccagtgagtaaagccattgcccacaaaggacactgggctaaagggaaaacatggaaaagaagagctaaaaaggggaggaggaaaggaaggtggaaataaaggaagagaaagagggggccaagaggtggagaaaggtgtagagagatggaaaatgacagaaaagagtcagagaaagagggagaaaaaaagaaaaaggaagggacgagaccaaaaagaaaagaatataaaagatgctagaaagaggagagagagagttgtagaacagccgagggtttggagaaagaaacagakaatgctgtggtaagagaggaagagaaaggcaaaacaatctaatacaggcagagcatcactaatccaaaagtccaaaatcagaaatgctccaaaatctgaaactttttgaatgcctagatgctcaaatcagattttggattttctgattagtgatgcttaacctgtatgtattctgcaaatatttcaaaatctgaaaaaaattaaaatctgaagcatttctg

SEQ ID NO: 875651 - DNA, 618 bp, Homo sapiens
cactatgtaggtaatgagataaaattctggtatttttaagtgttatccccacccccaaatagaatgtagactcatcaagggtagattctgtgccttctacttgttttttaaatggaaacaatactgtgtgaaaacacagttattgtttaataaatatatatgccaagaaagcttgcagrccctatttttcagggttcttttgattacaaatgaaagaaatgtaacccaaagtaacataagcaaaaagtaggaaattttttcatcatgaaactaagaaggtggtccagcattgctcaatccagaggctcgtgcaggatttttagtgcttcactaggtgcattgacctcattctctcctactgctaagttcttcgctgtctgcttctttacattccagggctcagtattccagctttgcaaccccagcaaaacgagaccttctttctgtgcaaattcgtacacaaatcccagaggagattctggctggctttgttaggaccttgccccacactaaacaaaaaccatgccagggaaatggacactatgattgacccagctaggtttatatgccagtctgtgcacttagaggtggtcagagcattgtaactggcagtttccc

SEQ ID NO: 875652 - DNA, 631 bp, Homo sapiens
aaccgctcaactattttttctcctaaagtacatactcacacctcagcgtctctcatttttaaaagttaagaaaaaggaatgtaccctactaaccatacattccctctaattactattctatctttccctgtcatcacagaaaagattcttaaaattgttgtttatacttgctgattacatttctaccatattctatttaaaaaaaagctttcccataagccaggaaaagcctgcttgccaaatccartgtacttatgtcagtgcttcccttgcctaacagctctgtgacaacttggttcagcaattacattccctctctttttattttatcttacattgattgtaagcctcatttggaaagctcctctccctgtgctcttttcataggcattggcgatctccagctttcattctcctttacacttattaaccacgcagatttgttcacctgggtgactttttcactttcagtgctcttgctataacctatgccatgataatggctggaattgcctcacatgttctcatcaattcaaggatctcttcctttctgacagcaacactgatattaacccaccaccaccaacactgatactaacccaccaccatagattgagttccatgaatggca

SEQ ID NO: 875653 - DNA, 598 bp, Homo sapiens
aagaaaacacatgtagggaacacatgtagccaaaaaataatatataatcagagaaataataggacttctggaaaaaaaagatgagatcagattggttaggatctttactaacatgacaagagcatgaattttttttctgtagataataagtatgaaagaattttagcttaaaaattagcataatttggatccacatatgcaaatcaatgaatgtaattcataatataaacagaactaaacacaaaaaccacgtgattatctcaatagacacagaaaaggccttcaaaaaaattcaacatcgcttcatgttaaaaattctcagtaaactagatattgaaggaacatacatcaaaataataagagctatttatgacaaacccacagcaaatatcacactgaatgggcaaaakccagaagcattctccttgaaaaccagcacaagacaaggatgccctctctcaccactcctactcaacatagtattggaaatgctggccagggcaatcaggcaagagaaaaaaataaagagcattcaaataggaagagaggaagtaaaattgtctttgtttgcagatgacatgatcctgtatctagaaaa

SEQ ID NO: 875654 - DNA, 612 bp, Homo sapiens
tttccccactttcaagcctggggcagcaggagagccgctacagctgcagtttctcctgggctgcaaaacttgcagtcacgttcagcttggcaacctggaacagattcgcatgtgccattgccgggtaacccactctgttctcctgagattgtggtgcagtagggcccttgctgctccatctccaagcacatctctggcatccagagtaaccatttgcctagttgagtagcctgagccaccgcactcctcctggacataacgttatggtgaagcagagctctctctgctccatacccaggaagatccctargcattcagagcacctccttgcctgcttctggagtttgagtcaccccacccctcctatgcagagatcttagtgcagggggtctctgctccatgctctaggcatcttgagcacctactctcctggactagaagtttagaccatcccctatccctgtgcagagaacttggggctgaggaggtttcccagctacactactaggcacatctctgggcccttggtggccacccactgcattctccctcggcactagtgcctgtgtctgtcatcaggggacctgtaggtggacctgtcaggtctggccc

SEQ ID NO: 875655 - DNA, 612 bp, Homo sapiens
tttccccactttcaagcctggggcagcaggagagccgctacagctgcagtttctcctgggctgcaaaacttgcagtcacgttcagcttggcaacctggaacagattcgcatgtgccattgccgggtaacccactctgttctcctgagattgtggtgcagtagggcccttgctgctccatctccaagcacatctctggcatccagagtaaccatttgcctagttgagtagcctgagccaccgcactcctcctggacataacgttatggtgaagcagagctctctctgctccatacccaggaagatccctaggcattcagagcacctccttgcctgcttctggagtttgagtcaccccacccctcctatgcagagatcttagtgcagggggtctctgctccatgctctargcatcttgagcacctactctcctggactagaagtttagaccatcccctatccctgtgcagagaacttggggctgaggaggtttcccagctacactactaggcacatctctgggcccttggtggccacccactgcattctccctcggcactagtgcctgtgtctgtcatcaggggacctgtaggtggacctgtcaggtctggccc

SEQ ID NO: 875656 - DNA, 616 bp, Homo sapiens; identical to SEQ ID NO: 874121

SEQ ID NO: 875657 - DNA, 598 bp, Homo sapiens
aatcaattaaaaaacacactataaaaatctgcagagacatgaacaacatttcaccaaagagaaaatactgaggcgggcagatcacctgaggtgaggagtttcagaccagcctggccaacatggtgaaactctgtctctactacaaataagaaaattagccaggcgyggtggcatgtgcctgtaatcccagctactcagaaggctgaggcaggagaatcacgtgaacccgggaggcagaggttgcagtgagctgaacccacaccactgcactccagcctgggtgacagagtgagactctgtctccaaaaaaaaaaaagaaaaagaaaatacttaaggcctacaaaacataaagagaagtttaacttaacgagcattcagagaaatgcatgtcaagactacggtgagattataatcattcaattgttgacacgttaaagtcttaaaatgttaagtattggaggaaaggtagatacataggctttcttatgtgtggttggtggaggttaagttggtgctgcggctctggaaaacagtttgacactatctcctaaagttgaaaataaagacatcacatgatctggcaattttcttgctagta

SEQ ID NO: 875658 - DNA, 598 bp, Homo sapiens
aatcaattaaaaaacacactataaaaatctgcagagacatgaacaacatttcaccaaagagaaaatactgaggcgggcagatcacctgaggtgaggagtttcagaccagcctggccaacatggtgaaactctgtctctactacaaataagaaaattagccaggcgtggtggcatgtgcctgtaatcccagctactcagaaggctgaggcaggagaatcacktgaacccgggaggcagaggttgcagtgagctgaacccacaccactgcactccagcctgggtgacagagtgagactctgtctccaaaaaaaaaaaagaaaaagaaaatacttaaggcctacaaaacataaagagaagtttaacttaacgagcattcagagaaatgcatgtcaagactacggtgagattataatcattcaattgttgacacgttaaagtcttaaaatgttaagtattggaggaaaggtagatacataggctttcttatgtgtggttggtggaggttaagttggtgctgcggctctggaaaacagtttgacactatctcctaaagttgaaaataaagacatcacatgatctggcaattttcttgctagta

SEQ ID NO: 875659 - DNA, 598 bp, Homo sapiens
aatcaattaaaaaacacactataaaaatctgcagagacatgaacaacatttcaccaaagagaaaatactgaggcgggcagatcacctgaggtgaggagtttcagaccagcctggccaacatggtgaaactctgtctctactacaaataagaaaattagccaggcgtggtggcatgtgcctgtaatcccagctactcagaaggctgaggcaggagaatcacgtgaacccgggaggcagaggttgcagtgagctgaacccacaccactgcactccagcctgggtgacagagtgagactctgtctccaaaaaaaaaaaagaaaaagaaaatacttaaggcctacaaaacataaagagaagtttaacttaacgagcattcagagaaatgcatgtcaagactacggygagattataatcattcaattgttgacacgttaaagtcttaaaatgttaagtattggaggaaaggtagatacataggctttcttatgtgtggttggtggaggttaagttggtgctgcggctctggaaaacagtttgacactatctcctaaagttgaaaataaagacatcacatgatctggcaattttcttgctagta

SEQ ID NO: 875660 - DNA, 564 bp, Homo sapiens
ctttgaaagaagaaacagcagcctacactgtgaaccagatggaaaactgtgagtctccagagtgtgtgagagggggagagactgccaccgtgacacacactcccaccggagagccgggcaattcaggccatggaggcagatcttaacactacccagtgctggagctgatttakcgagtgatggggtgagaagaagcggtatcaggatgcacattgcctgcactttcacactccagcaaggacagagggaagccattcctgatcctacctcacaggggacctcacagaagtctaccagctaactcaagctgcagtcacaggttgagagaagctcccatctgagatatgagattataaccttgagtgaggataaaccctgttggccagaaatgaggggcaagtagtaagtttgctatagccatgggcgcaggagctgggcactcctgcttcacaggtagaccagaaggggtgcggcctgaaagctgtggtttcactggtctccactgggacggcttatggcctggggcagtttttagttctacctacagactacctggaacccagc

SEQ ID NO: 875661 - DNA, 543 bp, Homo sapiens
gtgctgccagtacacaggcaaatgctaccagtctctttgctaaagcatagcaagagtaacctttactccagttcccaataagttcttcatctccatctcagactacctcagcctggacttcattacccatatccctatcagcattttggtcaaaaccattcaacaagtctctaggaagatccaaactttccctcatcttcctatcttcttctgagacccccaaactgttccagctcctgcctattatmcagttcctaagttgcttccacattttcaggtatctttatagcaatgccccactcttctagtaccaattttcggtattagtccattctcacactgctataaagacctacctgagactggataatttataaagaaaagaggtttaattgacccacagttccacaagcttaacaggaagcatgactggaaggcctcaggaaacttacaatcgtgatggaaggtgaagaggaagcatgcatatcttcacaatggtggagcagaagaaagagagagggaaggggaagtgccacacacttt

SEQ ID NO: 875662 - DNA, 599 bp, Homo sapiens
taaaacaaaacgaacaaaaaagagattctttgatttgatcagttacctcatttgaccttcaaaagcaaaagagcaaatatttcttgccaaaaataaaaaaattaaatcattcatacaccctaggtttaaagctacagacccattttgccatgaacttacatagcagcagtttaacgcaggttgaatcaaatctaaaatctgtctgttagtggaaccagctcttgaaaaatgtataattattttttcatagtaagacatcacactcccygaaagctctctttattctcctgtaaatgcaatctgccatcccagtatgtatgagttttgggttacaaagtcctttggatttaaaggtcaattagtttggttccactttaattagaagccatcataatagtgctgtgtgagtaatttatagaagcataaatattgacatcaatttttgtcagatattctgatatcataaacatcatgtaaatctaagcaccagcaatcaatttgcacataatagactaattttattagaactgtatgactgcactatttggtttttagagtccctctcctcttgctacattaaatcatcgttttaaatcatg

SEQ ID NO: 875663 - DNA, 641 bp, Homo sapiens
aaaatgggggtggtggggaatgggttgacatatagatgaaacaaaaacagcaaatgattaatagttgttgagactgggggtcatgtctattacactactttgtttattttgtataggtttaaagtgttctgtagtaaaacacttgtataaaaagataaagtttttctacaacattagctcttaagattgtggctgcctttggggagaaagaarggagtaagtggctgtcaagggcatgaaaaaggctggtcttatgccatggttacacaaatgtatttgccttgtaataattcgttgagctctgcattaatgctttgtgcatgtatttctgtatgcatgttattcaccaataaaaattgaaatattaaaaaaagaaaaaaatgatgacctaatgctagtgctgtaatagaaatccaagtgaaacaggatatagaaacacataacaaaaagactaataataaaaagccaaggcttttgtggtacttactgtaagtgtggcactgctctattaactcatttaatcctcacaacaaccctatgaggtaaggagtatgactattcccatttacatatgagaaaattgaggcacagaaaggttaagtgagctgctcaaggtcacacagctaaagtgtagcagagca

SEQ ID NO: 875664 - DNA, 578 bp, Homo sapiens
catggaagacacggtctaaagatgaaaccatctataactctcaattttaagcaggactgaattacccaggtttataaaatactccaaggaattaaaaggcaaatgccatgctctatatactctatggacacgcactgaaatataagtgtaaaaattatagggccataagaggaatttggaagagaatatcaaatgttctaaaattccttggttctagaaccagtgacccctgacctagcgagcctttctttaatgaaataaaagagcatttcattagattacatggccctggtttagttcttaacaatttggggcacctcctcatctccatgctttcataattaatcatcaggcctcttttgtmttctcaaaaaagccttccgtcaattgcctacccaatcttctttttcctcttttcattccaaatctcagaacaaaatcaggttcagcttctgtgaaattgaccctccagcgtgaaatcgaccctccagcgtgaaatcatttttttaatgataaagtgccaaaagtgttctgcaagtataaggtattagttgagtgttataattattatgatccag

SEQ ID NO: 875665 - DNA, 649 bp, Homo sapiens
aaggttaggagcaggtcatgtaccagggtttctaccaaattaatgctatcaggggaattacacttaaatggaattctttctatctaaacaattccatctagtttcatcactgctttttctctccccatcccttcctatataaaataattccgaggagtagacatctggaataatatataaagaatcaagttatcaaacaagccaagatttaccaccaggcccagtgaccccgctctaagtcatccagaaaacgaaagtctcaaacagccagtaattctttttgacaggtttcaaataatctttgacattctgcttcttggtacacaatcttcattcaaatgaccaaaacaaaattttaaagaggcacttccatctgggaatcattttcctcatatatttttcatttaaacatcatattggtatgtctaaragaaggcttcttaaatcagctataaaataaatgtaggaatataaatctaaatataatcagtacacttagtgttcctcactgaaaatcaagatgctcttctttatggcatattttttccaaaactaactattcacttgtagaatatttgtgtgacaaagtatcatattgtcatgagtgtgccagtccaataaaaggaaacttcattatgcctatatttag

SEQ ID NO: 875666 - DNA, 596 bp, Homo sapiens
atttatttgaaaaagagtttggagtttgaagagagtgcaagaaagttttcagttcaaccttacagaagttaaaagaaacacatttggggttactagggagaaaatttccaagaagtcagtgaaaaacgctgagaaatccatgttatgaaccctgatgtgttttggtctgctctggaatgaagttttcattggcagttggaaaaacgtccacttgcacatgragtattttcgtccttaacctcactgagccaagtagatggatgaatgtttgcaaacattcctttccatgttactctttatctaggggtacccaacattggaagcacaaggtgtgtatgaatgtatgattggaggaagatctttactgagtaggaccatggaaaaccccactggctccaagctttttagactgaggtacacattagaagagtcctctctccccagctaccacctataccagtctgcttctcctactccagccatcatgacctctcacccaggcacaaacccttcaatcctaggagagtctctccaaccctgtcctctggaattacattgctagtacattctaggatagcaaatataatctagttacc

SEQ ID NO: 875667 - DNA, 541 bp, Homo sapiens
tgcagcccacggaccatgagccaaagcagggcgaggcatcatctcacccgggaagcacaagggtttggggaattccccttcctagccaagggaagccatgacagatgacacctggaagatcaggtcactcccaccstaatactgcacttttccaatggtcatagcaaacgacacaccaggagattatatcctgcacctggctcggagggtcccacacccacggagcttggctcactgctagcacagcagtctgagatcaaactgcaaggtggcagcgaggctgggggagaggcgcccaccactgctgaggcttgagtaggtaaacaaagtggccaggaagctcaaactgagtagagcccaccacagttcatggaggcctgcctgcctctgtagactccacctctgggggcagggcatagatgaacaaaaggcatcagaaacctctgcagaattaaatgtccctgtccgacagctttgaagagagtagtcgttctcccagcacggagtttgagaatggacagactgcatcaagtgggtccct

SEQ ID NO: 875668 - DNA, 545 bp, Homo sapiens
cttgaaactctacacctatttttttgttttcttttgttttgttttgagacagagtctcactctgtcaccccggctggagtgcagtggcgcaatcttagctcactgcaacctctgcacccccaggttctagcgattctcctgcctcagcctcctgagtagctgggattacasgcgcgtgccaccacgcccagataatttttgtatttttagtagagatggggtttcatcatgttggtcaggctggtctcgaattcctgacctcgtgatccgcctgcctcagcctcacaaagtgctgggtttacaggcgtgagccacctcacccggccaaaactctatacctattaaacacctctccgctcactcctcccaccagcccccagtaaccactgttctactttctcttgaactcatctatttttggattgttgagagagacttaagccacggtattttgggatgtactgctcagatttcccctttttaggaccaaaccactcattttctcagctactgagagtattggcaaatgacagactaagttcagt

SEQ ID NO: 875669 - DNA, 545 bp, Homo sapiens
cttgaaactctacacctatttttttgttttcttttgttttgttttgagacagagtctcactctgtcaccccggctggagtgcagtggcgcaatcttagctcactgcaacctctgcacccccaggttctagcgattctcctgcctcagcctcctgagtagctgggattacacgcgcgtgccaccacgcccagataatttttgtatttttagtagagatggggtttcatcatgttggtcaggctggtctcgaattcctgacctcgtgatccgcctgcctcagcctcacaaagtgctgggtttacaggcgtgagccacctcacccggccraaactctatacctattaaacacctctccgctcactcctcccaccagcccccagtaaccactgttctactttctcttgaactcatctatttttggattgttgagagagacttaagccacggtattttgggatgtactgctcagatttcccctttttaggaccaaaccactcattttctcagctactgagagtattggcaaatgacagactaagttcagt

SEQ ID NO: 875670 - DNA, 554 bp, Homo sapiens
ccactagtccctttgcaaaagcataacagaatcacctttgctccagtttccaagaagtccctctccatctgagaccatctcagcctggaattcattgtctatatcactatcagcattttggtcaaaaccattcaacaatctctaggaagttccaaactttcccacaccttgctgtcttctcagccttccaagcctctgggaagttccaaatattcccacatttttatgtattcttctgaaccctctaaactgttccaaactctgcctgttacccagttccaaagtcactttcacaattttgggtatccttgtagcagtaccccactctctgtgataccagtttactgtgttagtcctttctcatgctgctaatgaagacatacctragagtgggtaatttatagaggaaagaggtttaattgactcaaagttcagtatggctggggaggcctcagaaaacttacaatcatggtggaaggggaaacaaacacatccttcttcacatggcagcaggaagaaggagagttgagcaaagagggaaaagccccttaaaa

SEQ ID NO: 875671 - DNA, 691 bp, Homo sapiens
gacatggttctttgtcccaccacttgcaatggcagattctaccttctaatgggttagtctacctgttaagatactgacttctgatacaacatggatgaacctcataaacatatcctatgttgtattaactaaggttctccagaaaaacgacaaaaaatagaatatatacgaacagataattgagagaggatttattaggtgaagtggctcacatgattttggaggcagagaagtcccatgatgtgccatttgcaagctgaagaaccaaagaagatggtagggtggytgagtccacttttcaagtcaaccaggggagctgatggtgtgattctcagtttgagaccaaaagctggtggggaagggtagtggctagtgcgagtcccagagtcaaaaggccagagaacctgaagttctaatgtccatgtgatatagtttggccatgtccccacccaaatctcatcttgagttgtaactcccataattcccacatgtcatgggaggaacccagtgggaggtaattgaatcatgaaggcaggtgtttcccgtgctgttctcgtgatagtgaataagtctcacgagatctgatggttttaaaaatgggagtttccctgtatagtctctctctctctctttgcctgcctccatccatgtaagatgtgacttgctcctccttgccttctgccatgattgt

SEQ ID NO: 875672 - DNA, 691 bp, Homo sapiens
gacatggttctttgtcccaccacttgcaatggcagattctaccttctaatgggttagtctacctgttaagatactgacttctgatacaacatggatgaacctcataaacatatcctatgttgtattaactaaggttctccagaaaaacgacaaaaaatagaatatatacgaacagataattgagagaggatttattaggtgaagtggctcacatgattttggaggcagagaagtcccatgatgtgccatttgcaagctgaagaaccaaagaagatggtagggtggckgagtccacttttcaagtcaaccaggggagctgatggtgtgattctcagtttgagaccaaaagctggtggggaagggtagtggctagtgcgagtcccagagtcaaaaggccagagaacctgaagttctaatgtccatgtgatatagtttggccatgtccccacccaaatctcatcttgagttgtaactcccataattcccacatgtcatgggaggaacccagtgggaggtaattgaatcatgaaggcaggtgtttcccgtgctgttctcgtgatagtgaataagtctcacgagatctgatggttttaaaaatgggagtttccctgtatagtctctctctctctctttgcctgcctccatccatgtaagatgtgacttgctcctccttgccttctgccatgattgt

SEQ ID NO: 875673 - DNA, 657 bp, Homo sapiens
tatatatgtacttaaatattattagggagtagtacagatatgttttatacaatttagttactaattctcaaaagtgaactaaaagaaaattttcagagaaagactggaaattcatatatttcaagcaaacaatttaggtttgtctgttgtgacaagaagaatgtgtctgtttgtgctgctttaaatttatattgataacagatgagttcctttaagttaaggtcatgggtcaaatttattaatgtgctctttccctaatcaaaattatgtgtacattttggttgacaatttgtgaactatttattttgacttattcaatgatttgttaattcaactgctttaagcttttaaaaccctcggtttctatataaaactatggctcatgatcttgggatatatccatgtgttgtaattgtttttagtgcctcgttgtcaagtgacacaaagaagaatttgatggcaggctttggaattcttttcttgtaagttgatatgcaaygcattccaaaatagaatatctgatatgtccataattggtaatgaatttaggttacaaaacattattgctacatttatatgttagccaacagaaggaagcaaattctatatctctccaagcttcatcaagatttgatgggtaatttggttggccctaaa

SEQ ID NO: 875674 - DNA, 674 bp, Homo sapiens
cagaactggctttgctatactcccgcagtattgcgagggctatctggtttgcagttatggctatgcatagagcatataatacatccaaaaagtacagggacagggtgcaacttccagtcctaaaacctcaggcagtttatttctggctaccctctataggaattttttcttcacttaccacattttatgttgtatttagaaagagcaacaaggctagaccacagtttttttttttttgttttktttttttgagatggagtctcactctgtctcccaggctggagttctgtggtgcaatcttggctcactgcaacctctgcctcccgggttcaattgattctcctgcctcagcctcccgagtagctggaattacatgcgcatgccaacatgcccggctaatttttgtacttttagtagagatggggtttcactattttggccaggctggtctcaaactcctgacctcaagtgatccacctgcctcagcctcccaaagtgctgggattacaggcatgagccactgcgcccagcctagaccacaaatttatattctgacaaatataaaacaaaaatcatgtttatgtaaaaaagggagtcctggtactagcgggtggaaatgcaaaaattttattgtgaaaaacctctactaatataactaacaacattatagggaa

SEQ ID NO: 875675 - DNA, 650 bp, Homo sapiens
tttcctaattgtgtgacctttgttaagtgactcaatctgtgtctccgttccatatgtgtaaatgaggatcaatgactgtacctccgcagtagggttgttatgaggttatagctacttagtacatataaatcctttagaacagtgctgagcacatatmgaaatgtttgttattcttattagcagtcagtattaagtactaggtgagagaagatctaataaagcagaaaaaggcagagaaaagaaaatggtgggtctgggcatgatgggagccatgagagaggaagctgggggctggtgagcagacttgccattaggaaagggccagagcttctagaggaaaggaggaagtagccacccaaaccttcacagaatcctgtcaacatctccagggacaaatcaagccaccctacagaaagtacacttgtatggcctgttaatgctgaggtcgaattcattagaagaaattgtgcaatgtagaatcgaatcatttttaagcatttaaaagcaagaagcagaagtgaaccgtgcttaaaagaggcaggcacatagtatctaagagcttgggctctgcaattagactggcacaagttcaaatcccagctctgcccttcactattatctgacctgggaagggttacttagccttgttg

SEQ ID NO: 875676 - DNA, 611 bp, Homo sapiens
gaaatatctccgtaaggaaactactaaaactaatgagagaaattgtagattatgcaaactaatggaaaagtatttcaacctcatggacaggaagaatcaaattgttaaaatggcaatagtgtacaaagcaatttacaaattcaataatatttttatcaaactaccaagatcattcttcacagaattagaaaatactgttttaacatttatatggaaccaaaaagaagagttggaacaaccaaagcaatcytaaacaagaagaacaaagtggaaggcatcgtattacctgatctcaaattataacacaggctatagtaattaaaacagcatggtactggtgtaaaaatagatagaacaatggagaagagaaaactcagaaataaaggtacatatccacagcaaactaatgttgacagagtcaattagagcatacacagcagaaaggacaaacttttcaataaatggtgctgggaaaaattggagtgtcatatgcagaaaaatgaaactatgtatctcaccatatataaaaattgactcaagatagattaaagacttaaatgtaaaacctgtaactattaaaatcctaggaaagaaatccaggaaaactcctt

SEQ ID NO: 875677 - DNA, 635 bp, Homo sapiens
gtgtcatatgcagaaaaatgaaactatgtatctcaccatatataaaaattgactcaagatagattaaagacttaaatgtaaaacctgtaactattaaaatcctaggaaagaaatccaggaaaactcctttggacatcagtgtaagcaaataattcatgactaagaccttaaaagcacaagtaagtaaaacaaaaatagacaaatggaagttaattttactaaaagcttctgcacagcaaaagaaaaaataaacagtgacacacacctgcagaatgaaagaaaatatttgcaaactatacatctaacaatgactaatgtctagaatttacaaggaacttaacaacaagaaacaactccatttaaaaggcagcaaatgatatgaacagastttttcaaagaagacatacaaatggacaaaaagcatatgaaaaaatgttcaacatcactaaacatcaagaaatgtgaattaaaaccaaaatgagataccatctcatgccagtcagaatggctattattaaaaagtcaataaaagttattggcagggatgtagagaaaagataatgcttatatgcttttattgagaatgtaaattagtataccctctatagaaaacttaaaatattttgcaaagaact

SEQ ID NO: 875678 - DNA, 630 bp, Homo sapiens
ggcgagccatgtcataagttcttaatatgaaaatatgacagtgaccacatatgaatagcatattaacaatctgtgttttccaaatgaactgacttcacctatcttccaaaagaaaattaaataactataagttatttaaatgtttaactctaagccagagtaattctaaattgatataaactattggtttttatattttaatagtatttgatgaattgattatattatagctattgtcattttagttaatgagttacctaatcttgaaacgcacacatagaatttaaactaaaaatatttttcctaattttagagttgatagctgggatttgttacatgtgactccagtacaccaagggttaaggactatagatatttaactacatgttgagtagtgcagaaggtggagaccaacttgyacagtaagcacaattaagtttcacaattagcccatgggccagataggtttattcttgcaatgtgcagtataaaataattttatataagaaatttaaataaatcaaagtataaaaaatttaactttgattcttatagtttatctatattggagaatataacattgggctttggaatataaagttggaaaaactgtttcttcaattctacaga

SEQ ID NO: 875679 - DNA, 631 bp, Homo sapiens
aacagcatccaagtcttcccttgaatgctttgctgcttacaaatttcttctgccagataccctaaatcatctctctcaagttctaagttctacaaatctctagggcaggggcaaaatgctgccagtctctttgttaaaacataacaagagctacctttgctccagttcccaacaagttcctcttctgcatctgagaccacctcagcctggatttcattgtccatatcattatctgtattattgggcaaaaccattcaacaagtctatatggagtttcaaactttcccacatttttccaccttcttctgagccctccaaactgtgccaacctttgcctgtgacccacttccaaagtcacttccacatctctgggtatctttttagcaatgccccactctactggkaccaatctactgtattagttcgttttcacactgctaataaagacatacctgagattgggaagaaaaagggacttacagtttcacatggctggggaggcctcacaatcgtggaggacataatgaggagcaagtcacatcttacatggatggtggcaggcaaagagagagacagcttgtacagagaaactctctttttttaaaaccatcaagtctcttgagactcattc

SEQ ID NO: 875680 - DNA, 552 bp, Homo sapiens
aattgtaaggcacacattttcacactctgatgttggtcttacaatcagtggtctgacattaagtgaccacatttattctccctctcaatggtacatcgaataatggagtggtatctaatcaatgatcttaaggattctatgaaatacaccagcacgacagtaacagatggcactctcaaatgaagatcatttgaggaggttgtaataaaggaacacacaggtgtggctggggtgtagggaaatcgcaggtgatagtaaaggacctgggactgggaagagaggctgctatgactccggcctcaggaggaggtggtgggcgtggttactagaacccttttttttttttttttaattcttttcagtcctgctcyttctgtaactagaaccttgaaggagagagttgagagagagaggagctgcttgagagagagcaatgaccttcagtggaaagacacagcccgtccaaggtaggctccaccatctatcagtggcatggccttgggcaagttatttaacttacctgtacctcagtttactcatctgcaaagtggg

SEQ ID NO: 875681 - DNA, 664 bp, Homo sapiens
ccatatctatgcttgaaattccttgatattctgccaatgaatgtctcaatgcttatctgtttctgttgcttacaacgaaaggacctaaaccaattagtgctctaagggccctttcaattctgtaattgtctgagaggatagttgtgaatgagaccacttctgaacactcacatccatgtccttcccttcctccctgggcacaccacaagatcatatttcccaggctcacttgcagctaggcaagaccatgtgactaaattctggccattggaatgtgggcattaagcaatgtgtgtcactttcagggttggcccatagaacctcaatgcaattctccctggagtggactcaggtcctggaggagggcagggccacatgctgggggagcttgcaatgaatgcttgcactgagcacagaaccatcctcatctccaacccctgtcaccatttcagatckcatgggtgagaaatggagctgcatcatcttaaggcacagagactttgaggtttacttgttatagcagctgatgtggtgtgccctaactcatacaataattctccagaaagggatctatgccttcaaattggcaaagaagacatcatcaaagccaagaagtgaacatcagctactgtttctcttgtcagccagagcagtaagtttcccc

SEQ ID NO: 875682 - DNA, 684 bp, Homo sapiens
caagtccagctgagcccagcctagatcagccaagctgcagccaaacctcggatcattatgattctctgctatgtagtgatagctaaggcaactacgtccttgctgtgcaatctttgacaagttatcttctctaccaaaaacttaatttcttcatctataawatggcaaaatatagagcaattgtaagaattaaacaaaatagcagcgtgaagtacttagcataatatatagttaataaatattaaatattattatgctttataagccatccctaattcctttgccctttcctttgctgacttcccagatatatctctctctatcctagacactacaaccaccatatatcagtaatgcatttaggaggctgaattgccaggtcctgggccatcttataaaatactgctatgtgggaagaaaaaatgacgcaggctgtagtcactgttaatagtaagaatgaacacatagagcatttcccctgtgcagcattgggccttaaaaggagatgtgattggcctaaaggtgagcttttccgaggactggtccaggacccttgccatagtgagatgcgggaacaagcccatcgacagagaagtgcacataggcctccagccttagagcagttctgctggtccagggagttccaggaagtcttaaatggagaaacaaatcaccataagcctt

SEQ ID NO: 875683 - DNA, 684 bp, Homo sapiens
caagtccagctgagcccagcctagatcagccaagctgcagccaaacctcggatcattatgattctctgctatgtagtgatagctaaggcaactacgtccttgctgtgcaatctttgacaagttatcttctctaccaaaaacttaatttcttcatctataatatggcaaaatatagagcaattgtaagaattaaacaaaatagcagcgtgaagtacttagcataatatatagttaataaatattaaatattattatgctttataagccatccctaattcctttgccctttcctttgytgacttcccagatatatctctctctatcctagacactacaaccaccatatatcagtaatgcatttaggaggctgaattgccaggtcctgggccatcttataaaatactgctatgtgggaagaaaaaatgacgcaggctgtagtcactgttaatagtaagaatgaacacatagagcatttcccctgtgcagcattgggccttaaaaggagatgtgattggcctaaaggtgagcttttccgaggactggtccaggacccttgccatagtgagatgcgggaacaagcccatcgacagagaagtgcacataggcctccagccttagagcagttctgctggtccagggagttccaggaagtcttaaatggagaaacaaatcaccataagcctt

SEQ ID NO: 875684 - DNA, 678 bp, Homo sapiens
agcaaggggttggggggcaggtgccacacacttttgaatgaccagatctcatgaaactctatcatgagaacagcaccaaagtaggaaatctgccttcctgatcaaattacctaccaccagaccccacctccaacatgagggattacaatttgacgtgtgatctgggcaaggacacagatccaaaccatatcaggaagcaaagagcagggcagcaaggtgaggttcagtttccatttgggcattggggcagaggatggtgctacttgctgagatggaaaggctgatgaagggacagggttagagggcaggaggaggcaatgttagcaacaataggaaatatccatataacaaygactgtgagcggccaggcgaggtggtacgcctgtaatcccggcactttgggaagctgaggagggcggatcacctgaggtcaggagtttgagaccagcctggccaacatggggaaaccccatctctactaaaaatacaaaaattagcctggcatggtggcaggcacctgtaatcccagctactccagaggctgaggcagaagaatcgcttgaacccaggaggtggaggttgcagtgagctgagatcacatcactacgcttcagcctgggtgacagagcaagactccatctcaaaacaaacaaacaaaaacaatgactgtgaggcagg

SEQ ID NO: 875685 - DNA, 575 bp, Homo sapiens
gtgaataagtctcacaagatctgatggttttaaaaatgggaatctccctgcaaaagctctcttattttctccgctgccatgtgagacgtgcctttcactttctactatgattgtgaggcctccccagccacatgaaacagtgactctatgaaatctctttcttttgcaccttgcccagtcttggagatgtctttatcagcagcatgaaaatggactaatacagtaaattggtagcagtagaatggggcactgctgaaaagataccagaaaatgtggaagtgactttggaactgggtaacaggcagaggttggaacagtttgtagggctcrgaagaagtcaggaaaatgtgggaatgtttggaacctgctagagacttgctgaatggctttggccaaaattctgataatgatatgaacaatgaaatccaggttgacgtggtctcggatggagatgaagaacttgttgggaactggaacaaaggtgactcttgttgtgttttagcaaagagacggcattttagcaaatggcagcattttgcccctgctgtagagatttttggaactttgaacttgag

SEQ ID NO: 875686 - DNA, 605 bp, Homo sapiens
ctaagttcaaatcctagttcagctgcttctaaatcccatggcactaagagtcatgtaattcctgatgactgacccctctgagttgcagttattttgtaggtaaaatgggagtaaagtacctcctccacaggatggttctgaatattaaatttgataatccatataagcactaacatagtacctgaacacacagtgggtgcctcacaatgttagctttctttccaacttggatcttagtattggttttcccttacagactaactattaatcacaaaccataaagtgtgacagctgaacaggtccatgggaatcatctccaggatttaaggttatattacatggatccctaggatttstgagttgtaccccatgccacatgaggaattaagggggttaactagggcagagttctctaacctcttctttgtttaaaagaaatggatgactgtaccaacagatccaatattggcatgacaaatgcctgcgaaccagtgatctattctcaaccccttatttcatatttgagtaaacttgagccagttaagagtaaggacttgccagaaatcattctgcctgggaaataggtaaaggcacattcaatacgt

SEQ ID NO: 875687 - DNA, 620 bp, Homo sapiens
tcataaattaattttattaaattataattatttctgtgaattttttatgtatcccagttctggtttgtgatttactttcctaacatgagaggaaaaaagtacatttactacttatgaaggaaaacatttacatcaaattatctttgtatccaggaaatacaaggtgtcaaatgttggatctgaatgataagaatataggtaattttcttttgattactttttgctgccctttttaacatrtcacagtggaaagtatataattcactatatgtttttaaaatcccataaaattacagcattaattaaaataagaccaaactgcaccaaactgcccctgagaagcactttctgtggctacaggatcaccagggcttgtccgtataccaccccaacttgcaaagacccttcagtgccttccttaccatgcctcaggccataacagagccagaatgtagggatgccaacatgttgttggtttgtccaagattattatccaatgatggtccaaagaacagaattcaggcatcccgatttgctgctgtcttacttgttaattatatcctaaataagcctgcttcctgaaattttctttatagagatttcatcacatgcagtttcct

SEQ ID NO: 875688 - DNA, 620 bp, Homo sapiens
tcataaattaattttattaaattataattatttctgtgaattttttatgtatcccagttctggtttgtgatttactttcctaacatgagaggaaaaaagtacatttactacttatgaaggaaaacatttacatcaaattatctttgtatccaggaaatacaaggtgtcaaatgttggatctgaatgataagaatataggtaattttcttttgattactttttgctgccctttttaacatatcacagtggaaagtatataattcactatatgtttttaaaatcccataaaattacagcattaattaaaataagaccaaactgcaccaaactgcccctgagaagcactttctgtggctacaggatcaccagggcttgtcygtataccaccccaacttgcaaagacccttcagtgccttccttaccatgcctcaggccataacagagccagaatgtagggatgccaacatgttgttggtttgtccaagattattatccaatgatggtccaaagaacagaattcaggcatcccgatttgctgctgtcttacttgttaattatatcctaaataagcctgcttcctgaaattttctttatagagatttcatcacatgcagtttcct

SEQ ID NO: 875689 - DNA, 566 bp, Homo sapiens
caagaagaagagctaactatcctaaatataaatgcatcacatacaggaacacccagattcataaagcaagttattagagacctacaaagagacttagactcccacacaataatagtgggagactttaaaactccactttcggtattagaccgatcaacgagasagaagttaacaaggatattcaggacttgaaatcagctctggaccaagcagagctaataaatagacatctacagaactctccaccccagttcaacagattatacattattctcagcatcacatagcccttattctaaaatcgaccacataattggaagtaaatactcctcagcacgtgcaaaagaacagaaatcataacaaagtctctcagaccacagtgcaatgaaattacaactcaggattaagagtctcactcaaaaccgcacaactacatggaaactgaacaacctgctcctgaatgactactgggtaaataagaaaattaaggcagaaataaataagttctttgaaaccattgagaacaaagacacaatgtaccagaacacagctaaagcagtgttcag

SEQ ID NO: 875690 - DNA, 566 bp, Homo sapiens
caagaagaagagctaactatcctaaatataaatgcatcacatacaggaacacccagattcataaagcaagttattagagacctacaaagagacttagactcccacacaataatagtgggagactttaaaactccactttcggtattagaccgatcaacgagagagaagttaacaaggatattcaggacttgaaatcagctctrgaccaagcagagctaataaatagacatctacagaactctccaccccagttcaacagattatacattattctcagcatcacatagcccttattctaaaatcgaccacataattggaagtaaatactcctcagcacgtgcaaaagaacagaaatcataacaaagtctctcagaccacagtgcaatgaaattacaactcaggattaagagtctcactcaaaaccgcacaactacatggaaactgaacaacctgctcctgaatgactactgggtaaataagaaaattaaggcagaaataaataagttctttgaaaccattgagaacaaagacacaatgtaccagaacacagctaaagcagtgttcag

SEQ ID NO: 875691 - DNA, 625 bp, Homo sapiens
gacatttggtgtcacattgtatttcaaaaaataagtatactttcacattatatttcaaaaagtaagtgtacttttgtaacttgactacgcctaataatttatttcaagggatgaatgaaaggtgagaatttcgagacaaggctgataatttcctttaggacacacaaaggaatagggtaaatggaagcaaatacgaagtcaagtagagttgctttgttgatgtgtctttgatttcttttatgattttatttatttttctatataaaagtagattttagaataggtttttctgtgagtaaaaatgaccctttagagacagagagattgaagatacagatgtgaagaaataaataaatgtcagagataggagtaaagttaaaaggccactgatgcaggctgttttgatttggtaaggggaaaaagagtaaattccctcagataggtttcctactcccactgaattatgaggctargccactagttgagattgtgattaggaaatgaggtgaagacaggttgaagagaaaagagaaaggaaaagcagcaagttctagaggccaaagcctagggcctccatttcatgtaactttttaatttgcatttctctgatggccagtgatggtga

SEQ ID NO: 875692 - DNA, 675 bp, Homo sapiens
tgactgaatcatctcccaccaggccccttccccaacacatgggggttaaaattcaagatgagatttgggtggggacacagagccaaaccatatcagtgacaaacatgtaatctgagggacaaattaaacattgattcagtgttatgttaccaaatgtaatatttgggctttggaaatatgcttgatttgtctaagggaccaacggatatctcaaaccactagacttgtgggggtatttaacaaacctattaccaaactcacagcttcaaggaaagattgcattatctggcaaggtagattctttgactacagtgtcattttgcctttttctgcattgctccttatttccacatatctctttmcattctctttagcttatacaaacttctctctcttgggagtttaaaggcacctcattcatcaccacactctcattaatatcctttgaacttaaagaatacttttcaagaatgattgacttcatcataaaatttgaccttaatttttcactaaacctctactctgatcagctttcccagtgccttcttttgtcctggaatatatatatatatatatatatatatatatatatatatatatatatatatatatatatttactttcatatacaagcatgttacttgaaatatatcacacatttaacactgggtagtc

SEQ ID NO: 875693 - DNA, 675 bp, Homo sapiens
tgactgaatcatctcccaccaggccccttccccaacacatgggggttaaaattcaagatgagatttgggtggggacacagagccaaaccatatcagtgacaaacatgtaatctgagggacaaattaaacattgattcagtgttatgttaccaaatgtaatatttgggctttggaaatatgcttgatttgtctaagggaccaacggatatctcaaaccactagacttgtgggggtatttaacaaacctattaccaaactcacagcttcaaggaaagattgcattatctggcaaggtagattctttgactacagtgtcattttgcctttttctgcattgctccttatttccacatatctctttccattctctttagcttatacaaacttctctctcytgggagtttaaaggcacctcattcatcaccacactctcattaatatcctttgaacttaaagaatacttttcaagaatgattgacttcatcataaaatttgaccttaatttttcactaaacctctactctgatcagctttcccagtgccttcttttgtcctggaatatatatatatatatatatatatatatatatatatatatatatatatatatatatatttactttcatatacaagcatgttacttgaaatatatcacacatttaacactgggtagtc

SEQ ID NO: 875694 - DNA, 553 bp, Homo sapiens
ctattttgcaaatactaatcagatgtgatttttggattacactctggcaattatttggagcacacattttctattttgctaaatgctttaacagacaactaagcttgatataggtttgctaggctaagtaacataaaaactctgaaaatgatttttacattaatgcatcataatatgtaaaactattactatcctttaccttatctcaagattaagagtgaactcttcttatctcagttctagcttatggaaaaagataataggcattatatttcacaggttcatcatgaagatgtttcaaaataggttactgaaaagaarctagttgattccaaagttaacaccctggagggaatataaagtcaagagtgtgaataccttagagaataaatagcaagtaagtatcaagagagcagggagagttacctttttttaaatctcagcctggagtttgaaacttagaaccaatggaggtgttgggggtggggggtgcagagtggggaagagtggatttgtgtcttcaaactaaaaaattcaaaaattataatatagg

SEQ ID NO: 875695 - DNA, 655 bp, Homo sapiens
caccttgctggagctcttcacaggtcaggcacagtccaccagcacagaagctatgatgtgggcccccagggcccttgagactgccctgtgagcaggtatggccaggctggagccccaggagaggtcaccagaccaaaggatacatgggttggactagccccatctgatgtgcaagactgctctgcagcaatcaggtccaataatttccctagggctaaagtctcttataggagcaagttgagcccagggagatggccttccctggctgstctctactatagatgctccagcaccaaatcttctggactctacatcagctggcttgctgctgctaccatttctttaaacagctctccctgccacctaaagtgtccatggtggtcaagaggtcccctcttgctgggtttccagaggcctgtagcaagagcaggttgctccttgccagctcaactcacccattaccctggagctgttgtggttcaaaaatgggtcccagtgtgtggtagcccatgcagagttcccagctttctcctgcttcagcccactctctgtgtcttccctctgtccactcttggaaccttccctctgaacatctgttcagagtacaccagttgtctcagtcctgtgtgggagctgttccatttgtctgcatcta

SEQ ID NO: 875696 - DNA, 662 bp, Homo sapiens
acaaccagaaaatcttaaatttagccatcaacaatcaactatactagaaggtgactttctcatagtaatgataaaaaccacaagaaagaaaaataatagctgatggacaatgactatcaacataaaattctttaccctgtaaaattatcaatccgggatatggttaaaataaagtcattttcagatgagaatttgtcaagtatagacttaaggaaattctcaaggtggtagttaaggaaaaaaggaaaataatcaggttataatgatgtgagatataagaaagcatggtgagtgaataactttaaaaatcacatgtatcattcttaacaaatattggctgtgtaaacaktaatattaatctctacataaaatgatagagactaaagatgatattgactacccatgacagacaatacgaagttggaattactggagttaaaagagttctgaaatatgtgtattatactgaagtgtagaaatgttaactgtagattttaagtatactatattaaaggtttagaagtaagagaatatgaatacagtatataattttttaaaataaagaataaaaataaaatgaaacatcaatttaaagaatgcaggaaagttagataaaagaaacatggaaacacaagggaaatataaagctgaaaaaagatggc

SEQ ID NO: 875697 - DNA, 634 bp, Homo sapiens
accagtaatgtaagattcattgttgctcttgccagccctattctaagataccctctttctcctatccttcagatactgatagaggtttgattcctgtgaactgattttctgtatcaaagacgctacttcctaacctcagttctgttgtcccacaggatggtagtacaatgcttacagtctctcataatctggttttgaaaagtcctgggtggtagagagaatgatattatgctttttaatgggttcatatagtgcagacattctcattaagtatcaattcatatggtttacagttctgcgaagctgggaatactgccatatccctttgtgtggttagggaactcacagatgtatttatgccaaaattcacagccactctgagtcaacattttattgcctgcacttaggggaggctctggcaaaggcagacrtgtcataaatgtgtgaaaagtaaattaaatattcaattatgtctagaatctattattatagagtacataggaaaagtgatgcattgtaaggttcaggagcattgaaaatatacaaaaaatcggattctagagatagtgtctttggcaaatatctgtagcacttgagattcaagcattgaattttctaagtgcaacagaagtat

SEQ ID NO: 875698 - DNA, 646 bp, Homo sapiens
atatgtggaatcctaccagtcaagttgtgctgtgtacaattctgctatttctgaggcttagtattaagatgttatcatcccaaatataacacacttctgctaataacagtttggtcagtagtaaaggaattatttttgccttctgccttatgtgctttatttctttgtcttataattcttgtcaatttaaagattttaatttatcagacattgagatgtatcttgaaattgatgacatgtaaaagttttattagaggtattttctttcttagcaataaataatagttgatagtgtcttcgatctaatgaaatataatataattataattagtttagaaataaagttggagtcaggaagtgcaaatttttgtcatcatcagtgcaatgtcctggggttaataawaacatacagcttctgtgatagcaagcattcacttggagcctggccacacttggaaatgagtttcacagtccagccaagattgccatgttttatatgaaatgataatgaagtggcttcacttttaagactgtattcttattgcttccaaatgaacactgccttgtgcccaccactcattcccaggcttttaactcataaaaatgctgtttgtacaaaagagagaaaaggcccaagggcttctaa

SEQ ID NO: 875699 - DNA, 595 bp, Homo sapiens
aattgtttggaatagtttctgaaggaatggtaccaactctttgttgtacctctggtagaatttggctgtgaatctatctggtcctgggctttttttggttgrtaggctattaattactgcctcgatttcagaaattgttattggtctattcagggatttgacttcttcctggtttggtcttgggaggatgtatttgtccagggatttatccatttcttctagattttctagtttatttgtgtagaggtgtttatggtattctctgatgttagtttgtatttctgtgggatcagtggtgatagcctgtttatcattttttattgtgtctatttggttcttctcagttttcttccttatcaatctagctaacagtctatgttattattatttttcaaaaaaacatctcctgtatttattgatttttgaaggattttcatgtctctatctccttcagttttactctaatcttagttaactatttcttgtcttctgctagcttttggatttgtttgctcttgcttctctatttcttttcattgtgatattagggtgttgatttgaaatctttctagcttttctgatgtggacatttagt

SEQ ID NO: 875700 - DNA, 595 bp, Homo sapiens
aattgtttggaatagtttctgaaggaatggtaccaactctttgttgtacctctggtagaatttggctgtgaatctatctggtcctgggctttttttggttgataggctattaattactgcctcgatttcagaaattgttattggtctattcagggatttgacttcttcctggtttggtcttgggaggatgtatttgtccagggatttatccatttcttctagattttctagtttatttgtgtagaggtgtttatrgtattctctgatgttagtttgtatttctgtgggatcagtggtgatagcctgtttatcattttttattgtgtctatttggttcttctcagttttcttccttatcaatctagctaacagtctatgttattattatttttcaaaaaaacatctcctgtatttattgatttttgaaggattttcatgtctctatctccttcagttttactctaatcttagttaactatttcttgtcttctgctagcttttggatttgtttgctcttgcttctctatttcttttcattgtgatattagggtgttgatttgaaatctttctagcttttctgatgtggacatttagt

SEQ ID NO: 875701 - DNA, 577 bp, Homo sapiens
atgtctaatttttcctggacatgagacaagaacctggacctagctgagcctttagcaaaaattctgcatcacgatgaggccgaagaaacttaagcaggatgaacacaaagaaaaccacaccacatcacattataatcaaattactgaaaaccaatgataaagaaaaaatcttaaaagcaccctgagaaaattatgagacagcttaaaatttaaggarcaacttaaaatttaaatatgtgcagtataatacttcttaaataatactgatttagtaagacatggatacttttgattttataagatagtatctttatttttggatatccatgctgaagtacttaagggtgaaatatcatgatatctgaaacttactttcaaacagtttggcaaaataatatagataactagctagctagctaggtaaagtattaacaagggcaaatgggtatacattgtagtatgcctttaacttttctgcaagtttgagaatttcatttgaaataccatattcaacccccagggcctgaacagatgtatttggtgggacttaaacaacaacaacaaaaacctgtcagtt

SEQ ID NO: 875702 - DNA, 577 bp, Homo sapiens
atgtctaatttttcctggacatgagacaagaacctggacctagctgagcctttagcaaaaattctgcatcacgatgaggccgaagaaacttaagcaggatgaacacaaagaaaaccacaccacatcacattataatcaaattactgaaaaccaatgataaagaaaaaatcttaaaagcaccctgagaaaattatgagacagcttaaaatttaaggaacaacttaaaatttaaatatgtgcagtataatacttcttaaataataytgatttagtaagacatggatacttttgattttataagatagtatctttatttttggatatccatgctgaagtacttaagggtgaaatatcatgatatctgaaacttactttcaaacagtttggcaaaataatatagataactagctagctagctaggtaaagtattaacaagggcaaatgggtatacattgtagtatgcctttaacttttctgcaagtttgagaatttcatttgaaataccatattcaacccccagggcctgaacagatgtatttggtgggacttaaacaacaacaacaaaaacctgtcagtt

SEQ ID NO: 875703 - DNA, 598 bp, Homo sapiens
aacaaacctgcacatgtaccctctaaatctaaaaaagttgaaactaaaaaaaaaaaaaaaaacttccaggcccagatatctttactagtgaattcttctaaacatttaaaaaagaaatagcaataattttacaaaactcacccatattctagggaaaaaaataacattttccaaatcatttttttggggttctgcaaatcttaatactaaaaaacctggcaaagaaattttaagacgggaaaattactggctatctctcacataatatagatataaaaatcctaaataaagtattaccaaatcaaatacaataatagaaaatagataacatataactaccaagttttcatttattctaacaaaactggaatagtaakctagcctggtctaatatgtaataatcagtcaatgtaattcactacataacagaataaaggagaaaattagtttatcagcttataaatgtaaaaaaaatgcaacatccatatgacaggtagaataatgcccccacaaatatattcgcatcctaatctccaaaacctgacatgacaaaagggactttgcagatgcaaataagttaacggccttgagatgggga

SEQ ID NO: 875704 - DNA, 617 bp, Homo sapiens
cttaaatgtaaatgagctaaatgccctcacttaacaggcatagagtagcaagccggataaaaaaccaagacccagtgatatgctgtcatcaagacatccagctcacacataatgacacacaaaggctcaaaataaaaagatggagaaaaatctactaagcaaatagaaaacagacaaaagcaggggttgcaatcctaatttcagtcaaaacaggtttcaaaccaacaaagttaaaaaaaaaaaaaagacaaggaagggcrtcacataatagtaaagagttcaattcaaacagaagacctaactattctaaatatatgtgcatccaacacagaagcagccaggttcataaagcaagttcttacagacctacaaagggacatagactcccacacaataatagtgggagacttcaccattccactgataatattagataggtcatcaaggcagagaattaacagatattcaggacctaaacccagcattggaccaaatggatctgatggacctttagagaagtctccacccaaaaacaacagaatatatatttctttcgttgctacatagcacatgctgtaaaattgacacaattaggcataaaacaaccctcaacaaat

SEQ ID NO: 875705 - DNA, 580 bp, Homo sapiens
actaacacaagaacagaaaaccaagcaccacatgttctcactcataagtgagagttgaataacgagaacacatgggcacagggaggggaacattacacactggggcctgtcaggggttggggggctaggggagggataaaattaggagaaatacctaaagtagatgacaggttgatgtgtasagcaaactaccatggcacgtgtacacctatgtaacaaatctgcacattctgcatatatgctccagaacttaaggtataatccaaaaaaaagaaaaaagaaaaatttcaggccaatattcctgatgaacatggatgtgaaaatcctcaataaaatactttcaaactgaatccagcagcacatcaaaaagcttatgcaccacaatcaagtcagcttcatccccaagatgcaagggtggttcaacatactcaaatcaatgaatgtaatccatcgcataaacagaaccaatgacaaaaaccatgtgattctctcaatagatgccaaaaaagccttcaagaaaattcaacatcccttcatgctaaaaacactcaataaactaggtattggtggaacatatttc

SEQ ID NO: 875706 - DNA, 573 bp, Homo sapiens
tccaataatcacctttcttttttcttgcaccattaatttttcacctcccttccccagtctattggattatatctttcactgtgcaaacatgctacacatttcccatcctaaaacacacaagatataagcaaaaatacagaacaaaatgaaagctctgtatttatctcaacaccattcctgacataatcccatttctctgcttcatttccaagcaagggaattgtttatatttacacatttgtacctcctctcttcattctcttattctctactgaaactcttctgtcatagttacagtaattacctactgatagacccactgatatcttctcagtcctcatcctctcagtctatcagmagcctttgatgtagttgctcctgtcttcttgaaacattctcatttggcttctaggaagtcactctgttttcctcctactgactggctactcctttcattcttctatgctattccttcttatttttcaatatttaaagtttgagtaccccagaagtcaatccttgaattctttcttctctttatatttactttctgcattatccataactttaaat

SEQ ID NO: 875707 - DNA, 544 bp, Homo sapiens
ccacagacagaattcaaggaaatacagccaagaaagcaaaagaatgcaaaggttaaaaaccaaagaatatgacgcagaaaagactattttctttcctttggttttaatattggaagagataatgtgaaaaaccagagacaccaacatgtatttaatttttattttttctctcttaattcacttgccagccaggggctaccatgattgctccagcaacagcagtagtcatgaaaactctcatggaaagttactccataggattgaagagcaagarggtaaatttccctcagcagtggggtcagtggtaagatggaggctggtttcaatgactaactcatctaaaatcctgcaagtttcaactgcagagatgtcaaagctgatgatgatacctgaaggatttctgctggatgtgcccatggggacaaagccagaagtttgactcagaagtttcagcaatgtgaagaaaggaaatcaggtatttatcaccagacattatgtcgtcactcaaaaggactctaatttttagaagattgactgtctaaaa

SEQ ID NO: 875708 - DNA, 614 bp, Homo sapiens
aaaattgatattgaagtaatccaccaatcttagtcaacgtttccagttgtgtttctgtgtgtgtctttagttcttgcaattttattatgttaagtttgtgtatccatcattatagtaaagaacatttctctcacctcaaggatctgttgtgttgccttttttttttttttttttttttttgagatggagtctcgctctgtcgcccaggctggagtacagtggcgcaatctcagctgactgcaagctccgcctcccgggttcatgccattctcttgcctcagcctcccaagtagctgggactacaggcasccgccactatgcccggttaattttttgtatttttagtagagacagagtttcaacgtgttagccaggatggtctcgatctcctgacctcgtgatctgcccacctcggcctcccaaagtgctgggattactagcatgagccaccgcgccctgcggttgtgttgcacttttataaccacatctaccttccacatccgcaacacctggcaaccactaatctgttttccttatctttaattttgtcaattcaataatgttacataaatggagttatactgtatgtaaccatttgggattcgctttttttc

SEQ ID NO: 875709 - DNA, 650 bp, Homo sapiens
aagattttatgaagactaagtcttctaactgaagaggggaactatattttcatttgtgggtaagggcaatactttgatttcatgattttttgaaaggcatttaaatctggcttagatttcaagggggagcatggtgaggtgtgtctgacccctggtttcctgtcacgaccagagttagttttttttttaggtgtctttgacattccctttggccaattaaacattctaggccagatgagaatgaaggtgggcaggtatcattagtcctttaaattatttaaagcaatgtgagagtcaaaatgtaaaagccaaaaataaggttacacatcaagaaaaaccaaaaccatagactcaagatatatyggggaaaatatgtctctcatagacgtctaagacaaaatgctttagcatcaggctacaataatagagttggaggagaaaaactcacaggagctgacaaaaaaaaagagctaaaggatagacacatcatcataatccttcttatagagaaaaatagatgaaagcagcaagacacaacaacagttaaatctctgagatacaaatccaagaagtttcaaaagaaactatttatgacattacaagaaacatttctgataatttaacaaataaataccttccttctcatgtca

SEQ ID NO: 875710 - DNA, 566 bp, Homo sapiens
aaccagtcttgcgtgccaggagtgaagctgacttgatcatggtggagaagctttttgatgtgctgctggattcggtttgccagtattttattgaggatttttgcatagatgttcttcagggatactggcctgaaattttctttttttttttgttgtgtatctgccaggttttgatatcaggatgatgcctaaaataagttaggaaggagtctctctttttctattgtttggaataatttcagagggaatgataccagctcctctttgtacctgtggtaraattcggctatgaatccatctggtcctgggccttttttggttggtaggctattaattactgtctcaatttcagaacttgttattggtctattcagagattcgacttcttcctggtttagtcttgggagggtgtttgtgtgcaggaatttatccatttcttctagattttctagtttatttgtgtagaagtgtttatagtattctctgatagtagtttgtatttctgtgggatcagtggtcagctctcctttatcgcttttaattatgtcgtttgattcttctctatt

SEQ ID NO: 875711 - DNA, 318 bp, Homo sapiens
atactgacagtgggatattaaaggcttccactatttttgtgtgggggtctaagtccctttataggtctctaaaaatttgttttatgaatctgggtgctgttgtattgggtgcatatatattgaggatagttagctcttcttgttgaattgaaccctttaacattatgtaatgccyttctttgtcttttttgagttttgttgacttaatgtctattttgtcagtaactaggattgcaaaccctgcttttttcagctttccatttgcatggtaagttttccatcatctctttattttgagtctatgtgcatctttgcaca

SEQ ID NO: 875712 - DNA, 563 bp, Homo sapiens
gtgccctggatatgagacatggagtcaaaggagattattttggagctacaagatttaatgactgccctactgggttttggacttgcatgaggtctgtatcccctttgttttggccaatttctcccctttggaatgtatttaccctgtacctccactgtatcttggaagtaactaacttgttttttattttataggtgaaaggsgcttgccttgtcttaggtgagactttggacttggatgtttgaattaatgttgtaatgagttaaggcttttggggactgttgcaaatgcatgaatttgtttcagaattgaaggatatgagaccttggaagggccaggggcagaataatatgatttcactctctgaccccacccaaatctcatgttcaattggaattcccaatgttggggaaaggacctggtgggaggtgattggatcatgagggcagattttcccttgctgttctcatgatagtgagtaagttatcacaagaactagttgtttaaatgtgtgtagcacttcccccttttctctctctcctgttgctatgtgaagatgtgct

SEQ ID NO: 875713 - DNA, 594 bp, Homo sapiens
actcataatatctccatttgaaattatcttgttgaatgtttgctctatcagttccgctcctctcttcccttcccactccaggacaaaatgtacactcagtgatggcagggaccttgtctgtcttcttaagtgatgtgcatccccaatccatgcacacacaataggccctcaggaaagatttcaatgaaagatatgatggagttgggatctgaaaacaaatctatgttgatctgaaaacaaatctatgttgctccaaggtttttagccactagyctatttcaccttcctcgactctagttagctaatctgcaacatggagataaaggcacccagcttccatgggagtgggaatgttcataaatgccctcacactttgcctggcacatggaagtgactctaaatggtctatttagtaatattgttattgtcccttctttcttgaaaacatcctgtttagcattaaagactttcctatgcaaagcagaactagcaccgactgagttcatcttaaacaggctgttctgaaaggaattttcataagaaatgaaaacatttggcttctatcaaactctgggaacacccagaattctatga

SEQ ID NO: 875714 - DNA, 656 bp, Homo sapiens
atttggttgtgttttttcaaacagctgtactaatttttttaaattaaactttaagttctgggatatatgtgtagaacgtgcaggtttgttacataggtatacaggtgccatgatggttggctacacccatcaacccgtcatctacattagatatttctcctaatggtatcccttccctagccccccaccccctggcaggccctggtgtgtgatgttcccctccctgtgtccatatgttctcattgttcaactcccacttatgagtgaggacatgcggtgtttggttttctgttcctgtgttagtttgctgaggatgatggtttccagcttcatmcatgtccctccaaaggacattttttatgactgcatggtattccatggtatgtatggaccttagaggaagttatctccccatttgctatatctccaatgtgtagtctcattgatggttttttacttttcttaatatatttttaagatttttaataagaaattgggatagcagttatatgaaattgtgtactaaattcagcatgaacttggaagttacctaaaaacattgtaaacattattattaaaaatttcaaacaaaaataggataatttaataaatcctacactattaaccagattctagtattattaagatttgcgact

SEQ ID NO: 875715 - DNA, 654 bp, Homo sapiens
ttactcacatatatatatatatatatatatatatatatatatatatacacacacacatacacatatatatgtgtgtatatgtgtatgtgtgtgtgtgtgtgtgtgtatatatatatatatatgttctgcttctctgaagaaccctaatacaatactcacgggtatttttcataagactcatatgcttatattaatatatatacacatacatrtacacacacatacacgcacaaacacacatacacacattggcagaatccctgctggtgggcctctcccttgcatggtgctctaaatgtgtgcagggagctcatagaaggggaagccgtggtagtgcctgagagcacaggctttgaccccagaccaaactgcgttcaaatcctgagctccaagaagcattccatttccctacagctattaccttacaggaaaactggatcaatgtccttaaagagctgtttctgggactgaaatatccaagtcacacagcctatcgccaatgcagttcagcaggtgatacagataggtgacctccctttctctttctctctctgtcccctctctctgtttcttcctctctctcgtcttatataaaactactcactgtcctctcaaccaccctgctctctgtacctagatatgttgcagagcaca

SEQ ID NO: 875716 - DNA, 438 bp, Homo sapiens
tgagtggatctctgtggggtgtgcaccgacatggggagctgcagggtcatttggtgcatgcacattcaggttcacttttctaaggtggttatgagaatttatctctcaccggtcgtgggttctggtcccagttcatacctccccagtcctcgataggggactctttttttgtttgtgtttttcttgagcctcgctggtgggcatgcagcaagtcctatttgtatgtttggtttttttttagcacactcacaaagactaatgagactgcayaccttttcacctatttattggccctcttggggagcatcttttattaagagcctgctcagtcatttgccggttctgccacatgggtgtctatctttttcttattggttcataaaagaattttgaaaatataagctatattgctttatatctcgttcttgttagttatat

SEQ ID NO: 875717 - DNA, 669 bp, Homo sapiens
tcacaaaagcctgcttttatttccaacatcctaacttgtgaagcaaagttttctgcagtgatgacaaccaaaacgagactatagagtacactggacataagcaacacacatcagatatcactgtctcccatcaccacaagatgggactgtctagttgcaagacaagcagctcagggctcccactgattctacattatggtgagttgtacaattatctcattgtatatgacaacgtaataacaatgsaaataaatataatgcacttgaatcatcccaaaatcatcaccccctacccttggttcgtggaaaaaatttaatccacaaaactggttcctggttccagaaacattggggaccactgccctagacctgctagctctcagccaaactagcaaatgctaagactagaagaactacatagccgagccaagtccaaattgccatcccacagagtcatgagctaaattaatggttgtactgtgccactaagtgttcagatgatctgctatgcagaaaaagctcattgatataaccagtcatgtttagaatagtctgaaaaaatggcactagctgaacaattattgtcagtcacattgattccaagagggatacctggtacctgactatcttgctctgttacaagcagtgggaaagtgtggaggacagaaa

SEQ ID NO: 875718 - DNA, 627 bp, Homo sapiens
ggaggagctgataccattccttatgaaactattccaatcaatagaaaaagaggcaatcctccctaactcattttatgaggccagcatcatcctgataccaaagcccggcagagacacaacaaaaaaagataattttagaccaatatccctgatgaacatcagtgtaaaaatcctcaataaaatactggcaaactgaatccagcagcacatcaaaaagcttatccaccatgatcaagtgggcttcatccctgggatgcaaggctggttcaacatacgcaaatcaataaatgtaatccagcatataacagaaccaaagacaaaaaacacatgattatctcaatagatgcagaaaaggcctttgacaaaattcaacagcccttcatgctaaaaactctcaataaattaggtattgatgggacatatcttaaaataataagakctatttatgacaaacccacagcaaatatcatactgaatgggcaataactggaagcattccctttgaaaactggcacaagacagggatgccctctctcaccactcctattcaacatagtgttggaagttctggccaggacaatcaggcaggagaaggaaataaagggtattcaattaggaaaagaggaa

SEQ ID NO: 875719 - DNA, 645 bp, Homo sapiens
tctgaaactattccaaacaattgaaaaggaaggactcctgcctgactcattttatgaagccagcatcaacctgataccaaaaccaggaggagacaaaacaaaaagagaaaacttcaggccaatatccctaatgaacattaatgcaaaaatcttcaataaaatactggcaaaacaaatcccgcagcacatcaaaaaatttatccaccatgatcaagtcaccttcatccctgggatgaaaagctggttcaacatatataaatcaataaacatagtccattacataaacagarccaaagacaaaaactacatgattatctcaatagatgcagaaaagccctttaataaaattcaacatcccttcaagttaaaaactctcaataaactaggtattgatggaacatatctcataatagtaagagccatttatgaaaaatccaccaccaatatcatatggaatgggcaaaagctggaagtattccctctgaaaactggtacaagacaaggatgccctctctcgccactcctattcaacatagtattggaagttctgaccagggcaatctcttgatgcctttcagatcctttatttatctttgacttttgggagtttgatcattaaatgtcttgagatagtcttctttgggt

SEQ ID NO: 875720 - DNA, 615 bp, Homo sapiens
tggtgttgggaaaaatggctagccatatgcagaaaactgaaactggactccttgagttaatacagaagttaactcaagatggattaaagactgaaacataagacctaaaaccataaaaatgctagaagaaaacctaggcagtaccattcaggacctagtcataggcacagacttcatgactaaaacaccaaaagcaatggcaacaaaagccaaaattgacaaatgggatctaattaaagagcttctgcacagtaaaagaaactatcatgagagtgaacaggcaagcttcagaatgggagaaaatttttgcaatctatccatctgacaaagggctaatatccagaatctacaaggaacttaaatttacaagaaaaaaaaacccatcaaaaatgagctaaggatatgaacagaaacatctcaaaagaagacatttatgcagccaagraacatatgaaaaaaaagctcatcatctctggtcattagagaaatgcaaatcaatatcacagtgagataccatctcatgccacttagaatggcaatcattaaaaagtcaggaaacagcagatgctggagaggaggtggagaagtaggaatgtaggaatgcttttacactgt

SEQ ID NO: 875721 - DNA, 515 bp, Homo sapiens
tcagaacttggcctgataatttcatgaattctgactttaccaaatataaactaatagataatcacaattcagctatcgaaaaaaggcatcattaattagtctgcatagataaagccatttaaaaaaacaaaattattaacagtgcacaaaatgtcaattctcaatggctgtcaaactggaatgtttcagaaactgacaatccactgggaaaaggactatcaaggagatagacaaatatctttctgcctttaactttagtaagcttctcatcatggagatatttccccccccaaattataaagcacatacagtccaccaatagcaagctgatacaggtatgcgttgacttagagatgayatgtctattttatattcccatgaaagcagacacagaataatcaataacatcagaaagagcagtttactttatatggaatggaggaaggccttatacgaacaatgaagtgagcaaatgtatgaaagtgtaaaaggagcaagttttttttaatcaataa

SEQ ID NO: 875722 - DNA, 573 bp, Homo sapiens
tgatactaactcattccaacttcacaagaactgtgagatagttactattaatacttgtatttgcagatgaagatactcagctttggagaggtccagctactgtccttagatacacaactattatattaacttgtagatcaggatttaaaaattgagctgcaaaagggactcaagcttcagctgctaggcacagatcctcctttgcttgtgagataataaattaagaaccattaacttatttgttttgmacatgggatagaatatagacatgaaacagatttgtcatgacacaaagcctcagctgtaacaaattaaatcaacaccctggaccttcctctctacatgcctctttactatcattatataaagatccagtgtcaggtaataaaaacaaacaaataatagcattcaactctacgatcttggacaaaggttatcgttcctccaagtcatttccttacttataaaataggagacttagatcacaggatctcagagattgcttactggaattgaatctaagatgcagtatgtccctttcccatattatatatttttacatttagaaaggcc

SEQ ID NO: 875723 - DNA, 618 bp, Homo sapiens
gttatgaatatgtttgtgtgtgtatatctatatctagatagagagaataattaagcaaacatattttttcttctctttcttatccccttattatgtaacatagatatattgatattataatagtatttaagtattattaattttacatcacagtatttaagttagaagatataaagaagaaggcgaaacaccactgaaggactttacctccacttctggggaaaagattagcatgctttgggttgtatgcaggacagmtgtagcattttaggtggaattatgaacttgttattgcttcattggggattatatatcatttaaggatgtggatatgaagttgacaaggggtaaagttgtaatggttaattttatgtgtcaacttaaatgggccatgtggagcctacataaacattattctcagtggctttgtgatcctttttctggatgagattaacacttttattggtaatctgagtaaagcagattgccttctttaaggcggctgggccacatccaatctgttggaggcctgaataggaaaaatatataaataaaagtggagtaaaggtatatttactctctctgtctgacagtcaaccagctgggacatcaatcttc

SEQ ID NO: 875724 - DNA, 614 bp, Homo sapiens
ggcttattaccctatgactcctggatatactgttgctcagctaagatagaggagatagggcagtatacaacttttacagagcaggaggcagccagttcagctaaccttttagatgttattaatggagaggctagaatgggtggaaaatacaggattctattaatgtcaagatattttccattggtcatcctagtcaaatatggtggctttattactatgatgagtgcaaacctgggtacaacaagcaggagtagagacgatggccacatatgtctgtttggatttttcagcacaaactgcaattctctgcatcagcctcctgagtagctgtgactacaggtgcccgccacaatgcccagttaatttttctatttttagtaaagayggggtttcaccatcttggccaggctggtcttgaactccttaccttgtgatccacccgcctcagcctcccaaagtgctgggagtacaggcatgagccaccacaccatgcccaaattatttcttttaaatgtggtcacatcacatggacaggtatacatgtaacactaagactgagttcatgattgagttgtttcaatgagaggtagctgctaaaggcagcactttcttgc

SEQ ID NO: 875725 - DNA, 599 bp, Homo sapiens
ccatgcaaagtggccaggcatggtggctcacgcctgtaatctcagcactctgggaggccaaggtgggtggatcacttgaggtcaggagttcaagaccagcctggccaacatggcgaaaccttgtctctactaaaaatacaaaaattagccaggcatggtagcgcacgcctgtaatcccagctactcaggaggctgaggcatgagaattgcttgaacccaggaggcagaggttgcagtgagctgagatcatgcccctgcactctagcctgggcaacaaagcaagatcctgtctcaaaaaaaaaaaaaaaaaaaaaaaagagagagagaggaggaaaaaaaaccatgcaaactttaacataaaaaatacaagtgcagtaagaatctttgtgtcaatatgattmtcaggatttctctcatggcagccaccccaagaccaggcctaactagaacaccctgctgcaggctgcctttgcgtctcctccctaaaattctacttatgccataagctcttgggacatgagctcctaaaatcaaccataacctgggcacagtctgcatctgtgccaaatgagggctggaacgcctgtctacttgcctgc

SEQ ID NO: 875726 - DNA, 704 bp, Homo sapiens
gcagaatgtgcaggtttgttacataggcatacgcttgccatggtggtttgttgcacccatcaacccatcatctacattaggtatttctcctaatgctatccctccccgctccccccaccccacaacaggccctggtgtgtgatgttcccctccctgtgtccatgtgttctcactgttcaactcccactwatgagtaagaatatgcagtgtttgtttttctgttcctgtgttagtttgctgagaataatagctttcagcttcatccatgtccctgcaaaggacacaaactcaaccttttttatggttgcgtagtattttgtggtgtatatgtggcacattttctttatccattctatcattgatgggcatttgggttggatccaagtctttgctattgtgaatagtgctacaataaacatatgtgtgcatgtgtctttataatagagtgacttataatcctttgggtgtatacccagtaatgggattgctgggtcaaatggtatttctggttctagattcttgaggaatcgccgcactgtcttccacaatggttgaactaatttacactcccaacagtgtaaaagtgttcctatttctccacatcttctctagcatcttgtttcctgatgttttaatgatcgccattcaaaccggcgtgagatggtatctcattgtggttttgagttgcatttctctaatgacca

SEQ ID NO: 875727 - DNA, 704 bp, Homo sapiens
gcagaatgtgcaggtttgttacataggcatacgcttgccatggtggtttgttgcacccatcaacccatcatctacattaggtatttctcctaatgctatccctccccgctccccccaccccacaacaggccctggtgtgtgatgttcccctccctgtgtccatgtgttctcactgttcaactcccacttatgagtaagaatatgcagtgtttgtttttctgttcctgtgttagtttgctgagaataatagctttcagcttcatccatgtccctgcaaaggacacaaactcaaccttttttatggttgcrtagtattttgtggtgtatatgtggcacattttctttatccattctatcattgatgggcatttgggttggatccaagtctttgctattgtgaatagtgctacaataaacatatgtgtgcatgtgtctttataatagagtgacttataatcctttgggtgtatacccagtaatgggattgctgggtcaaatggtatttctggttctagattcttgaggaatcgccgcactgtcttccacaatggttgaactaatttacactcccaacagtgtaaaagtgttcctatttctccacatcttctctagcatcttgtttcctgatgttttaatgatcgccattcaaaccggcgtgagatggtatctcattgtggttttgagttgcatttctctaatgacca

SEQ ID NO: 875728 - DNA, 640 bp, Homo sapiens
cagcatcctcatctgtaagatgcaggtgctaaatgatgactgttgttctttcaaatgttaactttctatgagtcacttcttcattgtatgtgtcaagaagcacaacctcgaaagcctgcctttgacaatgcttagaggttagaggatgccaaatgagcctcatcttctttggctactgagttartaaccatccttcatttatctcagggagcaaaggcaggatttccgtgggtgtccaaggtccttactcacagtcaggatgcatggcagtacccttaataactacagattcagaatcacagaagacatttaccgagtatgtattttctgccaaaccctgtgccaggtgttattagaacattacttatgaaatatttggtagtgtggatgaagaggcagcttttcctgcttacacaatacagaaatatgatttcaaaaatctattaaaattttattaatctcagaaggcatgatttctaattgtgtttgatcttacacttgttatgatttaggaattcacatctgagttggttgcatgatgctatagttggcaacatgattctgaccgccaccatcacaaatagaggttagaaaatattacttatgtgaaaataaatgccatttctggcacctaaaacag

SEQ ID NO: 875729 - DNA, 640 bp, Homo sapiens
cagcatcctcatctgtaagatgcaggtgctaaatgatgactgttgttctttcaaatgttaactttctatgagtcacttcttcattgtatgtgtcaagaagcacaacctcgaaagcctgcctttgacaatgcttagaggttagaggatgccaaatgagcctcatcttctttggctactgagttagtaaccatccttcatttatctcagggagcaaaggcaggatttccgtgggtgtccaaggtccttactcacagtcaggatgcatggcagtacccttaataactacagattcagaatcacagaagacatttaccgartatgtattttctgccaaaccctgtgccaggtgttattagaacattacttatgaaatatttggtagtgtggatgaagaggcagcttttcctgcttacacaatacagaaatatgatttcaaaaatctattaaaattttattaatctcagaaggcatgatttctaattgtgtttgatcttacacttgttatgatttaggaattcacatctgagttggttgcatgatgctatagttggcaacatgattctgaccgccaccatcacaaatagaggttagaaaatattacttatgtgaaaataaatgccatttctggcacctaaaacag

SEQ ID NO: 875730 - DNA, 609 bp, Homo sapiens
cataggggaaagtggatgctctactgttaagaggaaaaattgagctagagaattatacatgtacatgtaatgtgatcccaatttggattacagatagatatccatctctctctctctatctatctctctctctctctctctctctctstgtgtgtgtgtgtgtgtgtgtgtgtgtgtgtgtgtagagagagagagaagagagaacaagatagaaagagtgaatcatggctgataaagagagagagagttctcagaattagagaaatacatttaaaaatcccatttttgtagcaagactcgtagtgaatttattttcttctttacaactttctgtgttttctaagatctctgtaacaattagtgccaacacttgcataactgaagcaggggacagggagcatctgcccagtgacctgtccctgcacaccacccttgccgctccttgcatgtgtccatgacctgtcccaactgacagactcctctgggttcatcccgtggcttcttcagagccctcgtgtgtggctccttccttagctatgtagagctgtagaataagcaagtgtcagtgcattcaagagtcgaagagcggtctcagtgaatggacaattt

SEQ ID NO: 875731 - DNA, 675 bp, Homo sapiens
aggatctttctgaaccctagcacgcacgtatcaagactccaactaagactcaggtgtctatagagaggagaacaaaagaaggagtagacagagtgaggttgggagtctctcaaagactgatggaggctaaggatgctcttcctcaaacctgtgctactcaaacctggtcatcactaccccattctgggtgttaggtcctcatccaaatattatgagctttggccttgtaagctccagtgcttcttctatctcaggcagtttatatatgacttggagatgaaatacaaaagcatacatgaaacatagagagaggaattattgctgattcactcattgaagatagcttatctctaaaaccaaagtgggcatagcatagtttactcttttggtggcaygttgtgtctgaatcctagctcttaattacaccagctgtgaaccctgggtgactttcattctctctctgaatctcagcttccccacctataagataggaataattcggccagtggttttccaatgtggtatggaattaggagtagttgtacctcctggaagcttgttagacatgcaaaattttaggccctacccagacctattgaatcagaaactctggggatagagtctagtattctgtgttttaataggcccttcaggtgattatgatacatgatgaag

SEQ ID NO: 875732 - DNA, 675 bp, Homo sapiens
aggatctttctgaaccctagcacgcacgtatcaagactccaactaagactcaggtgtctatagagaggagaacaaaagaaggagtagacagagtgaggttgggagtctctcaaagactgatggaggctaaggatgctcttcctcaaacctgtgctactcaaacctggtcatcactaccccattctgggtgttaggtcctcatccaaatattatgagctttggccttgtaagctccagtgcttcttctatctcaggcagtttatatatgacttggagatgaaatacaaaagcatacatgaaacatagagagaggaattattgctgattcactcattgaagatagcttatctctaaaaccaaagtgggcatagcatagtttactcttttggtggcacgttgtgtctgaatcctagctcttaattacaccagctgtgaaccctgggtgactttcattctctctctgaatctcagcttccccacctataagataggaataattyggccagtggttttccaatgtggtatggaattaggagtagttgtacctcctggaagcttgttagacatgcaaaattttaggccctacccagacctattgaatcagaaactctggggatagagtctagtattctgtgttttaataggcccttcaggtgattatgatacatgatgaag

SEQ ID NO: 875733 - DNA, 579 bp, Homo sapiens
atctattgggatttgcttttgctaaataggacagaggaagtcaaaatagcaattgtttaaatagacaaatgtttatttttatataagaagttgggaggtgggcagagctgatactgtgccccatgaagtggaagctggccccttccagcttaccctctgatttccctagaatacggtttttatcctcatagtacaagatggctgctagaactacagccatcacatccaaatttcaagcagccagatggatgaggagacgaagaaagtgtgctccctctctttcagacacatgctgatatttaacacagtaaatttagggacatatccacatttggctacgagggaagctgagaaatagtggcataccttgttwcattgtgggttgttttaatttgcctcacaggtattgagtttttttttttttaaacaaattgaaaggttgtggcaaccctatgtctagcaaatccactggtgccatttttccaatagcatgtgctcacttcatgcctctgtgtcacagtttggtaattctcataatatttcaaacattttcattattattgtatctgttatggtgac

SEQ ID NO: 875734 - DNA, 571 bp, Homo sapiens
gtgtctcacgcctgtaatcccagcactttgggaggctgaggtgggtgggtgatgagatcatgagttcgagaccagcctgaccaacatggtgaaaccccatctctactaaaaatgcaaaaattagctgggcgtggtggtgcatgcctgtaatcccagccactcaggaagctgagggaagagaatcgcttgaacccgggacacagaggttgtagtgagccgagattgtgccackgcactccagcctgggcgaccgagtaagactctgacaaaaaaaaaaaaacctgtcagaaccagactcacaaagccattttgagttgccaactgtcttagagaagataaaaagatatgcttctactctgccaacagactcctagcacagagactcgagcacagaaaacaatttctaaaaacggtctgtcagtcctcagttgtgttactcaagtgggcagatcattgtctgtccctctttgctatctttctatatctattgagaggcaaaaaataatcagaggaagaatgaagagaggagggggatagttgtcatgcactgacaatggcagtataagctgag

SEQ ID NO: 875735 - DNA, 571 bp, Homo sapiens
gtgtctcacgcctgtaatcccagcactttgggaggctgaggtgggtgggtgatgagatcatgagttcgagaccagcctgaccaacatggtgaaaccccatctctactaaaaatgcaaaaattagctgggcgtggtggtgcatgcctgtaatcccagccactcaggaagctgagggaagagaatcgcttgaacccgggacacagaggttgtagtgagccgagattgtgccactgcactccagcctgggcgaccgagtaagactctgacaaaaaaaaaaaaacctgtcagaaccagactcacaaagccattttgagttgccaactgtcttagagaagataaaaagatatgcttctactctgccaacwgactcctagcacagagactcgagcacagaaaacaatttctaaaaacggtctgtcagtcctcagttgtgttactcaagtgggcagatcattgtctgtccctctttgctatctttctatatctattgagaggcaaaaaataatcagaggaagaatgaagagaggagggggatagttgtcatgcactgacaatggcagtataagctgag

SEQ ID NO: 875736 - DNA, 568 bp, Homo sapiens
gccagtctatctgctaaggcatagcaagagtgacctttcctttagttcccgataagtaccttatctccatctgagaccacatcagcctgtacttcattgtccatatcactatcagcattttgatcaaaaccattcaaccagtctctaggaagttccaaattttcccacattttcctttcttcttctgagccctccaaactgctccaatctctgcccattacccaattccaaagttgcttccacatttttatgtatttttataaaagtgccctgctctgctggtaccaattttctgtrttagtctgttttcacagtgctataaagatactacctgagactagataatttatacagaaaaaatgtttaattgactcacagttctgcatgactggggaagcctcagaaaacttaacaatcatggcagaatgtgaaagggaagcaaagacctgcttcacatggtggcaggagagagagagagagatcaagggggggagtgccacactttaaaatcatcagctcttgtgagaactcactcactatcatgagaacagcatgggggaaactgccc

SEQ ID NO: 875737 - DNA, 631 bp, Homo sapiens
aatcattcctcttgaaaactggcacaaggcaagaatgcactctcaccacttttattcaccatggtattgcaagttctagcgagggcaatgaggcaagagaaataaagcatcctcaaataggaagagaggaagtcaaattgtctttgtttgcagatgacatgatcctatatctagaaaaccacatcaactcagcccaaaagattcttaagctgataagcamctttagcaaagtctcaggatacaacatcaatgtgcagaaatcacaaacatttctatacaccaacaacagacagagagtcaaatcaggaatgaactcccattcacaattgctacaaacagaataaaatacgtagaaatacagctaacaaggaaagtgaaggaccttttcaaggagaactacaaaccactgctcaagaaaatcaggacacaagcagaagtaacaacattccatgctcatggagaggaggaatcaatatcgtgaaaatagccatactgcccaaagcaatttatagattcaaagcaatttataatctattcccatttaacgacctttgaaattcttcacagaattagaaaaaactattttaaaattcatacggaaccaaaaatcagcttgcatagccaaggcaat

SEQ ID NO: 875738 - DNA, 631 bp, Homo sapiens
aatcattcctcttgaaaactggcacaaggcaagaatgcactctcaccacttttattcaccatggtattgcaagttctagcgagggcaatgaggcaagagaaataaagcatcctcaaataggaagagaggaagtcaaattgtctttgtttgcagatgacatgatcctatatctagaaaaccacatcaactcagcccaaaagattcttaagctgataagcaactttagcaaagtctcaggatacaacatcaatgtgcagaaatcacaaacatttctatacaccaacaacagacagagagtcaaatcaggaatgaactcccattcacaattgctacaaacagaataaaatacgtagaaatacagctaacaaggaaagtgaaggaccttttcaaggagaactacaaaccactgctcaagaaaatcaggacacaagcagawgtaacaacattccatgctcatggagaggaggaatcaatatcgtgaaaatagccatactgcccaaagcaatttatagattcaaagcaatttataatctattcccatttaacgacctttgaaattcttcacagaattagaaaaaactattttaaaattcatacggaaccaaaaatcagcttgcatagccaaggcaat

SEQ ID NO: 875739 - DNA, 601 bp, Homo sapiens
ggttcttatgaaggcgctttttcatgtagatggttgctgaatttagtggtcctgtagggggtgtaggggggtaaaatagatggaaacttttgtctgcccatcttgctccagccctgtctcctaatcccccatttcctaaatgaaatttcaatctttattttgtaaataaggaaaactgaagataaacattttgctttaggtcacatggctgcttaatgcaaatctgtgatttgtgcctaggcagtctgtattcccttagctactcatactacttcagagataacacattgtgatacaaaagaaaagaaaagtggaggaaacgtgaaagagaagaatgactgagaagagagatggatgagtgagaagaataatatcagggaaagatgagaagaaatttgaggaraatatgggtgagttatattgggagaagtatataaggtaagagaaaagaataaaattctggccttgagagagaagaaataaggaagagagtagaataaaagaagaatgagaagcagagtgtcttagttcattctcatactactataacggcatatttgagactgggaattctataaaggaaagaggtttaattgactca

SEQ ID NO: 875740 - DNA, 655 bp, Homo sapiens
taccactatcagcatttttgtcaaagccattcaacaagtctctagaaagttccaaaactttcctacatctccctgtcttccaagccctccaagtatttgagaatttccaaactttccccatttttctatcttcttctgacccctccagactgttccaacctcttcctgttacccagttccaaaatcacttccatatttttgggtatctttacagtagtgccccattcccrgaaccaatttactgtattagtccattctcatgctgctatgaagacatacctgagactgggtaatttataaaggaaataaatttaattgactgtccatttcacagggccgggaaggcctcaggaaacttacaatcatggtggaaggggaagcaaacatgcccttcttcacaaggcagcaggagagagaagaatgagagctgagaaaagagagaagaatgagagctgagcaaagagagaagcccctcacaaaaccatcagatctcatgaagaattactcattatcatgagaatagcatgggggaaactgcccccacgattcatttacctcccactgggtccctcctagaacacatgggaattttaggaactacaatttgagatgagatttgggtggaaacacagccaaaatatatcacagagaaagc

SEQ ID NO: 875741 - DNA, 476 bp, Homo sapiens
acctttactacagttcccaataagttcctcatttctgagacatcagcctcaacttcattgtccatatcaccatcagcattttggttgaaaccattcaaaaagtctctaggaacttccaaatttgcccacatcttcctaccttctgaaccgtccaaactcttccaacctctgtcccttacccagccaaagtcacttccacatttcaagtatctttatagaaatgccccactttcctgataccaattttctgtattagtccattctcacactgctataaagaactacatgagactgggtaatttatgaaraaaagaagtttaattgagtcacagttccacaggctgtacagaaagcatggctaggaggcctcaggaaacttacaatcatggtggaagatgaaggggaagccagcatatcttacatggctggagcaggagaaagagagagaagggggaagtacaagacacttttaaacc

SEQ ID NO: 875742 - DNA, 553 bp, Homo sapiens
cacccagattcataagcaagttcttagagaactacaaaaagacttagactcccacacaataataatgggagactttaacacaccactgtcaatattagacagatcaatgagacagaaaatttataaggatattcaagacttgaactcagctctggaccaagcagctcgtagatgagctgtccaccccaaatcaacagaatatacattcttctcagcaccacatcacagttattctaaaattgaccacataattggaagtaaaacactcctcagcaaatgcaaaacaatggaaatcctaacaaacagtctctcagaccacagkgcaatcaaattagaactcaggattaaaaaactcactcaaaaccacacaactacatggaaacgtaaataacctgctcctgaatgactactgggtaaataatgaaattaaggcagaaataaataagctcttagcaaccaatgagaacaaagaaacaacatgccagaatctcttggacacagctaatgcagcgtttagagggaaatttttagcactaaatgcccatgagagaaa

SEQ ID NO: 875743 - DNA, 556 bp, Homo sapiens
aagccattcattaagcaatccatctccatgacccaaatacctcccattagactccacttccgtccaacattgaggatcagatttcaacatgaggtgcaggggacaaacatccaaactatacagacagtttgcaaatactctctctctctttctgtgggttatctcttcacttgattgtttcctttgctgtgcagaaacttyttagcttgatgtaatcccagttgtctatttttgctctggttgtctgtgcttttgaggtcttacacaaaaaatctttggccagaccagtggcctggagcattgtctcaatgttttcttctagtagtctcatagtttctggacttagatttaaatctgtaacccatttggatttgatttttgtgtatggtgagagaaaggggtctcatttcattcttctgcatatagttctcctgtttttccagcaccatttattaaaagagtgtcctttccccattttatgttcttggcacttttgtcaaagatgagttggttgtaaatgtgtggatttaaatctgggttctctattctatttcat

SEQ ID NO: 875744 - DNA, 689 bp, Homo sapiens
caaagtgtgaagtaaaaacaaaaaaggcagtttaagaaagttccagtgtttcaaagagagcattttttaaaatgtatatacatggagaacatttcattataccgtaaaataaatgcagcactgtaagataaaggaagactaatatatatggagttttgctctttctcccctctacagctgcaaccatcttcaacctgctgaacttaactcaatggttacaggaatttgttgctttttttttttggtctcctattcagttcacatttcaggctgttsagcagatgcctgtgattctggagattcaaatcactggtgaaagttttttctctgtttcctcagtttttcaggagcttttcttcataaaatgatctcctgctgtttgaagtaccttcagtcttcctcatcaacaaacactaaattcaaaaagtaccttactgaaactttttggttcacatctgattgttggagtagggtcatatcccactaaaaacagtctcattggaattgattcaccttttactggtgcaccatccattatttcatatttggtgatgtttctgtttctgctgtggtactgggtccaattcctgtgatctcttttttgatcagttgtaactccatatgttgtatttttattcttactactaagaagtaaatttttccaacaattacatgctttaaatgatact

SEQ ID NO: 875745 - DNA, 570 bp, Homo sapiens
taacagttgtagtataacgatataatggaaaaatacacaagttaaaaaaaaaatccaggaaaaaattccaatgaacctgggctgggtcaggtgcccacctctggatcattcaaccatgtctaggaatatatttgtttgaaaaagggactccctgtggtttggaaaggagaagggagaagtctgaaacaaaattttaaagtaacgttttcattttgaaatagtttaaatttcacaagaagcttcaaaaatagtaccaagagttctcatgtacccttcacccagcttcccccaatggcaatgtcttacataactatagtacatgtcaaatccagaacattaccattagtattatacaatactgtaaacttaggtacagaccttatttggatttccccagtttgtttttacaygctcttttaaaaaaaatatttatttatatttcagaagcgtatagtactgtgaacgtttatcccacaggtagatgcaagtaaccatcaccataatcaggatacagaactgacccatcaccataaaaagactgcctcatgatatcccctaactatgtctttc

SEQ ID NO: 875746 - DNA, 694 bp, Homo sapiens
aatccaaacacgctgtcgacccgagctgcagtgagtgtgcttaggaaaatgagataggtcgcccaatgctgccatcttcagatcactactggtagtacaccattctcgcagcagttcgggcctagccaaatgggcagtggcaaaagcttgaagggaccaagtccacagacacagaatcacaccaataaaatatgtaatggtgccacctggtgatttataaaagcactctatgcaaaacccttcttatgtttggcattaggcacctgaagttcttgctaaggtcacaattaaagagatgtatgactttgtcaaagaacacttgatgggaaagaaatttactattcccatttccctactgaagggccyttttgcctccctcctctcactccctctgcatccctccttgaaataattacatagcctcttcctgagggtccttgaatgttcataaattagattaaaatgatacatataaacttctaggaggaagcccgagttgcctacttctttcacttcctccaggatattggcttacacacatcatttaagaaataaattcctgagtaagcaagtgaggaagtgactgagtgatatattttccctatcgccttccctaaaaatttgatcttgcatattggtagcatatattttaaaataatcacatacatcattccacatctagaattccattaac

SEQ ID NO: 875747 - DNA, 563 bp, Homo sapiens
tccgaagtgtgttatagaacattatctgtggctgataagatttgtgtgctcttccttctttgtgttgagaaaaaattgagcacataccactttttaattaaagaattgtgttccacacatatttcctcaatcttcaaatwttcctttagttctgtccccattagtgagagctattttcatccagtctaatcaatactcgcccctttcattgttctcattttgagtttagatcataaacatacatctgtcagtagcaaaagtattctaaagctccccctctgcacttggtcgcagatactcatactgttagggtgtaaaagggaaactggaatccataaaacagggtgaactctactatatatgacactatgcggttttcctgagctgtgcagcacagggacctgctagtaaggcagtatagtatagtgggtaattcagagtgcaggttttggggttaacttacctgggtttatacccaggctctgtcacttactggctggatgaggttaaagagaagattattcataacacttgttaaagaatggtaaggaagactttatgca

SEQ ID NO: 875748 - DNA, 355 bp, Homo sapiens
ctattatttttggactttttaataatcgccattctcactggcgtgagatagtatctcattgtggttctgatttgcatttttctaatgatcagtgatgttgagctttttttcgtgtttgctcctccatgtatgtcttcttttgagaagtgtctgttcatatcctttgcccactttktaatggggttgtttgtgtttttcctgtagtttgattaagttccttgtagactctggatattatacctttgtcagatggatagattgtaaaaattttctccaattctgtactttgttcactctgatgatagtttcttttgctctgcaaaattcgcttatttaattagatcccatttgtcaa

SEQ ID NO: 875749 - DNA, 587 bp, Homo sapiens
tgtgggtcttggctctttatccaatttgccattatgtgtcttttaactggggcatttagcccatttacgtttaaggttagtattgttatgtgtgaatttgatcctgtcattatgatggtagctggttatttttcagacttgtttatgtggttgcttcataatgtcactggtctgtgtgcctcagtttgtttttgtagtggctggtaatggtgtttcctttccatatttagtgcttccttcaggagctcttacaaggcaggcctggtggtgataaagtccctcagcatttgcttgtcttaaaagaatcttacttctccacttatgaagtttagtttggccagatatgaaattctgggttggaaattcttttctttaaggatgttgaatrttggcccccaatcttttctggcttgtagggtttccactgagatgtccacgttagtttgatgggtttccctttgtaggtgacctggtctttctctctggctgcccttaacattttttctttcatttcaacctttgaaaatctgaagattatgtgtcttgaggttgatcttctcatggaatatgttactggggttctctgg

SEQ ID NO: 875750 - DNA, 637 bp, Homo sapiens
ggtggcttgctgtagtatgtcattttatggagaataaaggcccaaaagataatttcaaaaacatgttatgtcctgtcattaatgataaaagtgcattaattgatttggctgtcatcaagagagaagtttgatatgagattttcaaattggttcctagacagtgagaatcaagtgattacttgattttttgttaggggttctagtaattccttactataaattattttttatcacatgagatacctttcaaagtacactaaaattctaacgagaatttctggtagagaaaagactgttattcaaaaaatgtttcttttgcttaatgtttttcttcccatacctgagctgacactttgttcttttatctttatctcattcttatctgttacaatatacacataccttgtaygtccgcctcctactatcctgtaatagctgaatatattaaggaagacctaaggtaattcaggccagtgagggatatgatgaaatagaatgattattttgggataaggggctcaagaaaggctagagagtggctaacacaataaagagaagctttttttatcatatagatatgccacatcaaaaaaaggtgtattttagtgtccccaaaacctgctgtaagtataatctc

SEQ ID NO: 875751 - DNA, 639 bp, Homo sapiens
ttccacagagtctgtatatattccaatgattatttttgaaatagtggttgcctttcaaagtgtcatcacttttattcaatgcattcctttgtatagttagtatagtagcaatgaaataaaacactgagttggtcagcttgtaaaactgtcaactaatatattattaatggagtttaacagatgagtgcaaaactaggccctatcatctatgtggccatgtcagcaaagagaagagaatctggcttctgctcttatgtcaatccaactaacaggaattgaagcacctgaattaaacaatttgcaacctgtcaaaacttagcaagatcaagcatttaaaccaaactgaaagttttraggggaaattttttattattatagtatttataataactgaaaattgaaaacaaagtaaaacaagcctctttcttaataggggattatggattaggagcatttaactaatggagacttccacttaaggtacaccactgaagaataagtttcctgtaggcatatgacttatggatacagtcttattccctcatatttgcatttttttaaatgaaagttctgtataagcattgcatactgaaagatctaaggaataatcaaccaaacaaaagccccacatgaatgatg

SEQ ID NO: 875752 - DNA, 654 bp, Homo sapiens
ctgttagttagtggtaagtcaagaatttagggattctctacaaggaggagctggtaccattccttctgaaactattccaatcaatagaaaaagagggaatcctcactaactcattttatgaggccagcatcatcctgataccaaagcctggcagagacacaacaaaaaagagaattttagaccaatatccctgatgaacgtcaatgcaaaaatcctcaataaaatactggcaaaccgaatccagaagcaaatcaaaaaacttatccaccatgatcaagtgggcttcatccctgggatgcaaggctggttcaacatatgcaaatcaataaacgtaatccagcatataacagaaccaaagacaaaaagcacattattttctcaatagattcagaaaaggccttcaacaaaattcaacagcgcttcatgctaaaaactctcaataaattgggtactgrtggggcgtatctcaaaataataagagctatttatgacaaacccacagccaatataatactgaatgggcaaaaactggaagcattcctggcacaagacagggatgccctctctcactgctcctattcaacatagtgttggaagttctggccagggcaatcaggcaggagaaagaaataaagggtattcaccaatggaaca

SEQ ID NO: 875753 - DNA, 658 bp, Homo sapiens
cattttacacatggggaaactgagactaagagaataataagtggttgagtgacttgtccaagggcacatatctgctaagtgaacaggtccagaacttggagtgtctgacttacggtataaactgtgctactttctcgtcccctggaagcgctgagccttcacacactatctatggaagaaagtctcattgcctctcacatttacrttgtgagctcctctaaacaggaatcatctgtccaagagttctgtatatgtccatagcccagatactgaaaatgtcttaatttgctctgtctccaaccccctttctctctcatcccaatacataatcatcaatggtctgggatctttgaaatttgtcacacaacctctgattcaaaatacttccagtcctttggacctcctataaaagaggtctccatctggaaaggactttgtgtcatttctgttttttctcatcaaacatccagaggacccctagtgtaagtaatgccctgagtcaagggactaagtgtctatgggtattgtcatgaaaggaagaccttcctggactacctagataacacacttttctcccaataccttctctctcattcataattgacctttggatttattttctgccttagcttcatacctttgaggtctccacatatct

SEQ ID NO: 875754 - DNA, 554 bp, Homo sapiens
gtctcgttgacctgtctaatattgacagtggggtgttaaagtctcccattattattgtgtgggagtctaagtctctttgcaggtctctaaggacttgctttatgaatctgggtgctcccgtattgggtgcatatatatttaagatagttagctcttcttgttgaattgatccctttaccattatgtaatggccttgtctcttttgatctttgttggtttaaagtctgttttatcagagactagaattgtgacccctgctttttttttgctttccatttgcttagtagatcgkcctccatccctttattttgagcctatgtgtgtctgtgcacatgagatgggtctcctgattatagcacactgatgggtcttaactctttatccaatttgccagtctgcatcttttaattggggcatttagcccatttacatttaaggttaatattgtgtgtgaatttgatcctgtcattatgatgttagctggttattttgcccattaattgatgcagtttcttcatagccttcatggtctgtacaatttggcatgtttttgc

SEQ ID NO: 875755 - DNA, 610 bp, Homo sapiens
aaagcactgaatagcaatgcaaaagcataaggaagcataaaccttattgagaaaggtaaatatataaatacagaataatgtaaaactgtgaaggtgatgcatgaattactttgaaccttaatatgaaagtaaaagataaaaatttgttaataaacacacaatataaaaagaagcaaaccctgactacaggtactcaaagtgggtggttatgggagaagtcaaagtaaagttttcrtttgcagttgaagttaccaacttaaaataggtggttataactacaagatattttacacaagctgggagctaaccacaaaggaaatatcctacaatagatataaaagataaagagaaatgagtcaaagcaaatcactacaggaaatcatcaaataacaatggaagacagaaagagagggaaaagaataaaacaaccacaacacaggcagaataagttctcacctttcagtaattaacttgaatgtaaatgcattaaattctccaaccaaaaacagagtggctgaacaattatctaaaaaagatccatcaatatgctgtctaaaatagactcacttcaaattggctagaagtaaagggacggaaaaatatatttcat

SEQ ID NO: 875756 - DNA, 682 bp, Homo sapiens
gcacagttgctggtaagggactcttctgctgggctcccaccagcagctctaggatcagacctggatatgagatatctcttacctgttgcgcttttgaaatgtttctgatgaacagactatcccacagaaggaggaacagcactgaaatcctttctcgcaatcttcctgcattgtacacaggtgagtacagttttcaggtgctgatatgcagggtggaggttccaagatatactctggaacacagaacaagtaagagaagggcctcaccaacaggctggagtaatgttcagaactcagaaagcccagggaactgccaggaaacctgccaccctcatctgccttgcatggttccagggtggtggcatcaggttttgtcctcagctgctgccttcctctgagttctgagcagggaagcagggcatggatattttttgatcaagaayagagtttggtagaaccctgcacccattggtcattcaccatccttgtagttcagatgccaagcccccattgactatggttgtgtccatatcaagggtatcaatggtgtatgtggtgaacaagaaagaggtttgtatgttcgttctgcactgattcattgtgtggtcttgagcaagttgtagagcttctcattaacaacatagtttaccctggggttaacctaacatggattatttgtgta

SEQ ID NO: 875757 - DNA, 550 bp, Homo sapiens
gacagaagtgcctgtgcctataacatgagtgagtgcaggttaaactgttcaaatctgaataagattggcgaatcgatcgatgccattttcctggttgtgatattgtcctatattttgcaagacattgcaattggggaaatctgaagagttcaggggatctccctgtattgttttctgcaactgcagatgaatttacaattatcctcaaattaagagacgtaaaaactagaatgakgacgacatactgaacataacacaccaaggcaaggcaagtgactgtgaaaggacgcatgccactaacaaaatggcctatgaataaggaaagcaaaataatccaaaccagtcagtaggaaataccaagttcctaagctgactgtgatgacaattccgatggaattcagaaatcctcataaattaagccctaagtttgaaaaaacaaaaaaaacccaaaaaactgtttttgacttcagggatcttagttaaatatttgtgcctttattttcatttgatgtatccctcatacccttgttatatctgtgtattttttctt

SEQ ID NO: 875758 - DNA, 606 bp, Homo sapiens
tctttgtgagaagcagaaccagatgagtccccctttgactgtcactatatgctcacaactgccaaatagagtggtgttttctcagactttatttcaggctgggttcctgagataagagactccaaaatggaaatttgtttgtatgactttactgagtagttctccagggaatgatctctattaggaagtaaggaaggtaagattaggcagaggaataagtttaactgctatactgttactacaaaggcctcagccaatttcatagcaagctctgaagcwggagccagggtttgtactcacttattagcaagtcctcggatgtgagatgcctttgcagaaggggcataaccttgggcaaggcagcaatctttgggcaaggacaattctttggggatgctgttaggtatgagccattggaaagcaatccttctagcagctaggtgaattaggaccttgcttctaagggataccaagcagcataccatctcagcaacatacatttccaatccccctttgcgctactcagatctatatattaacttcattctttctggaaatatctcctttatcattctggtttcttacagaaacatacagaaataatat

SEQ ID NO: 875759 - DNA, 650 bp, Homo sapiens
ttatagaactatactgattaacaaactcattgacatttccttatattatctttggggctcatttgccattgccattactgctgtatttcatacatcaccaataacctggactatttgtactgattacacaatatgctctcctttcctacacctcgatgtttgtttcattacatttcttagaggtttcttcctgttgtctacttatggacattctattaatatttcaggttctacctcaaatccttccttataaaaatttactggccagacgtggtggcttatgactgtaatctcaacactttgggtggcctaggtgggaggatcacttcagcccaggagtttgataytagcctgggcaatatactgagaatttgtctctacaaaaaaaaaaaaaaaaattagctgggcatggtggtatacaactgtatttccagctactcgggaggctgaggcaggaggatctcttgatcccagaagtttgaggttgcagtcagctatgatcacaccactgaacttcagcctgggtgacagagtgacagcctgtctcaaaataaaaataaaaataaaataaaagttggctgatgaaaataaccaagttatttcaccaactcttattgatacacatcctctgacaagtattctatgtgggc

SEQ ID NO: 875760 - DNA, 600 bp, Homo sapiens
acattcattatatgatttatggttgagggtttctttatcctaaaagtgttttgagttttgtcaaatgccttttctgcatctgtttagatgaccatatggttctgtcaatgaggtagattacatttatagatttgcataggttgaaccatttttgcattccagcattaaatgccacttaatcatgatatgacccttttaatgtgctggtaaattcagattgctagtattttgttgagaatttttacacctatgtttatcaggggaattggtctccaattttattttcttctaatgtcttaggctttggtatcaggggaatgcagaacttataaatgagtatggaaaaatttcctcttcttaaattcttttaaagagtttgagaaggatttgcattctttcttctttaaaggtttgatagaatttaaccatgaaactattaggtcytaggctttgcttagatgtaggatttttgttactgattcactctccctacttgttgttggtctgttcagattttcttcattattcaggttgtatgcttctaggaacttattcaattcttttaagttatccaatttgatgacatgtaattgtttatag

SEQ ID NO: 875761 - DNA, 626 bp, Homo sapiens
gcattactcgtggtagcacttctactgtggtcaatatggtacttgcttaacttatatgttttaaaagaaattaatttttaatttagtgttaaatggtttctggagagaaagtctgtgagtaaactaggagtaggtgaatagggttgaagtagagtccagaacttttatgagcatagtccagaatctcttggctttgtacttaataaaagaccttgttttaaacaagcaaacaggcttcctaccttattggtaggtcttgtcttctactctgtttcctctttttgagtctggaaagaagaaagctagtatcttttgcttgcagaattgcaattctagtttacacacttaatgctcagatattacaaataaaatmatttaaatttgttcttaaagtaaacccaccatatcaaaatttaaatagaaaatggatatgtaggttatttgccttattaaagtgtgccttaataccttaataatttatttctatgttccttttaatatcaagctgctgtcatgtgttgaaaatgtgagatttactagattaatcattctgaagtttcactatggccagaatgtatactttgttttgtatcatcttctctaagattttataagcatgcgatttg

SEQ ID NO: 875762 - DNA, 579 bp, Homo sapiens
gtttataacaacactattcacaatagccaagagaaaaagagagtgcaagggaaactgccagttttaaaccatcagatcttgtgagaactcattatcataagaacagcatgggagaaactgcccccatgatccaatcacctcccaccrgatccctccctcaacacctgggaattacaatctgagatgagctttgggtgaggacacagagccaaaccatatcattccactcctggcccctcccaaatctcatatccgtttcacatttcaaaacctatcatgccttcccaacagtccctcaaattcttaactcatttcagcattaacccaaaactccaagagcaaagtctcatatgagacaaggcaagtcccttctgcctgtgagcctgtaaaatcaaagattagttacttccaagatacaatgggggtacaggcattgggtaaatacagccattcaaaatgggagaaattggccaaaacaaaggggctacgggatccatgcaagcttgaaagccaacaaggcaattattaaatcttaaagctccaaaataatcttctttgactccatgtctcacatccagg

SEQ ID NO: 875763 - DNA, 650 bp, Homo sapiens
ttagaggacacattgggaccaattcccaaagtggcttttttttttttttttcaacaaatctagctcctggttgggaagagcttgtacctctgagatttgtccagagggggattttcaaagtttcacataaatattttgattcattttgggaaaaraattgggatcatgagattgcttaagtttattttgctttcttaaaatttgtttttatttttcatatttttgtttttattgtttcattcttatgggacctccaattatttctccactgtgtctagtcttataaggaatacaaaaatattgccaattaaggtaattactctgttgtttacatgagacaataaatggatgaaacaatttgcatgagaatacgaagtagagaactgaagattctttgagctaaatttgttctttaaccttgggatcctctggatgagagttttgatgtctttgattaatcacttgtgcaattacctccgttactcagtccaaatttattgcttctgtgggcaatgtttcttcaaattgttggaccacaccctcaaaaacattctacttcatcccatctaactccttttaggcagtatgcctcacaagttgagaatcttcttggttggtaaagagagaaagaatatgaaatcaagataaat

SEQ ID NO: 875764 - DNA, 616 bp, Homo sapiens
agaaattggcaatatatcacccagaaacatctccttaaatctcttcattttatcctgaagtatagtaatttatcatgtatagttctgatatgagtatggtatttgtatactataattacaaaactcataattttgtaaatgtttacaactgaggttgggatccacatatattccaagtctgaagtaccaaatgacaaatattattgtgattatctgttttatttgtatataaggcatatcttgagatgcacacacacacacacacacacacacacacacacacacwtggcttccttaatgtaatcagtccccattatcagtggtaaaataatcatatctttttgtcatttaaatacaactggtaaatatttttattgcacaatattcatagttgaataacaatgataagacaaacagtaaatgaactacttgccttccataaacattcattgtcttcacaggaagtttaaatataatttacatgaaaatgttctagtgatacaggagtaacaaagcctatctaatggtaaatgctattttaatggcttagagttagttcatgggaccagtttttatatccagtgtcaacactaggaactttcattaaaaccacagt

SEQ ID NO: 875765 - DNA, 631 bp, Homo sapiens
taaatgtgcgtcaaatacataaatgaaacctgatcttccatgtctactaagagcgtctatattgactcttgctctatattttatacttcataaaatgattccatgtactttataagtaaattttgtactttaaaaaatgagatatatgtgcatagcaaaatatgtgaagaagaagacaggagccagactgtcacttcatatatgtctgctttagactttcttttaagcargaaatatattcattttgtaattgaaatgaaaaatataaaataaatctaataaaagttgttaacttaaacatttttttagctacaatctagcatttgggaatctatttattttcataaacgtgatacacatgattcccagtgaaataaaagaagatatttagccaacatcttcttttacccccaatcaaagcaatcgcttctctatatcactcagcactgcattcactctcttccttgccaagttagattttattttgccgtgtatgtattttggtcacatttaatcctttctggaacaagtcacgatgtgcataaatacatacataacactttggaaacagcacgtaaagatgttttggcaatcgaaaatctgtactgaatattttcaaatatataggtta

SEQ ID NO: 875766 - DNA, 630 bp, Homo sapiens
taatctaaattctataactggatatttacattactttctcaatacctaaactgatgttcttttcaggaaatgataattgagcatttgatgaatttgagtaattttcacaatgaatgtgtatttaataaacatgtattagctaaaatgggcattcttaaaatgcatgaggcacacagaatatgaaagcattagctgattctcgggctgtacttacaaattaaacacacaggccaaaagacagaaaattatctcaattaaaacagaattctagctacagaagatgctttttttttctttgtggatgtagatattagtttttaggcaagatcaggacacaaggtctgtctgaaataagaaaatatttgagcattttcttatttctctctaatcttggcaggaagtggtcccccaattgcaaacytcaggcaacaatacactaactgtaaagaacatgtattcttagaacaaatagaagtttacctctcccatcctcaaacacacacaccttactacatagtctaagtattcattccaaacacagacaactccttaagaaatgaactccagaaaacatgtttttcttcttattggatatcgacccaccacttctaaacttgcctggcattttgg

SEQ ID NO: 875767 - DNA, 599 bp, Homo sapiens
ggctaccttttttacttttttttttttttaagtagagctggggtttcgccatgttggccaggctggtctcgaactcctgactgcaagtgatccggctgccttggcctcccaaagtgctgggattacaggcgtgagccactgcgcctgtcctccraggataagtcttttaccatcaccttgcacatagaaaattaaggtttaccaaacccaagtgaaaaagattgtgagtggaagatatgctcccagtcctagagtgtatgctggttcctccaaaagaaccctgtttttatgctgaatagtattacgtggacctagcaagattgcaggtcagttttctagccctgatcttcttccggggctctcaggctcagtggactgcaccacttgaaacctggttgtacacactagaaggctcttggcacctctctcacctttattgtctgccaattttgcctctcaagtatctgttgaatccatccacttctcttcatctttactactgtcgcctagtccaggccaccctcacctctcacttggacacttgcactggctcagctggctgccttatatcctccctgcccttcctttacctccaccag

SEQ ID NO: 875768 - DNA, 608 bp, Homo sapiens
tgctacctggcttcaaactatactacagggctacagtaactaaaacagcatggtactggtacaaaaacagacaccctgaccaatggaacagaatagagaacccagaaataagaccatacactacaaccatctggcctttgacaaatatgacaaaaacaagcaatagggaaaaggatccctattcaataaatggtgctgggataactggctagccatatgtagaagattaaactggacctcttccttacataatacacaagaatcaactcaagatgaattgaaaacttaaatgtaaaacccaaaactataaaaccctagaagacaacctaagcaataccatcctggacrtaagaatgggcaaagatttcatgacaaagcaccaaaaacagtagcaaaaaaaaagcaaaaattgacaagtgggatctaattaaacttaagagatttcacagagcaaaaaagaaactatcagagtaaacagacaacctacagaatgggaaaaaaatttgcaaactatatatctgacaatggtctaatatccagcatctataaggaacttaaacaaatttacaagaagtaaaaaaaaaaaaaagaacaaccccaataaaaag

SEQ ID NO: 875769 - DNA, 654 bp, Homo sapiens
tcagaactgcctttctcatggatctggaagacatcttttgaaatgttgtcatgaaagaagacaggacccctatctcccagtttctgagggagggtaggagctcaacaccagaaggcacttagttgtaaaaccacttgctctcctgaagataccagaaagtctacattttctctgggtaaagtcaatcagcaaacttagacagcctatctccccatcaccccatctttggaaagccctactacctttgtttcagtggagttcagactcaattctagtctctttcccctactgaaatagtcttgargccggacgtggtggcgcatgcctgtaatcccagcactttgggaagctgaggagattggatcatgaggtcaggagtttaagaccagtgtggccaacatggcgaacccctgtctttactgaaaatacaaaaattagttgggcatggtggcacgtgccttcagtcccagctacccgggaggttgaggcagaagaatcacttgaacccgggaggccgagggtgcagtgagccgagattgcgccacggcactccagcctgggcaacaaagcaagactctgtctccaaaaaaaaaaaaaaaaaaaaaaagaaatagtattgaataaagtcattgaataaagtcttccttacctgtg

SEQ ID NO: 875770 - DNA, 654 bp, Homo sapiens
tcagaactgcctttctcatggatctggaagacatcttttgaaatgttgtcatgaaagaagacaggacccctatctcccagtttctgagggagggtaggagctcaacaccagaaggcacttagttgtaaaaccacttgctctcctgaagataccagaaagtctacattttctctgggtaaagtcaatcagcaaacttagacagcctatctccccatcaccccatctttggaaagccctactacctttgtttcagtggagttcagactcaattctagtctctttcccctactgaaatagtcttgaagccggacgtggtggcgcatgcctgtaatcccagcactttgggaagctgaggagattggatcatgaggtcaggagtttaagaccagtgtggccaacatggcgaamccctgtctttactgaaaatacaaaaattagttgggcatggtggcacgtgccttcagtcccagctacccgggaggttgaggcagaagaatcacttgaacccgggaggccgagggtgcagtgagccgagattgcgccacggcactccagcctgggcaacaaagcaagactctgtctccaaaaaaaaaaaaaaaaaaaaaaagaaatagtattgaataaagtcattgaataaagtcttccttacctgtg

SEQ ID NO: 875771 - DNA, 608 bp, Homo sapiens
cttgtgatgcagataaaacctcacaagtagcagccttcagaaaaaaagagatggtaaatgtttctttcagacttttgaaggtgtcagactctcagttaatctttcctagatccacacaaaaaaagggcctcagagaaagcctggctgcatcggtgcaaagtctctacagatgcaaatctcccttacacgagtcatcttttcagggatacttctgtttgctggctctctaaacagcgatctcaaaatatatcaaagaagtatatttggggatgaaatattatgatrtccttcagtttggtactatcagcagtttcaggcatccagtaggggtcttagagtgtaatccctacagataagggaagatgctctagcttgttttttgtttgacctctctaaatctcatgttgaaatttgatccccaatcttagaggttgatacctatgggagatatttgagttattagggcagatccctcatgtagagattaatgcctttccccagagtgggacagtgagtgaattatcactccattagttctctctagagctggccggctgttaaaaagagcctggcacctactctctgtctcttgcttcctctcttgccat

SEQ ID NO: 875772 - DNA, 648 bp, Homo sapiens
ctttcttttgcctgatttctctggttaggacttccagtactatgttgaataggagtggtgaaagtgggcatccatgtgttgtttcagtattcaaggggaatgcttcctgcttttatccattcagtatgttgctggcagtgggtttgtcataaatggctcttattattttgaagtatcttgctttaatgcctagtttgttttttacatgaagggacattgaattttattgaaagccttttctgcatctatagagatgatcaggtggtttttgtttttatttctgtttatgtgatgaatcaaatttattaatttgcaagtgttgaaccaaccgtgcrtctcagagataaagcctacctgattgtggtggatttaactttttgatgtgctgctggttcagtttgctagtattttgttgaggatttttgcatctgtgttcatcaaggatattggcctgaagctttctgttcttgttgtgtctctactaggttgtggtatcaggatgatgttggcctcatcttctttttaaaggctaaatagtattccattacgtgtgtgtgtgtgtgtgcatgtgtggggtttgtgtgcatgtatgcatcctcacattttaaaaattcattcatcccttgatggacatttaggttgagtcca

SEQ ID NO: 875773 - DNA, 636 bp, Homo sapiens
tcttaacaaagcttacatgcaatcaactgaagaaagggtagtttaaagaaataatgcttggacaatattcatatgtagaaaaatattctttaatacatcatattaaaaataaactaaaaatgaattacataattaagtgtaaaacccaaaataaactgctaaaggaaaacatgagaaaatattattaacttgcattagggaaatatttyttaaatatgatgtataaaacacaaaccctaaaagaaaaagtgaacaaattggctttatcaaaattaaaagcttctacttttttttttttttttggctagtcaagtaaagcactggaggtggagaaggaacaaggaaatctgtaactggtagttttcaattaattctaaacaccactgcatgcaggcaatcaaaagtttctactttttaaagacacttataggagaaaatatttgaaagcatatatctgataaagaattgtatccagaatacacaaataattcatactcaataataaacagaataggagatatgcaaatatttgaaaagacacttcatcaaagaatagtgaatggtacataaacacataaaatgatgctcaacatatttacttattagataaatgcataataaaaccataatggtata

SEQ ID NO: 875774 - DNA, 513 bp, Homo sapiens
ggtatatacccagagaattataagtcatgctgctatgaagacacatgcacacgtatgtttattgtggcactattcacaatagcaaagacttggaaccaacccaaatgtccaatgatagactggattaagaaaatgtggcacatatacaccatggaatactatgcagcaataaaaaatgatgagttcatttcctttgtagggacatggatgaacctggaaaccawcattctcagcaaactattgcaaggacaaaaaaccaaacactgcatgttctcactcataggtgggaattgaagaatgagaacacatggacacaggaagggggacatcacactctggggactgttgtggggtgagtggaggggcgagggatagcattaggagatatacctaacgttaaatgatgagttgatgggtgcagcacaccaacatggcacatgtatacatatgtaacaaacctgcacgttgtacacatgtcccctaaaacttagagtataaaaaagagcagcaaaa

SEQ ID NO: 875775 - DNA, 576 bp, Homo sapiens
ccagcatcgttccattgctggtgaggagctgcattcctttggaggaggagaggcattctgatttttagagtttccagttttcctgctctgtttttttccccatctttgtgtttttatctacctttggtctttgatgatggtgacatacagatgcattttttgagtggatgwcctttctgtttgttagttttccttctaacagtcaggaccctcacctagaggtctgttggaatttgctggaggtccactccagaccctgtttgcctgggtattagcagcggaggcttcagaacaacagataatgatgagcacaaattgttgctgcctgatcgttcctctggaagctttgtctcagaggggtacccggccttgtgaggtgtcagtctgcccgtaatgtgagttgcctccctgttagcctacttgggggtcagggacccacttgaggaggtattctgtccgttctcagatctccagctgcatgctgggagagccactactcccttcaaagctgtcagacaggtacatttaagtctgcagaggtttctgctgccttttgtttgtctgtgccctgcctcc

SEQ ID NO: 875776 - DNA, 654 bp, Homo sapiens
ttctgtttgttagttttccttctaacagtcaggaccctcacctagaggtctgttggaatttgctggaggtccactccagaccctgtttgcctgggtattagcagcggaggcttcagaacaacagataatgatgagcacaaattgttgctgcctgatygttcctctggaagctttgtctcagaggggtacccggccttgtgaggtgtcagtctgcccgtaatgtgagttgcctccctgttagcctacttgggggtcagggacccacttgaggaggtattctgtccgttctcagatctccagctgcatgctgggagagccactactcccttcaaagctgtcagacaggtacatttaagtctgcagaggtttctgctgccttttgtttgtctgtgccctgcctccagaggtggagtctacacaggcaggcaggcctccttgagctgcggtgggctccacccagttggagcttcctggcttttttgtttacctactcaagccttggcagtggcaggtgcccctcccccagcctcactgtcactttgcagtttgatctcagactgctgtgctatcaatgagcgaggctccgtgggcatatgaccctctgagccacgcacaggatataatctcctgatgtgccatttactaagaccattg

SEQ ID NO: 875777 - DNA, 576 bp, Homo sapiens
ccagcatcgttccattgctggtgaggagctgcattcctttggaggaggagaggcattctgatttttagagtttccagttttcctgctctgtttttttccccatctttgtgtttttatctacctttggtctttgatgatggtgacatacagatgcattttttgagtggatgacctttctgtttgttagttttccttctaacagtcaggaccctcacctagaggtctgttggaatttgctggaggtccactccagaccctgtttgcctgggtattagcagcggaggcttcagaacaacagataatgatgagcacaaattgttgctgcctgatcgttcctctggaagctttgtctcagaggggtaccyggccttgtgaggtgtcagtctgcccgtaatgtgagttgcctccctgttagcctacttgggggtcagggacccacttgaggaggtattctgtccgttctcagatctccagctgcatgctgggagagccactactcccttcaaagctgtcagacaggtacatttaagtctgcagaggtttctgctgccttttgtttgtctgtgccctgcctcc

SEQ ID NO: 875778 - DNA, 576 bp, Homo sapiens
ccagcatcgttccattgctggtgaggagctgcattcctttggaggaggagaggcattctgatttttagagtttccagttttcctgctctgtttttttccccatctttgtgtttttatctacctttggtctttgatgatggtgacatacagatgcattttttgagtggatgacctttctgtttgttagttttccttctaacagtcaggaccctcacctagaggtctgttggaatttgctggaggtccactccagaccctgtttgcctgggtattagcagcggaggcttcagaacaacagataatgatgagcacaaattgttgctgcctgatcgttcctctggaagctttgtctcagaggggtacccggccttgtgaggtgtcagtctgcccgtaatgtgagttgcctccctgttagcctacttrggggtcagggacccacttgaggaggtattctgtccgttctcagatctccagctgcatgctgggagagccactactcccttcaaagctgtcagacaggtacatttaagtctgcagaggtttctgctgccttttgtttgtctgtgccctgcctcc

SEQ ID NO: 875779 - DNA, 601 bp, Homo sapiens
gacttggaaccaacccaaatgtccaacaatgatagactggattaagaaaatgtggcacatatacaccatggaatactatgcagccataaaaaatgatgagttcatatcctttgtagggacatggatgaagctggaaaccatcattctcagcaaactatcgcaaggacaaaaaaccaaacaccgcatgttctcactcataggtgggaattgaacaatgagaacacttggacacaaggtggggaacatcacacaccggggcctgttgtgggstggggggagaggggagggatagcattaggagatatacctaatgtaaatgacgagttaatgggtgcagcacaccaacatggcacatgtatacatatgtaacaaacctgcacgttgtgcacaagtataataaaaaaaacccacaatattttcttaccttctgtactcttgatggtctggcatctggggcctcattgcctgggaagagactgccctttccagggctagttaattctatagatagcaaaggactcgcccacaagtgtgcctttcatatgcaagctaaactaaccaatctggagctcatactttgagccaccttctctatctggct

SEQ ID NO: 875780 - DNA, 601 bp, Homo sapiens
gacttggaaccaacccaaatgtccaacaatgatagactggattaagaaaatgtggcacatatacaccatggaatactatgcagccataaaaaatgatgagttcatatcctttgtagggacatggatgaagctggaaaccatcattctcagcaaactatcgcaaggacaaaaaaccaaacaccgcatgttctcactcataggtgggaattgaacaatgagaacacttggacacaaggtggggaacatcacacaccggggcctgttgtggggtggggggagrggggagggatagcattaggagatatacctaatgtaaatgacgagttaatgggtgcagcacaccaacatggcacatgtatacatatgtaacaaacctgcacgttgtgcacaagtataataaaaaaaacccacaatattttcttaccttctgtactcttgatggtctggcatctggggcctcattgcctgggaagagactgccctttccagggctagttaattctatagatagcaaaggactcgcccacaagtgtgcctttcatatgcaagctaaactaaccaatctggagctcatactttgagccaccttctctatctggct

SEQ ID NO: 875781 - DNA, 606 bp, Homo sapiens
ggttattttgcccattgattgatgcagttttttttcatagcatctatggtctttaaaatttggcatgtttttgcagtggctggtaccggttgttcctttccatgtttagtgtctccttcaggagctcttgtaagtcargcctggtggtgacagaatctctcagcatttgcttgtctgtaaaggattttatttctccttcacgtatgaaacttagtttggctggttatgtttgtacgctttaacccacttatctttatccacccacatcccccacactcacccttcccagtatctgttatctatctttccatgctctactttgataacttgatgctatgaaacttttttagctcccatgtatagcaagaatatgtgatatttgtctttttatgcctggcttatttaatttaacataataacctccagttccatctattttgctgcaaatgatatgatttcatttttttagccaaatagtattccattgtgtatatatacaccacattttctttatctgtttatttgtagatggacacttagtttgattttatatatttactattgtgaatagtgctgcaataaacatgagggttgagatatcttttt

SEQ ID NO: 875782 - DNA, 523 bp, Homo sapiens
agaaaagagtaataagagtggagacatggatactggaattaacatggatactcaggaggccaaatggagtcagtataagagaaatgttaaataaatgtttggattcacatttactttgtactctgtgccataaacaatatctttttttctccccgcaactccatagataatgttgaaatacttcatgccttctgagatagtttttagaaggaattgtccaagaggaactaattgtagaatgacctaactaaatcttctagttttcttttcttcaatggccctgcgtargtcatgagtacttgaggattcactttttctataaattcactataacccaaccttgccactttcaatagtttcttaacactgacattgtgggatgatgaccacttgtggaattctggttgagagataaaatggccttcataagcacacttcaggttaatcagacttaaggatatttaatgtttcccttgatactgtctaccaaacaaagtacatttatatgcattctagaatgtct

SEQ ID NO: 875783 - DNA, 550 bp, Homo sapiens
tcaaaaacgtgttcgagtaaataaaatttcttatttctattagccaggaattttacatttgcaagttgtagaaatacaataacattgattcaaagcccccagaaaggaagtgggatttattgactttataaatctctgaagtcccaaagtttaccttcacatatggttgtatcaaaaatgtcatgaagactctgttttttgttttggttttttgtctaccaccaccacccaaccccacctgcatcccatgcccttgtttttctccargttagccttattttcagttaggtcctttccttctaatgaccctaacagtgcccaactttcatcttcctacctaattcatcaaggcagaggaaaatctctcttgtacaatagttaccaaaaatgtcactagttaaatttcagtaccaaggcatgaatactgaggttacttctaggtctcaaaagtgaggtcatcctacatggattaagagtgaggaagaggtggtttcccaaagcaaaatacaagcattatttacacaacatgtatacactacataagctcacc

SEQ ID NO: 875784 - DNA, 589 bp, Homo sapiens
tgaaacccccatctctactaaaaatacaaaatgtggccgggcatggacctgtagtcctagctagtcagggggctgaggcaggagaatctcttgaacctgggaggcagaggttgcagtgagccaagattgcactactgcactccagcctgggagacagagcaagactccatctcaaaaaaaaaaaaaaaaaaaaacagagagaactcaatttatatctaccctaatagtgtaggagtactttcctttgggaagcaragcagaaggctgggtggaatgcggccagagctgctcctatacatgaaccctaagcatatgttacttcaataaaaataacttgggtatggaatatttgagtacaggaacacatgtgtgatctcctctctgtgtgttcatgaagactgcaaaataagttttccatatcttccttgtagatgaacttatttaaagcttgtaattcattagtgatgtacccttagccatgtctatatattacgttggtgcacaagtaattgcggtttttgccattacttttagtgccaaaacttcaattaagtttgcaccaccctaatacatagaattgtataaaagc

SEQ ID NO: 875785 - DNA, 589 bp, Homo sapiens
tgaaacccccatctctactaaaaatacaaaatgtggccgggcatggacctgtagtcctagctagtcagggggctgaggcaggagaatctcttgaacctgggaggcagaggttgcagtgagccaagattgcactactgcactccagcctgggagacagagcaagactccatctcaaaaaaaaaaaaaaaaaaaaacagagagaactcaatttatatctaccctaatagtgtaggagtactttcctttgggaagcagagcagaaggctrggtggaatgcggccagagctgctcctatacatgaaccctaagcatatgttacttcaataaaaataacttgggtatggaatatttgagtacaggaacacatgtgtgatctcctctctgtgtgttcatgaagactgcaaaataagttttccatatcttccttgtagatgaacttatttaaagcttgtaattcattagtgatgtacccttagccatgtctatatattacgttggtgcacaagtaattgcggtttttgccattacttttagtgccaaaacttcaattaagtttgcaccaccctaatacatagaattgtataaaagc

SEQ ID NO: 875786 - DNA, 588 bp, Homo sapiens
attgagagtcatggcctctcctctaaactccagactcaagtatctagctgccaactccacatcaaccttggatgtcttgtgagcatctcaaacatagcatatgcaaacctgaactcttgatgtagttctaacacctgcttcttctccagtttctctggctcaataaatggcatctgtattgctcgaaaaacatgggaatttttctctactttctcctcttttactgcccttggctagtycatcatttcctgtagatccttcatccaaaaatcattctttgatttgtccccttatctccacctttagcaccacaataagccaccatgtttcatctgttctgtaatagtttcctaactggattccttctgcccattgtcctgccaatatttttcttgtaacagcaagagtgacctcttaaaatgttaggcaaatcagattacctcctgtttaaatctctcaatgttttacaatatgtaacaaccaaaagaagacagatatgatcctactatgtcaaatggactaagagtatttttcatctataaactggaataaaaatacctacatcaaagagtggttgtatcaaatgag

SEQ ID NO: 875787 - DNA, 564 bp, Homo sapiens
ttttctgtgtctattgagataatcacatggtttttgtctttagttctgtttatgtgatgaatcatatttactgatttgtgtgtgttgaaacaaccttgcatcccagtgatgaagcctacttgatcatggtggattagctttttgatgtgctgctkgatttggtttgcaagtattttgttgaggatttttgcattaatgttcatcaagggtattggcctgaagttttctttttttgtttctgtttctgtcaggttttggtatcgtgatgatgctgtcctcatagaatgagttggggaagagtccctcctgctcaattttttggaatagtttctgtaggaatagtagcagctcttctttgtacacctagtagaatttggctgtaaatccatcaggtcctgggctttttttggttggtaggctatttattactgatttaataaatcagagctcattattggtctgttcagggaatccatttcttcctggttgagtcttgggagggtgtatgtgtccaggaatttatccgtctcttctcagttttctagtttgtgcacatagagttgt

SEQ ID NO: 875788 - DNA, 539 bp, Homo sapiens
tcagagatgtaatgaataaatctgaatgcttctccctttatccatgtgaagtgaagaaatacatttcttaaaaccccatagggagaatcatgaatttctgaacttttcctgtttctaatgtatgttttgtgctactttacaaatcaatttgaattaaatgtaaaaaacacaattgaagaaatgtgatttgttatgtctttgtttagkaacagcaagtaacagatgatttttagagattgtggacaatttataaacagaagaaacaattcaaagaaatgatgattacctatctctgtactgttaatttaatagttcaatccatacaactggaatgtgtttatatgtaaatccatttagcagtgcaaagcaattttcaggtagtaattttatggctataataatttctgtcattaaagataaatagaataacagaatgttaattatattgttttctaaactaaaattttacctgtaatgatcacctttgatttactgccacagataatacatattttcagtttccaaggtcaaatatcatt

SEQ ID NO: 875789 - DNA, 720 bp, Homo sapiens
accaccctttcagagcagtcctgatgagaacttaattcctaggaagaattctgttcccttccttctcttccattccctttctcctgacgtgggcacagcctccaaacccaggcagaaggctttctccagccagagctgaactggagaggacccttatgagcactagaaaatgattaggccagcacagtggcgcrtgcttgtaatcccagcattttgggaggtggaggtgggaagattgcttgaggccaggagttcaagaccagcctgggcaacatagggagactttatctctacaaaaaataaagaaattagccaggtgtggtggtgcacgcctgtagtttcagctattcgggggaagggggtgttgacgcaggaggatctcttgagcccaggactttgaggctgcagtgagctataactgcaccactgggggaccactctggaagaaagagggagactctgtcttgaaagaaagaaatggagaagagagagagagaaaaagaaagaaagagaaaaaaagagaaagaaaaagaaagaaagaaagaaaggaaaagaaaggaaaggaaggaagaaggaaagagagaaagagagagagagaaaaagagaaggaaggaaggagggaaggaggcaaagaaggaaggaaggaaagaaggaaggaaggaagggaaatgattgacccaggaagcggtatagcacaatagttaagaagtatgctaccta

SEQ ID NO: 875790 - DNA, 720 bp, Homo sapiens
accaccctttcagagcagtcctgatgagaacttaattcctaggaagaattctgttcccttccttctcttccattccctttctcctgacgtgggcacagcctccaaacccaggcagaaggctttctccagccagagctgaactggagaggacccttatgagcactagaaaatgattaggccagcacagtggcgcatgcttgtaatcccagcattttgggaggtggaggtgggaagattgyttgaggccaggagttcaagaccagcctgggcaacatagggagactttatctctacaaaaaataaagaaattagccaggtgtggtggtgcacgcctgtagtttcagctattcgggggaagggggtgttgacgcaggaggatctcttgagcccaggactttgaggctgcagtgagctataactgcaccactgggggaccactctggaagaaagagggagactctgtcttgaaagaaagaaatggagaagagagagagagaaaaagaaagaaagagaaaaaaagagaaagaaaaagaaagaaagaaagaaaggaaaagaaaggaaaggaaggaagaaggaaagagagaaagagagagagagaaaaagagaaggaaggaaggagggaaggaggcaaagaaggaaggaaggaaagaaggaaggaaggaagggaaatgattgacccaggaagcggtatagcacaatagttaagaagtatgctaccta

SEQ ID NO: 875791 - DNA, 632 bp, Homo sapiens
tcaagctgcatttggggcttacaggacatactctcaaaatgcaaaggagggaacaactaatgccattgggagagaaggaagagtgggtgatcagaaaagacttcttgggctgggtgtggtggctcacgcctgtaaacccagcactttgggaggctgaggcgggcgaatcacctgaggtcaggagtttgagaccagcttggccaacatggcaaaaccccatctccgctaaaaatacaaaaatgagctgggtgtgttggcacacgcctgtattcccaactacttaggaggctgaggcaggagaatcacttgaacccaggaggtggaggttgcagtagctgagatcgtgccactgcactccagcctaggcgacagagcaagactctgtttcaaaaaacagacaaacaaacaaaaaaaaacctagcactttgggaggcagaggtgggaggactgcttgaacccargagttcaagaccagccagggcaacataatgagaccctgtctaaaaaatataaataaaaataaattagctggacatggtggtgcaggcctatagtcccagctacttgggacgattgcttgagcccaggaggttgaggctgcagtgagctgtgattgtgccactgtgctccag

SEQ ID NO: 875792 - DNA, 597 bp, Homo sapiens
cgggagagggaaagaacaaaagggactaagaaaaagagagaagagaaataaagaaccaaggacagaaaggattagcacaggccggacccggaggctcatgcctaaaattctaggactttgtgaggccgaggcgggcggattgcttgagctsagcagttcgaggccagcctggccaacatggcgaaaccccatctctacaaaacacaaaaattagccaggcgtggtggcgggcgcctgtaatcccagctactcggcaggcggatcgcttgaacctgggaggtggaggctgcagtgagccgagatcgcgccactgcactccagcctgggagacagagcgaaagcctgtctcaaacaaacaaacaaaaacaaaaaataaaaccgagagaaagaaaagagtacaaacttgggtgggagagaaggtaaatggaagagcgggcagcgcacgcagaacaagcgtggggggcgcaaagggcgcagggctggggccaggctcaccgagccgcagggagaacacggcagtgcgtgcggctgtgtctgtcggctggcggagggcgcgtcggacgagccgggcgagcgtggacagtcaatcccaaggcg

SEQ ID NO: 875793 - DNA, 642 bp, Homo sapiens
atgactgaatttgtaaatgctaagtacttatgtgttccttgtacctcagttttatcgtctgtaaaatgaaaggatttggggttgaacacctataaactactttccaactctcacattatttgattttctgatcaaattcataattgatcaaatacttatttgttcaacccagcatacaaaactgaaaaaatggttagagtttggaaaacaaagtcaaaatctttaagtaaacaagatcagaactgatttgctgggtcacttaactctgtgagaaatatactaactaccatacaaacaataagtaagtaaaacaaggaatcaaagaccargtttatgggctagctttcatgcttgtttgaaatgcactgggtttcttatactgtcatggcaatggccttttaaaattttaggaataatatttaatggttgatttcaaaagtattaaaatatattcacatacaactatttaatttttataaaaacaatgatttcagagtccttgaaaaattgtgcttcattgaataaaaacaggaattttctattcctggaatcatttgtctgaaattaacttattttaaggcatggcattcagaatgtaaaactcaaaatgcctgtttagtggaagaagtttcagctgtagtt

SEQ ID NO: 875794 - DNA, 642 bp, Homo sapiens
atgactgaatttgtaaatgctaagtacttatgtgttccttgtacctcagttttatcgtctgtaaaatgaaaggatttggggttgaacacctataaactactttccaactctcacattatttgattttctgatcaaattcataattgatcaaatacttatttgttcaacccagcatacaaaactgaaaaaatggttagagtttggaaaacaaagtcaaaatctttaagtaaacaagatcagaactgatttgctgggtcacttaactctgtgagaaatatactaactaccatacaaacaataagtaagtaaaacaaggaatcaaagaccaggtttatgggctagctttcatgcttgtttgaaatgcactgggtttcttatactgtcatggcaatggccttttaaaattttaggaataatatttaatggttgatttcaaaagtattaaaatatattcacatacaactatttaatttttataaaaacratgatttcagagtccttgaaaaattgtgcttcattgaataaaaacaggaattttctattcctggaatcatttgtctgaaattaacttattttaaggcatggcattcagaatgtaaaactcaaaatgcctgtttagtggaagaagtttcagctgtagtt

SEQ ID NO: 875795 - DNA, 652 bp, Homo sapiens; identical to SEQ ID NO: 875375

SEQ ID NO: 875796 - DNA, 656 bp, Homo sapiens
tgattttttgaagggttttttgtgtctctatctccatcagttcggttctgatcttagttatttcttgtcttctgctagcttttgaatttgtttgccattgcttctctagttcttttaattttgatgttagggtgtcaattttagatctttcctgctttcttttgtgggcatttagtgctataaatttccctgtacacactgctttataygtgtcccaaagattctggtacattgtgtcttcattctcattggtttcaaataacatctttatttctgccttcatttcattatttacccagtagtcattcagcagcaggttgttcagtttccatgtatttgtgtggttttgagtgagtttattaatcctgagttctagtttgattgcactgtggtctgagagactgttatgatgattttcattcttttgcatttgctgaggagtgttttacttccatttatgtggtcaattttagaataagtgtgatgagttatcgggggaaccctctcccaatattcaacgtatgttctttctattttccataagtgtcagctggctgagaaatagaaagagtacaaagagaggaattttacagctgtgcctctgggggtgacatcacatatcagtaggactgtgatgcccacctgagccgcaaaac

SEQ ID NO: 875797 - DNA, 640 bp, Homo sapiens
ccattttgctcgtgagatgggtctcctgaatacagcacactgatgggtcttgactctttatccaatttgccagtctgtatcttttaattggcccatttagtctgtttacatttaagattaatactgctatgtgtgaatttgatcctgtcattatgatcctagctggttgttttgccctttagttgatgcagtatcttgatagtgttgatgttctttacaatttggtatgtttttgcagtggctggtaccagttgttccttttcacgttttgtgtttccttcaggagctcttgttaggcagggctggtggtgacaaaatctctcagcatttgcttgtctgtaaaggattttatttctcctttgcttatgaagcttagcttgactggatttaaaattctgggttgaaaattcctttctttaagaatgttgaatattggcccctactctcttctggcttttagggtttctgccaagagatccgctgttagtctgatrggctttcctttgtgggtaactcgacctttctctctggccattcttaacattttttccttcatttcaaccttggtgaatctggcaattatttgtcttcgggtcactcttcttgaggagtaactgtggtgttctctgtatttcctgaa

SEQ ID NO: 875798 - DNA, 548 bp, Homo sapiens
aatccaacttacaagggatgtgaaggacctcttcaaggagaactacaaagcactgctcaatgaaataaaagaggatacaaacaagtggaagaacattccatgctcatgggtaggaagaatcaatatcctgaaaatggccatactgcccaaggtaatttatagattcaatgccatccccaccaagctaccaatgactttcttcacagaattggaaaaaactactttaaagttcatatggaaccaaaaaagagcccgcatcaccaagtcaatcccaagccaaaagaacaaagytggaggcatcacgctacctgacttctaactctactacaagtctacagtaaccaaaacagcatggtactggtaccaaaacagagatatagatcaatgaaacagaacagagccctcagaaataacgccacatatgtacaactatctgatctttgacaaacctgacaaaaacaagcaatggggaaagattccctatttaataaatggtgctgggaaaactggctagccatatctagaaagctgaaactggatcccttcct

SEQ ID NO: 875799 - DNA, 646 bp, Homo sapiens
gtggtagcatgcaggtcaagagagaaggatgaaaacacagaggagggtttttgtgtttttgtttttgttttgttttttttgtatttagaggacgttagagaagaatcagtagattataggcaacaaagtcttgataaaactgtagaaaaacagtaggaataaaatcgcagaaacaagtgaaaaaatccagaaggattctaattgtgaataagctaccagttggcaatcatggaacaccattattggaattcttgaaataaagtttagaaaaaaacatttcaggaagttttgccagataaaatataagatgcctagttaaacttgaatttcagaaaaacgatgaataatatttttgtataagtatgtcctgtgcagtatttgggacgtacttacactagacactgttttttgatgtgaaattcaaattttattgggtaccctatttttatttggaaaatctgccaatcttagyatgattcaaaaggttgtgagaaggcatggtgatcagagtcaatgatctggtccttcatttgatgatgcagtgttttgatgagagaattattaccatgtttacttggaggtcagaaataaaggccccagggaagcattttctagaacacagggagaaccttttgggaagtctctt

SEQ ID NO: 875800 - DNA, 611 bp, Homo sapiens
ctgaaagaaaaggggaaaggcatcccttagttcccttctctcttccagtgaaatcctggggtatgtgagggagagaaaaaaaggcatccctttctttcttcccttctccgagtcctggaagccactaggtgcaccacccatggacacaagtgcaagtgccaaccatgaagtaggaaggcctagtcattagggatggtcacacttacctacgctgtgccttagccttccactgttggtaacctttgggttccctagacctcatctatgccacagatgcaagcaaattcttcacccatgaarcaggaaggcctagttggcagaaacaatcatactcacctgcgtggtaccgtagccttctgctgtctactgtctctgaatccctcagatcaagttttggttttagggctccatacctaagcttggaaaatacattggagtaatgtaaagtgaagctgtggaaccagatgcattaaggcacctttttagtactaccttgttctatgattcaagtcaatggaaaactatgaaaactcgatttaggcaggattgctaagggctcaaatacttcagaagtaaaggcttggtcatttcctaaagctaagtgccatgtt

SEQ ID NO: 875801 - DNA, 634 bp, Homo sapiens
tctccagtgtctattgtttccatctttatgtccatgtgtatttattgtttccctctcacttataagtgaaaacatgtgttatttgattttctgtttctgtattatttcacttaagaaaatgtcctccagctgcatccatgtttctggaaaggacataatttcattctttttaatggctgtktagcattccttcatgtgtatgtaccgaattttcattatccatttttccattgatgaacatgtaggttgatttcatgtctttgctattataaatagtgctgtgataaacatacaagtttctttttctttggggacatacctaatagtgggattgctggatcaaatggtagctctatttttagttctttgagacatttccacactgttttccatagaggttgtactagtatgcatacccactaacagtgaataagcatccccattttcctgcatccacaaaaacatcttttttttttttacttttaaataatagccactttgagtggtatgagatggtatctaattgtggttttgatttgcatttctctgatgattagtgatgttgagcattttttttcttatatttcttgactgtgtatgctttcttttgagaagtgtcattttatgtcctttt

SEQ ID NO: 875802 - DNA, 634 bp, Homo sapiens
tctccagtgtctattgtttccatctttatgtccatgtgtatttattgtttccctctcacttataagtgaaaacatgtgttatttgattttctgtttctgtattatttcacttaagaaaatgtcctccagctgcatccatgtttctggaaaggacataatttcattctttttaatggctgtttagcattccttcatgtgtatgtaccgaattttcattatccatttttccattgatgaacatgtaggttgatttcatgtctttgctattataaatagtgctgtgataaacatacaagtttctttttctttggggacatacctaatagtgggattgctggatcaaayggtagctctatttttagttctttgagacatttccacactgttttccatagaggttgtactagtatgcatacccactaacagtgaataagcatccccattttcctgcatccacaaaaacatcttttttttttttacttttaaataatagccactttgagtggtatgagatggtatctaattgtggttttgatttgcatttctctgatgattagtgatgttgagcattttttttcttatatttcttgactgtgtatgctttcttttgagaagtgtcattttatgtcctttt

SEQ ID NO: 875803 - DNA, 634 bp, Homo sapiens
ttttggtgtgaagaagctctttagtttaagttccatttgtcaatttttattttgttgcatttgctattgaggtcttagtcataaattattttcctaggccaatgtccagaagagtttttcctaggtttcttctaggacttctgtagttcaagtctcatattcaagtctttaatctttagttgatttttgtatacagtgagagataggggtccagttctactcttttgcatatggctagccagttttcccagcatcatttattgaatggcttgcacgttctttcaccattgtttatctttgttgacgttgtcaaacatcaataagatgtagctgtgtggctttatttctgggttctcwattctgttccgttggtatgtgtgtctgatttttacttgcaccatgctcttctggttactataaccttgtagaatagtatgaatttgggtgatgtggtatctctggctttgttcattttgcttaggattgctttggctatttgggctccttttttggttccatatgagttttagaatagttttttctaatctgtgaatgatggtaatttgatagaaattgcatgactctgtagattgctcttggcagtaaggtcattttatcaatattgattcatcca

SEQ ID NO: 875804 - DNA, 634 bp, Homo sapiens
ttttggtgtgaagaagctctttagtttaagttccatttgtcaatttttattttgttgcatttgctattgaggtcttagtcataaattattttcctaggccaatgtccagaagagtttttcctaggtttcttctaggacttctgtagttcaagtctcatattcaagtctttaatctttagttgatttttgtatacagtgagagataggggtccagttctactcttttgcatatggctagccagttttcccagcatcatttattgaatggcttgcacgttctttcaccattgtttatctttgttgacgttgtcaaacatcaataagatgtagctgtgtggctttatttctgggttctcaattctgttccgttggtatgtgtgtctgatttttacttgyaccatgctcttctggttactataaccttgtagaatagtatgaatttgggtgatgtggtatctctggctttgttcattttgcttaggattgctttggctatttgggctccttttttggttccatatgagttttagaatagttttttctaatctgtgaatgatggtaatttgatagaaattgcatgactctgtagattgctcttggcagtaaggtcattttatcaatattgattcatcca

SEQ ID NO: 875805 - DNA, 634 bp, Homo sapiens
ttttggtgtgaagaagctctttagtttaagttccatttgtcaatttttattttgttgcatttgctattgaggtcttagtcataaattattttcctaggccaatgtccagaagagtttttcctaggtttcttctaggacttctgtagttcaagtctcatattcaagtctttaatctttagttgatttttgtatacagtgagagataggggtccagttctactcttttgcatatggctagccagttttcccagcatcatttattgaatggcttgcacgttctttcaccattgtttatctttgttgacgttgtcaaacatcaataagatgtagctgtgtggctttatttctgggttctcaattctgttccgttggtatgtgtgtctgatttttacttgcaccatgctcttctggttactataaccttgtagaatagtatgaatttgggtgatgtggtatctctggctttgttcaytttgcttaggattgctttggctatttgggctccttttttggttccatatgagttttagaatagttttttctaatctgtgaatgatggtaatttgatagaaattgcatgactctgtagattgctcttggcagtaaggtcattttatcaatattgattcatcca

SEQ ID NO: 875806 - DNA, 629 bp, Homo sapiens
taatgtttgtattttgattttgtactctaaacctttactgaaggtaaagatagatatctgatgatcttagataatgtgacttcctcttttcctatatggatgtctttttttttttttcctctcacctgattgctctggctaggaattccagtactacattgaataggcctggtgaaaatagacawacttgtcttttcctagtttttaagggggatacctccaacttttgcccattcagtatgatgttggctgtgggtttgtcatacatgactcttattattttgagacatgttccctgtatgcctagtttgttgaaaggtttttttttattatgaagggatgttggatttaatcaaatgttctttcagcatctattgagataatatgtttttatttttaattctatttatgtggtgaatcacgtatattgagtcacatatgttaaagcatccttgcatttctggaataaagcccaatttatgctgctatattcagtttgctagtatttgtgtgaggacttttgtgactaggttaatcaggaatattgacctgtagtgtccaatttttgttttgtccttgccagattttggtatctggaagaaactggttttatagaataatttagagag

SEQ ID NO: 875807 - DNA, 495 bp, Homo sapiens
atatcttcttgtgaatttatactttatcattatataatgtttccatttgtctcttataacagtttcaatttaaactctacttggcattgatatcaccattcctttgctttttccattactgtgtgcaccaatatttttttcttcttatctctttcaacctttgcgtgttcttaaatacaaaatgagtatattaaastgtccatatagttaagagtgcttttaatccattgtgtcagtctgtcttttggttagagagttgaataaataatggtttaaatttataattgatagggaagatttattattgccatttaaataatttgttttctgtatgtcttatagctattttgtgcctcctcttttttctaatgccttcctttgtggttagttgattttttttaattgacacatttttattcccttcttatttccttttgtgtgtattctatagatatgtcctttgtggttaccttggtgattatccataatatccta

SEQ ID NO: 875808 - DNA, 495 bp, Homo sapiens
atatcttcttgtgaatttatactttatcattatataatgtttccatttgtctcttataacagtttcaatttaaactctacttggcattgatatcaccattcctttgctttttccattactgtgtgcaccaatatttttttcttcttatctctttcaacctttgcgtgttcttaaatacaaaatgagtatattaaactgtccatatagttragagtgcttttaatccattgtgtcagtctgtcttttggttagagagttgaataaataatggtttaaatttataattgatagggaagatttattattgccatttaaataatttgttttctgtatgtcttatagctattttgtgcctcctcttttttctaatgccttcctttgtggttagttgattttttttaattgacacatttttattcccttcttatttccttttgtgtgtattctatagatatgtcctttgtggttaccttggtgattatccataatatccta

SEQ ID NO: 875809 - DNA, 585 bp, Homo sapiens
attgaccatttgtgtcatcttttttggagaaatatttatcaaggtcctttgcccaaattttaattgagttgtccttttgttatttagttgtacgtattctttacatattaaaatataaatcctttgtcaaatctgtgaccaaaaatattttgtgctattttgtaggctttttttaactttgtagtgtcctttgaagcayagaaatttttaattttgataaaatgcaatttatctaatttttccttttgtttcttgtgtttttcttgtcatacctaagaatctattgccaaatccaaggtcacaaagaatcacccctatgcttctactaaaagtttagttttagaacttacatttaggttttaagtctatttgttgaaaggattattttttccacattaatagtgttagcaccatttgggaaatagttttggcttgctaatggcccttagtggaaactgaatacttaaccatgaacctataagttttcatggaatctaagctatccatcataaactgtaaataatatatgcaggccctgaaggcataattaagttacataaaacatggtccaaatgtccatagtcc

SEQ ID NO: 875810 - DNA, 586 bp, Homo sapiens
attcttaacattattaggcattctggaaatgcattttaaaatgaaaatgggtttttttttttttaaatctgagtatgctgagtaactggaacactcatatattactggtaggaatgaggaagtgtgcatctaatatggaaaacattttggtcatttttttaaaaataaagtgcagcaaatactcgtcatttctagaaactacactcctaggtttttacccaagtgaaataaaaaatatattcatatataaacctataygtcaatgtttatagtatcctttccttgtaatcaaccaaaactgaatacaagtaaaatgttcttcaactgtatacacaaataaacatttgtatatctacataattgaatacaatttggcaaaaaaaaaaatagtgatacaaacaataaaatgcctgaatttcaaatgcacgtggcagtagtcagactccaaaggctgttgtaatagttaactttaggcatcaacttaactgggctaagcgatgccccaagagctggaaaaacataatttctgagtatgtctgtgagagtgtttctggaagatgctggcatttgaatcaatagactgagt

SEQ ID NO: 875811 - DNA, 525 bp, Homo sapiens
tcctggacatttccagatcctacttcctggtatttctagacacaccctgggccagaagggaacctactttcttgaagggaaagacccagttctgggaaggattatcatctgttaaccaaagagcacttgggccctgaataatcagaggaaattcccaagtactatgtcaagggctttgggtgaaactctaacacttgctcacttcaggtgagactcagcacattcctagctgggatggctatgggatgagactctgtaaacttgagaaaagcagagaaaaaagtcttgcacctaacatrccaacatggccacagtggggtatagcaccaagcagacacctggggtcccaaatttcaggcctttactcttagacttcatttctggagttgtctggggccagatggcagcccactacgctgaaggataagtcacaggacaggtttttggctctagtctctgactcctgaacagcacctaaggacccacctggcactgaggagaagtcacctccctgaagggaaggac

SEQ ID NO: 875812 - DNA, 664 bp, Homo sapiens
tgcagcactttcaggcctatagtaggaaaggaaatatcttcacataaaaactagacagaaaattactgagaaacttcttaatgatgtgtgcattcatctcacagagttgaaacttcttttgattgagccgtttggaaacactcttttagtagaaactgcaaggggatatttggagcgttttgtggtctatggtagaaaaggatatatcttcacataaaaatagaagcattctgaggaacttcatgatgtgtgcattcatctcaaagwgttgaacttttcttttgattgagcagctttgaaaaactctttctgcagaatctgcaagttgatatttggagtgctttgtggcctatagtagaaaaggaaatatctttacataaaactagacagaagcattctgagaaacttctttgtgatgtgtgcattcatctcacagagttgaatctttcttttgtttgagcagttttgaaactctcatttgtagaatcttcaagtggatattttcagcgctttgaggcctactgtggaaaagaaaatatcttcacataaaaactagtcagaagcattctgagaaacttctttgtgacgtgtgcattcaactcatggagttcaacctttcttttgatacagcagtttggaaacagtctttttacagtatctgcaa

SEQ ID NO: 875813 - DNA, 583 bp, Homo sapiens
gcaagtgtatatttgaagtgctttgaggcttctggtggaaaaggaagcatcttcacataaaaactagacacaagcattctgagaaacttctttgtgctgtgtgcattcatgtcacagagctgaatctttcttttattgagcasttttgaaaaactgtttcatagagtgttcaagtggatatttggagcactttgaggcctatggtggaaaaggaaatatcttcatataaaaactagacagaagcattctgagaaacttcttaatgatgtgtgctttcatctcacaggtttgaaccttttttttgattgagcagtttggaaacagtctttttgtagaatctgcaaatgatacttcaagcactttgaggcctatggtgaaaaaggacatatcttcacatgaaatataaacagaagctttctgagaaacttccttttgatgactgcatacatctcacagaggtgaaactttcttttcattgagcagtttggaaacagtctttttgtaaaatctgcaaaggaatatttctgcgaagttagaggcctatggtgaaaaagaaatatcttcagataaaatgtagacagaa

SEQ ID NO: 875814 - DNA, 599 bp, Homo sapiens
tttgttccctattgtagaggaaatatctgcacataaaactagacagaagcattctgagaaacttctttgtgatgtgtgcattcatctcacacagttgaacttttcttttgattcatcacttttgaaacactctttttgaagaatatgcaagtggatatttgaagcgctttgtggcctatagtggaaaattttatatcttcacataaaaactagacagaagcattctgagaaacttctttgggatatatgcattcatctcacagacttgaaactattttgatttagcattttagaaacacccttttgtaaaatctgcaagtggatattttgagcgctttgcatcctctagtggaaaaggaaatatcttcacacagaaaaaagacagaagcattctgagaaacctgtgtgtgatgtgascattcctcccacagagttgaacctttcttttgattgagcagttttgaaacacactttttgttgaatctgcaattggatatttggagagccttggggcctatggtggaaaagtaaatatcttcacataataactgcacagaggtattctaagaaacttccttctgatgtgcacattcagttca

SEQ ID NO: 875815 - DNA, 618 bp, Homo sapiens
aaatgtccacttgtagattctacaaaaagagtgtttccaaactgctcaatcaaaagttaggttcaactctgtgagatgaatgcacacatcacaaagatgtttgtcagaatgcttctgtctagtttttatgtgaagatatttccttttctaccataggcctcaaagcactcccaatgtccacttgcagattccacaaaagaggttttcaaagctgttcaatcaaaataaatgttcaactctctgagatgaatgcacacatcacaaagaagtttgtcagaatgcgtctgtctagttcttatgtgaagatatttccttttccaccaaaggcatcaaagcactccaaatgtccaatcacaggtattatcaaaagggtgcttcaaaactgctaaatcaaattaaggctcaactctgtgataygaatgcacatattgcaaagaaggttgtcaaaatgcttctgtctggtttttatgtgaagatatttcctttttaccataggcctaaaagtgcacaaaatgtccacttgcagattttacaaaaagagtgcttccagactgctaaatcaaaagaaaggttcaactctgtgggacgagtacatacatcacaaagaagtttcttaga

SEQ ID NO: 875816 - DNA, 618 bp, Homo sapiens
aaatgtccacttgtagattctacaaaaagagtgtttccaaactgctcaatcaaaagttaggttcaactctgtgagatgaatgcacacatcacaaagatgtttgtcagaatgcttctgtctagtttttatgtgaagatatttccttttctaccataggcctcaaagcactcccaatgtccacttgcagattccacaaaagaggttttcaaagctgttcaatcaaaataaatgttcaactctctgagatgaatgcacacatcacaaagaagtttgtcagaatgcgtctgtctagttcttatgtgaagatatttccttttccaccaaaggcatcaaagcactccaaatgtccaatcacaggtattatcaaaagggtgcttcaaaactgctaaatcaaattaaggctcaactctgtgatacgaatgcacatatygcaaagaaggttgtcaaaatgcttctgtctggtttttatgtgaagatatttcctttttaccataggcctaaaagtgcacaaaatgtccacttgcagattttacaaaaagagtgcttccagactgctaaatcaaaagaaaggttcaactctgtgggacgagtacatacatcacaaagaagtttcttaga

SEQ ID NO: 875817 - DNA, 618 bp, Homo sapiens
aaatgtccacttgtagattctacaaaaagagtgtttccaaactgctcaatcaaaagttaggttcaactctgtgagatgaatgcacacatcacaaagatgtttgtcagaatgcttctgtctagtttttatgtgaagatatttccttttctaccataggcctcaaagcactcccaatgtccacttgcagattccacaaaagaggttttcaaagctgttcaatcaaaataaatgttcaactctctgagatgaatgcacacatcacaaagaagtttgtcagaatgcgtctgtctagttcttatgtgaagatatttccttttccaccaaaggcatcaaagcactccaaatgtccaatcacaggtattatcaaaagggtgcttcaaaactgctaaatcaaattaaggctcaactctgtgatacgaatgcacatattgcaaagaaggttgtcaaaatgcttctgtctrgtttttatgtgaagatatttcctttttaccataggcctaaaagtgcacaaaatgtccacttgcagattttacaaaaagagtgcttccagactgctaaatcaaaagaaaggttcaactctgtgggacgagtacatacatcacaaagaagtttcttaga

SEQ ID NO: 875818 - DNA, 618 bp, Homo sapiens
aaatgtccacttgtagattctacaaaaagagtgtttccaaactgctcaatcaaaagttaggttcaactctgtgagatgaatgcacacatcacaaagatgtttgtcagaatgcttctgtctagtttttatgtgaagatatttccttttctaccataggcctcaaagcactcccaatgtccacttgcagattccacaaaagaggttttcaaagctgttcaatcaaaataaatgttcaactctctgagatgaatgcacacatcacaaagaagtttgtcagaatgcgtctgtctagttcttatgtgaagatatttccttttccaccaaaggcatcaaagcactccaaatgtccaatcacaggtattatcaaaagggtgcttcaaaactgctaaatcaaattaaggctcaactctgtgatacgaatgcacatattgcaaagaaggttgtcaaaatgcttctgtctggtttttaygtgaagatatttcctttttaccataggcctaaaagtgcacaaaatgtccacttgcagattttacaaaaagagtgcttccagactgctaaatcaaaagaaaggttcaactctgtgggacgagtacatacatcacaaagaagtttcttaga

SEQ ID NO: 875819 - DNA, 567 bp, Homo sapiens
aaaataagatgagcacaataaatgtttaaaaaagaaataataaaaaatagttcaagtctagcttaagaaaagaaatataccacagtgtatgactggcagatcaaaggcatgaaaagaacagagaatagccacaggcaatgctttgattacataatcgtttcttctggactgtttaacttccctgtagagaataaaccaagttcctatgagacccattttcataagagacttgagcaccagagtcaattttgcctagcattagaagatgcgaggtattaatgtagctacactaatagatatttacagccatgcattaaaaatacatgtgtgcacccataatgatctggcacccagctaggagctaagtaacatacaagagcaaaaaaaaaaaaaaaaaaaaaaraaagtcaaaatgagtttcagaaactaagaaaaaaaagacattgtgaaaggataaagtccctgaaaacatttgagaaccagagaggccagcgtgattagaggctgctcagttgagttcaactggcatgacgacttcagcatggatatgtttaaatgacatcaagc

SEQ ID NO: 875820 - DNA, 588 bp, Homo sapiens
taggaagagaggaagtcaaactgtctctgtctgcagatgacataattctatatttagaaaaccccattatctcagcccaaaaactccttaagctgataagcaacttcagcaatgtctcaagatacaaaatcaatgtgcaaaaattacaagcattcctatacaccaacaatagacaagcagagagccacatcatgaatgaactcccattcacaatttctactaagagaattaaatacctaggaacacagcttacaagggatgtgaaggaactcttcaatgagaactacaaaccwctgctcaaggaaataagaaaggacacaaacaaaaggaaaagcatttcatgctcatggattgccaagaccagctcagtcagggagaccgtaacccagcggtgctagaggaattaaagacacacacacagaaatatagaggtgtagagtgggaaatcaggggtctcacagccttcagagctgaaagcctcaaacagagatttacccacgtatttattaacagcaagccagtgataagcattgtttctatagattatagattaactgaaagtattccttacgggaaacaaagtgatag

SEQ ID NO: 875821 - DNA, 591 bp, Homo sapiens
ccaagtatctggtactacaggtacccgccaccatgcccagctaatttttttttttttttgtatttttagtagagacggggtttcaccatgttgatcaggcaggtctcaaactcctgacctcagctgatccacctgccttggtctcccaaagtgctgggattataggcatgagccaccatatctggcccttatattaawttttatgtagttaaaatatttttaattctcactggtcttcttttttgaccaatgtgttatttagaagtctattaattgtgaaatatttggtaattttctggctacctttttggcatttctttctagtttaattccattgtgatctgtgaatatatttgttttatctctattctcttaaatttatgttggattttacatcttaggatatggtttcatttggtgaatgttccatgtgacctcaagaagaaggtgcatttttctggctgttggttgctgcatttcttatatgtcaaatagctcaagttcattgacagtgttgttcaggtcaactatatctttattgattttctgcctgcttgatttgtcaattactggaagaggagtattgaagtc

SEQ ID NO: 875822 - DNA, 612 bp, Homo sapiens
actgaatcctcaggatgacagaaattactagtaaaatagagtttgatttagactaatattaaaaatggttttttgaaaatatcaatgaaatagatagaccactagccagactaataaagaagaaaagagagaaaaatcaaatagatgcaataaaaaatgataaaaggatatcaccatcaatcacacagaaatacaatctaccatcagagaatactataaacatctctatgcaaataaactagaaaatctagaagaaatggataaattcctggacatatacatccttccaagactaaactaggaagaagccgaattgctgaatataccaataacaagttctgaaattgaggcagcaattaatagcctaccaacaaaaaaaagcttaggatcagatagattcacagccgaattctacaagatgtacaaagaggagctggtatcattctttcygaaactatttcaaacaatagaaatagaaggaatcctctctaactcattttatgaggccagcatcatcctgataccaaaacctgacagagacacaacaaaaaaggaaaatctcaggccaatagcccagatgaacatggatgcaaaaatcctcaataaaatact

SEQ ID NO: 875823 - DNA, 518 bp, Homo sapiens
ctgcttgcataggtctatatggttatagagaatttggggaatactgattcacttgattttggaatcttaggtgagtactcttttgtataagaatttgtttaagacattgttataaattgttacaaatatccttattggagacaatttctttttcctaaagataatccattaaataaacaaaacggcaacataatcttttccatgtsgggtgctaaacttggtaataaaggtaacatttttgcttgaactattcaggcagagtcctgtgtttaggagggctgctaaggcagaaaataaggttgaagtaacagtggctataaggaggtgattcacatctccaaaagatttaataagatatgtcaaaactaaaattaattttcctataggaagttgatatggtttggctctgtgtccccacccaaatctcatattgaattgcaatccccatatgttggagaaggggcctggtagaaggtgattgagtcatggaggcggacttcccccttgttcttcttgtg

SEQ ID NO: 875824 - DNA, 582 bp, Homo sapiens
ccctatcacttcctgttacacaaattaaacgcagatttggtcttttcacatagtcccatatgttttggaggctttgttaatttctttttactcttttttctctaatcttgtcttctcacttcatttcattaatttgatcttcagtcagtgatatcctttcttccagatgactagggtacrtctgttccttaggccctcctgccagacagctcttcccagggcccctgcctgcaaacaggaaggagggtgtgcatagcagcagcctccactgtccagcctgggtgctttactaacagatgcacttaagtactttgctgggggcctggatcattttggacctccaaatgtaaccagtaccttatcccaaggggccagaaaaaaataactatgagctggttcctgtgcctcagggttgcagtgcacagctccagagtactgagctaagatctgtgcctgacacttgagcaggaaaggagccctcactctcagaatactgacagggttgagaaacatgggcttatgggccaacaagggagcagggaagccatccctttgtagggctagtccagaagaagtgtggcc

SEQ ID NO: 875825 - DNA, 660 bp, Homo sapiens
caccaacttcggtaaaatataagctttgattatcttacctagaattttgcagtgagaaatataaagataaatgttcttttttgaacttcagtataaatgtaagttttatgtttcatattttaatttggcattagtttagaattgaggtttagaatggtatataacagtacttatgtagttcgattgtctaaaagtcttaatataatagtagagcgtaagaagagggactgatggtaaacgagccttctgaaagttccttttatactcatttaaatagtattcatcaaacacttactatatgtaaggtactagtgacacagcaatgtataaagcagctgtctttcttgaaactttttactagcaccaaratagtttcaagaacctgaaacgctgtcattcttataatatctttcctcacccatgtccagcttcagtgaatctaggatttctccaacacaaatgttgctgtgagagaactgagtggatctgcatggcctagttaaatgccatcagttctattcattattcctctaagcacacataactcagaatatttctgactaaatcattgttataagctgtggattcaacactcaacttaaaaactcaactcttcgccatatagattcaataattattctttctccacccactgcgaga

SEQ ID NO: 875826 - DNA, 537 bp, Homo sapiens
atatgacatcccttttctctttttaaacaatttcttgtataactcacaggcaaagaatttggtggaattatctgcatttagaaggccattcatacctcacttagagctactgatccaacctatttctttgctgactatttcaaatagggcccaakataaaatgtagtcttccctgcatatgggctatgcaatcaagccaacccagtagtgtttctacaaactctgttgtatagtgatgttctgtggcaagccccatagtagagccaaagtatgaactgagttacagagtaaggatatgaccttctaaaataaagacaaaatatctccaataactctagacactttatctttctcactaatccttccacattatctctttgcagagattgcttttggccaatatctgaactgaccctgcaatagtttggccttgtacttccccctcactcataaaaattgagattccatagaatagaatagtagccagatataatgaatggcatgagaaatctgaatggtcctaggggtgtatttcat

SEQ ID NO: 875827 - DNA, 644 bp, Homo sapiens
ttatcagcagcatgaaaaagaaataatacagtaggctatttattactgcctcaatttcagaacttgttaatgttctattcaggaattcaactttttcctggttcaatcttgggtgggtgtgtccaggaatttatccatttcttccagattttctagtttatttgcatagagctatttatagtattgtctgatggttggttgtatttctgtggggtcagtagtgatatcccctttatcattttttattttgtctatctgatttttctcttttctttatcagtctagctagcaatttacctattttgttaatttttcttccaaaamccacctcctggattcattgatttttttgaaggatttttcatgtctctatctccttcagttccactctgatcttggttatttcttgtcttctgctaactttggggtttgtttgctcttggttctttagttcttttagttgtgatgctagggtattgatttgagacctttctagctttttaatatgagcatttagtgctatatattttcctcctaacactgcttttgctgcatcccagagattctggtacattgtctctatcttctcattggtttcaaaaaacttcttgatttctgccttcatttcattatttacccaggag

SEQ ID NO: 875828 - DNA, 638 bp, Homo sapiens
aattattattaggcctatgaaataagatacaaggcaacacgataataatggaaggcttcaatacttcactgacagcactggacagaccatcaagacagaaagtgaacaaagaaacaatggactttatgccttagaacaaatggacttargtatttacagagcgtgctacccaacaacagcagaatatacattatttttgtaagtacatggaacattctctaagatagaccatatgacaggccacaaaacaaatctcaataaatttaagaaaattgaaattatatcaagtatcctatcacaccacagtaaaattaaactggaaattaactccaaaaagaaccctcaaatctatatatatacatggaaattaaataacctgcttctgagttatcattgggtcaacaatgaaatcaagatggaaatttaaaaattctttgaactgaacaatattagtgacacaacttacaaaacctctgggatacagcaaaagcaatgctaagagaaaagtgcatagcattaaatgcctacatcaaaaagtctgaaaaagcacaaatagacaattaaaggtcacacctcaagaaactagaaaaacaagaataaaccaaacccaaacccagcaatagaaaataaataacaaa

SEQ ID NO: 875829 - DNA, 635 bp, Homo sapiens
cagagaatggtttggagcctcctcaaaaatctaaaaatagagctactttaagatccagcaatcccactgctaggtatacacccaaaagaaagaaagtcagtatatcaaagagatatctgcgctctcatgtatgttgtagccrtgtttcaatagtcaaaagttagaagcaaactaagtatccattaacagataaatggataaagaacatgtagtacttatacacaatggagtactattcagccgtaatgaataatacatggatgaaaccggaggtcgttattctaagtgaaataagccaggcacagaaagacaaacattacatgttttcacttatttgtggaatctaaaaatcaaagcaattgaactcatggagactgagagaagaaggatgattaccaagggatgggaagggcagttgggggtatcatgggaaggtggacatggttaatgggtacagaaaggatagaaagaatgaacaaggctagtatttgattgcacacagggtgggtataaccaataataatttaattgtacatttaaaaatatctaagagtataattgaatggtttgtaacacaaaggataaatgcttgaggaaatggatacctcattttccatgatgtaattattacacat

SEQ ID NO: 875830 - DNA, 635 bp, Homo sapiens
cagagaatggtttggagcctcctcaaaaatctaaaaatagagctactttaagatccagcaatcccactgctaggtatacacccaaaagaaagaaagtcagtatatcaaagagatatctgcgctctcatgtatgttgtagccgtgtttcaatagtcaaaagttagaagcaaactaagtatccattaacagataaatggataaagaacatgtagtacttatacacaatggagtactattcagccgtaatgaataatacatggatgaaaccggaggtcgttattctaagtgaaataagccaggcacagaaagacaaacattacatgttttcacttatttgtggaatctaaaaatcaaagcaattgaactcatggagactgagagwagaaggatgattaccaagggatgggaagggcagttgggggtatcatgggaaggtggacatggttaatgggtacagaaaggatagaaagaatgaacaaggctagtatttgattgcacacagggtgggtataaccaataataatttaattgtacatttaaaaatatctaagagtataattgaatggtttgtaacacaaaggataaatgcttgaggaaatggatacctcattttccatgatgtaattattacacat

SEQ ID NO: 875831 - DNA, 662 bp, Homo sapiens
ttacaaaacattctcattcttttctgtctctggaactgaaacaaatcatccaaggttattagaacagttattcagatcttcactttagagaaatagctaagtctccgaaggatgattgatttaagctcttagagccagaatcctctaggttcactgattcatttactctttctagaagaaggtatttcccctgctacacatgttatatttttgcaagrgaagtaaaataggaatggaaacacatcccaaacaccattcccaactatttctcttagctttttaggagctaaaatttggttaaggaaattaccagatgacagcacttttatgttgaaaaatgcaaccatagctgaaaagaactgttgtgagtccaagagaacaaatacattcaatgggaaatgtggtaaccatacttgggttattctcaccacataccctacgtgaggagacaagtttgtaaaatcaaggagtttgacagtatagcaaatcaggactaacaacagcataagcaagaagcaggatgatgtgtgcagaatatattaaatacctaccaacctaggctagttactcaaagccatataattccaaatgttttgtcagaagataaatcagtaggcttgaactactccacacagggtgtgctgtgtaacaaaatcaaaatc

SEQ ID NO: 875832 - DNA, 569 bp, Homo sapiens
ctacaatacttcactgatagaatacatcaactagactaaatacatagaggatagaagttatagagttaaaataataaagaaaaatcatgttcacgaaacatttaaaaaattaatcagcacatgattaattttttagacatgacaataaaaaggaaaagttaaatccaacaggtaaaaatcgcatgggccacatttactgaccataaaataatcagtgagagattaagaagtaacaataacaatgccaaaactctaaacacttaaaaattgaactctttcagagatctcttgagttaaaaaaaatcagaaatggacactgaaattatagacattgagaatacaatggagtataaccaaagctatatctagatgacaatttctaattctcagttgttaatagcaaataaatacagcaatagaaaaaaaaatgcrttgaagttaagagcctaaaaatagaaaggtaaagcaaatcaaaagagaaaaaaaaataagagcaaagcatcaataaaaccaaaagaagaaattactgaattagaaagtgaaaaatcccaaagaagcagtgttaataa

SEQ ID NO: 875833 - DNA, 603 bp, Homo sapiens
ttttatgttaatcgagtttatcctagaggctccactcattctcattaagtgggatggaatatgccagtttctaatttgattgtttcagaaacttattttagcatcattttcaattctgaatcaaagagccaaatctaaaatatgcctctgtgaggagatgggtagttgtctgccgtttgatttagaagaaatcctcagattttatcactaggatttatcttcagatttaaaacttaaatataactagagctctatttgatgctgtcatagagttcatgcaatgtgcagacttataataaaatcctttcagtatttcaatagctaaagccttttagatagagtctccattgaaatttccattgaaattgccccctatttggttctactctgcatgtaacttttctggtctgagttcctccaatatatggtrgtagtactgtgatcttgctagatttgatctggggactctgccataattctaacaaactgatagcaatgatgccactataattatcacaatatttatactgggaaagtatataaatatactgcatagcaataaggatttgcttaaaaaataactgttatcactactgatttgta

SEQ ID NO: 875834 - DNA, 601 bp, Homo sapiens
cttatgctggaaacccttgaatcttcagcccaagaaagcctcagattttcacttcctcctgcccttgtagtctactaactgtgtctgtccctatccaggatttccccttcttctgtgtctgcctgtggttcaggaaaacctaactctctcttcttcatcaccaggggagttttgaagaaaaacatcctgtctccaccatttccataattccctgccttgacttgaacataggaaagaaaccagtaacatttctgaaaccacartttgcttctctcttttttctccttggatcctgaagccttgtagacactggtgcccgagaaccagggaaaggacaggtcaggtttcacctctgaggtgggccactgcagtgaaggaacatatattagggtgcacttgttcatggcttcacatgaaagcccgcgatggaaggggtgttggggatatgagtgctggcttgtacagagcctggactcagagatgcagtgggtgtatatgagggactctagaaaaagctgctggggcagaagagctgaaagtcccattctgctagagaggtaggaccaagatgcaaatggatttaatgtccttattgacgtct

SEQ ID NO: 875835 - DNA, 648 bp, Homo sapiens
taagttaaatatgtagatcagggatgtccaatcttttggcttccctgagccacactggaagaagaattgtcttgggccgcacataaaacatgctaacactgacgatagctgataagcttaaaaaaaaattgcaagaaaaatctcaagttttaagaaagtttacaaatttgtgttgggctgcattcaaagctgtcctgggctgcattygacccgtgggctagagttggacaagcttgtagatgatttcaggttataaaaccagaagtacaattcaacaaaaaaggagtaagtcatcaatataaatattagcaaacgagatattgctacatctctatttaaagtaaaatacaaccgattttaaagttcctgaaaccacagccatattttgacatttcacaaagaatggttctaatctactagagtacatttggctaaatagataacttacctaaatttgctccaaagctaaatcacaagtaaacatatttatgtttaaaacacagaaataaataacttaagatttttatccaagtggtcagtgttgtattggaaagatatatctataaataaactttgaactgatttcaaacttagaatttatgtttttatatttttccactaatatcattatcacttctgtaattttca

SEQ ID NO: 875836 - DNA, 661 bp, Homo sapiens
ttccatttgatggagtgattcatttacttagaatattttaatacctttctagtgctgtaggataaaggacaataccacactccctttactttctgctccagttataatagattactttcactttgttaaatatgccatgatctcttttctccctgggccttttgaacacatgatcttctctgcccttctactagtacgcccctgcaaacaccctcatctctactgcccccagctgcccttcaccttactatcctctatgacctgaataacttcctacttatacttcttaaatgcttcgaggaggcttttttggctccccaatatgttaggtgtatttgatacaaattcctaaacaactccrtatttctcttttcaaaacacttatcatgcttgaaatgtataattaaagtccacctttcaaacaagattacaaattccctgtccacagggaatttgttttgaatttctgactcgacttaaagacattgcctggtatatagcaggtgcttaataaatattggctgaatgaacgaaataaagcattccattccatgtgcatattataaacatatttgatgtttttgcccttcaaccaagatcatagttctctgagggagggaccatgttttatacttgagtgtccttagcagtgcctacaaaa

SEQ ID NO: 875837 - DNA, 661 bp, Homo sapiens
ttccatttgatggagtgattcatttacttagaatattttaatacctttctagtgctgtaggataaaggacaataccacactccctttactttctgctccagttataatagattactttcactttgttaaatatgccatgatctcttttctccctgggccttttgaacacatgatcttctctgcccttctactagtacgcccctgcaaacaccctcatctctactgcccccagctgcccttcaccttactatcctctatgacctgaataacttcctacttatacttcttaaatgcttcgaggaggcttttttggctccccaatatgttaggtgtatttgatacaaattcctaaacaactccgtatttctcttttcaaaacacttatcatgcttgaaatgtrtaattaaagtccacctttcaaacaagattacaaattccctgtccacagggaatttgttttgaatttctgactcgacttaaagacattgcctggtatatagcaggtgcttaataaatattggctgaatgaacgaaataaagcattccattccatgtgcatattataaacatatttgatgtttttgcccttcaaccaagatcatagttctctgagggagggaccatgttttatacttgagtgtccttagcagtgcctacaaaa

SEQ ID NO: 875838 - DNA, 661 bp, Homo sapiens
ttccatttgatggagtgattcatttacttagaatattttaatacctttctagtgctgtaggataaaggacaataccacactccctttactttctgctccagttataatagattactttcactttgttaaatatgccatgatctcttttctccctgggccttttgaacacatgatcttctctgcccttctactagtacgcccctgcaaacaccctcatctctactgcccccagctgcccttcaccttactatcctctatgacctgaataacttcctacttatacttcttaaatgcttcgaggaggcttttttggctccccaatatgttaggtgtatttgatacaaattcctaaacaactccgtatttctcttttcaaaacacttatcatgcttgaaatgtataattaaagtccacctttcaaacaagattacaaattccctgtccacagggaatttgttttgaatttctgactygacttaaagacattgcctggtatatagcaggtgcttaataaatattggctgaatgaacgaaataaagcattccattccatgtgcatattataaacatatttgatgtttttgcccttcaaccaagatcatagttctctgagggagggaccatgttttatacttgagtgtccttagcagtgcctacaaaa

SEQ ID NO: 875839 - DNA, 679 bp, Homo sapiens
tctgtactgcatcaaatcattcccctgcactctagtttccagttgggtttggccaatggtaaacgatggcaggtgaccagagtgggagaggagagaaagtctggtttattcattctcttggtttgctctctgctgatctgtgatttggcagtggcttattctcccacctaaggcaagagatcccacagtgggcccttcccactgttaaagctttccctaggttccatcccttcccttgctccatcaagattgacagtgttagtggttcccaccattgctagtccctagggcttcaccatcccttagtggtttccttaagattgcccacaactttgttaagaagtctcccactgagtgtggcattaagttcctgctggggccctgactgatatgctaatatacataaaggccactatrtagtccctttctttgagtcagtgttgtagaataaacagaccactggactgtctactaaataaaataaaaccctgcattctatattcctatatttctataagactaaaaatggcattagtgccactatttcttgttcttcttgcacactgggcttccagctgagaatcagtcagtgtggtgtgtgaaaggacaaaatgaacatcattcatctctatgagttaactagtccagtagttacttttcaaatggagttgcatctgta

SEQ ID NO: 875840 - DNA, 682 bp, Homo sapiens
tacaattgattctggcaaggatcattaatgatttctaaatccattcaatgaaaagttgttggaaaacggtatgctcatatggtctaaagtgtcaccctacagataacttgttaattaccaaaggaaagttttcctttcaacgaaaagatttacagccaacaccttaactaagtaatttaagataacattacaaagaataggataaactactattttgtaccacttaatgtgatacagctcttgccaaaaacatttaacctaatctaatcatgaggaaacaatcagaaaaattcagattgtagaactctaaaaaatgttaacatcaggacactttagaataaaggatgttaaagaaacatgaaaactaaatgcaatgtgtaatactcaattggatcctaggagagacaatctataaataaaattgttgagaaaattgggaaaatgtgaatataaactacatytttggtaatatactttcaaagttaattttggggggtactgtgactatgtagatgaatcatcttctttggagatacatgctgaaattttagaagacagtggaatttaattttaaagagtaatcagtgaatctagatttgttttaacatcttgctagtttccaacttttctggaagcttaaaactttttaaaatccaaagttggtggaaaaaaatctagattt

SEQ ID NO: 875841 - DNA, 691 bp, Homo sapiens
cctctctgactttcaattccctaatctgtaaaaagtaaagtctaagaattagaaacaaggtaaaacatagtgtctggcactctgtaagtgttaaataaatgttaattttatgttcgaccactgtttgctaaataattttgaaatgtatccttttttggttgattccctgggaattcagttaggaagagaggaagtcaaattgtctctgtttgtagatgacatgattgtatatttacaattgtctcggcccaaaatcttcttaagctgaaaagcaacttcagcaacatctcaagatacaaaatcaatgtgcaaaaatcacaagcattcctatacaccaataatagacaaacagcgagccaaatcatgagtgaactcccattcacaattgctacaaagagaataaaatacctaggaatccaacttacaagggatgtgaaggacctkttcagggagaactacaaatcaccgttcaaggaaataagagaggacacaaacaaatggaaaaacattccatgctcgtggataggaagaatcaatatcatgaaaatggccatactgcccaaagtaattatagattcaatgctatccccatcaagttaccattgactttcttcacagaattagaaaaaaactactttaaatttcatatggaaccaaaaaagaacccgtatagccaagacaatcccaagca

SEQ ID NO: 875842 - DNA, 673 bp, Homo sapiens
tcaaatttcatttaattctcacagcaaaccctcatcttagatattacaattcccattggatggatgtagaaactgagttgcagaggacttaagtgacttgcctaaagccactggacgtaagtagatattcagcacatatgtactggaaaatcaatggatgactgaatgaatatctggaaggcactgaattagccatgaaagcagtaacaccatcataaagccattctctgaaccctgggaattcatgacctggggtgatgtataaagcatatctatgaaatgaaaaattttttaaaaaacaagttaggagatgaaggtcttaaaatttcttgttctcatttactagactatgaatccctgagctttaaacaccattgagttgctcacagcatgagctttgcagccawcaaggccaagttcatgtcatgattctctattttctagctctcacagaaactttctgaatttttttcttttactatgcaaaatgggaatcacagtagctcctgccaaggaacttgttaagattaaatgagttttgagtgtttgaagcacaggtctaaatcctacctctcagtaggtatgcccacattattactgaagtgagtaacacagatcaaagaaggaagtttaaatcagaagcacctaaaactagaaggagctgagattctgt

SEQ ID NO: 875843 - DNA, 590 bp, Homo sapiens
tttttgttgttgttgctcttaaaaagatagtatcttcctctctccacacaggactattggggatgtttttcttttatttatcttgatgaaatctaatatatgcattggctgaataacaactgtagaaattgactgtcatttttgaggagaaatgagaaaatatgaatggagccacagaaagtatcagtaaagcaaatagctagctttcttaacccagcattatctgacactgtgattaaatgcagtattcttgtgttttgaacagtccttcttccctcttcctccacccacattctgtcctccataactaatcaggaaacatctgaaacatactgggaatagagtgaytctaattagatgttttttgcctgacccaaatagtttttggcttttatatattaaatgttattacacagttctctccccacaacataaggagttatgaaataagtctccttttccttgtcctatttggaaataggtaaatggcaaaggcagggcccccagtgccgtcaacttgctgaatctgggcctggaagagaaagccctagaccagggacatgtgccaccactgcttcctcgctcatctg

SEQ ID NO: 875844 - DNA, 612 bp, Homo sapiens
cctaatctggcactttaaactttaagatttattgcgggcattcaagatttgaaattgactgcatttattgaataaagccaggaagccattttattctaacggttgggctaggttaatctgtaatgaaatccagtctaagagtagaggggggagttcaattcagttagacatttgagtactgtgtgccatatagatgctagatactgaggatagggagatgactaggcctcacaccatactttcatggagcccacagtctactaagaaggatggaaaggaagaaataattatcacaagggatgcatcctcctttcttctgtaagtatgtgaagaggacttaacttccaaagatatattcagttcaaaaagcttttactgaagacctrtgattatgtgttggaaactggtactagtgttagggactgagaatacataaatgaagcctttgcttctgtcattgagatgaaggagacaaaagaaacaaatgtttacaatagagtggaaatagatatatgagcacagtgaatagaaacacaacttgctctggaggagttagagataacgagatattgccaattgatgcattcaataaatgtttaataagtgcgctca

SEQ ID NO: 875845 - DNA, 603 bp, Homo sapiens
ctgcctgtcgtagtgtgctcaagctggccataacaaaatatcaccgactggggtggcttaacaacagaaatgtatttcctctcggttctggagtctggaagttcaagagcaggatgccagcatagttgatttctggtggaggctctctttttgctgtgtcctcacatggtagagagaggaatctctctggtatttctctttataggggcattaatcccgttatgatagctccasccttatgacctgatctaacccttataacttcccaagagccccatcttcagataccatcacaaagtgtgtcacagcttcaacagataacatttgagggatcacaaacattcagtctctaccactgcctaatagtttaaataaaactagttaggattaatggaaataatagtgtaacctttgaagtgccatctgattccattttagtattactacttagtcattaatggatgcagaacacacacataccacacacacaaacacacatgcacacacacacacacacatatgtctgtatattagcttacaagcattattcatagagtagacttttctataggtcatcaagaagattggaactgtccatatttt

SEQ ID NO: 875846 - DNA, 591 bp, Homo sapiens
gattgaggaagctgtgctctaagggcacagtacagaaggtagcttggagtgtgctatgtttccgagagccttttaagttgggtggctgagtaaaggagggtggaggcaggctgttctacttccaatccatggataaatctcattttctcaatgtaatgcagaggctgttcttctatgattggcaaacactatttgttcttatcatggaaacagcatactgctatcaagaaatagggaaaagacagtaaaaaaaaaatacgtggaaagaatatggaataccatgcagccataaaaaatgatgagttcaatgtcctttgtagggacatggatgaagctggaaaccatcattctcagcaaactatcgcaaggacaaaaaaccaaacgccacatgttctcmctcataggtgggaattgaacaatgagaacacttggacacaggaaggggaacatcacacaccagggcctgctgtatggtggggggaggggggagggatagcattaggagatatacctaatggaaaagacgagttagtgggtgcagcaaaccaacatggcacatgtatacatatgcaacaaacctgcacattgtgc

SEQ ID NO: 875847 - DNA, 623 bp, Homo sapiens
tcagtccagtagacagtgcttaagagtaacagctggctgcagggtcttctcctctgtgtacttgtcctcgacaggtgcagaagtgacaaaatgccaaaagtgccctgtcccagtgtgtactagtcttcagcaggggcagagctgctggagaaacctaagaagcagcctcattcagcccacgttccttgggccccaacaggatgaccactgctggatctgcagcagtgcactaggaaggggacagaggrcaagagatgaccacctctctgaatctgttcccaggctttggtgtgcccctttcagcagctgatatagtgatcgtgtttcctttgacccaaggggtggctttggcaagctgtattcctccttcccttagggctggtcctcaccaaagtttaggtctcctgggggatggggttcacctccctcttgtttcttggagctgatggagtactctctcaactgaccaagggagcaggctgagacacccagcaatgacacacacagaccagttccaggttgcaaagctgttcttggctgcaagtctcaccatccttgagaaacctctgctttagcaactctcttcccactacagtcctgcaagaggagagagcctaattcca

SEQ ID NO: 875848 - DNA, 631 bp, Homo sapiens
atttactgtaactatttcaatctatttgttgagtttagctgataaaatttggaatttccttactttgttatcttaaatttctttcagtttttttttaaatacagctattttgaattctctgtctgaaacatcacatatctctttttctccaggatttgtccccagtgccttatttagttcacttggtgaggtcatgttttcctggatggagttgatgctagtagatgttcttcagtgtctggacattaaaatcttgggcatgcaacaccatatgagaggtttaaaaaataaaatttaaagagagaaaaggtgagtatttattgtagtcttcactgtctgggattatttgtagctgtctttcttgggaaggcttttcacatatttgaaaagagttgggtgttgtgatmtaagccatatctgctttatggagcaccttatacccaataatgctgtaattcttccagactcagagaagtaccaccttgacagccttcaacaagacccaggagaattttctggattactagctacagactctttccctacccttattttctctcaaagatacagtctttctctctgttctaagccacctaaagctgggagaagaaagacacaagcacctcaggcc

SEQ ID NO: 875849 - DNA, 638 bp, Homo sapiens
cttggaataaagataattatagggctaaaagggttttctctagaggcaggttataggatttttttgtctgactggaataaaacaaaattaatcaatattttctgcaaccaatggcttttgacttagtcatctattaatatctatcaatcactataacctcagtcctatttcctccattcttctttttgctatcataaaaactggtccatttttttcctgttagatctatatgtttcacctcttttcttttcatccaaacaactggtcatcaacttagtacagataatgcaattgatccaaaccctacagaactcactgtttcaatttacataacttacataactgtcaagctgaaatcactctcaaattttttaattcaaaattttaatttcatttaatcatatttatttattcattaattaatttattttgaaaataattttamcttgtattttacattcaggggtacatgtgccagtttgttacatgggtatatcccatattgctgaattttggggtatgaatgatcccatcatccagatgctgatttggtatggtttgactctgtgtcaccataaaaatctcatgttgaattgtaattcccaaagtagggggaatgacttggtgggaggtgatta

SEQ ID NO: 875850 - DNA, 740 bp, Homo sapiens
tctgtcatctgtcatgcgaatctagttccacagaagggcaaattaggaatccattacctggagtaaccattcctcatgcctagaagaagaatctctacaagtaggattcttgctgttcaacatgcccttataaattggagtcagactgaatcattttttcttggcaatggacaagaaaatcagactgtaactatagctttgtcactgagaattggtcaaccatttcaaaataggtaagttttctccctctgatgcttctactggggcttgaaggattgataaatatgcttctattctctgtcagaatttkgaactaagggagagatacgcaaagattcaggcagatggagatcaagatggcaggtttatttttaaaggagctatggggaatctttggggtaacaatagatttttctgttactgtagacacacataccttcccagccacaagtggtgctagacaactgcacacctctccatcccacctcccatcccaacagatacataggcattttcttcagatgttgatgaaaataattattttatcactatatccagataattccaaaaagcaatatgcttgttgaggtgaaataatttttctaagatacaaacagaaaatatatacgattgaaatagacactaggtgatatttcacatatgcaatatgagctctgtttctttgacaagacagatgaatgaagaattcatgtttgaatgattggcattagtctaaagta

SEQ ID NO: 875851 - DNA, 740 bp, Homo sapiens
tctgtcatctgtcatgcgaatctagttccacagaagggcaaattaggaatccattacctggagtaaccattcctcatgcctagaagaagaatctctacaagtaggattcttgctgttcaacatgcccttataaattggagtcagactgaatcattttttcttggcaatggacaagaaaatcagactgtaactatagctttgtcactgagaattggtcaaccatttcaaaataggtaagttttctccctctgatgcttctactggggcttgaaggattgataaatatgcttctattctctgtcagaatttggaactaagggagagatacgcaaagattcaggcagatggagatcaagatggcaggtttatttttaaaggagctatggggaatctttgkggtaacaatagatttttctgttactgtagacacacataccttcccagccacaagtggtgctagacaactgcacacctctccatcccacctcccatcccaacagatacataggcattttcttcagatgttgatgaaaataattattttatcactatatccagataattccaaaaagcaatatgcttgttgaggtgaaataatttttctaagatacaaacagaaaatatatacgattgaaatagacactaggtgatatttcacatatgcaatatgagctctgtttctttgacaagacagatgaatgaagaattcatgtttgaatgattggcattagtctaaagta

SEQ ID NO: 875852 - DNA, 607 bp, Homo sapiens
taattatgttgagagtaatcatcatgtaattgcacataattatttgtaccttattaagtgctcatatgattaaaatatttctggtcaaataaaaattatccgtgagagtattttttggaggggggaaataagaaatgttgcttcctggtcttctgttctttgaataaggtaaagctgtctagctgacagtccataatgccccagataggatgaattagtaaggagagaagagacttagatttcattaatacaataccttgtacctccaatgaagttgagataataaacttcaacttccagcatggatgaacgctttccctgtagtagctataacaaaaaatattaccctattaagagtgtacactatgaatgtcattgargacaatgtgtttttcatgtccaacaccgccattagcaattttatactgaacttttatttttctcatagtactctctcttcaaaacttttaatattcacttatttacactcagtgttttttttaatttccagggactgtgtttagtgagatgatctacaggtataattccaaaagcacctaccaaatttgtttattcagacattcattaaagagcaactctatatact

SEQ ID NO: 875853 - DNA, 636 bp, Homo sapiens
aaacatgtctttgtttgaagcattatctcaattgtgaaatgtggcttagaacaattctagatagtatagtggtaaaaaacttcaactcaggagtcacatagatatgggttcaaatctcatctccaccatttattagccatgtacccccatgaaaattatttwaaacttttagtttccttagctttaaatggaaataataaggctgtccccacagaactgtcctgagggttaaagaatctttccagagtgacctgtacttagtaaatagctcccaaaattgtggaattctgtagctgtttaaatgagaagagatttttattaagaggtttccaaatttgtcctctttagcatgccattattgtcactttcaatcacttgggttttcagtactattattttattattttttcttcatatcagctttaaatttattctcttttcatacttagtcttgtcaaagccagattgtctcggaggtcttgatgttagacgacctagtatctcaggtttctctttgtaaaacaattgaattaatacatggatgtggttaggaaagtcatttgtggtcacataaacttcagaatcctttatgtccagttcttctctgtcacttgggtattcctgttataagagaga

SEQ ID NO: 875854 - DNA, 634 bp, Homo sapiens
tatgttctcaaacaagaacaacataattattttaatgaataaaattaagttttcatttcaagtattattccactggatagggtaaatgtaatctctaccttctttctgtgaagaagaaaaaatatatatgacaaatttttagtaatatttgaaaaaacaaaaaactttgaccratgtctgtaggattattataattttaattgttattgataggtaggctggagttgcaaatggtgccaatagctgtaaatagagctttagttttacatcagttgctgtccttaatgtaagaaagataggtgtttagatacatactaaacttttgtagctgactaatgtatatacagctggtaactgaccatattaaaaccaaacagatggtgatgtatttgtgattcagaattaatgtgaatatataatttttcataatccataggaaacattttcttacacatgtcatcatttatgaaattgtatttgttttaggggtatatgagaaaggtcagggattattttacatttctgaatatattagcaatatgaagaatacctgtttagtctctaccttctggttgttatcgatattatcctgagagtaaaggtagttaggtatttaatatagagatgaattatt

SEQ ID NO: 875855 - DNA, 614 bp, Homo sapiens
aaatgtcataaacaattgtaacatttaaattcttaaatttaatagtaagatatgttttataacatgtatctgagtttttatattcattcattgttatattccatcaggagtcatgtgaatacttaaaaatgcagagcaggtaacttttaagatctttgattatacactttaataaataggttcagtaaaattcacatttcttgacatattcattactcagcaagaattgcatacatctttttaattattcccaaacattcaataccttcaactcttaacaatgaattaattcctttgaagttattatacacatttaataaaattatatgtaactacgcagaaaaataatataagcttctcttttgatcctaaaagtagctaattcaactgtttctttctgcagttgtaggaattgttcacagattcttcttgaagttttgcacttttgtgtatctctacttgttttattggttaagcaaagtaaaacttctgaatggcttttgaaactgtacacaaaastcataaacacaacctttaaacaactattgttaaagtaagaaaaaaacaattaacttataaatctttttcctcttttcagatgtaggtcacaaagg

SEQ ID NO: 875856 - DNA, 643 bp, Homo sapiens
aaaaattcatgatatttaatgttcaataactatgagaaggcttaatcaacctactgtaatattttaattaaaaatcattctaacgtcaaataaacggagaaatactgtccgtcttccataatagatacaatggatggtttaatgttaaataccctgagaagtcttacagctaaaaatttatcactgtttcaaacagaattgttcccatatctggatgatagaactcactcctcctatgtatttaataatcaktattctatgagatatattttgggagatacttagtagaagataaagtcactgtattttattagggatgaaactgaggctagggagatccctaattcatttgagatctaatatgtgggcaaaatagacagattggtgcaatatccagcacagtttaacaaacactttccgagtagctactttgtgccagttattcattctggcaataagacgaataatacagccaggttggtgaatatcacaattcatagattctcaggtgattgttctcatgttttcagaaaaaggcaatgacagtgtgtacactgacccagagggtgattgtcctgctatacttaattttccaataactcctattgcattgaaactgttgcaactattcttcagaagtata

SEQ ID NO: 875857 - DNA, 549 bp, Homo sapiens
gggctttcagggatgcatcactaatgtcctttaggaaatatgtctttgcataatcaacgtcattgaggagacttttataagaaaatgaaaaaaagaatgaatttgactttcccttcactttttttttgtagagccattgccgtttctgtatttggataggagagaaatgaagcattgttatttaatttagcccttattataacatattatgtagtctcttagggtggcatgttaccaaaaacaagatgttctattttaaaagttgatttagtattacttcttttttttaattcacaatacattatgtaggtaggtttttttttctgtacattacacaccacagaytgtattagaaaataatgttggtgtagttttattgaagccacatcatgaaacataagtattataaagagaaggctgttttcccatttcaatcagttgtctagttgatgtgtttatttttcatccaatttattttatatactaaaaaacagctcttaggaaagtgagtacatcaaactcagtttcattgatttaattttatttatt

SEQ ID NO: 875858 - DNA, 641 bp, Homo sapiens
tcaaggtaactagataatgctaaatccccagtctactttgtgccgtgtagttattctaatcgtattgaagaacgttgtccatttgtcagcattttacaaagtgtgttaatgacttctattcctgctaccttatttttctgcccattagaataaacagtgactttatgtcacataaaagtagccttatagcctttttaaacgtttatttttgacaggagttgatggtatggtatttatgagagctgagaccagaattaaaaagttgtaacacattgttttagtgaacraaacaaaagaacaaatattctgccacacgatttataccataattctagaatttactttatccttttataaattcaacagctaaaaaggtctactgactaatttttcttaattaaattattttcttgaaacagaatataagttcctgctactactactactaatctcatctttattggaatcagttaggtcatattgagccatgattactttttcatttttttttttttattgagacagagtcgcactctgtcacccaggctggagggcagtggtgccatctcggctcactgcagccttaacctcctggactcgatctatcctcccgcctcagcctttgaaattgctggtattac

SEQ ID NO: 875859 - DNA, 641 bp, Homo sapiens
tcaaggtaactagataatgctaaatccccagtctactttgtgccgtgtagttattctaatcgtattgaagaacgttgtccatttgtcagcattttacaaagtgtgttaatgacttctattcctgctaccttatttttctgcccattagaataaacagtgactttatgtcacataaaagtagccttatagcctttttaaacgtttatttttgacaggagttgatggtatggtatttatgagagctgagaccagaattaaaaagttgtaacacattgttttagtgaacgaaacaaaagaacaaatattctgccacacgatttataccataattctagaatttactttatccttttataaattcaacagctaaaaaggtctactgactaatttttcttaattaaattattttcttgaaacagaatataagttcctgctactactactactaatctcatctttattggaatcagttwggtcatattgagccatgattactttttcatttttttttttttattgagacagagtcgcactctgtcacccaggctggagggcagtggtgccatctcggctcactgcagccttaacctcctggactcgatctatcctcccgcctcagcctttgaaattgctggtattac

SEQ ID NO: 875860 - DNA, 592 bp, Homo sapiens
aaccaacccagatgtccaacagtgatagactggattaagaaaatgtggcacatatacaccatggaatactatgcagccataaataatgatgagttcatgtcctttgtagggacatggatgaaattggaaatcatcattctcagtaaactatcgcaagaacaaaaaaccaaacaccgcatattctcactcataggtgggaattgaacaatgagatcacatggacacaggaaggggaatatcacactctggggactgtggtggggtgsggggagaggggagggatagcattgggagatatacctaatgctagatgacgagttagtgggtgcagcgcaccagcatggcacatgtatacatatgtaactaacctgcacaatgtgcacacataccctaaaacataaagtataataataataaaaaaaagaacaaagaaagaaatgcaaaagatacttttaacaaaataatcaataaaacaaacaaaccactaacaaatctaatcaagaagcaaagggaaaattcacaaatacacaaaatcaaaaatgaaaggggaaggaaaatgactatcagtagagaggaaatttaagaagtctta

SEQ ID NO: 875861 - DNA, 608 bp, Homo sapiens
tcacacaattccctcatcctcctgatagtttcattatatctttttgttagagtaataattatttggtaataattagtactagaattactacagttgggtcatgtaatacactatgattacatttcttctatttctccttcttttttattcgtttagttttctgtcatatacaatacttcactacttcatgacccaagcccattgacagaactctaacattactctcagtagagtcagacttaccgagtaatctgtcagttccgttgttgtcctggagacgtccctatgggaatcctctactttctgctaaaatctagaccagctgctttctaggcttgagcacagcagtagacatgccatctgccttccctgtcctctgtggacatttcttcattcccatgttgcatatgctaaacttttctggtttactccattttgtagrtggatcatatcctccagcaatttcatgggaaagagtgcatggaagaaatagattgcctaagtataattctaggaaggtgatggttttcatcaggatatttaagtcattgccacattttcttctggcatccagaattgcaattaagagctctaatgccatacggatt

SEQ ID NO: 875862 - DNA, 664 bp, Homo sapiens
gtgctacatttacattgaagaaaaaaactacaactccatttttaaatataaaaagtcaacattgtttttaaatttagaaaaatcatcagggtgatgctatggttgaaatagaaggtgagagattcaacatgttttcatgtaaaaaataaaacaaatttaaacagtgcattgtatgcctcaattactttattgattaccttgctgaaaagaatttcttttttttttgtactttaagttttagggtacatgtgcacaatgtgcaggtttgttacataggtatacatgtgtcatgtcggtttgctgcatccattaactcrtcatttacattaggtatttctcctaatgctacccctccccctgcctcccaccccacgacaagcccccatgtgtgatgctcaccgccctgtgtccaagtgttctcattgttcaattcccacctatgagtgagaacatgcagtgtttggttttctgtccttgcgatagtttgctgaaaataatggtttccagcttcatccatgtccctacaaaggacataaactcattcttttttatgtctgcataatattccatggtgtatatgtgccacattttcttaatccagtctatcattgatggaaatttgggttggttccaagtttttgctattgtaaatagtgctgcaata

SEQ ID NO: 875863 - DNA, 664 bp, Homo sapiens
gtgctacatttacattgaagaaaaaaactacaactccatttttaaatataaaaagtcaacattgtttttaaatttagaaaaatcatcagggtgatgctatggttgaaatagaaggtgagagattcaacatgttttcatgtaaaaaataaaacaaatttaaacagtgcattgtatgcctcaattactttattgattaccttgctgaaaagaatttcttttttttttgtactttaagttttagggtacatgtgcacaatgtgcaggtttgttacataggtatacatgtgtcatgtcggtttgctgcatccattaactcatcattyacattaggtatttctcctaatgctacccctccccctgcctcccaccccacgacaagcccccatgtgtgatgctcaccgccctgtgtccaagtgttctcattgttcaattcccacctatgagtgagaacatgcagtgtttggttttctgtccttgcgatagtttgctgaaaataatggtttccagcttcatccatgtccctacaaaggacataaactcattcttttttatgtctgcataatattccatggtgtatatgtgccacattttcttaatccagtctatcattgatggaaatttgggttggttccaagtttttgctattgtaaatagtgctgcaata

SEQ ID NO: 875864 - DNA, 587 bp, Homo sapiens
gatgtagggtggtgatttgagatgtttctaactttctgatgtgggcatttagtgctataaatttttctcttaacatggctttagctgcatctcagagattctggtatgttttctctttgttctcattggtttcaaagaacttcttgatatcgccttaatttcattatttacccaggagtaattcaggagcaagttgttcaatttccatgtagttgtatggttttgagtgagtttcttaatcctgagttctaatttcattgcactgtggtctgagagattgcttgttatgatttcattttttttgcattcgcttagcagtgttttacttttaactgtgtggttgattttagaataagtgtcatgtagcactgagaagaatgtatgttctgttgatttggratggagagttctgtagatgtctattaaggtccacttgatccagagctgagttccagtcctgaatatccttgttaattttctgtctcattgatctaatattggcattggggtgctaaagtttcccaatattattgtgtgggagtggaagtctctctgttagtttctaagaacttattttataaatctgt

SEQ ID NO: 875865 - DNA, 642 bp, Homo sapiens
tcacatttcatgtgaacagaatcaactaaaaagttctgccacaaatgtcataggaagaatgacaaaaaagaggttcagtgatccgcgtgcctataatcccgaggcatctacgtcactgagataagaaagggcagccggcatatcttccctcccacccctcatgtatctcttcccatcttgatttaaaacaaagccagtgttagaggagactggagttttcagattgttggctttctttttgctgccatttctattcctcaccaagaaagaataataaagctaatactgaaacttccaatttacaagcttccaggtttgaaaatacatagatatgaacgaagttacctttcagagatgagtcaaccactggccctgcaagatcacaagacagtagcttatcactttcaatttataagtggaatggagaacagcctttccaaacataacctgtgagaggagtttctgtaatcagaaractgacttgttggcttgtatccgagaagcctttcctatcaccttagtatgatagttctctggagagctgtgaggaaatctttcttttaaagtggcggtcatctttgaaaccaagcatgcataaggaagtagagcacagtacaggaaaagaaaggccctctgctctga

SEQ ID NO: 875866 - DNA, 586 bp, Homo sapiens
ctagtaagggaattgagtcagtaataagacaatctcatgacaaagaaaagtcctggacctgatagctttactggtgagttctgccaaacgtttaaagaagaactaacactgattcttttcaagcatttccaaagagtggaagaggagtgaatacctcttaactctttctatgaggccagcattaccctgataccaaagccaaaaacactataagaaaataaaacaacagatcaatatgcctctgatcattgatgcaaaaactctaaaaatactagcatactgggtggggcatggtggctcatgcctgtaatcccagcactttgggaggctgaggtgggtggatcacctgaggtcaggagttcaagaccagcctgaccaacatrgagaaactcttgtctctactaaaaatacaaaattagccatgtgtggtggtgcatgcctgtaacctcagctactcgggaggctgagacaagagaatcgcttgaacccgggaggtggaggttgtggtgagccgagatcatgccattgcacttcagcctaggcaacaagagcaaaactttgtctaaaaaaaaactatcatactgaa

SEQ ID NO: 875867 - DNA, 697 bp, Homo sapiens
aatttttagctattactaataatgtttcaacaaacacctttggacatctcttctgcaaatgtgtgtgtattctcttggagaaggtttaccttgtggaatttctagtgtgtatgtgtatgtgtgtgggtatatatatatacacatatgtatatattttcaactttactatatatttccaaaaaactcttcaaagtggcagatttaaactccccttcgccgtatataaattcacggttcctaaagcccttggcatagttttgtgtttttatagaaaagggcataaagtcttattgctgttgaattgtaccttgctcttttcaattgtcttttcacaataattcactatttatcatctgttgtgaatattgtggagtrgttcttaatcattttttctactaaactattttatatcattaatttgtagaaatcctctttatataatggatattatacttttcaattatatattttgtaaatattttacccaattttctggcttgcatttaacctttatttaggatgcctaggatttttcattttaatacagtctaatttatttttcttttcttcttcatgcattctggcatttgattaataagccatttgttgcccaacgtcattagttctctgtatatacttttaaatatcttaaacatgtaatattcataagtaatttcacaagtagtttaagatttga

SEQ ID NO: 875868 - DNA, 685 bp, Homo sapiens
ctgggtagtgtggatggattctaataaagggactacttacagcacagcaggaaagtcacaaagaaaccagacagaagagtgtaagtagtaaggggccaagcagtcatctgactagagacagtgccagcttgccaaagaaggcaccagacagaagctgtgatcttcagcaaagggacacagtctgcctgtgctgaccctgcaggggcagaggtgggggataaacacactcttctctcacctatcttctgccaccccctccattagctgaaccccaataaaagcatgagggtaagggagatctctgaagtatccaattcaggtgagcctcctaaggaacaaagcagaatgcagaaaaattaagagtgggtctagggaataaaatagagatatgcaccagagtatgatgatgtgtctgggaaagaatatacaaatacttttaaaattactagacaataaacctgagatgacactaatacaggtaaatctcatttaatggtaatatattccaagaaatgcatcattaggtgattytgtggctgtgcagacaccaaagagtgtactttatacaaacctagacagcgtagcctactacatacctaggctatatcgtacagcctattgctcctgggctacacacctgtgcagcatgtcactgtgctgaatacagtaggccaatggtccgcaa

SEQ ID NO: 875869 - DNA, 566 bp, Homo sapiens
gcatttgtattcatgaagtctgcaccaaacatcaggtagttactaaatatcttccccttatgtaccctgcactgtgcccagcactctggtagttaagaaatagaagccataactttccctcagagtttttgcaaaaagatcccttattcaattatggggtgatgcttgtcacatgttgcacagatatagctgcacctaacccctcattaactkaatggattcctatagtcagttctccagggatgtggaattgaagctgctgagattcacagaaagtgtgggtgtatttataaatgcatctcccattactcccaggttctcaaaaggagagagctctgttcccatagcaggtaaggagaaagtgaacactgtagcaagaagctgtcatcatttgttcattcagttatgctttttatgacacctagttttgcatcccaagaagagaaagtctggtcatttttgtgttctttgtccatcttggagttcctgatggcccactttgtatgattttttatgtagtaaggactgaatattttactacacacggtcacttgtatgagccaatt

SEQ ID NO: 875870 - DNA, 609 bp, Homo sapiens
acaagctgaaaacttttcctctaagataagaaacaagtcaaggctgctaggtcacagtgctacttcaggatctacatacagttgggactgacattggcaggcatgttactgggagcacagatgttgtgtctttcactggatccctgtgcaggcaggactgactctggaacagtggtatactagggctggagccatggcatagggtggtttcaagatycacagtcaggtatactatgggtgatgccataaccaggggcacagatggcatagttcctcctgggttccttgatgcaatggggcttgttgcaggatcatggccaactggagctgaggccagttccatagagtgactgttgctttggccttgcagctagacattgctaaccctggcaccagtgtgtgcctgccttctcaaggaagctctctccaatcttgggcttcagcagaatttcataatctcctacaggcacccaaaagcttccacaaagatacttctgttcatagatggctgctagatttttgtgtgtgttggaagctataatctggggacctattattctgtcatcctactgacatctttccaatgttattttggttcttacctttgta

SEQ ID NO: 875871 - DNA, 521 bp, Homo sapiens
gtaaggtcttgcaggacaaaaagtatgtcttctatgtgttactaagctaatagtaatgtttctattattagggaaaacacagactcatgggaaaattataaaaataggatatttgtgaaatgtgccaggcacttttatgtgctgccttgacatctgccaatgtcaagcttggttcagccatgtttgagggaaatattatataagagatatattgcaattgtaaatatagtttagtaaattcatttcttagaattgttccaagaaaaatacatgtatgcattcagatgcatagcacaaggatattctgtgcagatgtttgtatagtaacaaataggataactattataaaaactagagasacactgatgttaagaatgccacttagctattacaattgaataggtttcatttatatacagtattttgatagaagaaactctccaggacctacgctgttgcatgaaaaaaaaaaaaaaaagctatgatacacttaaaatttgtagttaaaatagccatcaaaa

SEQ ID NO: 875872 - DNA, 608 bp, Homo sapiens
aatcaccaaaaactgaaaacaaactaaacatccttcagttggagaatagagaaacaaactacggtgcagatatataactgattactactcagcactaaaaaaaataataaactgttgacataagcaacaatctggatgaatttcaaaggcattatgctgagtgaaagaagccaatctcaaaaaagtttatattgtgtaattcaatttttatgataatttcaaaaaataaaactatggtggttgaaaacagtgatttctatggattaagggttaggggagggtgtgataggatagagttctttggcttatagcacttttcagtatcccaattgtrgtggtggttacaaaaatctatatatgtgttaaaatgcatagaactaaatagcaaaaactcagtaataataaaaataacaaacacatgctaatcaacattttagcacacaaaggtgcacagtaagcatttgttgtatcaatttaaaaatgatattaaagaccattactgctatgttccacattgccacagcctagtttaaattactgtgtctagctgaatactgaacatgttatatatacgttatgtgttaatgtgtacataagcaagaatgact

SEQ ID NO: 875873 - DNA, 427 bp, Homo sapiens
tcaatttgttataattatgtcttttgacacacacttctcagttatataggaggttcagggacgtatactgatggttgctaagttaggaattctggtctactaatcttttaattagtttcaaatgtgcagagacttggggctcagggagtagaagaaataagactaagctcttaaatcatattgaaaaaatacttttgttgtataataatgcttytatgtgtattgggaatgggagggaggtaaggggctgaggaaggaaaactagctgtaaatgcaactgggaagatgtggaagaaggtggcctctgcgaaggaagtctccagaccttgactaaaaggacaggattaccttcttcaggtgaggagcagccttccaggctacctgaaacccccagctaccaaacaaaacactaactcagttcactggg

SEQ ID NO: 875874 - DNA, 655 bp, Homo sapiens
tgtgcacccatccatagaggtcctaaagggaaggctaaacatggaaattaaaaatcagtacctgctaccacaaaaacacaaatacatagcccactaaaactgtaaagcaactatacaatcaagtttacacaacaactaacaacamaatgacaggatcaaagtctcataaatcaatattaactttgaatgtgaatggctaaatgcccacacttaaaagacatggagtggcaagttgggtaaagaaactaaacccaactgcctgctgtcttcagtaaaacccagaggctcaaagtaaagggatggagaaaggtctatcaaacaaatggaaaataaaaaagagcaggggttgctattattgttttagacaaagcacactttaacccagcaacaatcaaaatggataaagaaggttattacataatgataaagggctcaattcaacaagaagtcttaactatcctaaatatatatgcacccaatcctgaaaaacccagattcataagtcaagttattagaactatgaagagacttagataatcacatgacactagtgggagacttcaacaccccagtgacagttttagtcagatcatcgaggcaggaaaataacagatactcaggacctgaactcgatgcttaaacacatggacctaac

SEQ ID NO: 875875 - DNA, 651 bp, Homo sapiens
  misc_feature 530: n = A,T,C or G
tcctgagactttgctgaagttgcttatcagcttaaggagatttggggctgagacgatggggttttctagatatacaatcatgtcatctgcaaacaaggacaatttgacttcctcttttcctaattgaataccctttatttccttctcctgcctgatcgccctggccagaacttccaacactacgttgaataggagtggtgagagagggcatccctgtcttgtgccagttttcaaagggaatgcttccagtttttgcccattcagtatgatattggctgtgggtttgtcgtagatagctctaattattttgagatacgtcccatcaatacctaatttattgagagtttttagcacgaagggttgttgaattttgtcaaaggccttttctgcatctattgagataatcatgtggtttttgtctttggttctgtttatatgctggattacrtgtattgatttgcatatgttaaccagccttgcatcccagagattaatttaagatgatttaaagacttacatgttagacctanaaccataaaaatcctagaagaaaacctaggcaataccattcaggacataggcatgggcaaggacttcatgtctaaaacaccaaaagcaatggcaacaaaaccaaaattgacaaatgggttg

SEQ ID NO: 875876 - DNA, 608 bp, Homo sapiens
tgctaccacctcttgataattccagtatctgcagttgcctgatgaattctgtgaaaacaagaagaggcttgttcagtgttgctccaaagggcagatacccacccagcgagtgggtatccttgtcagacaattccaacatctgatttctttcagtattataaagyttttttttttttctgaaaaagaagaacctttaagccaccagagttatccagctgcagacaatgcttttttgtaacaggtaaaaagttatccacctctttaggtgtctcaggaaatgtagggcagccgtttctctgccaagcacaatatagaagacattttaccttggtgaggcctgcttatggttatgataaggacatgtgccatctcacggttggctatcctgatgtgttgtagcaactgaaatgattctttctttcctcttccagtgaagggcatgttacttatatcatggtgcatagctcgatcttagctattgtagaaagactacaaacactggaagggttttttaatgttctctttcctcttcctgggatacagtgcctctagatactacatggtaaattccagattcttcaagtctttgttcaaatgtcacctgatca

SEQ ID NO: 875877 - DNA, 759 bp, Homo sapiens
tagccttattttaggatcttcagcaatagtcatgtatgtttttaaaacattttatttatttgtatttatttatttatttatttatttatttatttatttatttatttagagagagataggaggtcttactatcttactatgttgcccagggtagtgtcaaactcctgggttcaagtgatcctcctcagtagctgggactgcaagtgtacaccaccgaggcgaacttgttctgaaaactttttaaagtctacaggcttatttcagagatgtcagctttactgtcacacagtatcctagaagtagacattacaatgttctaggaagaaaataagactccagattgcccaaagtcatcggccaaaaartaacaaggctattaaatttgtatgtaagatttcagtctctaaatcaacggcttgcttcatgcttttctgcctccaattgtttttgttttgttttgttttggtgcacaatggggttcatattagggaaaaagtgatctagaaagacagctatttagccacggccttaattatctccttcctttctagagtgcaaatttgcctctaatggatggaaatgctaatgattttaaaccttactacaaaaaaaacagtctaaaaatttttaaagaaatactttagcaagctttatatattctattgggaataagacgtcctttaggcaacaattatctacaaaagaaaggaagtcatgagaaaggtgggggtgaaatgaacaagggaatgggatggtggt

SEQ ID NO: 875878 - DNA, 585 bp, Homo sapiens
tagtgggggtgacaaacactttaaacactttgtaattttaaacttgcttctagagaaagcttctcccctggggcaataatgtgttgatcagtgcatataacgagcagcctgcttagcagttgcgcttttcattataaattgtttaattggcttttggtataaatcagtcctgagtttgggtaccatgacctaacatcctagggcctcatgacccttggaaaaactgaatgttgatattttagcccttagtaaatatccctcatctttatgtctcctgttttttttttttttttttttttttttttttttttttttaaactaaraaaaaagattcctagttgataacctctaggcaacctttgaaaaaaaggaaaagcattttactgttttcaatctttgcaaaaatccttttgctatttttaagtccttgagagccctctcttcttaaacctctttaacctatctgaattgtaaccctcctattctactaaaatagtgctatttaaggtgtaggggtgaaaaggcagtatcttttttgtcacctatcacaagggtcgtggctgaataccttataacaaaacacag

SEQ ID NO: 875879 - DNA, 672 bp, Homo sapiens
ctgtgaccacaggttaactctgaactgtcatcttgctatggatgccattgatcacggaagacagaaccagagattgtgagtgaataagcacaaattcatcatcattgccagagtggaactcaaaacacaggcccagcatggcaaattagtttgaacttttgtgtctacaaaagaaaataatgtctttatttatgttgggatttaaggtctatttagtacttttaagttagctcatttaaacctcacaataactcatygaggtagatattttctgccacttatgagaaaaggagactcaggttaaatatggcagaagggaaaaatgatgtactttgggcactttagtgttcgaaatctagttttgatcatatgtaatagtgtgaggtgggaagagatgcttcgttttttaaaacagagtgaaaaatatttgccttacgttataaaggttaaaagaaatgatatatgcactcagtatttagcctagcacaaagtatttttattaaatgatctgtttgagatcacacaattagttaggtggcagtactagggcttgtatgtgggtgctctgacaccaggtagagggctctctcccctacatgacagctgatattgtgagaagtgaaggatagaggtggaaaggtcgtcatcatttatctctatacagtagttccc

SEQ ID NO: 875880 - DNA, 625 bp, Homo sapiens
tatctttccaaggcatcaggctacccaactaactgggaaagttcaacaatgtggatcagctatgaggcccacctggggtaggggcagcatcctcagagggatccagggtttatggggctgcataaacaggtagtgaactttttcccaggaatcaaatcagttcatattaaatggcagattgaaaacttcagtaaaactactaaaatattttacatttgaaagtttacaatatcaccattccctatagaatactcatctccacaagctgtaaatacaaaaaatcatactttggactgggcgtggtgcctcatagcactttcggaggctgaggtgggagggtcgcttgaggccagaagttcgagaccagtctgggtaacacagtgagaccccatctctatttaaaaaatcttcttttggctgaaataacttttctgttatactcgttaattctgtgctatgcttcaggrtggcacaagatcatgttctgagaggcctgtcttttatttttaagtacataaaaatcccaacaaaatggtgctttggtataaaaagggagagctcataatctaggggtccaaagtttgcactttttctttctcccaaaacacagttctcaaaatgtatc

SEQ ID NO: 875881 - DNA, 540 bp, Homo sapiens
gtttattgcattattattcacaatagccaagctatgaaaacaacctaggttgtttttatttaacataatgaatatcaataggcaaatgaataaagaaactgtggtgtttattcatatagtgaaatattattcagcctttaaaaaagaggtgatcctgccatttatcacaacaagattgacaatttatgctaaataaaataaaccagacctggaaagaaaaatactgcatgatctcatttatgtgtggaaccgaaacaaacaaataaaaaaaggtcaagtatacagagatagagaataaaacagtggttagtagggtcaaagacggcgrgcaggaaataggaagatgtaggtcaaaggatgtaaagtaagtagcaaatatgcaggatgaacaagtctagagatccaatgtacaacatgatagaatgtaggtaataaaattgtagtgtatatgggattcatactaaatgagtagattttagctgcttttgccagaaaaaaaaaaaagaaatggctaactatgcgagataattgatatgttaa

SEQ ID NO: 875882 - DNA, 637 bp, Homo sapiens
aataatttctaggattaaaacatcaccatcacacaaaatttaccatagatgcacaacacagccaacttgataaagcaaagtgtcaatttttatatatatacatgaatagataactataaaaattaattcttagggatgcttggtgctgatctcggtggagcagcctaggtcgggacattgaatttctgaattcaatgcacctgactttggatttccttcaraactaagcccacttccacaatttttatatttcaagtcgagtgttttatagtacttgtattttgtgtctgtttcatttcttttgcttgttaattgatttttcatttattcagttgttatttatccagactcattgaattatgaatggtgctaatggaatttaaagatgaaagacatctgaaactacaccacaaaacacttatattctagtaagttacatccaaacaagcaattactataaccataaaagatgaaagaagtctccccacatcacactttcttttcaaatgttccccttgctatccctacaggatacctcttgcattccttcttttctaacatctttccctacacttcattctttattcctctgctcaccgacactcacactgactttgaatacaagtttagaattggt

SEQ ID NO: 875883 - DNA, 657 bp, Homo sapiens
tcataaaactggcatattttcttttgaaaacaatggattttacaatgtatatttcaaaagcaactatggtaaaattataaatgcctactctaatgagtagcctaattcatagtgagaaacaggaaaacagtttccctttgcaatcaagattcccaatacgagtacatttattataaaacactacacacataaatattaaatgaaaaaatggctgcaaatagacttagattggctacaagtcccrttcttaaatcatcttttcacggattctacaacagttttatctgtctaaggaaatagcttccattgtcaataaatatgaacagcaaacaattattatgatatgattatattatttcatcttaaagctatcatttgaggtcctccagttccttttgtaaggagtataacattaattcactcacaatacctatgtatttctcacatctacagatagtaggtactcaaaaaatatctgttgttgatggcgacagtaactcatatgatagacggaatattttctgttcacaatcaatagctaatttaataatgttttcccttgtcaataattcctcttgttttcttatagcaaggagaaaaaacaattgattggtttattatttttgatatatgttgaagatttttaaatgatttcca

SEQ ID NO: 875884 - DNA, 618 bp, Homo sapiens
agagcaaaataaagacttatcctacattaagtaggagactgtttatttagaacctgctttgaggttacttctgctctttctcttccgtcagcaccccagcagagctgagtagatttcctgatgatagaggccctctttgttcacagtgaagtggagattggcagaaaaggaaaaatcgtggggaaaaatggtggagaaaaatggaagaggaaacatgttaacttcttttcttttgttttctttcttttcttttctggaaacaagttctcaccctgtcgcccaggctggagtgccatgatgcaatcatggctcattacartctcaaactcctggcctcaagtgatcctcctgcctaagcctcttgaagtgctgggattacaggtgtgaggcacaaaacctggcttcatttttctttctggtttcaaagcattataatgcaatttaggcatacctccctaaaaaactgtgagttacgttacacatgcacaacaccataactacacccatttctgggtcttattgaaatctgaaaggagaatgatcaataaaattcttataacaatcccaagaagatcttgccaaattgtaccaaagggattagataagttgagaccatag

SEQ ID NO: 875885 - DNA, 631 bp, Homo sapiens
acaaatacaacaacttatccttcactttagaagtaatatcttgacatgccccataccactagacccctagaaatttgagtgagatggaatgcctccaaattttaggctttatttcctacccttcgacatggcttaccaataagtctagagtagctgctgcttcttgctcacaaggtctaatcagcgtaatgtcctcagtgtaatggacctgtgtgatgtcttgtgatgggaagagggaaaggcgatggaactaaattatgacataaagctggctggagagtggccctgaggtaggatggtgaargtgtattactgaccctaccagctgatcttgacaatggtaataacgaagagaaaaaaaaaaacttaatgaggcaaagtatcaaaagaagacaaggaaaagacaagggtacatcttgtaaacaatcaaggatgttctggttggctgtacaagaagaggagtccacacagaaaaaagaagaatgctcatcctgcaatcctagcatgataggtaggtaggaaggggtattgatacgggttcataggtatgtaatgtgcagatacagatgtggggagctggacatatgtgaaaaagcactatgatgtagagatgtacatgatgtagagatgt

SEQ ID NO: 875886 - DNA, 620 bp, Homo sapiens
atccctgatgaacattgatgcaaaaatcctcaataaaatactggcaaaccgaatcaaacagcatattaaaaagcttatccaccacgatcaagtcgtcttcatccctgggacgcaaggctggtttaacatatgcaaatcaataaatgtaatccatcacataaacagaaccaatggcaaaaaccacatgatcatctcaatagatgctgaaaaggactttgataaaattcagcaccacttcttgttaaaaacactcaataaactaggtactgatggagcatatctcaaaataataatagctatttatgaaawacccacagccaatatcttactgaatgggcaaaagctggaagcattccctttgaaaaccggcacaagacaagggtgtcctctctcaccactcctattcaacatagtattgaaagttctggccagggcagtcaggcaagataaataaacaaagcgtattcaaatagaaagagaggaagtcaaattgtctgttttcagatgacatgattgtatatttagaaaaccctatcatctgagcccaaaaactacttaagctgataagcaactttaacaaagtctcaggatacaaaatcaatgtgcaaaaatcacaagca

SEQ ID NO: 875887 - DNA, 636 bp, Homo sapiens
tacaagaaaaaaacaaacaccaccatcaaaattgggcaaaggatatgaacagacacttctcaaaaggaaacatttattcagccaataaaaatatgaaaaaagcttatcatcaccagtcattagagaaatgcaaatcaaaaccacaatgagatatcatctcatgtcagttagaatggcaatcattaaaaagtcaggaaacaacagatgctggagaggatgtggagaaataggaacacttttgcactgttggtgggagtgtgaattagttcaaccattgtggaacacagtmcggcaattcctcgataatctagaaccagaaatatcatttgacccagcaatcccattactgggtatatacccaaaggattgtaaatcatgctactataaggacacatgcacacgtatgtttattgcagcattattcgcaacagcaaatacttggaaccaacccaaatgcccatcaatgatagactggataaagaaaatgtggtacatataccctagggaatgctatgcagccataaaaaaagaatgaattcacaccctttgaagggaaatggatgaagcgggaaaccatcattttcagcaaactaacacagaagcagaaaaccaaacaccacatgttctcattcataa

SEQ ID NO: 875888 - DNA, 640 bp, Homo sapiens
gagaaaaggaggattatcttctgtcaatggtttccattctacatcatgactttgaggtccatttgggattatgttggctttttctattaggatataagtacaaatggaaatgaaaatgaaacaaatgaaaattcccaatctgaacagacaaaattgaagtacagaatctcyacatgttaatgagcctcttttatttttatggtgaaagagtgaattaaggtaagaactatctttactgctttttctttacgtacacttttttatttatttatgtattttttttggtgctaacatttggtgttaattggtttggtaagttagggatacattttttgttttgttttgttttacttgcaatgcactgcagctcactgcccatttcaatttttattttttccttattaccttgatattttcctaaaatacacaaaggataaggaattttaaagattgacagagattaaaagtaattggaattaaaaggaggaaagaaaggcaggggaccagaagaaggcaaagactgaggaaaggaagcctgaacagaattatcattgtcagtcattaatcaaagctgctgctcttgattgtcatgttgagtctagtggactttcctcagtgacagaaatccatactcacattc

SEQ ID NO: 875889 - DNA, 631 bp, Homo sapiens
attggagacaaaacagagttaccaccttcaaaaaagtagatagtaaagcagagactaattagccacatagtttaagaagtagactttggagtgagatttcttgggcttgaatcctgtttctatcacttatcagctgtgtggcttttgacaatttacataacctctctgctttgagtttcctcaatggtaagtggtatttactatataggattgttgagataattaaattaggtaatatttataaactgcttagaacaagatcagggtgttaagcttagggcttgacaaatacttgctatggatctgaccagtgagatttacagttgatatttagctaaatataaaatgtgattactaatttctctactctgattttgcttattttgatactgcacacatttgattttcaaacatctatttctcaattttcctttttgtataatctgtaaaattataataaaaaataatcattaattccaatatgatrtattttttctaactttttaagaagactttttatacattgacgtagatcaaccatatattaggagtaaaaattttcaagaaaaatcaatataatagtaggtataaaaatagaagtatgcattttttgaggctcttttaagttact

SEQ ID NO: 875890 - DNA, 598 bp, Homo sapiens
aagttgatgaattcagatgttatatctgaggaaaggaagaaaattatttctcttttcttttcacagtgctgtgaccttttctggaatccacctgttgagatgctttatagccagtgtaacaggaagtcttgactaatggttcccggtttagctgaagattcaaaaaaaaaaaaaaaagctttatgctaactggagttaaatacctaraagaatttcaacattgttttaaatgttgtgcatctgtaacttcaggaggatcacttgagctttaaaacctgtgccttctcgaaacaagaatttgtgcctgaggtgaaaaaagtttgtaagttattgaattatggtgttcattagaacagctactagctgattcccctattttaacaaactgacaagagcacatccataaaatgaaaacctgttacaactatgtacagaagggtttgacgttttattgggcttttgtcttttaaagaatatgtctactatgggtattttttttttaaatgttaaaatgggctaggtaaaagggggctgcttttctgttaagcatcgataggtaagttgatggataaaagttactatgtaagcctattttttt

SEQ ID NO: 875891 - DNA, 683 bp, Homo sapiens
ttaagctttttgtcatatgcttgttggctacatgtctgtcttcttttgagaagtgtctgttcatgtcctttgcctattttttggtggggttgtttgttttctcttgtaaatttaagttccttatagaggctggatattagacctttgtctgatgcacagtttgcaagtattttttcccattctgtaggttgtctatttactctgttgatagtttcttttgatgtgcagaakctcctaaggttaattagatcccagttgtcaatttttgcttttattgcaattgctttttgtgtctttgtcatgaactctttgcccattcctttgtccaggatggtattgcctaggttgtcttttggggtttttatagttttgggttttacatttaattctttattctatcttgagtttattcttgtatatggtataaggaaaaagtccagcttcggtctgttgcatatggctagccagttatcccagcaccatttactgaatatggagaaaactcttaatcatcaaataattcagtcccttctaattgaatccttgtgggtagataatagatttaactcaaaattcctcccccaacccatttagaggatgaatgccagactacaaataattgctctgactttggactgagacattttatccttaagcccccctcagtcacctccactaccact

SEQ ID NO: 875892 - DNA, 643 bp, Homo sapiens
cttagataattaatttgcagcctctttttttttttttttttcaacagggtctcattctgtcacccaggctagagtgcagtggcccaatcatagctcactgcagcctcaaactcctaagttcaagagagcttcccacctcagcctcctgatttataggactacaggtatgtgcaaccatgcccagttaatttctttcttaatttctatttttgctttttggtagactggtctcaaacttctggcctcaagtgatctttccacttcagcctcccaaagtgctggtattacaagtgtgagccactgcacccagaccttttttcttttcttatatttgkgtttaagactacaattttctctaagtatagctttagcttcatttcacacattttgttttgctgaatttcattgtaatttcagtaaggactttaaaaaattaccatgagatttctttaaattatattcctttatttctaagtatttggataacttttaaagtttttttttgttactgatttctaacaatttcaccatgttcagggaatatatttctagaatttaattatttgaaatctgttaaaattcactttataaaccagaatatgatcaatatttgtaaatatttcatatgcatttgataactata

SEQ ID NO: 875893 - DNA, 580 bp, Homo sapiens
tcttatttctcctttgcttatgaagctctgtttggttggacatgaaattctttgttggaatttctttctttaagcatgttgaatgtaagtccccaatctcttctggcttatagggtttctgttgacaggtccactgttagtctgatgggcttctattggtaggtggtttgacctttctttctagctgccttggcattttttcttccattgcaaccttggagaatctaatgattatgtgtcttggggatgatcttctcgtggagtatcggagtatcttactggggtcctctttgtttcttgaatttgaatgttggcttgtctagctaggttggcaaagttttcatggatgatatactgagatatgttttgcaagttggttccattcmcccttttctctttcagggacatcaatgagtgtagatttggtctcattacataatcttatatgtctgggaggttttgttcacttcttttcattcttttctttgctattcttgtctgactgtcttatttcagaaagccagttgtccagctctgagattctttcctgtgcgttgtccactctattaatatttataat

SEQ ID NO: 875894 - DNA, 569 bp, Homo sapiens
ggactcatactgagtgaaaaaagaagggagatttacaatggaggttaagtgtaaaatcttgttggttgagtgtaatttctatctaaatgagacagggtatatacttatttccattttaaatctcccttcaaatatagtaacaaccaacatttttatgaattgtggaacattattaggacattaaagagaaggcactgcaggttttgtcctaatacctagatattaggtgtcttgggggatgttcgtctatcttcctgtgagcccatggcatcttggttctcattacttactattacaaggggccatagtctgaaaaattctcaagattrtaaaattttcttgaaaattaaaacttaaagagtttattactgtgtttggcccaaaaaacaagcttgcaatatatcaattctcttcttgataaaaacagggttgggggtcactaaagccacattttaatatatttaggatatattaacaagagtctgagctgtttattaatcagtgtggtttattataatttttaggggtttctatcatttacctttattaatatctcatccctccctaga

SEQ ID NO: 875895 - DNA, 586 bp, Homo sapiens
ctactgagtgtgtatattgttctcctacctatgattagagatgcatgattaaagaacgctcattttctcaagtacacaatgataaaactgaacaaaatcaggcattttgtacatggtttatggcagtaagtgttggtatatcttttcttgagttgatgatttggcaggacatagcaacattttacatgtgcatacttttcatattaacagttgtgtttctaggaatttgtcctacagaaatactcactcatgagcacacaaatgcatatgctgtacaataacatttgttatgttgttgtttttaagawatttaaatgttcttcagtagaaaaattaaaaaatatataatacactcatattatgaatattgtcctgatggaatgtaaacttcacaagatcagggaccttgaatagtttctttagccttctatcctcagttcttagcacagagcatggcacataacatgcaatcaaaagttacttctgaagcatttaataaaataatgcatttgttttaactactgaagtattaccataaaatgattaaatgtgggtcctagaatcatattgtctatgttttaatttt

SEQ ID NO: 875896 - DNA, 639 bp, Homo sapiens
agcactctggagaggaagaaggggcacctgaaatctagatatgtgttaatttacttagttcagcagttgcagattcaagctctatgagaggtcagggaggtaaccgagatgagtgtaacaccctgtggacaagataagatgtggtggggtcttggcaaaccaagcatcatagccagtctacgggaagcagtgggcagtcctctggccgagtgtatgagtctgttttcacgctgctgataaagacatacctgagactgggaataaaaagaggtttaattggacttaacagtttcacatggctggggaggcctcagaatcatggcagaggctaaaggtacttcttaaatggcagtggcaagagaaaatgaggaagatgcaaaagcagaaacccccgataaaaccatcagatctcgtgagacttattcactatcatgagaacagtgtggggaaaactaccccmgtgattcaaattatctctcactgggtccctcccacaacacatgggaattatgggagtacaattcaagatgaaatttgggtcgggacacagagccaaaccatatcattctgcccttggcccctccaaatcttatgccctcacatttcaaaacaaatcatgcgttccaacagttccccaaa

SEQ ID NO: 875897 - DNA, 669 bp, Homo sapiens
cacagcagagatgctagattgtattgtgcttacatgatgactttaggatattttattttttttgagacagaatcttgctatgttgcccaggctggcctcgaaccctgggctcaagtgatcctccttcctttcagcctcactgaagctgggattacaggcatgtgycatcatgcccagcttttgaagaattttttttttgtcatggcccaataattttttaaattctatttacaaatttctaaatacataatagtgaaaacatcaaaaatataaaaaggtattcaaactgtctcccactattgtcctctaactgccctgctgtcatctctttgaataggtgaccatctgctttttcgttattattcatcttttatttatttatttatttagagacagagtcttgctcttgttgcccagagaggagtgtagtggcacaatctccactcactgcaacctccatctcctaggttcaagtgattctcctgcctcagcctcccaagtagctgggattacaggtgtggtccaccatacccggctaatttttgtatttttaataaaggcaaggtttcaaggctggtcttgaactcttgacctcaagtgatgcacatgtctcggcctcccaaagtgctgggattacaggcatgaaccgctacacccagctgttatttt

SEQ ID NO: 875898 - DNA, 656 bp, Homo sapiens
tcccctcacctcaccctcctgacaggccccagtgtgtgttattcccctccctgtgtccatgtgctctcattgttcagctcccacatatggtgttgggttttctgttcctgcattagtttgctgaggataatgtcttctaactccatccatgtacctgcaaaggacatgatcttgttcctttttatggatgcatagtattctatggtatatatgtaccttgaaatactatggtgttccagaatctacaaggaatagattttctttatccagtctatcattgatgggcatttgggttgattccaagtttytgctattgtgaatagtgctgcattgaacatacacatgcatgtgcctttataatagaacgatttatattcctctggtatataccccgtaatgggacagttgggtcaaatggtatttctagttctaggtctttgaggaatcgtctcactgtcttccatagtggttgaactaatttacattcccaccaacagtgtaaaagtgttcctatttctccacagcctctccagcatctgttgtttcttgactttttaataattgccattctgacaagcatgagatggtatctcattgtggttttggtttgcatttctctaacaatcaatgatgttgagctttttttcataggtttc

SEQ ID NO: 875899 - DNA, 633 bp, Homo sapiens
ccggggttttttttttttttttttttttttttttgccttctgtaatactataatcattaagagagaatacatccaaggaggctaaacaaaaaaatcatagcccctgatggaccagggataaattaattaccatataccttctagaagatatacagacactaatttaaatgatccttacatttagcttttcagctgtgatgcttttattgcattcaaacataggcaaaacaaaatgattttagcatgtgcttagtaataraatccgtgtatttttttatttgctcctaaaatagaaatcacctttcagcagtttttttcttgtaataaatgacaatgagggtgacagatatgtgtttattttaaaaatctttgcaatatgtctattttaatactctatcatctaaaactcgttatcagtttttaagcattagttccgagagcaagagaatgaacatgcaagagtatatatgcatctacatgtgcgcaagtgcacgcacgcgcgcatacacacacacacagaaggctttcttagcaaccagatgtaaattaggcatcagaagacgctcaaggagaaacatatttttctcaccaaatctgaaaatacattttcagaacacctcaattgcctcattg

SEQ ID NO: 875900 - DNA, 630 bp, Homo sapiens
ccatcttcatgttagtgagttctcactgatctggttccttaaaagtgtgtggcacttcccccacactcctgctttcactatgtgatttgcctgttcctgctttgtcttctgccatgagtaaaagccccctgaagcctccccagaagccaagcagatgctggtgcgatgcttgtacagcttgctgaatgatgaggcaatgaaatttcttttctttatagattacccagcctcacatatttctttctagtaatacaagaatggcctaatatacctttccaatttgaatgcttttcatttccttttctagcctaattgctctatctaacatttacagtaacatcttgcttagaagttttgagagttgcatcccaaagctttgaaagcttcagatttaaaccactgagtatgatgttaggtatcacttctcatatatggcctgtattatgctgagataatytccttctgttttgacgtattgattgtttttatcatgaaattttgtaaaatactcttgagatgatcatgtaatttttattttatcctttattctgttaatgtagtgtatcacattaattgattttcatatgttgaaccatgtttacatgccagaggtaaatccctcttggttgt

SEQ ID NO: 875901 - DNA, 644 bp, Homo sapiens
tgaaagagttaagctttgtttaagtacttggagttagtagaaatgaatgcttaagataagataagagggtctgttatctgtcatgtgatgccatgctaaacccaggttggaaagtaagccacaatatactgggtcagaaaakacctgtttaataaaatatttatgattcataaggtgagacttcccaggcctcttaaaaaggaatttgagaaagaaaataaaaggtcacagtttggtcctcaccttgttaaaaatcaattggcttcagatgcatgaattatttttagatctcaattatgtcacattggtctacataactatccttatgctggtattttggtattttgaatagtgtagctttctagtaagtttaaaactgggaagtgtttgtcctccaaccttgttccttttcaagattttcttggctatttggggccccttgaaattccatatgaatgtgaggatcagcttcactgttatggccaaaaaaaaagaagtgtgttggaatttttgtagcaatgctcatctcagattgtttattactggtgtatagaaaaaaaacctgaattatgcaaattgattttgtacccttcaactttgttgcattaacttccagctctagtagctttcttatggatttgttg

SEQ ID NO: 875902 - DNA, 616 bp, Homo sapiens
cctcaaagtcattttccatccagctttgttctgttgctggcgatgagctgtgttcttttggaggagaagaggcactctgatttttagaattttcagcttttctgctcttgtttctccctatctttgtggttttatctacctttggtctttgacgatggtgacgtacagatggggttttggtgtggatgtcctttctgtttgttagttttccttgtaatagtcaggaccctcagctgtaggtctgttggagtttgctggaggtccactccagaccctgttttcctgggtatcaccagcggaggctgcagaacagcaaatattgaagaacggcagatgttgctgcctgatccttcctctggaagcttcrtctcagaggggcacccagttgtatgaggtgtcagtcggccccttttgggaggcatctcccagttaggctactcgggggtcagggacccacttgagggggcagtctgttcgttctcagatctcaaactctgtgctgggagaaccactactgtcttcaaagctgtcagacagggacgtttaagtctgcagaagtttctgctgcattttgttcagctatgccctgccccagaggtggcgtctacagaggcag

SEQ ID NO: 875903 - DNA, 587 bp, Homo sapiens
tgggcaaactcctccccatccatgaagcccttgctcaaatcttgccttttccttgagaattttccttcctgcattcttgttgcctctcactcaactcttctttctcccccgcccatggcatttaacagcttctaaagtaaagtttactttttccttatctgtattatttcttatctattacccacctgcctggaaaataagctccatgggagtaaaagtctttatttgttttgytcattctgtactctaggtaggtgtctaaaacagtgcctggtataatatagacttgatagataatttgcaggtgttattgaggagcaagccacacacagcttgggttaacacctctttaacttttgctgatgcccccctaccccctgtctttttttactttacaaaaaagaccagatctcagactgacagcctttgtttagtaagaatatttagctggaattttaacaaatcaactttattttaattttgtttacttttacaacctctgtgtttggcaatagattccagttctccactaactagtaatttaagacttccttttgaaataacatgaaggaactaaaaaatatatt

SEQ ID NO: 875904 - DNA, 587 bp, Homo sapiens
tgggcaaactcctccccatccatgaagcccttgctcaaatcttgccttttccttgagaattttccttcctgcattcttgttgcctctcactcaactcttctttctcccccgcccatggcatttaacagcttctaaagtaaagtttactttttccttatctgtattatttcttatctattacccacctgcctggaaaataagctccatgggagtaaaagtctttatttgttttgctcattctgtactctaggtaggtgtctaaaacagtgcctggtataatatasacttgatagataatttgcaggtgttattgaggagcaagccacacacagcttgggttaacacctctttaacttttgctgatgcccccctaccccctgtctttttttactttacaaaaaagaccagatctcagactgacagcctttgtttagtaagaatatttagctggaattttaacaaatcaactttattttaattttgtttacttttacaacctctgtgtttggcaatagattccagttctccactaactagtaatttaagacttccttttgaaataacatgaaggaactaaaaaatatatt

SEQ ID NO: 875905 - DNA, 582 bp, Homo sapiens
ttaattttgtctttctgcccaccctctaactgtgcattgacaaatttgataaccagttgggtataatggctcttgtgaagagtgggagcactcccaggtgtagagagggatgaggagaggtgagtggtgcatatagcattgttatttttattctttctggtggagggggagacctaagaatcttgacattttaatattttttaacctctgtctgactttcattgatcagcaattgatctgacagaaaagtcttcaaaacactatatttttagagaattttgcctgatctgagtctcctgaagagtagatgagtcacataacccgagtttcaggcagacatttggaagaagctagcaggataattttctgattccaatgtcacccaaccaggggcatatgaatatayagccctgaaagctgaaacaagttttttgccagagcagttcactatattctgttttccttcaggaatggaagatattaacagtaagattctccttgttgtcttggtatggattcttttggttatcttggtaaactgtcattctgcatgctccttcatgtattctttttatattgtaa

SEQ ID NO: 875906 - DNA, 611 bp, Homo sapiens
gaaggaatggtaccagctcctctttgtacctctggtagaattcgactgtgagtccatctgttcctggactttttttggttagtaggctattaattattgcctgaatttcagaatctgttattggtctattcaggggttcaaattcttcctggtttagtctcaggagggtgagtgtgtccaggaatttatctatttcttctagattttctggtttactgrcgtagaggtgtttattgtattctctgatggtagtttgtatttctgtgggatcggtggtgatatcccctttatcattttttattgtgtctatttgattcttctttcttttcttctttattagtcttgctagcagtctatcagtttcgttgatcttttcaaaaaaccagctcctggattcactgatttttttgatgagatttatgtgtctctatctccttcagttctgctctgatcttagttatttcttgctttctgctagcttttgaatgtgtttgctcttgcttctctaggtcttttaattgtgatgttagggtgtcaattttggatctttcctgctttctcttgtgggcatttagtgctataaatttccctctacacactgctttaaatgt

SEQ ID NO: 875907 - DNA, 611 bp, Homo sapiens
gaaggaatggtaccagctcctctttgtacctctggtagaattcgactgtgagtccatctgttcctggactttttttggttagtaggctattaattattgcctgaatttcagaatctgttattggtctattcaggggttcaaattcttcctggtttagtctcaggagggtgagtgtgtccaggaatttatctatttcttctagattttctggtttactggcgtagaggtgtttattgtattctctgatggtagtttgtatttctgtgggatcggtggtgatatcccctttatcattttttattgkgtctatttgattcttctttcttttcttctttattagtcttgctagcagtctatcagtttcgttgatcttttcaaaaaaccagctcctggattcactgatttttttgatgagatttatgtgtctctatctccttcagttctgctctgatcttagttatttcttgctttctgctagcttttgaatgtgtttgctcttgcttctctaggtcttttaattgtgatgttagggtgtcaattttggatctttcctgctttctcttgtgggcatttagtgctataaatttccctctacacactgctttaaatgt

SEQ ID NO: 875908 - DNA, 611 bp, Homo sapiens
gaaggaatggtaccagctcctctttgtacctctggtagaattcgactgtgagtccatctgttcctggactttttttggttagtaggctattaattattgcctgaatttcagaatctgttattggtctattcaggggttcaaattcttcctggtttagtctcaggagggtgagtgtgtccaggaatttatctatttcttctagattttctggtttactggcgtagaggtgtttattgtattctctgatggtagtttgtatttctgtgggatcggtggtgatatcccctttatcattttttattgtgtcwatttgattcttctttcttttcttctttattagtcttgctagcagtctatcagtttcgttgatcttttcaaaaaaccagctcctggattcactgatttttttgatgagatttatgtgtctctatctccttcagttctgctctgatcttagttatttcttgctttctgctagcttttgaatgtgtttgctcttgcttctctaggtcttttaattgtgatgttagggtgtcaattttggatctttcctgctttctcttgtgggcatttagtgctataaatttccctctacacactgctttaaatgt

SEQ ID NO: 875909 - DNA, 611 bp, Homo sapiens
gaaggaatggtaccagctcctctttgtacctctggtagaattcgactgtgagtccatctgttcctggactttttttggttagtaggctattaattattgcctgaatttcagaatctgttattggtctattcaggggttcaaattcttcctggtttagtctcaggagggtgagtgtgtccaggaatttatctatttcttctagattttctggtttactggcgtagaggtgtttattgtattctctgatggtagtttgtatttctgtgggatcggtggtgatatcccctttatcattttttattgtgtctatttgattcttctttcttttcttctttattagtcttgctagcagtctatcagtttcgttgatcttttcaaaaaaccagctcctggattcaytgatttttttgatgagatttatgtgtctctatctccttcagttctgctctgatcttagttatttcttgctttctgctagcttttgaatgtgtttgctcttgcttctctaggtcttttaattgtgatgttagggtgtcaattttggatctttcctgctttctcttgtgggcatttagtgctataaatttccctctacacactgctttaaatgt

SEQ ID NO: 875910 - DNA, 655 bp, Homo sapiens
aaagtgaacgttcccttttattccatccctttcctagttcgtcatacatatttatcattaaaagtttggtgtgtgttcatcttttctttgcaagagtctgtgcatgtgtgtgcatgtgcacgtgtttgcatgtggaagcatgtagtgcgtgtaagtgagattttgtgagctctgttgctctaactctggtttcactcactgaacaatgaagcttggaggtcgttcctcatcagtgcatgtaaacctcaatcttttgaattgttgctgagtatcctacttcaataagcagagggaagaggtgttttaaaatgtggttagaattctgtttacccttcctctgaaagaggcaggtctcttcaacattttctactcatgtgacaattagagaagctccttcttctcctcaggaaaggctgcctgtggggaaggattgcatttctttcggtggatctgggtcttctgggagcagcacaggcatgatcacccttctggagagtgatagaacrgtcagtggaaatgtaatcgatggccacaaggtgtgacagctctgccatcacattcggtttatgcttgtttcacgttcctcagagcagaattgcctttccaggcccaccatttgttctggtacttggtggtgaggaagctcactttaagt

SEQ ID NO: 875911 - DNA, 629 bp, Homo sapiens
atgatgacatcatctttcatcttgggtgtcatcttggatgtcccagatttgggggtgacctcttctgtctggaccagacatacctgaatttctttttatttcaataagatggggattttatggctcaaaaaagacacagacgaatcattccctaccaaggccatgcccagccatctccaggcattacccacactgcttccaggcaccttccacaaaggaggggtacatcaatgacacaagggggtgtaggctcagagttggctgcrttgtcttaaaagttagagatggaccagaggaagtatgctccttcttatagctgtgtcccatcccaggctagggagggcagaacttgggggcccagggtaatatccaaccactacttcattgaaacgttaaccgtgttttctaaatgaaatatagaagagcaagcaagcatggctttaagcaagcatgactggaaggcatggcgtcttctttttcctgcttctaggaaagtcttcatgaaatgaaaaataaaaattgattacattctgcctagtctagcatcccaagggtttcccataacaaacatacagcatcagtagacttggttgcccatgcactccttgcacagcaggactgaccttgcc

SEQ ID NO: 875912 - DNA, 629 bp, Homo sapiens
atgatgacatcatctttcatcttgggtgtcatcttggatgtcccagatttgggggtgacctcttctgtctggaccagacatacctgaatttctttttatttcaataagatggggattttatggctcaaaaaagacacagacgaatcattccctaccaaggccatgcccagccatctccaggcattacccacactgcttccaggcaccttccacaaaggaggggtacatcaatgacacaagggggtgtaggctcagagttggctgcgttgtcttaaaagttagagatggaccagaggaagtatgctccttcttatagctgtgtcccatcccaggctagggagggcagaacttgggggcccagggtaatatccaaccactacttcattgaaacgttraccgtgttttctaaatgaaatatagaagagcaagcaagcatggctttaagcaagcatgactggaaggcatggcgtcttctttttcctgcttctaggaaagtcttcatgaaatgaaaaataaaaattgattacattctgcctagtctagcatcccaagggtttcccataacaaacatacagcatcagtagacttggttgcccatgcactccttgcacagcaggactgaccttgcc

SEQ ID NO: 875913 - DNA, 629 bp, Homo sapiens
atgatgacatcatctttcatcttgggtgtcatcttggatgtcccagatttgggggtgacctcttctgtctggaccagacatacctgaatttctttttatttcaataagatggggattttatggctcaaaaaagacacagacgaatcattccctaccaaggccatgcccagccatctccaggcattacccacactgcttccaggcaccttccacaaaggaggggtacatcaatgacacaagggggtgtaggctcagagttggctgcgttgtcttaaaagttagagatggaccagaggaagtatgctccttcttatagctgtgtcccatcccaggctagggagggcagaacttgggggcccagggtaatatccaaccactacttcattgaaacgttaaccgtgttttctaaatgaaatatagaagagcaagcaagcatggctttaagcaagcatgactggaaggcatggcgtyttctttttcctgcttctaggaaagtcttcatgaaatgaaaaataaaaattgattacattctgcctagtctagcatcccaagggtttcccataacaaacatacagcatcagtagacttggttgcccatgcactccttgcacagcaggactgaccttgcc

SEQ ID NO: 875914 - DNA, 657 bp, Homo sapiens
ctagaaaaagagtccactaactttttatggaaagggctagttagtaaatatttttcattttaaatgactagaaggtctcttggttgcaactactcaaccctaccgttgtatcacaaaagcagctacaaatagtgtgtaaacaaatgagcacggctgtaatccaataaaacttgatttataaaaagaaacagcaggctggagttacttcatgggccatagtttgctggcccctggtctagsggaagcaggggccaactataaacccgccttaaactcccttcaggctagaaagcaaagcaagtccctattgccccacatcatggcccccacaagaaacaactgcaggttctcttcattttgattacactttcgtgtctcagcctaaaagccacttccctgggaagcctttccaactccctaggtctgggttgggtgtccatcttctatatgcctatggtgccactcacttgctccatcacagcaccgagtccagtgtgacatgagtgactaggtggtcgtctttcttagagagggggacaagttctgtcccctccaggccccatccctggtacctggcacagggtctggtgtacaacaggccactgagagcattgcttccgtttttcccatttccgcatccatttcagtggccttgag

SEQ ID NO: 875915 - DNA, 619 bp, Homo sapiens
agctaatcaagttttcagaaagttgtagaatgttttcttagctagacagagacaagtaattgccctgcgtgtctaagcatttggtcctcctttaaaccaacactacttacatatacaagatttttttccaacgttttttagctaggtggggagaaaataagtttctattaataaaaagtttgtgcttcttaatattcaaaactagaactgatatcaatgttataaaacattttcacttgaactgtgccttcagattttaattactatattattcacgatggaatagtttgcatcactcacatccaataaaagtaaaaatgagtataatttaaaagttcaggtctaaataactacaatttctycttttggctgacattctgggcagcaaatcttacctcacgtttctgcattcctgttttcagttcagtgttcttttgtatttgctttcgacccatgactgaagttgtcacattgatgctgccaattctctgtgcctttgtaagtgagaaaaacttttccttctcctcatatggggaaagtaataagtcatttacaaaggcctgtttgtaattgtggcctttagcgtctgtggactgcgttttaggtgcattatgagaga

SEQ ID NO: 875916 - DNA, 658 bp, Homo sapiens
tttttcagcctatctaattcttaggttcttatgagactcagatgaactagtctatttaaaagtacttagtagaaagtttatctaaattatcattttgcatttcatgatttaggcaatgattgattccaactaccatctgctaaacataacaagcctgaacattccagaaatgatcatttggcaattgttggtatacttcaatgcttaagtaaaaactaataatatgttccataaatagactcaaaaaaaattccagagcataaattaatcagcatttttagaaagactgaaaatagtctcacctttgtgtttgtgtargaaagtttagcaagaatgttttcttatttaactgctttcatagaaaagaaaactgttgtttctcttgtaataccataacattgcatcaaaaaataaatgataataataatattgcagctgtggcttctgtatttactctgaaaactatttaattaatctcttttcactactgaatctataataattatatgctaattcctttggttatttgatgagtatcctttacagattcaaatgttgctatggggaaggtaaggtgcaaagtgattttggataaacctaatgcaaatatcataatggatttattcattgagatggcaattataataaccttaaatta

SEQ ID NO: 875917 - DNA, 600 bp, Homo sapiens
tatgtatgttttaactatcaaatatgtgtaatagtgtactattccttttgtttacctctttatttatcactgacaatgtacttgagtgttataccattaatcccatttttctcataactcagtttttattgtacaattttgcatattgcagtgatttttaggaacatatatggcacattataggagaactgactgtacagacccaaattaaattagcggatatttgtaccaaaagacatgtacaaaaaaatcttaacaggtttattcaaaatagcaaaaactataatgctaaaataaagaatggtacatttagataatatagtactaaacatcagtgaaaaatatttagttackgctaagtgcaacagcctaggtaaatcccataaaaataatgttcacagaaagaagctagaaaccaggaagtaggtatattatgattctatttatatgaagttcaataaaagaaaataatagtctttgatgagagaaattagaatcaccgcttaaccttatggggtattgacacaaagaggtcatcttagtctattcttcctgctcttagaaaataccagatacttggtaatttataaacaatagaaa

SEQ ID NO: 875918 - DNA, 615 bp, Homo sapiens
ggggtgtatgaacagggagtaggtcacaaagatcacatgctttaaagggcaataaagatcacaaggcaaaggtcaaagcaaagatcacaaggcaaagggcaaaattagaattactgggccgggtgtggtggcacacgcctgtaatcctaccactttgggaggccaaggcaggtgtatcacgaggtcaggagatcaagaccatcctggttaacacagtgaaaccccgtctctactaaaaatacaaaaaaaattagccaggcatggtggtgggcgcctgtagtcccagctactcgggaggctgaggcaggagaatggcgtgaacccrggaggcggagcttgcagtgagccaagatcacaccactgcactccagcctgggtgacagagcgagaccatgtctcaaaaaaaaaaaaaaaaaaagaattactgaggagggtctacgttcggctgtgcacgtattgtcttgataaacatcttaaacaacaaaaaacagggatcaagagcagagaaacagtctgacctcaaatttaccagggcaggatcttttccccaccctaataagcctgagggtactgcaggagaccagggcgtatttcagcccttatcccaaccacata

SEQ ID NO: 875919 - DNA, 624 bp, Homo sapiens
tttctgcctctattgagataatcatgtgctttttgtcaatggttctgtttctgtgatggattacatttattgatttgtgtatgttgaaccagccttgcattccaggaatgaagctgacttgaccgtgtcgataagctttctgatgtgctgctggattcggtttgccagtattttattgaggattttcacatcgatgttcatcacggawatttgtctaaaattctctttctttgttgtgtttttgccaggctttggtatcaggatgatgctggcctcataaaatgagttagggaggattccctctttttctattgattggaatagtttcagaaggaatggtaccagctcctctttgtacctcaggtaaaattctgctgtaaatccatctggtcctggactttttttgtttggcaggctattaattattgcctcaatttcagagcctgttattggtctattcagagattcaatttctttctggtttagtcttgggatggtgtatgtgtccaggaatgtatccatttcttctagattttctagtttatttgtgtagaggtgtttatagtattctctaatggtagtttgtatttctgtgggatccgtggtgatatcccctttatcatt

SEQ ID NO: 875920 - DNA, 604 bp, Homo sapiens
tctgcaattttcccatctgtttgcatctgctttccaaaaagcctaaagaaaccttgaaggaactggggactggtatcaaagatggcaaagcagaagggtttaggggttctgaatgctcagtgaagagagcagggaaaggaaatggaggacatgacttcaaaaaagccagttcttaggcaacytacagaatgggagaaaagttttgccatctatccgtctgacaaaggactgatatccagaatctacaaagaacttaaacaactttacaagaaaaaaacaagaaaccccataaaaaagtgggcaaaggagatgaacagacacttctcaaaagaagacaattatgcagccaacaaacatgaaaaaaagctcatcatcactggtcattaaggaaatgcaaatcaaaaccgcaatgagataccatctctcaccagttagaatggtgatcattaaaaggtcaggaaacaacagatgctggaggggatgtggaaaaataggaatggttgtacagtgttggtgggagtgtaaattagttcaaccattgtggaaggcagtgtggtaattcctcaaggatctaaaactagaaataccatttggcccagcaatc

SEQ ID NO: 875921 - DNA, 671 bp, Homo sapiens
acctggaagtgatttagggctgttgaccagggttcttgtcatttgaaaatagatgatagcagaaaaaagagaaggagatgcaaaggtatgagcagagtggagtggcttccttatgaaagtggctggctagtgcttatgtctctggttttacagattgtttttattcaggtaatattgaatcaatcttaaaagaacttaagaagaagaataactcatcaccatgctgggcgccgtattttctatttttctctatggtgtytcccagtctttattcgtatctataccatttgctctcatggcggtctcatgtatctattctgtttgtaaaattttaatatgacatcatttttatgacacttcagtctctgcatcatttctaattattttattatattctgtcatgtaattatgtaaactctttgtcttttacttaaagtactcattattttgattatacaatactgttgcaatgaacatcttttttatttgggcattttcttttctttttagttattcagataaattccccagcattgaattactggatccaagagagagacatttttaaggatataaaatcacatttctaaagaattgatctaataaaaaaatgctgctagtaatatacctatttttcctgtttactcagtttgagttatagaattaaatca

SEQ ID NO: 875922 - DNA, 662 bp, Homo sapiens
tggcctcaacttaaagtcaccagctgcattaacccctaaccagagggtcatcctgttctttgaagctaggcattgaattctcctttctagccatgtaagtctcagatggcatcttcttccaatatacagctgtttcatctacattgaaaatctgttgtttagtatagctacttttgtcaattatcttagctagatcttctggataattggctgcagcttttccatcagcacttgctgctttaccttgcactttcatgttayggaaacagcttatttccttaaacctcatgaaccaacttctgccagcttccagtttttcttctgaaatttccttacctctctcagccttcatagttttgaagacagttggagacttgctgtggaataagctttggcataagggaatgttgtaactggtttgatcttcttattctttcctagcttttgagttaaagtgagacatgtgactctttctttcacttgaacacatagagggcattggaaggtttttaattggcccaattttaattctgtgggtcttggggagtagggagacctgaggggagggagagagacgggggaatagctggacagtggaacagtgagtgaggacatacacaatatttatctgttaagtttgttgtcttatgtgagcgtgattc

SEQ ID NO: 875923 - DNA, 640 bp, Homo sapiens
actaaaatctcaatggttaatggaacaaagatttatttattgttcatactgtcttttcaatgcaggtagtcaggggtctctgcttaccattattactcaggaaccaaagccaatggaggatgatactgtcatctcaacaaatgtcttcaggactagccatgggaggggaagagagcaaggggaattgggtgccaagtcttcaatacttctacactggagtgctacacataatttctgcttggattagctgcagaaagtcaaatgactatgcctaacttcaggaaggagtatgtctggaagaagaggagaaagaataatctcagcacatactgacactgttcctattttatacctgagracactttcagcttagaggaaaagggaaaagtagttggttcaacatcacatacacacagtagtaaagggaaagccacaattccagtattccactggctctaaaattagtgcttccagtctctttgatcactgcctgtagaggctggtgacattcttgctggagcctgttgggagttgaattgtgctcaccaaaaagatatgttgagattctaacccctggaacatctacatgtgctctcattcggaaatagggtccttgcaaatgtaatcaagatgaggtcat

SEQ ID NO: 875924 - DNA, 652 bp, Homo sapiens
ctattttatattgtttagaaagtgaattttgtcccaaaaaatgacaaaagatttatgagagctcttctctgtcctcaagccatgcatagtttaactggagagacaggctcagcatatatcaaaacaaggcagtgttttaagatttagttcttrttaatcagggccaaaaaaaacccaacttctgatgaacttggttcattcactctttggtagaaatggtagcagacccataatgttcatatttctaccaacatggttaacaggcagtttcatctggggtcatgagttggtgattccttcaccctgataattaggttttgccagcctggggtttaatgaaaattattaaaatggtgaattggaggagacttgcctagctgtgttaacaggagcatagttccttggggatagattgctcagagcttcagtgttttcaggattgaactgaatcatttattggtcacattgtttaagaaacaataataaacaaataataaaaacttgagaggcatgggagatggcctagtttttgaagggctgtggaatacagttagggatctctagacttggttccacacataacatagctttttacagttatcactggacatttacaatatgccagatactacgctaagcactttatatggat

SEQ ID NO: 875925 - DNA, 605 bp, Homo sapiens
taaaactcccaaaaactaattcgtatttctagttttaatcctaaaaaacctaactattgctcccctccatacctctcccttctattcattcctagtggctattgtcctcatctttaagtccatgagtaaccaatgtttagctcccacttataagtgagaacatatggtatttggttttatgttcctctgttaatttacttaggataatggcctcgagctgcatcaatgttgctgcaaaagacaagattttgttccttttcatggccgtgtagtagtccaatgtatgtatataccacattttcttattccaatccaccattgatgggcacctaagttgattccatatctttgctattgtggataatgcagcgatgagcaaacaagcrcatgtgtctttttgttagagtgatgtgttttctttcaggtatatacccagtaatgggattgctgagtcaaatggtagttttattttaccttctttttttttaatcttcctttaagttccaggatacaagtgcagaatgtgtaggtttgttacataggtatacgtgtggcatggtggtttgctgcacctatcaacctgtcatttaggttttaagctccgc

SEQ ID NO: 875926 - DNA, 609 bp, Homo sapiens
taaatagaccatttaaaatgtggaaatagctttttagatatattttctggttgatttgaagagattgtgggccaagtgcggtggcttatgcctataatcgcagcattttgggaggccgaggtgggtggatcacctgaggtgaggtcaggagttcaagatcagcctggccaacctagcaaaaccctgcctctactaaaaatacaaaaattagccaggtatggtggcttgcacctgtagtctcatctacttgggaggctgaggcaggagaattgcttgaacctgggaggcggaggctgcaatgagctgagattgtgccactgcacttcagcctgagcgacagagtgagattcgatttcaaaaaaaaaaaaaaagggagagattgtgtatatgtgtgtatgtgacagaccctaaattttctcctracatttgattaagttgatttaactatgccctttttcagaaaggaagaatccactctccagggtcttaatgaagcctgcccagtgcaacattgccatccagtgttaggcatctcagcaatgatcttctgcaaggggatctaaaaagctggaggcagaattttgtggttttgtaacaaaataaaataat

SEQ ID NO: 875927 - DNA, 552 bp, Homo sapiens
atgcagaatgacagtttaccaagataaccaaaagaatccataccaagacaacaaggagaatcttactgttaatatcttccattcctgaaggaaaacagaatatagtgaactgctctggcaaaaaacttgtttcagctttcagggctrtatattcatatgcccctggttgggtgacattggaatcagaaaattatcctgctagcttcttccaaatgtctgcctgaaactcgggttatgtgactcatctactcttcaggagactcagatcaggcaaaattctctaaaaatatagtgttttgaagacttttctgtcagatcaattgctgatcaatgaaagtcagacagaggttaaaaaatattaaaatgtcaagattcttaggtctccccctccaccagaaagaataaaaataacaatgctatatgcaccactcacctctcctcatccctctctacacctgggagtgctcccactcttcacaagagccattatacccaactggttatcaaatttgtcaatgcacagttagagggtgggcagaaagacaaaattaa

SEQ ID NO: 875928 - DNA, 625 bp, Homo sapiens
tcatgtacactgtgctttccatgttcatatggttatgtctatgattccaaaatccctaagatacatattattaaccaatgttatggagagagaactaaggatcatagaacctaattaatgtacctaaggttatacaggaagtaagtggccaggttaaactaggtttctgtagttacaaaagccatctacttctcattacaccatgttgcatctctcaatttaaaattacagtttaattgtagatccttgaggaattgccacattgtcttccacaatggttgaagtagtttacagtcccaccaacagtgtaaaagtgttcctatttctttgtagggacatggatgaagctggaaaccatcattttcagaaaactatcgcaaggacaaaaaaccaaccaccrcatgttctcactcatcagtgggagttgaacaatgagaacacttggacacaggaaggggaacatcacacaccggggcctgtcgtggggtggggggagcggggagggatagcattaggagatatacctaatgtaaatgacaagttaatgggtgcagcacaccaacatggcacgtgtatacatatgtaacaaacttgcacctagtgcacatgtaccctataacttaaa

SEQ ID NO: 875929 - DNA, 677 bp, Homo sapiens
ccagcctgagcgacagagccagactttgtcacaaaaaaagaaaaaaaaaattactttgcaaaaaaaaatctacattctcaattatccatttcactgatactaggtgtacatgctgaagctccttaagaagattgtactgacacatgaagtattcacttttaagcatctcatgccaacttatttatttgttgtctacagttgatatcttaaaaatcacatgcatggcaaattgcctattggctatggaaattcaaatgttcatgagcaattataagcatcttagcaaatgtgctcawattctatcaaaaaagaatagcaaaattgtatcatggattttctaattcattaattaatctctaaataagtctttattgagctcctaccatttgtcaggggatacaagaaaacaaagcagacttgtttcttgccctctttgaatttatgtttttgaaggacaactagataataagttaaataattagttaatttcagtttatgataagtactataaaaaataagagtactgagataagaatactttgtgtgagagagagaaggtagcctattccttcccccgcctccccaaccctccctggcccccacccacggctatctacagcacattctagatcatgctattatgaaaagattcagtcccctggtgctggctttgtagc

SEQ ID NO: 875930 - DNA, 615 bp, Homo sapiens
ctttgtaggtctctaacaccttgctttatgaatctggatgctcctgtattgggtgcataagtatttaggatagttagctcttcttgctgcattgatccctttaccattatgtaatgcacttctttgtcgtttttgatctttgttggcttcaagtctgttttatcagagactaggattgcaacccctgctttttttgctttccatttgcgtggtaaatagtcctccatccctttattttgagcctatgtgtgtytttgcacatgagataggtctcctgaatacagcacactgatgggtcttgactcttcatccaatttgccagtctgtgccttttaattggggcatttagcccatttacatttaagattaatattgttatgtgtgaatttgatcctgtcattatgatgctagctggttattttgcccattgcttgatacagtttcttcacagtgtcaatggtcgttacaatttggaatgttttgcagtggctggtactggtttttcctttccatgttcagtgcttccttcaggagctcttttagggcaggcctagtgttgacaaaatctctcagcatttgcttgtctgtaaaggattttatttctcccttgcttat

SEQ ID NO: 875931 - DNA, 658 bp, Homo sapiens; identical to SEQ ID NO: 875496

SEQ ID NO: 875932 - DNA, 635 bp, Homo sapiens
attatttgacttcccagtttggttttccatttaggcaagtatttctgcttacttccataatacattttttagtcttgttgctttttccatgacttttctataatcttgtctgcattttttaaaactttcttctctgcttttcttggtatttcttttgttctattattttttcaaactctgctagctatgtattctaagtttttctatagawagtatcaagaggacatagaattacagaattttaaggaatcttggaatgaattaaaataccttctagtatttttacctgtgttgaacattctggtcaaatgattctctagatagagaatgtgaggctcaaagagattaggatgcttttttttagacataggaattggcagaaatgagatttgaactcatgttaaagcccagtactcttgcttctttttatatcctattggcgtgtgttttaataatacaaacgggagtgagtctgtgggtagaatgagaatggaattagctggtgaacccaatggaagtagataagaatggaatgagcaggggaagtccaagtttgaagataaacaacactggattggataggagtacagactcttctataagagatcaaaatattggggtttatgacaagtttg

SEQ ID NO: 875933 - DNA, 635 bp, Homo sapiens
attatttgacttcccagtttggttttccatttaggcaagtatttctgcttacttccataatacattttttagtcttgttgctttttccatgacttttctataatcttgtctgcattttttaaaactttcttctctgcttttcttggtatttcttttgttctattattttttcaaactctgctagctatgtattctaagtttttctatagatagwatcaagaggacatagaattacagaattttaaggaatcttggaatgaattaaaataccttctagtatttttacctgtgttgaacattctggtcaaatgattctctagatagagaatgtgaggctcaaagagattaggatgcttttttttagacataggaattggcagaaatgagatttgaactcatgttaaagcccagtactcttgcttctttttatatcctattggcgtgtgttttaataatacaaacgggagtgagtctgtgggtagaatgagaatggaattagctggtgaacccaatggaagtagataagaatggaatgagcaggggaagtccaagtttgaagataaacaacactggattggataggagtacagactcttctataagagatcaaaatattggggtttatgacaagtttg

SEQ ID NO: 875934 - DNA, 629 bp, Homo sapiens
ggtggttgtctctggacctgcttcttggttatcatggagctggactgggcctgggtgagagggcctgatggggttgtcctgggtcatcacgggggtgatcagaaaagatgcagaatggaattgctgcgaggatgaatgagatgactgtcagcacagaataggcacccagtgagtgttcagggattaccctcagcagctgcccagaggccaaaaccacccacctgatagcgactgtccccaagccaggagaaaaagaagagagcaggtcccactcacctgagtctgatcagtcagctgtgttgagatgtgcctctcacytagaaaatggtccttcacgcagagccactcacagacacggctgtgtgtctctaactgctccacaacacagaggcgatgggggcttagcaacagtgacattgtggggtgacacaacccaccacaatgggagcctgcatgggtcaacagggcccagagtcaatgtcctctatcccctgaactgacatgtgtggatgcagtgtgtttgtgcatgtgtgtgtgcctgtatatgtgtgcacttatgtgtgtgtttctcctgcttctctggccaggcctagcttctccactcacgggtgcacccaggtcatcactga

SEQ ID NO: 875935 - DNA, 285 bp, Homo sapiens
cagctgcccagaggccaaaaccacccacctgatagcgactgtccccaagccaggagaaaaagaagagagcaggtcccactcacctgagtctgatcagtcagctgtgttgagatgtgcctctcacctagaaaatggtccttcacrcagagccactcacagacacggctgtgtgtctctaactgctccacaacacagaggcgatgggggcttagcaacagtgacattgtggggtgacacaacccaccacaatgggagcctgcatgggtcaacagggcccagagtcaa

SEQ ID NO: 875936 - DNA, 629 bp, Homo sapiens
ggtggttgtctctggacctgcttcttggttatcatggagctggactgggcctgggtgagagggcctgatggggttgtcctgggtcatcacgggggtgatcagaaaagatgcagaatggaattgctgcgaggatgaatgagatgactgtcagcacagaataggcacccagtgagtgttcagggattaccctcagcagctgcccagaggccaaaaccacccacctgatagcgactgtccccaagccaggagaaaaagaagagagcaggtcccactcacctgagtctgatcagtcagctgtgttgagatgtgcctctcacctagaaaatggtccttcacgcagagccactcacagacacggctgtgtgtctctaactgctccacaacacagaggcgatgggggcttagcaacagtgacattgtggggtgacacaacccaccacaatgggagcctgcatgggtcaacagggcccagagtcaatgtcctctatcccytgaactgacatgtgtggatgcagtgtgtttgtgcatgtgtgtgtgcctgtatatgtgtgcacttatgtgtgtgtttctcctgcttctctggccaggcctagcttctccactcacgggtgcacccaggtcatcactga

SEQ ID NO: 875937 - DNA, 591 bp, Homo sapiens
ctcagaagactgggatttagacaaatggaggggagaagagggtgttctaggcagagctataaaatggtaagtcccaattaatcctattggagaacaggggaacaaaagaggggtgtaattccccacaactagaccctcatcagcaataaagtgggtgaatgttctctcctcttgaattcctttttgtatccaaacaacaaagcacacagkgagtgatcttgcagagacgaagacaagcagggtttgcccaaccactttccaccagtgtgtgggtggtctctgagcatgcttgagtgtgtgcacagaaatcagatccaagcctgaggaaacacttagctcagcttgttcacttgttcagagttggggaattacacaggaaccttatctgacacattcctcaaaggcaactacaaccttgttcccgggtcagctgataacactccctgaggaggcacggggtggggctggtcccgccttgcctcagtaggtgatgggccacattgcctgtggaggtgtttccacacagggtctcgcatgatgtttgtgttggaggaagtgaagttggaaataacagaaactctaccatggaga

SEQ ID NO: 875938 - DNA, 667 bp, Homo sapiens
ttatgcagttgagataaggattgaaatacgccctggtctgcagtaccctcaggcttactaggattgggaaattccagcctggtaaattctagtcagaccggttctctggtctcaaaccctgtttcctgttaagatgtttatcaagacaatatgtgcacagtgggacatagaccctcctcagtaattctaattttgcctttgccttgtgatctttattgccttttggagcatgtgttctttgtgacttactccctgtccttacaccccctccccttttaaaatccctaataaaaacttgcyggttttgtggctcagggtcatcatggtcctaccaatatgtgatcaatatgtgatgtcacccctggaggcccagctgcaaaattcgtttctttgtactctttctctttatttctcagaccagccgacacttagggaaaatagaaagaacctacgttgaaatatttggggctggttcccccgatagcctgtggctgagaaaagagaatcacttgagcccagaagttcgaggtgaggttagagtgagctatgaccacacctctacactccagcctgggtaacagaacaagacactctttctaaaaaacaacaacaacaacaacaacaacaacaacaacaacaaaaacaaagacttacatttttgaatcat

SEQ ID NO: 875939 - DNA, 691 bp, Homo sapiens
gctcagcaaaataaaaaaaaaatgtagctgatactatttttaattgatgtatcactcaaagcttttacatactgatttaatgatattaaaatcataattatttcattttatgttccaacattcttccattttaatttttcttttccagatgataaattatgacaacatcatatgtggaatcaagaatttataattaactgatgtcaccacaagccttggataagcccttgtatctgtggcagagtgtattattgtctaaagaattgtagcccttgactcttgtttttttttttttcctagtaagccctgtactgtggttagattaaragtgccacagtgaaaacgacttggtcttgcgacttgattttgtcaatgcaaaatgagaaaaaatggcatatgctatttcttagaagagccttaagaaccatcacatgcatctgttagtgttctttttgtctgcaggacaaaagcaatatcctgcatactccttcagctaatgtcttagaataaagagtcaaagccacacatttgataaacctgtaaactaagtgaaaaataagtttgtgttgatgtaagccactaagattaggatgccatttgttgccacagccgaacttagttttaagcagactgatacagcttctaaatgctactctgtacaaaaataataataatgcctgcttttctactt

SEQ ID NO: 875940 - DNA, 564 bp, Homo sapiens
aaactgaatccagctgcacatcaaaaagcttatctaccacaattaggtaggttttattcctgggatgcaaagttgattcaatgtacccaaatcaataaatgtgatttatcacgtaaacagaactaaagacaaaaaccacatgattaccttaatagatgcataaaagkctttcaataaaattcaacacctcttcatgttaaaaagtatcaataatctaagtattaaatgaatttacctcaaataataagagccatctgtaacaaacccacagccaacatcatattgaatgggcaaaagttggaaacattccccttgagaacggcacaagacaaggatgccctctctctccacttcaattcaatatagtattagaagtcctagccaggtcaatcaggcaagataaataaataacgggcatccaaataggaagagaaaaaggcaaactatccctgttagcagatgacataatcctgtatgtagagaaacccatattctcagcccaaaagctcctttaaatgataaacaacttaaaaaaattctgacggatacaatattcggtgtgca

SEQ ID NO: 875941 - DNA, 636 bp, Homo sapiens
ttcaaaagctgcaactgagaagtgagaatgtggttaccttaattgaaaaaatacctttcagcacttcaaataacttcacattttccactagataagtggtgatttttgcagctacatcaactactaattaaagataattttataaactgaaaacatccaatattttatgacaatgataaggtargtatgtcgatctacctaggagaatcattcaccggaggtagaattgagtccaattttaaatgctacagggccactgatttcagttcaatttaatacaaaatttgaactgaaattttgctctgaaaggtaggtaatctctgtcacagaagatgatccagctaagctaggtaatcacgtggcaggaatttttgtcctgagaattcaaacatgaaatacatagaccccagaagtttacaattgtattaacaagttgattaaccgtccaacttggtggtttgtgaagaggcttattatagatggtaaggttcgctaccactgaggcatcaatgtcaatttcagtgtaccatctcttactcattcaatatctatgccctccactatgtctaacgttatcaagagcttagccagtattcaaatagatgacatttttaaatgactcaattccaattccat

SEQ ID NO: 875942 - DNA, 664 bp, Homo sapiens
attatgtttttcacaaatcacagtaatatggctatagaaattatacttttaaaatatttgagacctatgttgaatttattggttatttatgattagaaaagtatactggtaaagaaaagatgtcttatatatgaatataatattaattagctaccatttgaccaagaagcttccactgaagggaacagtaaaagtccttgttactatctgtccatattgcacatattcagtttcccattgctcttatcaaaaatctatgtaggcaactaaaacgttctttgcagataacatgctggattttgccatatgaatggtaaacaygagttagtctggggcactacacaatataaagcaatgtgattgaaaactagatacctttctttagatactactccaacatatcaagataattgagttattaaacactgaataaccgaaaagaagagcaaggtgaacatctaaaaatattatttatcctacaggagttgttgccttatctgcaaaatttttattggatattgtgattgttttattaaaaaacaacctatttttaaaagtaaatgaaattaatttacattggaaattatgttagagatatgtgaatgattaaagtttgtgttttaatatcattcttggattttatgtttctcagattttagtaacc

SEQ ID NO: 875943 - DNA, 608 bp, Homo sapiens
aatgacagttttagcatagcttgtctctgcaacttctggctccatgattccatggcaccctatcttcatgaacctgctgataaatctaatttaaatcttcttcatgatggtacttaatcagaagaaaaaaatgaatctcattttacacagaaaacagtaatgaagaaataggcaaataataagaacactcaaaattttgatcccatttttttwaaaaaaatcgatccatatcagtaaacatttgcaggtgaaaagtaactagtgctcaaataccatcttttcatgaattaatcatggctgcctttgcacagtagtagactgttcagtgcttagttaaggccccagctagttctcgctcacagactctattcttgagagtacaaccgattatttgaattgaaattaccaatcccaaggtgcctaaatgagcaagaagttatgaatattatagggagattttcttgtcttccaagtctgctctgaatttagaattttattgcaggttcagagagcactgagacaatgccatgttcagcccactgggaaggaggaaaatgaataagaagcaagtgaagattccaaagggagcaataaacaaacctgtccca

SEQ ID NO: 875944 - DNA, 608 bp, Homo sapiens
aatgacagttttagcatagcttgtctctgcaacttctggctccatgattccatggcaccctatcttcatgaacctgctgataaatctaatttaaatcttcttcatgatggtacttaatcagaagaaaaaaatgaatctcattttacacagaaaacagtaatgaagaaataggcaaataataagaacactcaaaattttgatcccatttttttaaaaaaaatcgatccatatcagtaaacatttgcaggtgaaaagtaactagtgctcaaataccatcttttcatgaattaatcatggctgcctttgcacagtagtagactgttcagtgcttagttaaggccccagctagttctcgctcacagactctattcttgagagtacaacygattatttgaattgaaattaccaatcccaaggtgcctaaatgagcaagaagttatgaatattatagggagattttcttgtcttccaagtctgctctgaatttagaattttattgcaggttcagagagcactgagacaatgccatgttcagcccactgggaaggaggaaaatgaataagaagcaagtgaagattccaaagggagcaataaacaaacctgtccca

SEQ ID NO: 875945 - DNA, 592 bp, Homo sapiens
ccatgcgcaatcctggctcagctggccaaagactcagatatatatcatgtaataatactttatctataaacatacaaaataggcaatttcactaaaaaaaatgcaaggcttaggtatttttattcccacaagatattcttcagacttttgtcttctactatgttatgagaatgtacgaaggcttgctctgttgtatatcttttaraaactacagaaaatccaatttccagttccctgcatgagaaataaaaaattcaccactgtcaaattttcttgacatataaaaaggtgacctcaaagggggaaaaatagtgaccaattgtatacatagtctttccaggataaaaccttttttatccatctttcctaaaatgggagtggttaatactgtacttggacctttgaaacaattcaaagaggaaaatttcactgataaaagtgttagaaatacatgaaggtaataactggcctttacttaatgtggtattatatagaaaaagaaaagactacattgaaaatcccttccaatgctttcacttactgccttagaaaaataattattaattaaattataacctggcaaaaagtaggg

SEQ ID NO: 875946 - DNA, 592 bp, Homo sapiens
ccatgcgcaatcctggctcagctggccaaagactcagatatatatcatgtaataatactttatctataaacatacaaaataggcaatttcactaaaaaaaatgcaaggcttaggtatttttattcccacaagatattcttcagacttttgtcttctactatgttatgagaatgtacgaaggcttgctctgttgtatatcttttagaaactacagaaaatccaatttccagttccctgcatgaraaataaaaaattcaccactgtcaaattttcttgacatataaaaaggtgacctcaaagggggaaaaatagtgaccaattgtatacatagtctttccaggataaaaccttttttatccatctttcctaaaatgggagtggttaatactgtacttggacctttgaaacaattcaaagaggaaaatttcactgataaaagtgttagaaatacatgaaggtaataactggcctttacttaatgtggtattatatagaaaaagaaaagactacattgaaaatcccttccaatgctttcacttactgccttagaaaaataattattaattaaattataacctggcaaaaagtaggg

SEQ ID NO: 875947 - DNA, 419 bp, Homo sapiens
ttttgagtgagtttcttaatcctgagttctagtttgattgcactgtggtctgagagagagtttgttataatttctgttcttttacattttctgaggagtgctttacttccaactatgtggtcaattttggaataagtgcaatgtggtgccgagaagaatgtatattctgttgatttcgggtggagagttctgtagatgtctattaggtccrcttggtgcagagctgagttcaattcctggatattcttgttaactttctgtctcattgatctgtctgaaaatcagagcacctcttctcctccaaagcaacacagctcctcatcagcaacggaataaagctagacggagaatgactttgatgagttgagagaagaatgcttcagacactcggtaataacaaacttctctgagctaaagga

SEQ ID NO: 875948 - DNA, 657 bp, Homo sapiens
atataaattgcatatttattttaaagcataaaaagagaaaatttctacttaattccataaacactgcattatattcaatccttatgaaataattccttccccttagaatgtacagtagtttataaacaaagttatgtttcactctatgtaggtaataatattattgtataacaaaaggtttttgaagcaaagaattaggaaaggagaggaagaacaaaggttgtgccataaacatagtcatttgcaataacttaaataagagtagaatacgtattttcttttagatctaagtgtytgaggcacaagccctcactgtataggtgtttgatagatgttccctaattcacatggagtagtgagagagtgtctgaagactaattttttaaatccttgtgacatgaaaggttttatatagtttataccacagaacttgttcaaagaggtactacaggaaaatattataagttggtttaagggatttcgggaattagcaagttattaaggaaatataagaacatttagaaataaataacccacctttggagttttattactgaaaataagtgttgccacgatactaccaaaaaaaaagaaaaagagaaagagaaaaaaaaacacctcaaatgtattatgctcaagttttacttgtaaaattaa

SEQ ID NO: 875949 - DNA, 622 bp, Homo sapiens
ggcacgtagttctcaataaacatcagtcattattctttgcttttattgttattggaaaggaatatgagaactattaaatatagatttctcaacattgtctaaaagaactaagttgcccaactttagacagcaagcctatatagcttgtatgttctgccatccaattgagtgtggcttaggaaaaaatattatatcagttcttaggagtgaaaaaagataaaggtaaatgttttttgtacattgagtrtagtgtaagtaaattttgatcccactgtagaagagatattccttcagtatcctcaagctgtgtgcctgaatctaacatttgtggaaagtgagagaaggatgcaactagaggccaaaataccgtatgcatgagtatttaaaacatacattaagctaataataaactgttaaataaaatatgttttagccttttactttgaaaactataccttcacaatgaattggaaggccacactcaaatttagaattaacacagagttccatgctggaacttggtgagaaaggaaagcaggctgtattctagcctctgacctacctcctttctcccaccagtctctgttcttcatgaggtgtaatgcgcaagcattttgtcaac

SEQ ID NO: 875950 - DNA, 613 bp, Homo sapiens
ctagttagaagatataatggtgtaagactttaggcttcagtctaaaccactaagaatccctaaatgttaatatcccaccactgttttattccataagttcttaactgtgaagtcttgacaggctggcttacttccataattgtgaggtacattagaaattatttattgctaataatagatagggacaaagtctggagaatattcattcttttgaaatctgctatgttgggtttgctgcatccctataatagcactctcattctcattcatttaaatatggttaaggatcytgaaaaaattctgggtataacccagaatctatatgttctatgtggtgatctttagtaacctgagtcagtaaagctagagtttaaaatggaattgaggaccctcgtactctttaaataaaaataggtgaaaatgctcatatgaaagcaggcagacctccctctgtaactgtgctcccaaagtgagacaggcaccaggaacataggtactaattttgccatatatacacatatatatgcataaataaatatatatatacacatacatatatatgtgtatatatatatatttataattagcttttgcaggtcacacaaaatgattt

SEQ ID NO: 875951 - DNA, 613 bp, Homo sapiens
ctagttagaagatataatggtgtaagactttaggcttcagtctaaaccactaagaatccctaaatgttaatatcccaccactgttttattccataagttcttaactgtgaagtcttgacaggctggcttacttccataattgtgaggtacattagaaattatttattgctaataatagatagggacaaagtctggagaatattcattcttttgaaatctgctatgttgggtttgctgcatccctataatagcactctcattctcattcatttaaatatggttaaggatcctgaaaaaattctgggtataacccagaatctatatgttctatgtggtgatctttagtaacytgagtcagtaaagctagagtttaaaatggaattgaggaccctcgtactctttaaataaaaataggtgaaaatgctcatatgaaagcaggcagacctccctctgtaactgtgctcccaaagtgagacaggcaccaggaacataggtactaattttgccatatatacacatatatatgcataaataaatatatatatacacatacatatatatgtgtatatatatatatttataattagcttttgcaggtcacacaaaatgattt

SEQ ID NO: 875952 - DNA, 633 bp, Homo sapiens
aattataaaaatgttatatattatatagtattacacatgtctatggaatattgatatataacttatattatacatattatatatgtctatatagatattatctatggcataatgcatgcatatataatgcagaacataaatatgcatagattatatatgcattgtaatatatacatataacaaatatgtaagatatatgcatatcttatatatgtatatattataaatgtatacatatatgtcatatatagcatacatatataagatatgcatatattatatatgatatgtatatatttgtaatatatgcattatataatatataatakatagatatgagatatatacattgcttatatatacatacatcataatacatacatataatgtacatatagcattatgtacatagattttatatatatacctacattgtaatatatacatgtaatacatatataagatatatgcatatatctttatcattataataaatgataaatgtgcacagcatgaggtggtatggttttggaatagtcagaaaaactcctaaggagaggtaattatgtaagtacttagtctgaattacggtggtgagtagaaattagatctgtcagaggtggagggagagat

SEQ ID NO: 875953 - DNA, 643 bp, Homo sapiens
gtagatggctgccttttgctggtatcttcatacagtcttctccctgtgtgtgtacacagccagccctccacatctgtgagatctatatccacacattcaatcaactgcagatcaaaatgttcaaaaaagataacaaataacaataaaataatacaataagttttacaaagaaatagcaacgcaacaaaacactatacaacaatataatacaaataaaaaactacagtataacaactatcacatttacattgtattaggtattataagtaatctagaaatgtacaasaagatgtggataggttatatgcaaatactatgccatttcataaaaggaacttgagcatctgtggatttctcagagggtcctgaaaccacagcctcatggataccaagaaatgactgtatttgttccctaatcccatctttctataaggatacaagtcatataggattagggctcactctaaagcttccatcaatcttagtcacctctttaaagatcttatctccaaatacagtcatatactgagatgagacgtcaatatatgaattttgggggtccacaattgagcccacaaggccatataatatgtcactatgaatctactagaaaatatagagttcatgatataaaataatttat

SEQ ID NO: 875954 - DNA, 601 bp, Homo sapiens
tttgatcagtttttctaattgaatgacctctattaggacactaaatgatatccattggaataactatttgaaaagcacacaaaaataatacattagttttccctccaagaagtaatctgagtaaccaatggtaaccttactttagagcaatctctgtagtcacctgagggctacatggcctattggtactattttcttaaatactggaaggtctctatagctacttctaaagtgaagtcaccatgttcttaggaggaatgcatgctcttatccaaattccactcacaaattgcagtctcaagggtacacatggtacctctggaaaaaaagtgatttattttttaccctacatgtggaatctgcacgaatcggaggatacagattgatggtaccttcrtcatagactcagatgactggtggccatcgggtacctagttcagtttgaataattgaatctaatctttctttctgaagagattgcttgaggaaaatcagtttaactggttctgtttgtttataccaacagaacaaacagtttgagtgacatgcacctgccccacagaaagacggagtgtcaagtacgtgaatgaggatgcggaag

SEQ ID NO: 875955 - DNA, 574 bp, Homo sapiens
tcttgaactctttgagccacatataaagtttggaattagaacagaatgcctaatatgcagggctgaagtaataattatattacatcatgtaggtgaaaccacataacacttcctggcatgtaatctgtaaatcagcatagatttccactggagaagtaagggtggaagtgacacactaaagcagattcttactatatttgttcataattatacttcttaaaacattgtaagctgagttctttggaaagtagattctaagacagagattaatttgcagtatgttcactaaggagtgtctttgtgatcaacattcatggaagagaaagtagggaaacaggattgggaagaagaaaatgctatattgatatgtaggatcaatggcaacctttacaatcctaagagaactcyggagtttgatcagcttttcaaatttcttccctcttggatgagttagcaagtgctttattgtgttatgtggaacagtcagtggatatggcctaccaggtaaatgagtttgaccttcagcaaggcagctctttgcagatgagacaatctctgcaggtgttgagaactg

SEQ ID NO: 875956 - DNA, 511 bp, Homo sapiens
aaattaggaattgttgttggcttgtcatcagaaacagtggaggcaaaaagtcaagtgtaatgacatctttaaagtgttggggttggaggtagcagggaaacccagtcaacccagaattctatatacagccaaaacatctttcaagaatgaaggcaaaataaagacattttcagataaacaaaacctaagaaaattgccagtagacctattctacaagaaatgctaaaaattcttcacactgaaggaaaaatcatatgcaaacttggattttcaagaatgaagagaaccgaaaatagaaaatataygggcaaacataaagtacatttttcttaatttaaaaatatgatttttaaagcaacaattattacactgaattgtggggcttatatgtggataatatcatatatacacacagctattgtataaagtatgaggtaggtatggaagtagatggctacaaagtacagtttaggtgagatggtataatataaactcaaagtaaactgaaaag

SEQ ID NO: 875957 - DNA, 575 bp, Homo sapiens
caaccttaaaaccagagaccctaacattgtaccttttaagtaggagatgaaggtaaaaattggcttctattttatgtgctgtagtagtaatccaacatcttcccataattagttttagaaatatagtgactatgtatatacaaaaatagatatataacwctacttaggaaaacattgttctagaggaatgcagtgaaaagaatttgagtctgaatgattcaaatctctatgacccttaactgagaacacatttcagacagggttataacaattaaataaactgtatctaacatattactggcacagaataggtagtaagcaaagagttcccctccataacctgcctctgatagtcttactctagctactcagaatggccttttgaagagctacagccatctagaaaaagataccaaggagtctatccaataaaaaaggaagtgtgggaacccctgtcattactagttccatattacagaaaattggatggagaaaaactgtacagctcacacataatgcttcactgtcttcaggaatgcataattcataaggttataattaagagatggagggag

SEQ ID NO: 875958 - DNA, 580 bp, Homo sapiens
gagggcactaaggcctcaagggttaagtggctggtgacaagcacagagtgagtttgcggcagagcagggcccagaatccagggctccaggtgtccagcgcaaggctcttttgtggctcagagcagcctcctcactgattgtggattggtgcccagtaaagctcaaacaaggatagcttccaagccttgctagcaggtcagcctgctggctcttccaggagacctggaagtgttctctgagcttggggatgtcccctcttcagaccaaagtcttatagccaaaactcktctatttccagggtccctcaacaaaacctggggtcagtggggttgggggaagccgggacaggcaacggctatgcctggcatcctgaagctcttgagtgaggcctgcacacagaccagggtctgctgccaggacccaggctgaaacccaaacacccctgtctcagggtgcagtaccatgggggcatctcaattcaacatggattaggcatgtagatcctcagcttcaagggttcttggtcacgttttcccacctccttccttttcttgcttccttctttttaaactatcaggac

SEQ ID NO: 875959 - DNA, 580 bp, Homo sapiens
gagggcactaaggcctcaagggttaagtggctggtgacaagcacagagtgagtttgcggcagagcagggcccagaatccagggctccaggtgtccagcgcaaggctcttttgtggctcagagcagcctcctcactgattgtggattggtgcccagtaaagctcaaacaaggatagcttccaagccttgctagcaggtcagcctgctggctcttccaggagacctggaagtgttctctgagcttggggatgtcccctcttcagaccaaagtcttatagccaaaactcgtctatttccagggtccctcaacaaaacctggggtcagtggggttgggggaagccrggacaggcaacggctatgcctggcatcctgaagctcttgagtgaggcctgcacacagaccagggtctgctgccaggacccaggctgaaacccaaacacccctgtctcagggtgcagtaccatgggggcatctcaattcaacatggattaggcatgtagatcctcagcttcaagggttcttggtcacgttttcccacctccttccttttcttgcttccttctttttaaactatcaggac

SEQ ID NO: 875960 - DNA, 580 bp, Homo sapiens
gagggcactaaggcctcaagggttaagtggctggtgacaagcacagagtgagtttgcggcagagcagggcccagaatccagggctccaggtgtccagcgcaaggctcttttgtggctcagagcagcctcctcactgattgtggattggtgcccagtaaagctcaaacaaggatagcttccaagccttgctagcaggtcagcctgctggctcttccaggagacctggaagtgttctctgagcttggggatgtcccctcttcagaccaaagtcttatagccaaaactcgtctatttccagggtccctcaacaaaacctggggtcagtggggttgggggaagccgggacaggcaacggctatgcctggcatcctgaagctcttgagtgagrcctgcacacagaccagggtctgctgccaggacccaggctgaaacccaaacacccctgtctcagggtgcagtaccatgggggcatctcaattcaacatggattaggcatgtagatcctcagcttcaagggttcttggtcacgttttcccacctccttccttttcttgcttccttctttttaaactatcaggac

SEQ ID NO: 875961 - DNA, 575 bp, Homo sapiens
ccaactttgctgttttatttggaatattttatatcatgcactcactgggaaaaaagcatgtttaacattagagagacaatctttctgagtcaacattttataatacactaagaatattgctgcatacaaattttgctttaacttctagtaggcacctacaaggaccacctttgtactctgttctcaaggaagaagaaatgtgacaggatcattctaggcaaaccttatcctagaaagaagcagtttgctgcagccactcttatgatcacacacacacacgcacacacacacataaacacacacacacacacaaatatgggaaagcgactggacacagccctctcctaactttctcagattaaccgtggtctcatttgagacttaggraagttatttgtgtaattattattcattcaacgccacccctgactctgccatagccatgtcctacaatctaaatattctgctctgatatgagatcttgtatcgaaaaattaatttttggtttggacaatagggccaccaaagatggcatataaagatccttttattatgcacaaaagtatcactacttg

SEQ ID NO: 875962 - DNA, 658 bp, Homo sapiens
ctgggaggccttaggaaacttacaatcatgacagaaggtgaagcagaaacaagcaccttgttaacatggtggcaggagaaagagagagaaagagtgaaggaggaagtgttacacatttttaaaccatcagatctcatgagaactcactcaatatcatgagaacagcaaggggaaaatctgctcccatgatccartcacctcccaccaggcctctcctccaattcgacatgagatttgggaggggacacaaagccaaaccatatcacaagcttttaaaaagtaacttataaatgatataaatgtatgtgtagaaaacaaaagaatttacagacaaagtgttagaatcagtaattttaaaagctaaggtcctgaaattattgtgacagaggaagcagatagcctaacatgtatattttattatgttttattgtatttttaattgacagataataattctatttatggggtataatatgttttgatacacgtatacattatggaatgatcaaatcaggctagttagcatatctcacttccaatatttatcatttctttgtgatgaaaacatttaaaattctcttttagctattttgaaacatacaatatgctattattaattatggtccatgctggtcaatggattgccagaacttattcc

SEQ ID NO: 875963 - DNA, 658 bp, Homo sapiens
ctgggaggccttaggaaacttacaatcatgacagaaggtgaagcagaaacaagcaccttgttaacatggtggcaggagaaagagagagaaagagtgaaggaggaagtgttacacatttttaaaccatcagatctcatgagaactcactcaatatcatgagaacagcaaggggaaaatctgctcccatgatccaatcacctcccaccaggcctctcctccaattcgacatgagatttgggaggggacacaaagccaaaccatatcacaagcttttaaaaartaacttataaatgatataaatgtatgtgtagaaaacaaaagaatttacagacaaagtgttagaatcagtaattttaaaagctaaggtcctgaaattattgtgacagaggaagcagatagcctaacatgtatattttattatgttttattgtatttttaattgacagataataattctatttatggggtataatatgttttgatacacgtatacattatggaatgatcaaatcaggctagttagcatatctcacttccaatatttatcatttctttgtgatgaaaacatttaaaattctcttttagctattttgaaacatacaatatgctattattaattatggtccatgctggtcaatggattgccagaacttattcc

SEQ ID NO: 875964 - DNA, 600 bp, Homo sapiens
tacccataataatggaaaataggaagcaaataggagttgtgtcctttacaacttctaaatctgtcattgccacacttcccccagggctgttaaggcatcagaccaactgctcctcctattcacatccctgcagatggccaggaaaggagctaatagggtggttacaggggcaagatggtccaatccttgttttatcagactcctagtaaccacagcttgatgactgtcctgctataggacagactgcatttgcccaggtcctgccagctgtgcacccctccatggtgccacatggcaggtcagaagtgccaatgargtggcatgaggctcctgccacaccacctttcctcaaagccttatgtcttcatcatggaaaccttgtttatccattaccaagccaagagagaggattactgagaagaaggcagccaaaaacagggcactccctttggaacccagcgggtttctccgatcccaagcacaccttagtagttagcacagtgtgaatgaagacaaccaaatgttcatctgtgaatgctaataatgaatggttacaactacaggatcagcttgttcttccttcagggacatggaggcaga

SEQ ID NO: 875965 - DNA, 600 bp, Homo sapiens
tacccataataatggaaaataggaagcaaataggagttgtgtcctttacaacttctaaatctgtcattgccacacttcccccagggctgttaaggcatcagaccaactgctcctcctattcacatccctgcagatggccaggaaaggagctaatagggtggttacaggggcaagatggtccaatccttgttttatcagactcctagtaaccacagcttgatgactgtcctgctataggacagactgcatttgcccaggtcctgccagctgtgcacccctccatggtgccacatggcaggtcagaagtgccaatgaggtggcatgaggctcctgccacaccacctttcctcaaagccttatgtcttcatcayggaaaccttgtttatccattaccaagccaagagagaggattactgagaagaaggcagccaaaaacagggcactccctttggaacccagcgggtttctccgatcccaagcacaccttagtagttagcacagtgtgaatgaagacaaccaaatgttcatctgtgaatgctaataatgaatggttacaactacaggatcagcttgttcttccttcagggacatggaggcaga

SEQ ID NO: 875966 - DNA, 621 bp, Homo sapiens
atagcaatgtgagaacagactaatatagaaaattggtactgagaagtggggcattgctataaagatatctgaacatgtggaagcagctttggaacaggcagaggtcggaacagattggagggctcaacagaagacaggaagatgagggaaggtttggaatttcctagagacttgtcatatcactatcagaaatgctgatagtgatatggacratgaagtccaggctaaggaggtctcagatggagatgaggagcttattgggaagtggagcaaaggtcactcttgttatgtattagcaaagaatctggcagcattgtgctcctgctctagggatctgcggaactttgaacttgagagtgatgacttaggttatctggcagaagaaaattctaagccacaaagcattcacagtgacctggctgcttctaaccacctatgcttgtatgtgtgagcaaagaagttacctgaaactggaacttatatttaaaagggaagcagagcataaaatttgaaaaatttgcaacctggatatatggtagaaaagaaaagcccattttcagtggaggaattcaagcaggctgcagaaatttgcataactaaaaggaaggcaagtgctgatag

SEQ ID NO: 875967 - DNA, 617 bp, Homo sapiens
tccctttctgactttcataaacattcagaagactccagctcattcagagaattttcactaagaatttatttgctttttaaaatacagaaaagtcataaaatagaaaaagtttaggcaaagacttccctttgcctgcttgggtggatgaatgaatgaactagtgcatcacactgactgcctgctctgtgtcaggttctacttgaggccccagatactagcaagccctccaggttctcacagtctaatgagatgyagcaatgtaaacagctactttttatatgatgtgaaaaaacagaagtattaatgaaatgctgtgggaacataaactaactagggagtagtaattctgccttggtggtacttgggttttgattttgatcagagaaaattagaacaggtaatatttaaggtagttttgaagaatgagtaaaattttccagaaagtttggggaatgtaattcctggtagagggaagcctgtgaataaatgcagtggcaggagcattcacagtgtgagattctaaccggtgtggacatgtagagagtcaagtgtgaggcgatgaagggagtgagagaggagtaggtagcatggggacctggaaggtaggtggaggccag

SEQ ID NO: 875968 - DNA, 617 bp, Homo sapiens
tccctttctgactttcataaacattcagaagactccagctcattcagagaattttcactaagaatttatttgctttttaaaatacagaaaagtcataaaatagaaaaagtttaggcaaagacttccctttgcctgcttgggtggatgaatgaatgaactagtgcatcacactgactgcctgctctgtgtcaggttctacttgaggccccagatactagcaagccctccaggttctcacagtctaatgagatgtagcaatgtaaacagctactttttatatgatgtgaaaaaacagaagtattaatgaaatgctgtgggaacataaactaactagggagtagtaattctgccttggtggtacttgggttttgattttgatyagagaaaattagaacaggtaatatttaaggtagttttgaagaatgagtaaaattttccagaaagtttggggaatgtaattcctggtagagggaagcctgtgaataaatgcagtggcaggagcattcacagtgtgagattctaaccggtgtggacatgtagagagtcaagtgtgaggcgatgaagggagtgagagaggagtaggtagcatggggacctggaaggtaggtggaggccag

SEQ ID NO: 875969 - DNA, 542 bp, Homo sapiens
gtcgattggattgatgcatgagattcacaattccaactccattgcctcttggtgtgtgattcggaacctcaacagtgggttctgttaatgtggaaggctgataatcctcactttcatctgagtttgcatacaacagccacgattttccctgtgtgctgggctctattttggcactctgtagcacttgagagcttcatacaatgtgcatgcaagtcataatagtctccggccatcctacaagttgaagacccagaaccttagtttttgctctaagactaactacaagagtcatatcttcargtatgagtcatcattccacctgtaagctgtgcccatgtgtttttcccaattccaactgtggagacagaccaggcacaagggttgcatcacctgggtgctggccagagatatgtcacaattgccactttggtcagggtcaaaatctccccttagtgcaggggcaattcaggagggtcatatcacctaggtcgtgggcccagcgatatgtcacaatgccccccatggcagggccaaagcaggac

SEQ ID NO: 875970 - DNA, 590 bp, Homo sapiens
gctttttattagtaaagttttattggaacacagctgctgtgatttaaatgtgtcctcaccaaaaattcaggtgttgccaatgtgatatattaacagctggggcctttaagaggtgattaggccatgagggcgcctctctcctgaatgggattaaggcccttattttaaaaggctgtgtgcatttrgttagcttgcccttccaccttctgccgtgttaggatttggtgttcctcccttccagaagatgcattccctcatcagacaaccgaacgtgtgggtgccttgattttggacttccaaacctccagaactgtgagaaaatacatttctattcttaattaattacccagtgtcagatatttgttgtagccgcccaaatggactaagaaaacacccatgcctgtttatttctgcgtcgtccatggctgttttcacactacagtggcagtggttgagtagttgtgacagagactgtgtagtctgtgaagcttgaagtatttgctataaaaaaatcttgcagacctccattttagacagtctaagaacttgtatatttaccccaatatgtacatttctagggcttttctgca

SEQ ID NO: 875971 - DNA, 607 bp, Homo sapiens
gttccattggtctatatatctgttttggtccagtaccatgatgtttttcttactgtagccttatagtatagtttgaagtcaggtagcgtgatgcctccagttttgttctattgcttaagattttcttggctatatgggatctttcttggttccatatgaaatttaaggtagttttttctaatttaattctgtgagaaagtcaatggtagcctgatgggaatggcattgaatctrtaaattactttggccagtatggccattttcatggtaattgattcttcctatccacaaggatggaatgtttttccatttgtttgtgtcagctcttattttcttgagcagtggtttgtagttctccttgaagaggtccttcacatcccttgtgagttgtattcctaggtattttattctctttgtagcaattgtgaatgggaattcagtcatgatttggctctctgtttgtctgttatttgtgtataggaatgcttgtgatttttgcacattgatttttgtatcctgagactttgctgaagttgtttatcagcttaaggagattttgggctgagacgatgggtttttctaaatataaaatcatgtcatctgcaaa

SEQ ID NO: 875972 - DNA, 581 bp, Homo sapiens
tcgcttgaacccgggaggtggaggttgccgtgagccaagattgtgccactgcactccagcctggacaacagagcgagaccccatctcaaaaaaaaaaaaaattaaatgtgcctatgataatagttgatggatgggagtatatagaagtttttgacccctgtaaaggcaatttagtaaggtggcaaaatagtaactttgagttttaggcaacagttcaaatatctttgttttgggaaaagacaactaggatcatgttatatttggtgtatttatgtaaagccctccttatgtacagagtaacttcacttaccaattacagagctccgtttcctgggtgggcctcgtaaaacagacagataactttctaccagggtcytgagacaaacctgcctacctataaagagacaattccactgcatacatcaaggcagctagttccagatacagaccacgcccctgctggaaagagttctgtattaattaggcccagaggaagcttaccattgccacctgatattttaccctatgcttctccccaattattccaaaacaaaaggtcaaaagggaattcaatcataagc

SEQ ID NO: 875973 - DNA, 624 bp, Homo sapiens
gttttcatttgtcaacttacttttgtactgggctatttattggttgcacctgcacacttccaccctcttgccaggccctgcaagagtctttcagaagcccatcagagtcagaattgatgcactttccagacaccatctgccttcatttttttttttttaatttttaaggctggatatgtgacttggcagctccaacatttatattttcactatcccacggkgagccctgatatatagtaatttgtcattttgttgagctacaaatctgaattattcttatcactccttacaagactgatgtgtgaagccagttatttattcagcagtgaaacaaactaacagccaaacaactgcatctctgcttagctttgccagttgcctttctcacgcctggattgtcactctttcaaggtgacagtctttcttgttcattttgtttttcttaaagtccagtaaccgatatataaaacaatgaaaatgaaataacatcaaactagggatatgattttacacactgtgggtcgctcatgtgactctccacggatccatgattcaagggaaaattaactgtgttggcaaattcggggattgtgagcagtctcaggacatattccttgtaaactg

SEQ ID NO: 875974 - DNA, 564 bp, Homo sapiens
atattttggtgttttattctgggctgcaatccagtaggtggcacttaagagtgttggctagaagataggctccttagttgcatgactctcatgtattttggtgcagttggcagtagtgctctgtggtgaggtgggggaagagatggcaccatcacctggtctgttcttggggcttagaggagctctcttcagtcactggctccatgcccgcatttcctttgttggatatgctgatctacagggttccctcaggcatgaactgtacccttcctgaggcagccttgaagagggaraaatgcctcacactcccactggctgcaaacccaggtggctcatccctctcagtgttctgagattgagggctgttcctcacctgacactacccagatcagtgattcctgaccagctagggggcagcacatctgtttcccagaggaattcaaagctgcatccacccacagagtcaggcagaattgagtctgctctgctggaagccccagcaggcatgtctcactcagctataagcagcaggggttggtgaagtttcttgctccatcacctggg

SEQ ID NO: 875975 - DNA, 602 bp, Homo sapiens
ttgtattatggaggcggatcatctttctcagaatagtgagttcttacaaggtcttatggtttaaaagtgtgtggcacttttttttcccttcttctctctctctctctcctgctttgcctttgtaagacgtgcctgcttctctttcaygttccaccataattataagtttcctagggtctcctagctatgcttcctgcacagcctatggaactgttagtcaattaaatctctgttcttcataaattacccagtctcaggtagttctttatagtagtgtgagaacagcctaatatagtgtattaacacaattccagactcagagaagatactcaatctttcttcagtggatgaatcagtcaaaatatattgtcatttaacagctctacctgtctttgaaattgaaaaagaaggaagatatgttagaaacttaataatctataataagacattcttttaggtttgactacatgtatccatgtcactttacactaaaacaaaataaacaaaaataaatacagaaattagaagctgagaacctcacaatttcaggaaagttaaattatttgcttctcaccagtaggccagggattccttgagaggca

SEQ ID NO: 875976 - DNA, 575 bp, Homo sapiens
ataaaaagaatacatgaaggagcatgcagaatgacagtttaccaagatagccgaaagaatccataccaagacaacaaggagaatcttactgttaatatcttccattcctgaaggaaaacagaatatagtgaactgctctggcaaaaaacttgtttcagctttcagggctrtatattcatatgcccctggttgggtgacattggaatcagaaaattatcctgctagcttcttccaaatgtctgcctgaaactcgggttatgtgactcatctactcttcaggagactcagatcaggcaaaattctctaaaaatatagtgttttgaagacttttctgtcagatcaattgctgatcaatgaaagtcagacagaggttaaaaaatattaaaatgtcaagattcttaggtctccccctccaccagaaagaataaaaataacaatgctatatgcaccactcacctctcctcatccctctctacacctgggagtgctcccactcttcacaagagccattatacccaactggttatcaaatttgtcaatgcacagttagagggtgggcagaaagacaaaattaa

SEQ ID NO: 875977 - DNA, 692 bp, Homo sapiens
ggctatggagatatgtccaggaaaaatatctatcactctatgactctgtagaaaagtctttcaaagcctgaaaaaataattgcaacagcctttatgcaattttaataatttagctaaaaaaaagccctcctgatgttacagagaaatatgcatgaagaaatacaaggttactgctcaaattcagatttcagtgaaaattctcatttgtttaatgtttgagtcttaaaaaactttaaaataatatttattggctgggagtggtggctcactcctgtaataccagcactttgggaggccgaggcgggtggatcacctgtggtcgggagtttgagatcaggccaaccaacatggagaaaccacgtttctactaaaaatacaaaattagccaggcatggtggcacacgcctgtaatcccagctacttgagagtctgaggcaggagaatcacttgaacccagaaggtggaggttgaggtgagctgagatcgcaccwttgaactccagcctggacaagaagagcaaaattccgcctaaaaaaaaactaataatagcaatgtttatctataattgaaaaattataattatatatttttatggggtactgtgtgatgttttggtatatgtatacaatgcaaaatgcttaaatcaagttaattaacatatcaactagctcacatacttatccttattttgt

SEQ ID NO: 875978 - DNA, 575 bp, Homo sapiens
aaagtgttttgactattgctatctctgatcgttaaagtaacctgaaatgagctttttgcgtaattttggaaagaggacagacctctgcattggagtcataggatttgaggtttacacttgtctttgtcctctaggtrtgtgccctttgataaattcatttaaactctctggtctcagctttttctcttacctgaaaaatgagagggttgcacgagacagctctggttgccaacctgtgggatgtgaattctttggggtctgtggaatttccacaaggattaggtaatccatatgcatgctgtggttgatggagagactgaactaattctatattataaaatatgtatgcaggtcctgctttttaaaatgtgtgagcaatactgtgattaacaaaaatatacttcagccaaatagtgttcctgaattcatcataacttttgggtatcacgtagtttctctttcaaaaatatgaaaaccaataaaagcagctaagttgacttctcactgtgagccaaataactgatcttggcaacttgcacatattaacttattttttcctcaaaaaagtataggag

SEQ ID NO: 875979 - DNA, 620 bp, Homo sapiens
actctgaaggagggcaaagtctcctcatctactatacacacaccacttcccacctgaaacagacatcctgattgcatggctatgcaggagaaaatattaataggcacagttttacttctctaagtgattctttcctacataactaatgacctcaatggtcataatgtccttatttactaatttttctttttcctttttttgggggtggggggagatggagtctcactctgttgcctaggctggaaggcagtgacacgatctcggcttgctgcaacttcctcctcccaggtttaagcaattctcctgcctcagcctcctgagtagctgggactacaggtgtgcaccactgcacccagctaattttttcttgtatttttagtagagatgggttttcactgtgttgggcaggytggtcttgaactcccaacctcaggtgttccccctgccccagcctcccaaagtgctaggattataagcgtaaactaccgtgcccagcatttatttacaaatttttctaacaaagcccagtgtgcatactttcctttgttggttgccatatcttcaaaaagataatccactacttgacaggctgaggctagaagattgagctgaggagatca

SEQ ID NO: 875980 - DNA, 621 bp, Homo sapiens
caaacatggcttcacatcagatttacatggatagtcccttaaaggcacagatatttgggccacgcgtcagatctataaaatcagaatgattggaagacagaaatggagaatctgtaagtttctcaaactacacaggtgatttttattaacacagcctgagtggcaatgtttggataaataacctcaatactaactccctgagcaaataggcccagaggcgaaggtgctggaaccatcttcaaactggatggctctttctgcaacgttagcaaatttrgtttggtttgtgcagaccacgttaggtcaggacagatcagaattgggacagatatagtgacagttctcaactatttcactgttgtaatcttagccaacaagcccttactgagggtattaattggcatggttgggatggacaagtgatatgaagtttgatctgtttagctctctgaaaatagttctcaattttgctgcacactgaaattatactggggagctttgaggaaatactgatgcctaagattgtcccacctcttaagatgctgatttcattgatgagaagtgtagctgggctattaaaaaaatttaaatttcctacatgattccaatctgaagctaagg

SEQ ID NO: 875981 - DNA, 621 bp, Homo sapiens
caaacatggcttcacatcagatttacatggatagtcccttaaaggcacagatatttgggccacgcgtcagatctataaaatcagaatgattggaagacagaaatggagaatctgtaagtttctcaaactacacaggtgatttttattaacacagcctgagtggcaatgtttggataaataacctcaatactaactccctgagcaaataggcccagaggcgaaggtgctggaaccatcttcaaactggatggctctttctgcaacgttagcaaatttggtttggtttgtgcagaccacgttaggtcaggacagatcagaattgggacagatatagtgacagttctcaactatttcactgttgtaatcttagccaacaagcccttactgagggtattaattggcatggttgggatggacaagtgatatgaagtttgatctrtttagctctctgaaaatagttctcaattttgctgcacactgaaattatactggggagctttgaggaaatactgatgcctaagattgtcccacctcttaagatgctgatttcattgatgagaagtgtagctgggctattaaaaaaatttaaatttcctacatgattccaatctgaagctaagg

SEQ ID NO: 875982 - DNA, 592 bp, Homo sapiens
ctaaaaagcaagctgtaccccgaccaccttgggcacttgttgtcaggacctcctgaggctgtgtcatgggtgtgtccttaaccaaactttctaaattgactgagacctgtctcagatattttgagttcacaagttatattggcataggggtttcttagtttattttcagtrcaaaacaagccacgccagtagtcaatttcttcatgttacaagtatatatctatatttgaatgaaaaacaagtccacatatttcctttcttgagttattacttttcaaatcagatatgtcttgtttatacaaactaatgaaattgagtatattctttgatgatttactgctaaccctacagagaaagaaaagctaaaatttgtattcctcaattttgattttaattcaaataattgaagcacgcctatattcttaaaagctattacatgttctcttggaaggtctattgattcatccttttgaacactcattatggaaataggtagtgttaaattatagttgagtttaagtactatatttcacacagcacttgcatctgtaaataatgatcattgtaaaaaatgtccatttatggtcatcaa

SEQ ID NO: 875983 - DNA, 592 bp, Homo sapiens
ctaaaaagcaagctgtaccccgaccaccttgggcacttgttgtcaggacctcctgaggctgtgtcatgggtgtgtccttaaccaaactttctaaattgactgagacctgtctcagatattttgagttcacaagttatattggcataggggtttcttagtttattttcagtgcaaarcaagccacgccagtagtcaatttcttcatgttacaagtatatatctatatttgaatgaaaaacaagtccacatatttcctttcttgagttattacttttcaaatcagatatgtcttgtttatacaaactaatgaaattgagtatattctttgatgatttactgctaaccctacagagaaagaaaagctaaaatttgtattcctcaattttgattttaattcaaataattgaagcacgcctatattcttaaaagctattacatgttctcttggaaggtctattgattcatccttttgaacactcattatggaaataggtagtgttaaattatagttgagtttaagtactatatttcacacagcacttgcatctgtaaataatgatcattgtaaaaaatgtccatttatggtcatcaa

SEQ ID NO: 875984 - DNA, 661 bp, Homo sapiens
catgtggtgttgagaatttgttcaagaagattgaagaggccaggcccagtggcttacacttgtaatcccagcactttgggaggccaaggctggtggatcacttgagctcaggagttcaagaccaacctgggcaacatagcgaaactctgtctctgcaaaaaaaatacaaaaattagcagggcatggtggcatacgcctgtggtcccagctacccaggaggctgaggcaagagaatagcttgagcccgggaggcggtggttgcagtgagccaagatcatgccattgcactctagcctagttgatgggagtgaaaccctgcctcaaaaaaaataaaaaattaaaaaaaaatattgaagggaaacaagtgcaaaatggggacccagtgtcagaggtatgctgctgttctttaaaaaaaaaaaaawgttttccagacaattaatgtagtcagaaaccagggacacaaaaatgactgagatatggtttctgccttcaaggaactgacaatctagtgcaggagaagaaaacaaataatcacagtaaaaggtaatgaggagagcagtaatagcagtgtgattaaagaagcatgggaagaggaaagagaaagtccctgactctgcttagaggtcagggaagttggtgaattagcagatcaacagattgc

SEQ ID NO: 875985 - DNA, 508 bp, Homo sapiens
ctttcccccagcaatttgtagatattgctctattggacagttgctaattggaagtcaactgtctgctagtggccatgctttttttttttttttttttttttttttgagacggtgtttcattcttgttgcccaggctggagtgcaatggcaccatctcagctcgccacaacctcctcctcycaggttcaagcaattctcctgcctcagcctccctagtagatggaattacaggcatgtgccaccatgcccggctaattttgtatttttattttgtatttttagtagagacagggtttctccatgttggtcaggctggtctcgaacgcccgatctcaggtgatccgcccgccttgggctcccaaagtgctgggataacaggcatgagccaccgcgcccggccaaggccattctttaagaatctgatttttccttcaaatagttttttgttttgctttgtgttttattgtggtaagaacatagcatgagatctactctctcaacaaatgtt

SEQ ID NO: 875986 - DNA, 654 bp, Homo sapiens
  misc_feature 563, 564, 565, 566, 567, 568, 569, 570, 571, 572, 573, 574,575, 576, 577, 578, 579, 580, 581, 582, 583, 584, 585, 586,587, 588, 589, 590, 591, 592, 593, 594, 595, 596, 597, 598,599, 600, 601, 602, 603, 604, 605, 606, 607, 608, 609: n = A,T,C or G
  misc_feature 610, 611, 612, 613, 614, 615, 616, 617, 618, 619, 620, 621,622, 623, 624, 625, 626, 627, 628, 629, 630, 631, 632, 633,634, 635, 636, 637, 638, 639, 640, 641, 642, 643, 644, 645,646, 647, 648, 649, 650, 651, 652, 653, 654: n = A,T,C or G
taaaaaaaaaaacgcatatacctgccttcagctgttggcaccatcttcatgaagaatgaagaagcaaaacaaaaaagtgtctattgatgcggaaaagggagctatataaccaggtaaaaaaatgaaagataaaaaaggcaggcaaaagtcatgtcatgasattatcagaggcatttaggttgcaaggtgtgaaaaagatatttttggtgatttcatataaacagaaagaataaacaattacctcacttcagaaaatcttaagatatacctacacatatatggaatacatgcatttaaatatatatatatatatatatgtactttgtcagttttcatactatacaatgtgtccacaaacacagaaatatatatgttctttatttctctcaatgaacactccactcctgcttttaagatgtgttttagccattatatcatccaagtaccttgctttataatctgaaaacatcttaccaaatttcatttcctcattgtattttcttttttgataatatggaaatgctacaactatatcatccacgttgtttttgcatattcttttnnnnnnnnnnnnnnnnnnnnnnnnnnnnnnnnnnnnnnnnnnnnnnnnnnnnnnnnnnnnnnnnnnnnnnnnnnnnnnnnnnnnnnnnnnnn

SEQ ID NO: 875987 - DNA, 512 bp, Homo sapiens
gtgcattattcactcagacatatttttagttatttcaattgcgtttaatccacttcttttttatgagtcagtgtttctgaatgtttatgcaaaaaaaaaaatcctttttcattcccaaactttctaagtaagtggatacactacacttcacaagttttccagcctttctcttcctgtctcttggtcagacctaytcatggaggtattatccacactgtgatcttgaaataaatgaatttcactaaggctgctttcgagaacaaagtctttggtatttttcttatgtaagaagcacatttgcaagaatcatggaaaaaaatgacaaactaatggcctagaatagagtgactgctacactttaagtaatgcaatgacataaaaaccatcaaagtaaaaccaacatgtcatttcctgcccccaggaaatattagaatgagattaatgctgatgagtccctactgcttacacagcatctctttgagggagaatgcctgactgacacagtaatgaaa

SEQ ID NO: 875988 - DNA, 630 bp, Homo sapiens
gggagaaaatatttgcaaactatgtatctgacaaggcctaatatccagcatttataaggaacttaaacaagtttgcaagaagaaaacaaacaaccccattaaaaagtgggcaaaggacatgaaaaaatcttttctaaagacatacatgtagccaacaagcatatgaaaaaaagctaaatatcatttatcattagagaaatgcaaatcaaaaccaaaacgagacaccatctcacactagtcaagaatggctattgttaaaaagtcaaaaataacatatgctggcaaggttgcagaaaaaagggaacacttatacactgttagtaaaagtgtaaattagttcaaccattgtgaaacgcagcatggtgattcctcagagagctgaaaataggattaccatttgtctcaacaatcctattactgagtatatacccaaatgaatataaatcattctaccacaaagacgtacacatgcatatgtctgttgcagcactattmacgatagcaaagatgtggaatcaacctaagtgcccatcaatggtaggctggataaggaaaatgtggtacatatacaccatggaatactatgcagccataaaaaagaacaagatcatgtattttgcaggaacgtgg

SEQ ID NO: 875989 - DNA, 631 bp, Homo sapiens
ggatagggacaaagtttactgaactaaaggagcttgttgtaacccaattctaggaagctaaaaatcatgttaaaacattgcaggaactgacagtaaaataagccagtttagagaagaatagagttgaaaaatactacagcaacttcacaatgcaatcacaagtattaatarcagtatagaccaagtgaaggaaagaatattagagcttgaagactgtctttctgaaataatacaggcagacaagaatagagaaaaaggaatgaacaaaacctccaagaaatatgtgattatgtaaagagactgaatctatgactgattggtgtacttgaaagagatgggaagaatggaaccagcttggaaaacatattccaggatataatccatgagaactttcccaacatagctagataggccaacattcaaattcaggaaatgcagagaacctcagtaagatactacttgagaagatcatccccaagacacatactcatcagattctccaaggacaaaatgagagacaaaatgttaaaggcagctagagggaaaggccaggttacctacaaagggaagcccatcagcctaacagtggacctctcagctgaaaccctgcaagccagaagagattaggggc

SEQ ID NO: 875990 - DNA, 631 bp, Homo sapiens
ggatagggacaaagtttactgaactaaaggagcttgttgtaacccaattctaggaagctaaaaatcatgttaaaacattgcaggaactgacagtaaaataagccagtttagagaagaatagagttgaaaaatactacagcaacttcacaatgcaatcacaagtattaatagcagtatagaccaagtgaaggaaagaatattagagcttgaagactgtctttctgaaataatacaggcagacaagaatagagaaaaaggaatgarcaaaacctccaagaaatatgtgattatgtaaagagactgaatctatgactgattggtgtacttgaaagagatgggaagaatggaaccagcttggaaaacatattccaggatataatccatgagaactttcccaacatagctagataggccaacattcaaattcaggaaatgcagagaacctcagtaagatactacttgagaagatcatccccaagacacatactcatcagattctccaaggacaaaatgagagacaaaatgttaaaggcagctagagggaaaggccaggttacctacaaagggaagcccatcagcctaacagtggacctctcagctgaaaccctgcaagccagaagagattaggggc

SEQ ID NO: 875991 - DNA, 706 bp, Homo sapiens
aaatcccgacatctgagcggagtactgaagatgacattgcccagaatcgacaagaaactgtccattcaaaaataaataaataaataaataaataaatgtattgattattatgttcctgacatgggctaggcactgaggattccattacaaacaaaagggaaaaaatgtggtctttattcttatgcagctaaagtttagagatggagaaagaaacaatttcacaaattagtgtaatagatacaagttgtgataaaaatcaatgaagaaataatgcaaagtcttgtgcaagtatatagcaagtgaaggtggggagaggctgaagtgctggggtttgggatgaaaaagaaggctaccctgaaaatagctggattcctgattgaagtagaactaggaatccacacaggagtggggaagatagatatagaggatgatggttggtggagtacatttaaagcaaagtaaggaccagtggtaaaaacacctgcctgggaggattatcaataaaccaatggttgttatttgttagaatgaatgggtgtacrgtgtaggaggaggcaggaggagcatgcagggatagattatgatggcttttgacattcagaccatgttttgacagtacaggtgatgatatgtgcataaatcataaaacaaatttaaacagaatattcatagaggccttagtagagtcctatggaaggacagtaca

SEQ ID NO: 875992 - DNA, 631 bp, Homo sapiens
atttctacattctctactgttccattggtctatgtgtcagttattgtaccaagaccatgctgttttggttaggtagccttgcagtataatctgaagacaggtagtgtgatgcctccagctttgtttttgcttaggattttcttggctatttgcgctccttttaggttccatatgaattttaaaatagtttttttttctaagtctgtgaagaatgccaatggtagtttaatgggagtatcactgaatctataaattactttgggcaatatgrccattcttatgatattgattcttcttatccatgagcttgtaatgtttaccagttatatacccatagtaatataaatcattctattataaagatacatgcatgtgtatgttcattgaagcactattcacaatagcaaagacatggaatcaacctaaatgcccatcaatgatagaacagatgaagaaaatgtagtacatatacaccatggaatactatgcagccataaaaaagaacaagatcctgtcctttgcagggacatggatggaactgggagacattatcctcagcaaactaatgcaggaacagaaaaacaaacaccacatgttctcacttacaagtgggagctgaatgatgaaaaca

SEQ ID NO: 875993 - DNA, 586 bp, Homo sapiens
gttcagtttgtggataatcacatcacagacattggtttcttttgatattgtgttttcatgtctaataattcaatttgtttctttttttgtttgtttgtttgcatctctctgatgaagtcctctatatattcgtgcacgttgtttaccttttccacgagatcctttaacatattaaccttagttatttaaactacctatctgaccatttcaacatttggaccatctgatttaatgactactttacttcttgatgatggggcattttttttccatgtgtttcctgtgtcttctggttttcaattgaatgctggacactgcatgtaaaaataatagaggctgaagtcaataccatcttttcctggaaaagcacatgtttyttcttctcccagacttatgttgagagattgagtaaatattttctgtaatttgaactatatttggccttgtgattgctttcactgtcaaattgagcacatcacaggcttcaaatatctccagtggtgatttagtgcttaccttgtgcttaccgtgaggtgtgggatgctggagagcttctcctagtgttcctgttttgcttttatgtttc

SEQ ID NO: 875994 - DNA, 586 bp, Homo sapiens
gttcagtttgtggataatcacatcacagacattggtttcttttgatattgtgttttcatgtctaataattcaatttgtttctttttttgtttgtttgtttgcatctctctgatgaagtcctctatatattcgtgcacgttgtttaccttttccacgagatcctttaacatattaaccttagttatttaaactacctatctgaccatttcaacatttggaccatctgatttaatgactactttacttcttgatgatggggcattttttttccatgtgtttcctgtgtcttctggttttcaattgaatgctggacactgcatgtaaaaataatagaggctgaagtcaataccatcttttcctggaaaagcacatgtttcttyttctcccagacttatgttgagagattgagtaaatattttctgtaatttgaactatatttggccttgtgattgctttcactgtcaaattgagcacatcacaggcttcaaatatctccagtggtgatttagtgcttaccttgtgcttaccgtgaggtgtgggatgctggagagcttctcctagtgttcctgttttgcttttatgtttc

SEQ ID NO: 875995 - DNA, 563 bp, Homo sapiens
tgacactatttgttcacttcacctgctgagggcaaccagaaaactgggcacattagctataagtttttctgacttacatcaataaataaataaataaataagtaaataataagtttcttcctcagcttttcaatgcaagaatgagagtatactacagacaaggtattttttccattgtgaacattcatagggtgacatgcaatgaagtctacttgggttttaatttgtatcaacactcataggcaaaatagcctccaaagttaatgaccacatgactttaggagtggctcaaaaataaaatggcacttcttacaagacgagagcaaaacatccagccmtagttataagccttatcaaaaaaatgcagccccttgtgaattacacctcaataaaaaagtagccccaaaataagacacaggtctgaaaaaagaagaaaaattataacttaaagtatcttgaaaaccaatgtgaatataggttggaaagatagttaagagattaattttcataagactactcaagataaaggcttgtaatgtaatctagtagttaaagtttatcac

SEQ ID NO: 875996 - DNA, 637 bp, Homo sapiens
tcttcccaaccgccaggcaattctcacaagtaggccagattgttcactcaacaggcactggcatcctttcacaacgactgtacattcgcactccccaactctctagaaatcttccttctcccattgatctcaagactcctttgtatttgccttttcctgttccttcagatcaggagaagaaaatcatttaaaatgtcctttccaggaggcaccaccttagccctgtaagggttcttgcactgtatcttttgtctggtgacctcttatgtgactcggttgcaaaatgactgaactcagagtctcaagatataatctacttggctcagactagttcatgaattggttgttttgagatmagatttctatatctggtctaatttttgatgtggggtcagagtgtagagggagacaaggagttgtacaaacaagtcagctgaggggagagaggcagtttctcttgggaaaggatgtatgcagggaaacaataatgaccatatctaaggcacaactaaatatgcctgccttagtcttagattgtgcaattcgtttccactgtccacttccaaataaaatactgcctttggatttattgtaacattatggcttatacttataactatttatagtgacagtacag

SEQ ID NO: 875997 - DNA, 655 bp, Homo sapiens
ttcaggacctatgctacatttgagtggagtagagagaacagttacccttaaaggtactgtaagatgtgatgtgttgttgctctctcatactggcttaggagagctgagtgtggacatcaagtcccaggctccttattcagtgaagtgagaagatagcttaaatggctatggtgtgagtgtttaacagcacagaaactggaaaacactatacaaatcaaggcttttgttttcttcttccaaagagttgattgttaaaacatttaccagaacctcaatggatgcaggggaaactatcatgaaggaaaatctagattttcattagcacagaaggtgaagggaacactcatagtaaaatattaaaatataaaggacttttttgttgactgaccttgaattcaatagagtacaaagaaagggtytggggagtcagaagagggaaatattgggtcaaaaaaaaaggatccttacggaggattagagttctgggataaatgattaactggaagtcctggactccttttatgaagactgtaaagaacacggataaagggtatgggtgttgacgaaagggaggattggaggagaacaagccaggaacacctgttgctcagaatttcccatttggctcctgctgacaaatgtcctgaagatgggc

SEQ ID NO: 875998 - DNA, 614 bp, Homo sapiens
atcaagacagcagacatttccatcaccccaaaagttttcttttggctcatattgtaaacatctgtcctacaggtaaaattctcacggagctactgatgtgatttctgccacatttatttatttctattttcttgaggttatatacatttctctaattctatatactcttctcttctgcctagttttttgtatttacataattttcttaaaattcatttgtgtttttgcacgtatcartattccagatcattttattgtttaatagtattctattaaatgagtatagtctaatttgtttatccattcatttactgatgaacattcaaattatttttagctcagtgctattacaataaagctactatatacatttttaaatgtagaaatctttgggtatatttttattttacttgggtaagtaggaatgggatgtctgagtaatatggcatggggatgtttaattttttaagagcttccaaattttttctaaagtgtttttaccattttgcatttccactagcaatgcagtagatttccagttgccccatggcctcaccatcaatttaggaaatagctaaaaccatgtggtcacctatattttaattttaaccaat

SEQ ID NO: 875999 - DNA, 622 bp, Homo sapiens
tttgtttttattgcatttgcttttgggatactggtcatgaaatccttgcctaagccaatgtctagaaaggtttttccagtgttatcttctggaatttttatagcttcaggtcttagatttacaaccttaatccatcttgagttgatttttgtgtaaggtaagagatgagaattcagttttattcccctccatgtggctagccaattatttcagcaccatttgttgaaagggtgttctttccccactttatgattttgtttgctttgttgaaaatcagttggctgtaagtatttkggtttatttctgggttccctcttctgttccattggtctatgtgtctgtttttacaccagtaccatgctattttgttgactatgaccttaccgtatagtttgaaatcaggcaatgttatgctgccaaatttgttctttttggttagtcttgctttggctatgcaggccattttttggttccatatgacttttaggattgttttttctaattctgtgaaaaatgatggtggtattttgatgggaattgcatggaatttgtagattgcttttggcagtatggtcattttcacaatattgattctacccatccatgagcatgggatgtgttt

SEQ ID NO: 876000 - DNA, 616 bp, Homo sapiens
aaatttcctacaaatcttcatgtattctggatataaatttatgattggacataaaccaaaaaaagtccaggaccagatggattcacagctgaattctaccagaggtacaaagaggagctgataccattccttctgaaactattccaatcagtagaaaaagagggaatcctccctaactcattttatgaggccagcatcatcctgataccaaagcctggcagagacacaacaaaaaaagagaattttataccaatatccctgatgaacatcaatgcaaaaatcctcaataaaatactggcaaaccaaatcaagcagcacctcaaaaaacttatccaccatgatcaagtgggcttcatycctgggatacaaggctggttcaacatacgcaaatcaataaatgtaatccagcatataaacagaaccaatgacaaaaaccacatgattatctcaatagatgcagaaaaggcctttgagaaaattcaacaatgcttcatgctaaaaactctcaaaaaattaggtattgatgggatgtatctcaaaataataagagctatctatgacaaacccacagccagtttcatactgaatgggcaaaaactggaagcattccctttga

SEQ ID NO: 876001 - DNA, 485 bp, Homo sapiens
tttcatactgaatgggcaaaaactggaagcattccctttgaaatctggcacaagacagggatgtcctctctcaccactcctattcaacatagtgctggaagttctggccagggcaataaggcaggagaaagaaataaagattattcaattaggaaaagaggaagtcaaattgtccctgtttgaagatgacatgattgtatatttagaaaaccccatcgtctcagcccaaaatcttcttaagctcataagcaacttcaacaaagtctgaggatacaaaatcaatgtgcaaaaatcacaagcattcttatacaccaacaacagacaaacagakcgccaaatcatgagtgaactcccattcacaattgcttcaaagagaataaaatacctaggaatccaacttacaagggatgtgaaggacctcttcaaggagaactacaaaccactgctcaaggaaataaaagaggatacagacaaatggaagaaca

SEQ ID NO: 876002 - DNA, 586 bp, Homo sapiens
ttggaaaagttaacaaacctctctacacacaatataattaagaaagataataagaaacatatataatttcaagattttcaattttttttttactaagccagagaagataaatgagttaatcattcatgtcagtaagtaaatacaggatcaaaaaacatacctaatggaaggaaattaataacagaaaagtaaaaattataatctagaaaatgaaagatataaatcgattcataaatggataagacttttaagactttttttgaagaaatcatttgaaactagaataagcaagaggaatagatcaaaacaaaaaggaaaacagtgaaggtgatatacacatcytcttactgaaaattaattttaaagaactgctttgtaaacactaaaattcagagtcatcaatgtgtctggatatggattcatttttatttcttctgctcagcacttgttttatactttaaattagagtcctcaagtctttcctctgcaatggaaattttatggcatcatgtcaagtatacaaatagtgaaggcattgccagtgttttcttgtgtataagtattctctaccattagaatggaaacg

SEQ ID NO: 876003 - DNA, 438 bp, Homo sapiens
accacaattatccaaggaaatctgaaatgaatattactaaatacaaccttctggatttggttttacttacctagtatgttgactatgtctgcttatggttttcttacttatgcctacctacaccatcttttaatcaaatgtgccgataaaatttctaagtgcagaatttcctttgcttgacacaaacactttgttctactgtgaatcaacttctggggctttctattgtatggatktctacaaagggatgtgctgtaactcaagtataagcagatggttctttcattgttgtaaatcaaattggtataacctgtgactgggttcgatgtggccccagtttcctgaggcctgtgaaaattgctaggttgctcattttcattttttcttatcaccttaactggagttggaggcccttgcaagtccaggacaatgacgtct

SEQ ID NO: 876004 - DNA, 557 bp, Homo sapiens
cataaaaacgagacaaaagcattctcagaaacttctttgtgaagtgtgtactcaactcacagagttgaacctttcttttgctgcagcagttttgaatcactccttttgaagcatttccaagtggatacttggacagctttgaggctttcattggaaacrggagtatcttcacataaaaactagacagaagaattctcagaaacttctttgtaaagtgtgcattcaactcacggtgttgacactttcttttaatagagcagattggaaacactctttttgtagtatttgcaattggatatttggacagctttgacgctttctttggaaacgggactatcttcacataaaaactagacagaagcattctcagaaacttctttgtgatgtgtgcactcaactcacagacttgaacctttcttttgatagagcagttttgaaacactctttttgtagtatctggaaggggacatttgaagcgctttgaggcctaaggtgaaaaaggaaatatcgtcacataaacattagacagaatcattatcagaaacatctttctgatg

SEQ ID NO: 876005 - DNA, 611 bp, Homo sapiens
tgaggccttcttttgaaacaggaatatcttcacatagaaactagacagaatcattaccagacacatctttgtgatgtgcgcattgaactgacagaattaaacctttcttttgttagaggagttttgaaacactctctttatagtatctgcaagtggacattgggtgtgctttgaggcctatggtgaaaaaggaaatatcttaatataaaaactcgacagaattattgtcagaaacttatttgtgatgtgtgcagacaactcacagagtggaacctttcttttgatacagcagttttgaaacaccctttttgtttaatctgcacgtggacatttggagtgctttgtggccttcattggaaacgggaatatcttcacataaaaactagacagragcattctcagaaatttcttggtgatgtttgcattcaacccacagaggtgaacattccctttcatagagcagttttgaaacactcttattgtagtatctggaattggatatatggagcgctttgagtcctatggtgaaaaaggtaatatcttcacataaaaagtagacagaagcattctcagaaacctctttgtgatgtgtgcattcaactcacacagtg

SEQ ID NO: 876006 - DNA, 675 bp, Homo sapiens
aaaactagacagaagcatactcagaaacatccttgtgatgtttgcattcaattcatggagttgaacattccttttcatagggtagttttgaaacacactttttgtagtatctgcaagtggacttttggtacgctttgaggcctatagtgaaaaaggaaatatcttcacataaaaactagacagaagaactctcagaaacttctyggtgatgtgtgtactcaactcacagtgttgtacctttcttttgatagaggagatttgaaacactcttcttgtggaatctgcaagtggacatttggagtgctttgtggccttcgttggaaacgggtatatcttcatataaaaacgagacagaagcattctcagaaacatcttagtgaagtttgcattcacctcacagagttggaaattccctttcatagagcagttttgaaacactctttttgtagtatctggaattggacatttggagcgctttcaggaccatggtgaaaaaggaaatatattcacataaaaactagacagaagtattctcagaaacttctttgtgatgtgtgtacttaaatcacagtgttgaattttcttttgatagagcagttttgaaacactctttttgtagaatctgcaagtggatatttggataggatttaggctttcgttggaaacgggaatatc

SEQ ID NO: 876007 - DNA, 675 bp, Homo sapiens
aaaactagacagaagcatactcagaaacatccttgtgatgtttgcattcaattcatggagttgaacattccttttcatagggtagttttgaaacacactttttgtagtatctgcaagtggacttttggtacgctttgaggcctatagtgaaaaaggaaatatcttcacataaaaactagacagaagaactctcagaaacttcttggtgatgtgtgtactcaactcacagtgttgtacctttcttttgatagaggagatttgaaacactcttcttgtggaatctgcaagtggacatttggagtgctttgtggccttcgttggaaacgggtatatcttcatataaaaacgagacagaagcattctcagaaacatcttagtgaagtttgcattcacctcacagagttggaaattccctttcatagagcagttttgaaacactctttttgtagtatctggaattggacatttggagcgctttcagraccatggtgaaaaaggaaatatattcacataaaaactagacagaagtattctcagaaacttctttgtgatgtgtgtacttaaatcacagtgttgaattttcttttgatagagcagttttgaaacactctttttgtagaatctgcaagtggatatttggataggatttaggctttcgttggaaacgggaatatc

SEQ ID NO: 876008 - DNA, 675 bp, Homo sapiens
aaaactagacagaagcatactcagaaacatccttgtgatgtttgcattcaattcatggagttgaacattccttttcatagggtagttttgaaacacactttttgtagtatctgcaagtggacttttggtacgctttgaggcctatagtgaaaaaggaaatatcttcacataaaaactagacagaagaactctcagaaacttcttggtgatgtgtgtactcaactcacagtgttgtacctttcttttgatagaggagatttgaaacactcttcttgtggaatctgcaagtggacatttggagtgctttgtggccttcgttggaaacgggtatatcttcatataaaaacgagacagaagcattctcagaaacatcttagtgaagtttgcattcacctcacagagttggaaattccctttcatagagcagttttgaaacactctttttgtagtatctggaattggacatttggagcgctttcaggaccatggtgaaaaaggaaatatatycacataaaaactagacagaagtattctcagaaacttctttgtgatgtgtgtacttaaatcacagtgttgaattttcttttgatagagcagttttgaaacactctttttgtagaatctgcaagtggatatttggataggatttaggctttcgttggaaacgggaatatc

SEQ ID NO: 876009 - DNA, 469 bp, Homo sapiens
aatctagacagaagcaatgtgagaaacttccttgggatgtgtgcattcatctcacagggttaactcttacttttgattgagcagttttgaaactctctttttgttgaatgtggaagtggacatttggagcgctttgaggcttatggtggaaaaggaaatatcttcacatagaaactagacagaagcaytcttagaaacttctttgtgatgtgtgcactgatctcacagagttaagcctttgttttgattgagcagttttgaatctttttgtagaatctgcaagttaacatttggagcgctttgaggcctgtggaggaaaaggaaatattttgacatcaaaactacacagaagaattcggagaagcttctttgtgatgcatgcgtttatctcacagagttgaacctttcttttgattgagcagtttggaaacactctttttgtggaatctgcaagtggacatttggagcg

SEQ ID NO: 876010 - DNA, 594 bp, Homo sapiens
cctttccagtttcacgtgagtctgccttcctcatttctcgctgggaatacgattcccaaaatagcctgagaaaactttctgtggcattgccagcccctgcgggaggggctccattatgaactccatgactggagactcctggcaccatgtggcgaggctaccagaagccgcatgatcttgaccttcagtgaaggatgtcagtaaattccttgtgatgtaagaagcagttaatgtgcacatagaggccacatgctcactgaggtgtcccaaggacacactggaatacctgacctaaagktttgttttccttttcatttaccagttgctcctgctatgcattttgatcattgtattgttgtagaagacagtagcacaaaagcctttattttttgggaatttcagcgttgccagttaattatctggatcatccaagcaatgtctacaaattttgttctgacactagaaacttgatagagggagatatgtagccaaaatgaagcactgagagcattctgtgccccgaaccctccctgatgtcaatacgtagctgatcatagatagcaggaattcatcctgttgaatagtcaccaaaga

SEQ ID NO: 876011 - DNA, 618 bp, Homo sapiens
caattaatgggcaaaataaatagcaaacatcataatgacaggatcaaattcacacataacaatatgaaccttaaatataaatgggctaaatgccctaattaaaagacacagactggcaaattggataaagagtcaagacccatcaatgtgctgtattcaggagacccatctcacatgcaaagctgaacataggctcaaaataaagggatggaagaagatctaccaagcaaatggaaagcaaaaaaaaaaaaaaaaaaaaagcaggggttgtaatcctagtctctgataaaacagactttaaaccaacaaagatcaaaagagacaaagaaggccattacgtgatggtaaagagatcaattcaacaagaaaagctaactatcctaaatatatatgcacccaatacaggagcacccggattcataaagcaagtcctgagagacctaaaawgagacttagaatcccacagaataacaatgggagattttaacaccccactgtcaatattagacagatcaatgagacagaatgttaacaagcatatccaggacctgaactcagctctgcaacaagcagacctaatagacatctacagaactcttcaccccaaatcaacagaat

SEQ ID NO: 876012 - DNA, 663 bp, Homo sapiens
gccggcctcctgaaggagtccccctgtgccaggactttggcaccaaatgttatgtatgtccatgtgaagagaccaccaaacaggctttgtgtgagcaataaagctttttaatctcctgggtccaggcgactgagtccgaaaaaggagtgagcaaagggagataggggtggggcagttttataggatttcagtaggtagtggaaaattacagtcaaaggggttttttctcttgcaggcaggggcaggggccacaaggtgctcgatggggagctcctgagactcattgtccaagagaaggaatgtcacaaggtcaattgatcagttarggtggggcaggaacaaatcacaatagtggaatgccatcagttaaggcaggaactgactatttcacttcttttttggttcttcagttgcttcaggccatctggatgtatatgtgcaggtcacaggggttatgatggcttagcttgggctcagaagctgacactttccaagtatgttcccaggctttgttgatgtccccttcagcagctggcaccatattcacatttcctttgatccggagggagctttgggtgggctgtgctccctccttccttagaggtggtctgctttgaaggttagatctccaggggagtggggtccacctctttcccattcctt

SEQ ID NO: 876013 - DNA, 608 bp, Homo sapiens
aataggaatattatctggatagaagttgtagagtagaagagtagtccaaattacaagctatttttcctttgtttttctaagaattaattctataaaaaatacaattttaagtatttaataaaatgtatcgcaagagccttcagaatatatgagattactgtagtaactcttttatagtaaactattccagtgagtttcaggcatgtagaagctaaactggaaagttttaatatttgaggcctaattccaagacttccctcctgcaactgcctgtggaaatcacatcagacagcatgttttccctaaggatctccaattgccagattgccatactcctaagccttctcaccaacctccacatccattctctcctgcctttccttctgctgagcatatgtcaatcccagtttcctacctaatgaaattctaatcatsttcttttgcataacatcatcttccatgagaagctactttcatttcacagaattaactgtagcatctggccaagtacaaggcgtgtgttatggaatggataaatatctgttgaatcaatgaatcaattcatccaaaagactttgttcatgctccaaggagagaacttaaaacat

SEQ ID NO: 876014 - DNA, 592 bp, Homo sapiens
aaactgacgaaaactagcagcagggaaaaaacttctctattcaataaatgatgctggaataactggctagccatatgcagaagattgaaataggaccccttcctttctctaaacacaaaattcaacttgagatggattaaagacttaaakgtaaaacccaaatctatgaaaattctggaagacaacacaggtaatacaatcctgggcattggaatgagcaaagatttcatgacaaagacaccaaaataattgcaacaaaagcaaaaattgactaatgggatctaattaaactaaagaacttctgtgcagaaaaaaaaaactatcagctatctacagaacgggagaaaatatttgcaaactatgcatctgacaaaagtctaatattcagtatgaataaaaaacataaacaaatttacaagagaaaaactaacaaccccattaaaaagtgggcaaaggatatgaagaggcacctttcaaaagaagacacacatgcagccaacaagcttatgaaaaaaaactcaatgtcactaatcattaaagaaatgcaaatcaaaaccacaatgagataccatctcccaccagtcagactagc

SEQ ID NO: 876015 - DNA, 592 bp, Homo sapiens
aaactgacgaaaactagcagcagggaaaaaacttctctattcaataaatgatgctggaataactggctagccatatgcagaagattgaaataggaccccttcctttctctaaacacaaaattcaacttgagatggattaaagacttaaatgtaaaacccaaatctatgaaaattctggaagacaacacaggtaatacaatcctgggcattggaatgagcaaagatttcatgacaaagacaccaaaataattgcaacaaaagcaaaaattgactaatgggwtctaattaaactaaagaacttctgtgcagaaaaaaaaaactatcagctatctacagaacgggagaaaatatttgcaaactatgcatctgacaaaagtctaatattcagtatgaataaaaaacataaacaaatttacaagagaaaaactaacaaccccattaaaaagtgggcaaaggatatgaagaggcacctttcaaaagaagacacacatgcagccaacaagcttatgaaaaaaaactcaatgtcactaatcattaaagaaatgcaaatcaaaaccacaatgagataccatctcccaccagtcagactagc

SEQ ID NO: 876016 - DNA, 591 bp, Homo sapiens
gttattggttatctatttaagtcctatggaatcttgaaagtctaaagccctttttacatccctgtgcagtgtgggattagggtaaagaaaaactttgaaaatatagatggaaaaggcatttatggtactaataaaatgtaacatgcttaagacaactaaaaaaaktattaagaaatgaagaatgaactttaatgaaataaaaattcaattaattagtttgtaaaactgaaatctttgttattttgaaaggtctgttaatcataaaaatactgtgcttaaatcttccttactttagcaaacaggaaaactttatttttttctcttttcaatcttaatctagttcctctacctctgaaaactatcactaaagaaggagactgttgattttttcaaaattttggcctgcctagtgttaatggttttattttgtcttccaaaatgatacgttgaagtcctgacccccaataccttaaaatgttaccatatttggaaagatggtcttgcagatggaattagttcagatgagatcatgctggagaaggagggacccttattccaatatgactggtgtcattatattaataggaggaa

SEQ ID NO: 876017 - DNA, 309 bp, Homo sapiens
agaaatatgttagtaagaggagaacctgaatcactgaaaatctctgcttggtaactgttgtagaccagctatgactgtggaggatgccaccattgaggtatgctccctaattttagtgagaatgatgggattccagwgcagtaaaacctaaagtggcagcttttagctgtaaaagacagatgggcagcagggttgtatgagcatgctgaggccctcagagacctttgacagtagctaattgatcacagtttctctatgagcaaaaatatatgggcagcctactagagtatttcttgatctatataatgg

SEQ ID NO: 876018 - DNA, 575 bp, Homo sapiens
aatgatgtaggcttctgttctgcaatctttctgtgtcctccaggactactatgctttgtattaccatacagagtaatttgaatgatgatgaaatagaaggtttggaattttaaccaccttttgcagtgtatagatgcacaaaccaccatagtacatgtaaacttatgtagcaaacctgcaaattctgcacatgtatcccagaacttaaagtaaaattttaaaaatrttaaatttcttactaaataaatgaaaaagctctaataatactggatcacctagaagtgtattacaaaatctttaaaagagcttcctctctacctttaccaactcaatattcctcaacaatctgtatagccaaaataaataaaggctgatgcctccaagtttggttcacatgtctttcctctgataatcttggggcattagcacacagaaaactttgaattacttagacatgagagtcctatgatgctgaagtgggaaaccaggagccacttataggaccaccatggattattcatttctctttaccagctcaccttctatagacagagacacgtaggagtaataatcat

SEQ ID NO: 876019 - DNA, 653 bp, Homo sapiens
gatttgattaaccttaatatttatcaagtacataatttaatgaaaaacagctcttatcaattcactgtgaaaagcatattgaaaagctgttcaacagtcacagattaaatagattgagatgcatattttttggcacaacttcaaagaattatacctgacatgtctgccaactgatgtcaatatggctccatttaaaaattaaaatcaggtttctgcgcatgaaacatcttttgtaatactcagtatataaaaaaatagatcacgcatccctcttcaaagttaaacatttgtcagtgtagatatgttttaagtttttgtcagtttcatctgtatttaagatttatcaaygatgccatacttctgcatttcacaatgaaatcacctagtaaaggaattatttttttttgtcatcattaaggtaccaatgtagaaaaatgaagtaaaagataacatatagatcatagcatgactaacataaacaatacagccaaactaaaccttggaatatttctaggattatgaaaacatttatgatgtatgattacttactaagaaacaggttaaaaggttaagtattaagagaaattatcttttatttaaaaataataaaagaaaaatttaagcaaattatctaaaccatgaaaatgaagaca

SEQ ID NO: 876020 - DNA, 639 bp, Homo sapiens
tcctttccatgtttagtgcttccttcaggagctctttagggcaggcctgctggtgacaaaatctctcagcatttgcttgtctgtaaagtattttatttctccttcacttctgaagcttggtctggctagataggaaattctgggttgaaaattcttttaagaatgttgactattggcccccactctcttctggcttgtagagagtttctgccaagaaatccgctgttagtctgatgggcttccctttgtgggtaacccgacctttctctctggctgcccttaacattttttccttcatttcaactttggtgaatctgacaattatgtgtcttggaattgttcttctygaggagtatctttgtggtgttctctgtatttcctgaatttgaatgttggcttgccttgctgggttggggaagttctcctggataatatcctgcagagtgttttccaacttggttccattctccccgtcactttcaggtacaccaatcagacgtagagttggtcttttcacatagtcccatatttcttggaggctttgttcgtttcttttaattcttttttctctaaacttcacttctggcttcatttcgttcatttgatcttccatcactgataccctttcttccagttgat

SEQ ID NO: 876021 - DNA, 578 bp, Homo sapiens
ttaaatgtatgtagaattaaaatatatgatgacaataatgtaaatgtggtagaggtaatttgggattgttgtatgagtagtagtagtaaaggtattataaagtcttataattgtaaaaaaaagtagtcaaatactaaattatatcagggtatacgtgaggtatgatgtaatctataggtaatcactgaaagaatagtagaagtgtatataaataacaagcaattagagggtgaaatggaataataaaatatttggttgattcaaaagaaggcaagatgaaagggaacyagattatagaaaatactggataaatataaagctaatggcaagattacaatttaaacctaagtatattagtaattacattaattgtagtagattatgcactccaatgaaagaatagttgagaaacccaggtgcttgatacaggaagatgttagcatttacaagaatggtccactgaagttgtaagtgaccttgtagatgggcccaaggcatataagctagagcctcagcaacatttgatatactaacaagtgcactccttgttatatgtacccatatgcaaaccaaaaaaa

SEQ ID NO: 876022 - DNA, 651 bp, Homo sapiens
ttgcgaatgggagttcactcacgatttggctctctgtttttctattattggtgtataggaatgcttgtgatttttgcacaataattctctatcctgagactttgctgatgttgcttatcagcttaaggagatttggggctgagacgatggggttttctaaatatacaatcagtcatatgcaaacagagataatttgacttcctctcttcctatttgaataccctttatttctttctcttgcctgattgccctggcyagaacttccaataatatgttgaacaggagtggtgagagagggcatccttgtcttgtgctggttttcaaagggaatgcttccagtttttgcccattcagtaaaatattggctgtgggtttgtcataaatagctcttactattttgagatacattccatcaacacctagtgtattgagagtttttagcacgaaggggtgttgaattttattgaaggccttttctgcatccattgagataattatttggcttttgtcattggttctgtttatgtgatggatcacgtttattgatttgcatatgttgaaccagccttgcaccccagggatgaaaccaacttaatcgtggtggataagctttttgatgtgctgctggatttggtttgccagtattttatc

SEQ ID NO: 876023 - DNA, 675 bp, Homo sapiens
cggtgacagcagtattcctagggatgttgtacttgaccgtttggttctaccatcgggtgtggctggaccaggccaccatattggtaaagagaaaagccatttgagacagaaaatgacgcttttggaggcgtgtgggatgactgtggttcctaattctctcccgctcctgacagataattttatcagttaattgtatcctcagcatccctgccttgcgtggtggtggcactgggagagttccgcctgcccgttaccaccctctcttcaccactgtccmtgagatctgctcttcaagaggaagcctaaagtggagagtttgtaatcctgacaacgcccagctacctgcgtaccccggactccaactcccagtttgcaacgccaaagggtctaaagggcgaacgggggcgcattgcatcctgggagcaagaatcgcgataggtctgatggattgtgggaactgtagttccatgtgcgtgcgatgcactctatggtaggatagacccggggaagagtcatttgccggccaggaagggatacttttgagagcgtcagtgctgcatgccgggatttgtagtctgagggcccgcctcgcattctgggcggggattcatgctccttttcagggcgcccgctcctccccttggtattgccgtcagagatgggcggttggttatt

SEQ ID NO: 876024 - DNA, 624 bp, Homo sapiens
ccgtccctccaagaaagcatcattcacctggccattgcttttttttttttttttttttttttttccaaaaacaccattttaataaggaaacaacagaaataaaagattgttctctggctggagcccagaccccatataatacattacatgtacaaagtggctttcagccagctcctgggcgtctccctggggctctcctaccacctgttccatgccaaattcctgggtccttggacctctgctcctctccaraatatgcccaccccctccccttatcccataacacagtggtcaagaggagagcctgacaagtggctggaattggaggagggactattagggtgaagatgtttgcaacagctaaataaacatcggaggaaagtctccctttcctcagggtatagggtggtcagtggaaaatggcgtgtcctgctttggtgtggagcatgagtgcccagggaagcccaacctgaggtgggggtagggtccccctgaaccccttaggatctcctagaattactgcctccactgggacagggcaggaggcagaactgtccagaactttagagaactagagacctcccaagaggctgatgttggcatgccaggactacccagaggtca

SEQ ID NO: 876025 - DNA, 624 bp, Homo sapiens
ccgtccctccaagaaagcatcattcacctggccattgcttttttttttttttttttttttttttccaaaaacaccattttaataaggaaacaacagaaataaaagattgttctctggctggagcccagaccccatataatacattacatgtacaaagtggctttcagccagctcctgggcgtctccctggggctctcctaccacctgttccatgccaaattcctgggtccttggacctctgctcctctccagaatatgcccaccccctccccttatcccataacacagtggtcaagaggagagcctgacaagtggctggaattggaggagggactattagggtgaaratgtttgcaacagctaaataaacatcggaggaaagtctccctttcctcagggtatagggtggtcagtggaaaatggcgtgtcctgctttggtgtggagcatgagtgcccagggaagcccaacctgaggtgggggtagggtccccctgaaccccttaggatctcctagaattactgcctccactgggacagggcaggaggcagaactgtccagaactttagagaactagagacctcccaagaggctgatgttggcatgccaggactacccagaggtca

SEQ ID NO: 876026 - DNA, 624 bp, Homo sapiens
ccgtccctccaagaaagcatcattcacctggccattgcttttttttttttttttttttttttttccaaaaacaccattttaataaggaaacaacagaaataaaagattgttctctggctggagcccagaccccatataatacattacatgtacaaagtggctttcagccagctcctgggcgtctccctggggctctcctaccacctgttccatgccaaattcctgggtccttggacctctgctcctctccagaatatgcccaccccctccccttatcccataacacagtggtcaagaggagagcctgacaagtggctggaattggaggagggactattagggtgaagatgtttgcaacagctaaataaacatcggaggaaagtctccctttcctcagggtatagggtggtcagtggaaaatggygtgtcctgctttggtgtggagcatgagtgcccagggaagcccaacctgaggtgggggtagggtccccctgaaccccttaggatctcctagaattactgcctccactgggacagggcaggaggcagaactgtccagaactttagagaactagagacctcccaagaggctgatgttggcatgccaggactacccagaggtca

SEQ ID NO: 876027 - DNA, 642 bp, Homo sapiens
gcacagctgccagcattcccccgtgcaagcttccagcttgcttatctgtgtttgcagcctgtttttcaggcagctctttgttaaaaaaaaaaataatttcttgggctgcttttttgttagaagggaagccttgccaaggactcttttaccctcactgtctgcctaaataatttstttatatctcctgtatcaggatgaagaagaggtgcaacttggaaaagagatcagcagcaatccagctggaaaatagtgatcatctgagaggagagtggccatctggttgaatgaagggccacaggcgtgaataaaataaaagaagtaggcttgatgggtaactgaccacctgtggggaattaaggatgtttatcagagaggatgaaatattgggatggttttgtggagggagggcagtagaggggttcaagccaggacatttgggcagagatgccctatctcttggcttatactagtgagttcacctggataaaacttttactgtgaagcggtgacactctgcccatccaccttgtaagttcttctattataaggctgtagaaaaagactcaagtggctctttaatttgattccttgtgcaggttagatttttttcctagaataacttcagtctgctaatttcacatt

SEQ ID NO: 876028 - DNA, 642 bp, Homo sapiens
gcacagctgccagcattcccccgtgcaagcttccagcttgcttatctgtgtttgcagcctgtttttcaggcagctctttgttaaaaaaaaaaataatttcttgggctgcttttttgttagaagggaagccttgccaaggactcttttaccctcactgtctgcctaaataatttgtttmtatctcctgtatcaggatgaagaagaggtgcaacttggaaaagagatcagcagcaatccagctggaaaatagtgatcatctgagaggagagtggccatctggttgaatgaagggccacaggcgtgaataaaataaaagaagtaggcttgatgggtaactgaccacctgtggggaattaaggatgtttatcagagaggatgaaatattgggatggttttgtggagggagggcagtagaggggttcaagccaggacatttgggcagagatgccctatctcttggcttatactagtgagttcacctggataaaacttttactgtgaagcggtgacactctgcccatccaccttgtaagttcttctattataaggctgtagaaaaagactcaagtggctctttaatttgattccttgtgcaggttagatttttttcctagaataacttcagtctgctaatttcacatt

SEQ ID NO: 876029 - DNA, 588 bp, Homo sapiens
tgggtatatacccacaggaatataaatcgttttaccagaaagacacatgtacatgtatgttcattgcagtactgttcacaatagcaaagacatggaatcatcctaaatgtccatcaatggtagactgaataaagaaaatggggctgggcaaggtggctcatgtctgtaatcccagcactttgggaggctgaggcaggacgatcatgaggtcaagagatcaagatcatcctggccaacatggtgaaaccccatttytaataaaaacacaaaaattagctgggcgtggtggcgcatgcctgtagtcccagctacttgggaggctgaggcaggagcattgcttgaacccgggaggcagaagttacagtgagtcaagataagcaccactgcactctagcctggtgacagagcaaggctctgtctcaaaaaaaaaaaaaaaaaaaaaaaagggaggggggtacatataccatggaatactacgcagccataaaaagaatggtcatgtcgcttgcaacaacagagatgaagctggagaccattattcttagcaaactaatgcaggaatagaaaatcaaataccacatgttctca

SEQ ID NO: 876030 - DNA, 673 bp, Homo sapiens
gtcatcatgcccaactaatttttgtatttttagtagagacggggtttcaccatgttggtcaggctggtctcgaactcctgacctcctgatccacctgtgtcggcctcccaaaggtgctttttgaagggttgcgtattcacccacgatttgagagagggaggattattcccagtagaaggaatcagggaacasagggtacacaggcttaaaagcaagtcaggctggatctgagggggctggaggagtagcatctgaggatttgtaggaggcccaagcaaacaggtgtgtgcagggagaatggtgggcattggtcatgagcaaaaattattctacagagctttagcatgacaatattaaactactgaatcttggagtggtatgagagagtctgcctttcaaaaggatatcatttggagacgaagcagagggtcgaacctggagccagagaaaccaggagagaggctgctgcaaagtgatgagggtgtatggagggtgatgagtggtgggaccactggccaggagagggcaagtgaaggcaaaagtgctgtgactccatgactaatgtcatgtgatagcaaatcaaaccggagagctgagactagctgtcagattcctgacttactagatggtggcaccatagtctcagctaagaagaacccattaagattttggg

SEQ ID NO: 876031 - DNA, 673 bp, Homo sapiens
gtcatcatgcccaactaatttttgtatttttagtagagacggggtttcaccatgttggtcaggctggtctcgaactcctgacctcctgatccacctgtgtcggcctcccaaaggtgctttttgaagggttgcgtattcacccacgatttgagagagggaggattattcccagtagaaggaatcagggaacacagggtacasaggcttaaaagcaagtcaggctggatctgagggggctggaggagtagcatctgaggatttgtaggaggcccaagcaaacaggtgtgtgcagggagaatggtgggcattggtcatgagcaaaaattattctacagagctttagcatgacaatattaaactactgaatcttggagtggtatgagagagtctgcctttcaaaaggatatcatttggagacgaagcagagggtcgaacctggagccagagaaaccaggagagaggctgctgcaaagtgatgagggtgtatggagggtgatgagtggtgggaccactggccaggagagggcaagtgaaggcaaaagtgctgtgactccatgactaatgtcatgtgatagcaaatcaaaccggagagctgagactagctgtcagattcctgacttactagatggtggcaccatagtctcagctaagaagaacccattaagattttggg

SEQ ID NO: 876032 - DNA, 676 bp, Homo sapiens
tgtttagcccattgttcagtccaaaacttttaaattcttctctcttatcctccatacaaatcaattggagtatcctgtccccttatcttcaaaatatatccaggatttcaccacttctcaactgcctttactatgactatcttcatctagccaccaaatccttacaatattctaatagyttctgactattcctatacttgcctcattatattctatttttcacatcaaagtcagtatgattcatttaaaacgtgagtcttactgtttatttaaaatataaggcttactctctgctcaaattctccagtggctttcctttttacctttactccaattaacatccaaagtactttctatggcctaccaggctgtatggtaatatttcttttctcaacttcctcaatctcatcttcttgcttctctggtccagtcattcactctgtactttgcttcctccaccttgtacccttgtactttgtttcctccatcttgaatgaacttttcacagacaccctcaaagcactctttcttacttccctcaggtcttttctctaatgttattttttcaaagagggcctactttggtctcgggtcttgctttttgttccattgcattaatcataacctgacacactataggtttatatttatataggtatattttgtttctcttcta

SEQ ID NO: 876033 - DNA, 594 bp, Homo sapiens
taggtctaacacgtggctacaagacccatcgtgggcaagtggctaaggactctatttaactctacttttcttcttcactgtgcctctccctcttcttctttccccttccttctttaatgtgttgaggctaaggaggaggaatggggaaaaaaagtgaaaaatcatgtataatttggtccttcgtgtagagtgggctaacatgctcgcttgtagatttctcataggtcacacatgcctgatgtgtataatgcacactttgcccgatatattggaaccccctcaggttctattcccaggacttacccatgactttgtgctatggatataccctaaccacacaggctaccctccagtgaagagttcytacaggatggctcataacctggtcaacttctataacccctttttgaacccatgagaaattcacgtgtctttgctgcaccacacagtgggtacacaggcttgtcttaccatcgctttcccaaatctttctgctgttgctccaattaataccttacattcagaattgtgatgggaagcaggcgcatgccctcaaagacagggttgaggaggagggccgaacatatcaataaa

SEQ ID NO: 876034 - DNA, 658 bp, Homo sapiens
cctctaccaggatctgaacctaagagaatgctgtagaatgtgtctagtccatgtcactttcagggaccaaaagacagcactagatatcttagatgacccccttttagctgcacccgctaggagtttcatgcccccctttggagcctctgcatttcctgaattctgagggaagtcctgccagttctccagtgcaggatttctttccaaggtcattaggcacccgtctcccttatccaactaagcctagtctatacctttgcagcctacagaaataagcctaaccaataccaccaagagtggggccccacatcagctcccaaaattaaatctgtccccattgtgggaagcagacagagatgggggaacaatcagagtatatctcatttttttaatgtacaatttagctttatgcragaagaaatttagccagttttcagaggatccagggaagtttatagaggaatttgttgaccatgtcctttgatttaacttggcatgacttgcaaatattattatctacttgctgtaccatagaggagaaagaaaagattttagatattgtccatgaatatgcagttggagtgctgcttgttaccaaggccatttattgtgtagggggaggtgcagtttcagatctggaccctcagtgaaactacca

SEQ ID NO: 876035 - DNA, 659 bp, Homo sapiens
aaggccagattttgcctaacaacaggaaaatgtagagacacctaaacttaataagattaattttttttaaatcatgcaattttaactcacatcatttaatgttaactcacatatttatagcacatgccctcttgtagctatagagaagcaatgagtttagaacctaggttgcaaaggcatatagctaaaactgaaagctgcaggatggcctacattgttaatagcactcacataatgaattataaagctgatctccaaatgtyttggagctgaatactttgcagcaatatttctagctgagaagctaataggaaaaattcaaaaaaaaaaaaaaagcttgtgacttgatgtactgggatatattacgtcagctttcagttctcacatttgttttctgtctggcaaattttcatttatccatcaactattacctttgatgctaccttataaaaaacaaataatccagtggttcccaacagatctaatactacttctccttggttctactgctctgtataaatgtttagattgaagtccttaacttctagaatcaaaaatgttttaatatattttaattgcctcattttttgcaaacatctcaagatcaggaatatgcattttatttgtttccataaatacccaaaactaagtaatatatg

SEQ ID NO: 876036 - DNA, 692 bp, Homo sapiens
gcccaaaatctccttaagctaataggcaatttcagcaaagtctcaggatacaaaatcaatgtgcaaaaatcacaagcattcttatacaccaataacagacaaacagagagccaaatcatgagtgaactcccattcacagttgcttcaaagataataaaatacctaggaatccaacttacaagggacgtgacggacctcttcaaggagaactacaaaccactgctcaatgaaataaaagaagatacaaacaaatggaagcacattccatgctcatgggtaggaagaatcaatattgtgaaaatggccatactaccaaaggtcatttatagattcaatgccatccccatcaagctaccaatgactttyttcacagaattggaaaaaactactttaaagttcatatggagccaaaaaagagcccgcattgccaagtcaatcctcagccaaaagaacaaagctggaggcatcacgctacctgacttcaaactatactacgaggctacagtaaccaaaacagcatggtactggtaaaaaaaaaaaaaaacagggatatagaccaatggaacagaacagagcctgcagaaataatgccgtatatctacaactatttgatctttgacaaagctgacaaaaacaagcaatggggaaaggattccctatttaataaatggtgctgggaaaactggctagcc

SEQ ID NO: 876037 - DNA, 645 bp, Homo sapiens
ctgaaaattgcctgttagtatttttttctcttatcaaaatcaatgtgttatctgctatgtaattcattcatttgttcagtaaatttatggaacagatagtatgtgcctgggactaagttagattctgagtggtcataggcaattaagatacagattgtatcctcaaagagtccaggagagggagataagcaaatttgagtgacaaagtgttagtggtactgggagaaatgtctgtctaaacagagcacaattagctgcttttggggactcaggacagcataaccttaatatagcatatgatgcttccgttgctgggtcttgcaaatgagtaggtacttgcttctagttccttcagagtgcttcagcagtctccccacagctggagatctgtgcaagagaaaaaggcwatgcaagtttagaaaactgtgtgaataaaaccatgcaggtggaacgtttagattagggcccaggaatcagaccactgagataggaaatcaggaggagatgttgccacttcccaagagagatgagggtgaagaatttgaagagcctggggaatattcagctggagacattcagcagacagttgaataacatgtctggagcaaggaagactcattcaagttagaaatctagttgtgagag

SEQ ID NO: 876038 - DNA, 626 bp, Homo sapiens
tgcagatgacatgattgtatatttaaaaaaccccatcatctcagccccaaaactccttaagctgataagcaaattcagcagagtctcaggatacaaaatcaatgtgcaaaaatcacaagtattcctatacaccaacaatagacaagcagagagccaaatcatgagtaaacttccattcacaattgctacaaagagaataaaatacctaggaatccaacttacaagggatgtgaaggacctcttcaaggagaactacaaaccactgctcaaggaaataagagaggacacaaacaaatggaaaaaaattctatgatcatggataggaagaatcagtgtcatgaacatggccatactgcccaaagtaatttatagattcaatggtattcccatcaagccaccactgagtttttttgcagaattggaaaaaacctctttaaatttcacatgkaaccaaaaaagagcccatatagccaagacaatcctaagcataaagaacaaaactggaggcatcatgcagcctgactttaaactatactacaaggctacagtaaccacagcagcatggtactggtaccaaacagatatatagacaattctgtatagcatttctggcaaacgctcagaaa

SEQ ID NO: 876039 - DNA, 631 bp, Homo sapiens
aggttgaaagttttgtatgatgttaaatatatgcctaccctgtgacccagaaatttcgcttctagacagttagtaaaagagatgaaaatataatctacaaaaagagttgtataagaatgattatagtagttttgcatatgatagttccaaactggaaggaagctcaatgttcatcaacaggagaataggtaatgaggatactttcatccaatgggatactagtcaataataaaaaggcacagactacgaatacaatgacatagatggcattcaaaaacactatgaccaatagaagccagatacaaaaaagtgcatactcaataacttcatttatacaaaattttagaataggcataaaaataatctatggcagaggaaatttgaagagctattccctctgatggcagaggctttgtggggattgactgggaaagaataagagaaaaccctggggtggtgaaatttcttattygaatggggtgcagatgacttgagtttgtacgtttatcaaaactcattgagctataaaacttatgagctatactatatatgcattttgcctcaatacacatatttaaaaaaaagttaagagaaaaacatcaaagaaattacgagtagcagactttatttg

SEQ ID NO: 876040 - DNA, 496 bp, Homo sapiens
actattttcaggagatctctgctagatattttctgcctacattatacatattaaagcaaattaatagttttattccacattcttccattatatccagcttccccataacaatgactgctgtcatctaagttatttcmcaaagacaacagactattcttgactggcaggtttatgttttgctaggttttttttttttttttttgtcaaatcctgatttattttaaaactttaattttaaaactttaaatttgtcatcataaaatcataaaaatctccagagtttttgttcatttatcatttagtttttatatttatttatttatttatttatttattatttattttttttgagatggagtcttgctctgttgcccaggctggagtgcagtggcacaatctcggctcactgcaaccaccactttccaggttcaagcgattctcctgcctcagcctcccaagtagctgggattataggtgcttgccaccatgcctagct

SEQ ID NO: 876041 - DNA, 496 bp, Homo sapiens
actattttcaggagatctctgctagatattttctgcctacattatacatattaaagcaaattaatagttttattccacattcttccattatatccagcttccccataacaatgactgctgtcatctaagttatttcacaaagacaacagactattcttgactggcaggtttatgttttgctaggttttttttttttttttttgtcaaatcctgatttattttaaaactttaattttaaaactttaaatttgtcatcataaaatcataaaaatctccagagtttttgttcatttatcattwagtttttatatttatttatttatttatttatttattatttattttttttgagatggagtcttgctctgttgcccaggctggagtgcagtggcacaatctcggctcactgcaaccaccactttccaggttcaagcgattctcctgcctcagcctcccaagtagctgggattataggtgcttgccaccatgcctagct

SEQ ID NO: 876042 - DNA, 496 bp, Homo sapiens
actattttcaggagatctctgctagatattttctgcctacattatacatattaaagcaaattaatagttttattccacattcttccattatatccagcttccccataacaatgactgctgtcatctaagttatttcacaaagacaacagactattcttgactggcaggtttatgttttgctaggttttttttttttttttttgtcaaatcctgatttattttaaaactttaattttaaaactttaaatttgtcatcataaaatcataaaaatctccagagtttttgttcatttatcatttagtttttatattwatttatttatttatttatttattatttattttttttgagatggagtcttgctctgttgcccaggctggagtgcagtggcacaatctcggctcactgcaaccaccactttccaggttcaagcgattctcctgcctcagcctcccaagtagctgggattataggtgcttgccaccatgcctagct

SEQ ID NO: 876043 - DNA, 494 bp, Homo sapiens
ttcatgccattcttctgcctcaagcagctgggaccaccaagcctggctaattttttatatttttagtagagatgaggtttcaccatgttagtcaggatggtctcgatctcctgacctcgtgatccacccgactcggcctcccaaagtgctgggattacaggtatgagccaccgcgtccagccaycttttgattttttaagaaaaggtgggaatttggatttttagacactagttcaaatttaaaaaataaaagatcactcagtgggactagaaggccaaacaaaagaggttatggcaagcttcggtctgaggcccaccagcttttgaccttgtctgttggtagagccattctttcccccaaaggcacgaattagatgttgttgatgagtactccagattacaactttaaaaagtggtacatccatgggaaacattttgcccttcctcctcccacctccctgtttggaacagaaaaattcatcatctgtccgaga

SEQ ID NO: 876044 - DNA, 587 bp, Homo sapiens
gtgccactgcactccggcctgggtgacagagcaagaccctgtctcaagaaaatgaaaaagagagcgagtgagaaaggaaaggaaatgaaataggaaatcgcttctgctctaataagactctgcctagcctcttggttgctcaagtgaggaacatgtcctggatatgcacagaagcacctgcagccctcagcttggcccatcaacagggacctggagggccagtgtcagtcagctgaacaccagaaaaccaggaatgtgcccatcayagtgccattccttggaatattgttatccaggttttaaatcctgccttccaggaagttagctcagaaaatcacaaaagccaccaaaaaagaaaattaaaactatgaaagtccatttataaaaagagagaagttttaaaattccactaacagactttttatctattgccatggtaataactctgtccttggtgagtggatgagtctcatgccatccatgtacaaatgacagaaaatgtacaatgaaagacagtttcaaataagttcaatgtattatatatccattattttgagcgtgaagaaaagtataataaagaaaaatag

SEQ ID NO: 876045 - DNA, 643 bp, Homo sapiens
gtttattatgttatgtacttgctcttcaataatttggaaagataaatgataattgaaataaattttaaataagaggttaatatgtgaaaatatattttggcagagtttgaagtctagagttgtagaacctaggaacttttcataacctcagtattgaagcagaagtttttttttcagagttttacaaaatataagtactcatttctattgtaaagaaatatatttctggctgggtgcagtggctcatgcctgtaatcccagcactttgggaggccgaggcgggcggatcacraggtcaggagtttgagaccagcctggccaatgtggtgaaaccccgtctctaccaaaattacaaaaattagctgggcatggtggcgtgcacctgtagttccagctactcgggaggctgaggcagaagaatcccttgaacctgggaggtgcagattgtagtgagctgagaccgcaccacttactccagcctgggcaacacagcgaaactccaactccaaaaacaaaacaaacaaacaaacaaaaaaaccaaatatatttctttgcaagtaaatcctcttcctgctagaggcttctgtatggagaacagcacttcagtaagattacttccaaatatttctatttattgatatgt

SEQ ID NO: 876046 - DNA, 643 bp, Homo sapiens
gtttattatgttatgtacttgctcttcaataatttggaaagataaatgataattgaaataaattttaaataagaggttaatatgtgaaaatatattttggcagagtttgaagtctagagttgtagaacctaggaacttttcataacctcagtattgaagcagaagtttttttttcagagttttacaaaatataagtactcatttctattgtaaagaaatatatttctggctgggtgcagtggctcatgcctgtaatcccagcactttgggaggccgaggcgggcggatcacgaggtcaggagtttgagaccagcctggccaatgtggtgaaaccccgtctctaccaaaattacaaaaattagctgggcrtggtggcgtgcacctgtagttccagctactcgggaggctgaggcagaagaatcccttgaacctgggaggtgcagattgtagtgagctgagaccgcaccacttactccagcctgggcaacacagcgaaactccaactccaaaaacaaaacaaacaaacaaacaaaaaaaccaaatatatttctttgcaagtaaatcctcttcctgctagaggcttctgtatggagaacagcacttcagtaagattacttccaaatatttctatttattgatatgt

SEQ ID NO: 876047 - DNA, 643 bp, Homo sapiens
gtttattatgttatgtacttgctcttcaataatttggaaagataaatgataattgaaataaattttaaataagaggttaatatgtgaaaatatattttggcagagtttgaagtctagagttgtagaacctaggaacttttcataacctcagtattgaagcagaagtttttttttcagagttttacaaaatataagtactcatttctattgtaaagaaatatatttctggctgggtgcagtggctcatgcctgtaatcccagcactttgggaggccgaggcgggcggatcacgaggtcaggagtttgagaccagcctggccaatgtggtgaaaccccgtctctaccaaaattacaaaaattagctgggcatggtggcgtgcacctgtagttccagctactcgggaggctgaggcagaagaatcccttgaacctgggaggtgcagattgtagtgagctgagaccgcaccacttactccagcctgggcaacacrgcgaaactccaactccaaaaacaaaacaaacaaacaaacaaaaaaaccaaatatatttctttgcaagtaaatcctcttcctgctagaggcttctgtatggagaacagcacttcagtaagattacttccaaatatttctatttattgatatgt

SEQ ID NO: 876048 - DNA, 620 bp, Homo sapiens
cctataatgacaaaataatgttttactagtaaaagcagctctgtacctcacactgtgaaacaattttacagttcttcaaaaaagagttcttcaagcacatctaggggatctagaggcccgtctggaacatcgaggttccagaggcacttctaggcgaaatggcattgtcagaatcccttcatgtggaggcagaattggggctcagcttttgtcttagtgctgtttttacccccaagagattcacttatgcttccataatkcaggaagaaaccttcgctttggttttctgtgttccctcagctactatttttgatcacttcattttggtgagatgcttgagcagtgcaatatggtgttacggttttgctggagctcaacaccaagctttgtcttttattaagttacacacccctagggatgaagatgttgaccctttagcatctcctgagttattgcattcaccccttggcatgctcataatgaacatgtaatgaaattcagtaattaacttacttaatttatgtattcatttaatgtgtgcccttaatatctgccttatgatctaagaaaatctctacaattctgttgtttttgattgtaagattctagaagacagggat

SEQ ID NO: 876049 - DNA, 615 bp, Homo sapiens
gattatgtggctgtcacccataatctgactccagaactctgtttctgcaccttcctgtcaaactcataataagtctccgtattagtctgttctcatgctgctaatatggacatgcccaagcctgggtgatttataaagaaaaataagtttaatggactcacagtgccacgttgctggggagacctcacaatcatggcagaaggcaaaggtcaggtcatacacagcagcagacaagagagagcatgggcaggggaacttccctccatacaaccatcagatctcatgagacttattcactatcataagaacagaacagtcctcatgattcaattacttctcactaggtccctcccacaatacgtgggaattatgggaacaacaattctagatttggatgaggacacagccaaaccatatcagtctcataataacgaccaaaggccaagccttccctaaatcgtccttaagagactcatgcagatttcataatttgctcccagttgggccttttctcaagactttgasattttgatctggactcagatgcctttgtggctcattatgaattccatttgtgttcttacactggactcagtaagatagctactctttcat

SEQ ID NO: 876050 - DNA, 608 bp, Homo sapiens
tcaattacttctcactaggtccctcccacaatacgtgggaattatgggaacaacaattctagatttggatgaggacacagccaaaccatatcagtctcataataacgaccaaaggccaagccttccctaaatcgtccttaagagactcatgcagatttcataatttgctcccagttgggccttttctcaagactttgagattttgatctggactcagatgcctttgtggctcattatgaattccatttgtgttcttacactggactcagtaagatagctactctttcatcaatttgtgtcattatttattaattctttgcataattggacttcgaaataggattttaaaaaatgttttgaccgtgtgctcttcacaatgaagatcactaggcatttgttatgtgattctttctttyctatcatatgggagaaaataggattgggctgtgtgccctgagagggagggcacatttagatattttaggagctgtaaatagaagaccaaatatcagagagagagacttcgcttcacctgtagttcaaatggtttgttaggacaggaacagtggctcatgcctgtaattacagcactttgggaggttgaggca

SEQ ID NO: 876051 - DNA, 639 bp, Homo sapiens
atatacatattttaatctccatcttagcccaatatcagtatgtgtccaaattgatcatgactttactatatcatgctttttactgtctcagcttggctatcagtacactcagagttcttttttttaattgaggaatatatatttattaattaattttttattatactttaagttatagggtacatgtgaacaatgtgcaggttagttacatatgtatacatgtgccatgctggtgtgctgcacacattaactcgtcatttagcattaggtatatctcctaatgctatctctcccctctccctgcaccctataactgtccccagagtgtgatgttcctcttcctgtgtccatgtgtaatcatttttcaactcccaactatgagtgagaacatgcagtgtktggttttttgtccttgtgatagtttgctgagaatgatggattccagtttcatccatgtccctacaaaggacatgaactcatcatttttcatggctgcatagtattccatggtgtatatgtgccacatttgcttaatccagtctatcattgttggacatttgggttggttccaagtctttgctattatgaatagagccgcaataaacatacgtgttcatgtgtctttatagcagcatgatt

SEQ ID NO: 876052 - DNA, 586 bp, Homo sapiens
ctgcataattaagtaaaagaaaaaaattaaaaatgattacatctactataacaacagcaatatagatgacttaggcataaaggtactaggaaatgtgcaggacttttggaaagagaactattaaattttatggaattacataaaagaagacctgaataaatggaaagatgtaacatgtttgtgaattgaatgattcaatatagtttatagatgttagtgcaaatctagtcaaaacccatgggaaattaaacttctcaaaaygatcctaaagttctgcaagaacaaaaactgtaggtgagaataaccaagaaaatcttaaaaaagaattataagagtagcctgtacaaccagatattaaagctcccctaaaattaaagtaatgaaaaagaaagaatatgattgtttctactaaagccaatattattaatgatgggttttaattatattaacttacctgattgagatggctagaaataatttaaaaatactgccatctaaccattgattacattaatagccccaattcttcacccctccctgcattcacggtctttgtcgtgtgactttttaccaccctctttcaaaa

SEQ ID NO: 876053 - DNA, 592 bp, Homo sapiens
aagaactacaaccaaccagacgaacaagaaaccctgttacaagtctgctggcagcaacataaggtcagtgctctaaaaaggtactggtcagtaccctagaggtacaaagaacgggaagtttttgatcagggtaacayggggaagaatttggttatttcttttctcttttttgtttggagtttggtacgtgccatcttctgttatttcagggtttgagagaattttttgccccacctacagcacctatggagggtgatgaacaggagagggaggatgaaaattggcttgtatcatcttctttagtggttgcaaaaatgctaaatgttataagtgtagaaaaattggatctatgggagtaattttaggtaaaagtcaacttaacttacacggtattactgtagtcccaggagttgttgattcggattgtgaaggagaaattcaggtggcggtaatgtcataagattttaggttttaaaccaggagaatatcttgcagaactgttgcttattccctgtaaattgcacccttctccacataaggagaaatgagtttgcggatttggctcaactgttgcttattccctgtaaattgc

SEQ ID NO: 876054 - DNA, 592 bp, Homo sapiens
aagaactacaaccaaccagacgaacaagaaaccctgttacaagtctgctggcagcaacataaggtcagtgctctaaaaaggtactggtcagtaccctagaggtacaaagaacgggaagtttttgatcagggtaacacggggaagaatttggttatttcttttctcttttttgtttggagtttggtacgtgccatcttctgttatttcaggrtttgagagaattttttgccccacctacagcacctatggagggtgatgaacaggagagggaggatgaaaattggcttgtatcatcttctttagtggttgcaaaaatgctaaatgttataagtgtagaaaaattggatctatgggagtaattttaggtaaaagtcaacttaacttacacggtattactgtagtcccaggagttgttgattcggattgtgaaggagaaattcaggtggcggtaatgtcataagattttaggttttaaaccaggagaatatcttgcagaactgttgcttattccctgtaaattgcacccttctccacataaggagaaatgagtttgcggatttggctcaactgttgcttattccctgtaaattgc

SEQ ID NO: 876055 - DNA, 631 bp, Homo sapiens
ttgctactgaccccacagaaataaaaacaaccaccagaaaccactatgaacaactctacgcacacaaactagaaaacctagagaagatggataaattcctggacacatacaccctcccaagactgacccagaaagaaactgattccctatagaccaataatgaactccaaaagtgaatcagtaataaatatcctaccaatcaagaaaagcccaggacctgatagattcatagccaaattctgtcagatgtacaaagaagtgctggtaccattcctactgaaatattccacaaaaattgaggaggagggagttcctcttcaactgattctatgtggccagcatcaccttgatactaaaacctggcggatatacaataaaaaaagaaaacttcaggccaatatctttgatgaacatcagtkcaaaaatcctcaacaaaatagttgcaaaccaaatccagcagcccaccaaaaagctaatccaccatgatcaagtaggcttcatccctaggatgcaaggttggttcagcatacacaaatcaataaaggtgattcatcacataaacagaactacagacaaaaaccacatgattatttcaatagatacagaaaaggcttttgataaaattcaatat

SEQ ID NO: 876056 - DNA, 631 bp, Homo sapiens
ttgctactgaccccacagaaataaaaacaaccaccagaaaccactatgaacaactctacgcacacaaactagaaaacctagagaagatggataaattcctggacacatacaccctcccaagactgacccagaaagaaactgattccctatagaccaataatgaactccaaaagtgaatcagtaataaatatcctaccaatcaagaaaagcccaggacctgatagattcatagccaaattctgtcagatgtacaaagaagtgctggtaccattcctactgaaatattccacaaaaattgaggaggagggagttcctcttcaactgattctatgtggccagcatcaccttgatactaaaacctggcggatatacaataaaaaaagaaaacttcaggccaatatctttgatgaacatcagtgcaaaaatcctcaacaaaatagttgcaaaccaaatccagcagcccaccaaaaagctaatccaccrtgatcaagtaggcttcatccctaggatgcaaggttggttcagcatacacaaatcaataaaggtgattcatcacataaacagaactacagacaaaaaccacatgattatttcaatagatacagaaaaggcttttgataaaattcaatat

SEQ ID NO: 876057 - DNA, 609 bp, Homo sapiens
gcttccctttgtgggtaaacccagaatttcatatccagctaaactaaacttcgtaagtgaaggagaaataaaatcctttacagacaagcaaatactgagagatttttgtcaccaccagtcctgccttacaagagctcctgaaggaagcactaaatatggaacagaaaaactggtaccagccactgcaaaaacataccaaattgtaaagatcattgacactatgaagaaactgcatcaactaatgggaagaataaccagctagcatcataatgacaggatcaaattcacacataacaaaaataaccttaaatgtaaactttctaaatgccccaattaaaagacacagactgacaaattggataaagagtcaagaaccatagacrtgctatattcaggaaaaccatctcatgtgcaaagacatacgtaggctcaaaataaagaaatggaggaatatttaccaagcaaagggaaagcaaaaaaaaagcaggggttgccaccctagtctctgataaaaaaacatactttaaaccaacaaagatcaaaagaggcaaagaaggccattacacaatggtagagggatcaatgcaacaagaagagctaactatccta

SEQ ID NO: 876058 - DNA, 570 bp, Homo sapiens
ggaatatttaccaagcaaagggaaagcaaaaaaaaagcaggggttgccaccctagtctctgataaaaaaacatactttaaaccaacaaagatcaaaagaggcaaagaaggccattacacaatggtagagggatcaatgcaacaagaagagctaactatcctaagtatatatgcacccagtacagcagcacccaggtccataaagcaaattcttacagacatacaaagagacttagactctcacacaataatagtgggasactttaataccccactgtcaatattagacagatcaatgagacagaaaattaacaaggatattcaggacttgaaataagctctggaccaagaggaactaatagacatctacagaactctccaccccaagtcaacagaatatacatttttctcagcaccaccttgcacttattctaaaattggccacataattggaagtaaaacactcctcagcaagtgcaaaataatgggaaccataacagtctctcagaccacagtgcaatcaaattagaacacaggattaagaaactcactcaaaaccatacaactacac

SEQ ID NO: 876059 - DNA, 661 bp, Homo sapiens
ttagaacattagatatcccatatgattttggaacatatattaatattatttaccgaaataaaaactgaagaagattacacatcactgtggcaatcccttgtatctaaacatgttaaataatcctgtttacctcttttctggatgctccagaggccctctgtcacaaccaaaagctaggcatcaggagagacaattttgaaactgaaatttaattttggggagactgttaaatttagasgtataaaaacttgatattatgaaatataattacagattactataagttatttattttcccaaaatgatgactcaaaaatttaaaaaggcaaaatccttttattagcctttactattacatgaaaatccttttcaagagggagaaaggcaaacttcacccttgcattagtttactattagtgtcaaccccaatttttaatgaaaccttatagagaattctatctaatcttaatcagtttgactgaggtgatattcttacaaacctttcataaacctttacaaattttgctaaagagcagaattgcatcttaagaaaaccttactgttcttttatttcagtgctcaatttacaaaaatcttataacacccttttgaatttggtcaatatgtccacacacacagtttcctttgcaagattaatttt

SEQ ID NO: 876060 - DNA, 661 bp, Homo sapiens
ttagaacattagatatcccatatgattttggaacatatattaatattatttaccgaaataaaaactgaagaagattacacatcactgtggcaatcccttgtatctaaacatgttaaataatcctgtttacctcttttctggatgctccagaggccctctgtcacaaccaaaagctaggcatcaggagagacaattttgaaactgaaatttaattttggggagactgttaaatttagaggtataaaaacttgatattatgaaatataattacagattactataagttatttattttcccaaaatgatgactcaaaaatttaaaaaggcaaaatccttttattagcctttactattacatgaaaatccttttcaagagggagaaaggcaaacttcacccttgcattagtttactattagtgtcaaccccaatttttaatgaaaccttatagagaattctatctaatcttaatcagtttgactgaggtgatattcttacaaacctttcataaacctttacaaattttgmtaaagagcagaattgcatcttaagaaaaccttactgttcttttatttcagtgctcaatttacaaaaatcttataacacccttttgaatttggtcaatatgtccacacacacagtttcctttgcaagattaatttt

SEQ ID NO: 876061 - DNA, 594 bp, Homo sapiens
tctgatatacacatctgaaagtgttttattttccactcatctatgggattactaggcttccaattaaggttttcaagggacactgcctctcttcctactgggaatggggattctgtctctttctcaccctctttcccctttttgactctttcttttttgactggctatgggagacatgctgttcatctccagatttctctgctatctgtagggctgcctctttctcagcagcagttagaattttaagaggatatggagaaataggaatgcttttacactgttggtgggactgtaaactagttcaaccattgtggaagacaatgtggtgagtcctcgaggatctagaactagaaataccatttgacccagccatcccattactgggcatacacccaaaggattataaatcatgctkctatgaagacacatgcacacatatgtttattgcagcactattcacaatagcaaagacttggaaccaacccaaatgtccatcaatgatagactgaattaagaaaatgtggcacatatacaccatggaatactatgcagccataaaaaaggatgagttcatgtcctttttagggacatgga

SEQ ID NO: 876062 - DNA, 604 bp, Homo sapiens
acacagaccaacgacactatgaagcaaccataaaaacaagcaaaatcaccagctagaatcacaatgacaggatcaaaaccacacatatcaatactagctttaaatgtaaatgagctaagtgtcccaattaaaagacagagagtggcaagttggatcaagtaccaagacccattggtacactgtcttcaagagactcatctcacatgcagtgacacacataggctcaaaataaaaaatttaaaaaaaatggaggacaatctaccgagcaaatggaaaacagaaaaaaagaaagggttgcaatcctagcttctgacaaaacagactttaaaccaacaaagatcataaaagacaraaaagaccattacataatggtagagggttcaattcaacaagaagatctaaggatcctaaatatatgtgtatccaacacagtagcacccagattcataaagcaaatttttagagaccttcaaagagacttagactcccacacaataatagcaggaaaatttaacaccccagtgacaatattagacagatcattgaggcagaaaattaataaagatattcaggaactgaactcagcactgaatcaaatggacct

SEQ ID NO: 876063 - DNA, 626 bp, Homo sapiens
atatgcctatcaaacaagctggaagccgacggttactgacatcatctttacagtgatctagttccatagcaaggctctatggagagaattcatgtgggaaaaaaatattcttacaaatcaagactgttttgagtagttatcactcaaaaaattccagtgtctttgtcaccagccttccagttttatttcttccaagttcttgcttcacagcctttagttacttctgatgcattagtgcagatgtttatcttaatctcttttttaaaaacattatgaatcagtttatttatagattttatcctttctctatgaatgttttggttaaagaatctattwacatggaatatatatgggaatttatcccagtttttttctcaacctctttattccacacaaattagcaataatatattcttcacaaatttattccctttaggtttgaggtcacctttgcattgagttgaaccatagacatactattcttccaactagtttcagaatgccatgaagaataatctgtaaaccagattagtagtcttttaaattttatttttaaatagtttgtattaaaaattcttaagttaaaaaaattggtaaactagtcctaagcaattgaacttgaaatc

SEQ ID NO: 876064 - DNA, 626 bp, Homo sapiens
atatgcctatcaaacaagctggaagccgacggttactgacatcatctttacagtgatctagttccatagcaaggctctatggagagaattcatgtgggaaaaaaatattcttacaaatcaagactgttttgagtagttatcactcaaaaaattccagtgtctttgtcaccagccttccagttttatttcttccaagttcttgcttcacagcctttagttacttctgatgcattagtgcagatgtttatcttaatctcttttttaaaaacattatgaatcagtttatttatagattttatcctttctctatgaatgttttggttaaagaatctatttacatggaatatatatgggaatttatcccagtttttttctcaacctctttattccacacaaattagcaataatatattcttcacaaatttattccctttaggtttgaggtcacctttgcattgagttgarccatagacatactattcttccaactagtttcagaatgccatgaagaataatctgtaaaccagattagtagtcttttaaattttatttttaaatagtttgtattaaaaattcttaagttaaaaaaattggtaaactagtcctaagcaattgaacttgaaatc

SEQ ID NO: 876065 - DNA, 593 bp, Homo sapiens
tgcacatctttttcaaggggaaagtttctggccctagtctcaaagcactatcttctttcaactaattccaccacagaaacaactgcttcaaggtgatagctagcagctgtgttctgggtgcagaaggctgttctttgacagttggatttcttaggaggtatctagtaaactctagaatttctgctattttgctgtggttagtcctagcaaaggatatagcyagaacccataattaaaattaaatgtctgcatcatctcttatggtagtttgctcatattattcaattattgaagatacggtctttcaagataaagatgacactaccgctcccctcttaagaagattgttttgcaagtaactttaaagaatgtagagtgactcatacaccctcattttgtttccctttgtgaccaaaaacaagtattttgggagagttggctgcattagaagttcaatctgtggtcactgaaaaagctgatagaccgaagtgctgaactcaacagcactctgcccttcctcttatttccccctttatcccgtcccaagagaaaagtgagtagaagttttgggtcaattctaccaaatttttcat

SEQ ID NO: 876066 - DNA, 644 bp, Homo sapiens
ttcctaatacctggattccacatttatggtaaatttagcatctttctggccctgcttgtccttattcccctgcttttaatgtctcccatgcagatgacactcccaaatagatgttctgggtctgcactgaaatttctacctagcagctcttggctgctgcagttgcttgtttctcakcaaaagtttctcccggagtagaggaaggctgtattccatcacctgggaaggtcttttcatcacctttgctcttgttattttttgttcagttccaaaataatttatttctgttgctgccaccactctgactacctccgatatcagagaaaaggacccatgtcttctagaagacataagattttatttctcttgatatgcagaaatcagagaccatatgttattaatttttaaattccaattccactaatagtaattaatacatggtgaataaataaatagaagtcccaatgttgctgaatacacattttagacactatccaattctctaataaataagaagaaataagacttttactaattcattcatttctttttatgttcattttataaattccacttatagttatcttcactaatagatgagaatagaaaccataaattcattaatatgcaactgaccagcccat

SEQ ID NO: 876067 - DNA, 506 bp, Homo sapiens
gtagaaaaccagaaaattagaaatttcagcctctggtaagctaggagtgaccatgtgctctggtgggagtccctgggaagacccattctctcaaataaaatttcaaaaagagaagggttttacactttgccctttagctattctttattctgttctgcctgaaaatcagatatattgcctttcagggtctcaccaaacctaagaggtgcaacattctctttattatgacaaatgctcttctatgctaagtgtggtagaacagggaagatggaggtaacttaggtcctagatggcatccttacttcagctctggacatcacggaatttgaaaaaaagaaaaagcaaamaaacaaacaaaaaatgaagctgctgttgtttgagttttctgttctttgtatcccaatgaataatttctggttaatcaatggggcatatcacagaatctgagggcaattatgtgattagttctcaagagcatccaggactccagtgaaatcaggactctg

SEQ ID NO: 876068 - DNA, 658 bp, Homo sapiens
accaacagtgtataaccattcctttttctccccaacttcaccagcatctgtaattttttgactttttaataatagccattctgactggtgtgagatgatatctcactgtggttttgatttgcattgctctgatgattagtgacagtgaacattttttcatatgcttgttggccatgtgtatgtctccttttgaacagtgtctcttcatgtcccttgtccccattgtaatggggttgtttgttttttcttcttctaaatttgtttaagttccttatagttctggaattagacttttgtcagatgcataatttgcaaatattttcttccattccataggttgtctgtttattctgttgattgttttgctgtgcagaagctttttagtttaattagttcacatttgccaattttttttaaagtgtaggggtgcatgacttaccctggcctggtrtagcctcaggtcctgtttataatttggtatcatattgccacaaagagtctgttctggcagttttatgacctcctattttaacattaatgcagtcagctattgtttttaaatcagcaatccccaactttttggcaccagggaccagttttgtggaagacgatttttccacagattgttgaggaggggtaattggcattagattctcat

SEQ ID NO: 876069 - DNA, 674 bp, Homo sapiens
attagctttgctaatattttaaacttactaaatttgttcatgtcctctttcctgtgtgtcttccctcacttttaccttgtgtattaagtaccacaaaagaatattgtctgaaacaaatggcatgcaatccttggaggatagatttccatgctactatasagtgaacgtcttccatagtgaaaggcttatatttaatatgtgaattgtgccagaggtggttcagccaggtaaaatgctggtattaccttgaaaacatgggcgtatccatcttccactgagctgtgtgttctggtttgggctcttgttgatatggttttgatgccaaagcacgaaaagctgtttcctgataaaaagcagaaaccagactccttggtgccattgttcattactgcctgatcagacagggagagtatgatataatctgacagctgagaaagttgtgcgctcctcacccactaagcacatgtatctttttgaagaaccctgctgaaagcttgcactctgagccctgaagccagattttgctaaagttctgtgattccaccatggttccctgatgaagtaaaatatattgtgtatagactgcaagctaggattgtactgctgaaatttgagatctaaatataagtaatctaaactacaagtagtctacattactgtgcctgtaaaagttt

SEQ ID NO: 876070 - DNA, 645 bp, Homo sapiens
  misc_feature 606: n = A,T,C or G
gacgagtgctgtagaaaaggccagaagtagaagaggaggcaggaggtgtaggtgagagggtgatatgggagggttcatgtgagctgagacctaaaggaggttgagaaagcctccggatgtgtgaccaaagattattccaggcagaggagggagcaaagtgcaatgatcctaaagcaggaatgttcctggagtgtttgaaagcttccaggaggccagtggggctggaggagaatgagcaaggggaggggtaggagagtcccaggggtgagggtgggtggcaccagttaggctcagcctcagaagccctggtgaggacttcagcttaagccaagtgagayggggaagcccttggaggtttaggccggagaaatctctggcccgagtcacatctcagcagaattattctggttgctgcattgaggagagaggtaggggaagtagggggttagggccgaaatgggcatatcccagttaggaggcattgaagtgagccaggtaagagatgatggttgcttgggctggagcagtcgtaacgaaggtggtgggaagtgctcaggttcgggatatgttttcaagataatcctgttggactaggtgtggcatgtngaaagaaagagagcattcaagaatgactcctggaaattt

SEQ ID NO: 876071 - DNA, 610 bp, Homo sapiens
ttatttaagctaaaataactagcatttcctgaagacttactaagtgccaagcaaaggtttctgagtacagttagttctcgaaacaggcccatgagttgggggtcattttcattccttttttttttttttttttttttttgagatggagtctcactctatcacccaggttggagtgcaatggcacgatctcggctcactgcaacctctgccacccgagttcaagcaattctcctgcctcagcctcccaagtagctgggattacaggcccccgccaccacgtccagctaatttttgtatttttagtagagacggggtttcrctatcttggccagggtggtcttgaactcctgaccttgtggtccactcgcctcgggctcccaaagtgctgggattacaggcctgagccaccacactcggcctattcctattttacagatgagaaaactgaggcacagagaagtcaaatcacttgcccaaggtcacacaggcattaggaggaggcattgggactcaccccaacacagtcaggctgaagctgagcgcccaatttctatactattctctctttagaaaaaaatattaagtaaacgatagactcagtggtttttgg

SEQ ID NO: 876072 - DNA, 652 bp, Homo sapiens
tgattggctgctgctgaaaagactcaaatctacttcacaatgaaaattttaagatgtgttagtggaattaaaacacagtgacaaaacagaggaggccagatcaaatcattgctaacaaagtaaattgagagttttgtttttaagtaagttttgctgaaatatttcttttgataattggagttactatttatcaaaaaaatgtgttactctctctgtattaaaattacaaggactgcttgagtaagagtaaggctatgttcttttggcttaggattgacttggcaatgagggctcttttttggttccacatgaacttgaaagtagttttttccaattctgtgaagaaactcattggtagcttratggggatggcattgaatgtataaattaccttgggcagtatggccattttcacaatattgagtcttcctatccatgagcatggaatgttcttccatttgtttgtgttctcttttatttcattgagcagtggtttgtagttctccttgaagaggtccttcacattccttgtaagttggattcctaggtattttgttctctttgaagcaatggtgaatgggagttcactcatgatttggctctatgtttctgttattggtgtataagaatgcttgtgatttttgcatattga

SEQ ID NO: 876073 - DNA, 606 bp, Homo sapiens
atctcacagaaatacaaactaccatcagcgagtactataaacacttctatggaaataaactagaaaatctagaagaaatggatacatttctggatgcatacacgctcccaagactaaaccaggaagaacttgaatccccgaatagatcaatagcaagttctgaaatttaggcagtaactaatagcctaccaaccaaaaaaaaaaaaaaaaaatgcttargaccagatggattcacagcctagttgtcctagatgtacaaagaggagctggtattatttcctctgaaactattccaaacaacagaaaaagaaggactcctccataactcattttgtgatgtcagcatctttctaataccataacctgggagagacccaacaaaaaagaaaatttcaggctaagatccccgatgaacatcgatgcaaaaatcctcaataaaatactggcaaaccgaatccagtggcacatcaaaaagcttatccaccacgatcaagtcagcatcatctctgggatgcaagactcgttcaacataaggcaaatcaataaatgtaatccattacataaacagaaccaatgataaaaatcacatgattatctcaacagatg

SEQ ID NO: 876074 - DNA, 550 bp, Homo sapiens
agtaacattttcaaattatttaggtattcgagagtaaggtatttctcaaccaactctactagaactttcagcgaacttttctcccagtactaaaatgttaatatattttcacattttatctcaaaaaatatttttaaatggctgtattttttctttgaaagatttagggtttgagcagttttatacaattcttgatgttgcattttgctatatttaataaaagtattgttatgaactaagtcttattgatgctatatattatacataaaatcctaattatttgcttgtagtttctctctataatcttttcagattatactcagttataaaatagaagtataacattttaaaaatattttataagtgtttaacttgtctctgtttgtgtactgttgtcaggcttttttcakctggtcaccagatcttgggacttgtcatcatatctgtcaccatttgctgacataaaatagaatcaaagtaattgtgttacctgcccaaggtcacataacttgtgtaactggaattcttaacaataaacgagttgtggtct

SEQ ID NO: 876075 - DNA, 588 bp, Homo sapiens
tgacaaattggagagtaggatagaattccttttgcctatcatacactaatctgttttaaagttagctttatcttcttctaaattaatgtttcttaagccatctctcaagaaaacatctgctgtccaccgtcatctgaattatgtgagaattcattacaaccctaggttcagaggaagcaccactccagatttacaaaatcacagggatggggtggggatgaaaggacagagaatttgtaatyatcgcagattcttgagggccatctaaaatttgacctgcaaagaatttgaagcaatctgtaattcttgtccactgtccagctgtggcatatttaatacactacatgactgtatgtacagccttaggacttttcctctctatgtcaacaaaactcatttcttccaggacatagaatttatccttgtagcccacatactttatctgataagaatggaatttataattggatgtcaaagcatagcaaacaatgaagggagaaaagtgcagagggggaaaacacatctattatttattttgttaggaaatcatttcttgacactgatgaggatgctacccattatctagtt

SEQ ID NO: 876076 - DNA, 588 bp, Homo sapiens
tgacaaattggagagtaggatagaattccttttgcctatcatacactaatctgttttaaagttagctttatcttcttctaaattaatgtttcttaagccatctctcaagaaaacatctgctgtccaccgtcatctgaattatgtgagaattcattacaaccctaggttcagaggaagcaccactccagatttacaaaatcacagggatggggtggggatgaaaggacagagaatttgtaattatcgyagattcttgagggccatctaaaatttgacctgcaaagaatttgaagcaatctgtaattcttgtccactgtccagctgtggcatatttaatacactacatgactgtatgtacagccttaggacttttcctctctatgtcaacaaaactcatttcttccaggacatagaatttatccttgtagcccacatactttatctgataagaatggaatttataattggatgtcaaagcatagcaaacaatgaagggagaaaagtgcagagggggaaaacacatctattatttattttgttaggaaatcatttcttgacactgatgaggatgctacccattatctagtt

SEQ ID NO: 876077 - DNA, 604 bp, Homo sapiens
aagtaattttcttgttgaaagttgatgaaaacatgctggaagttgaaatcagggcttgtcatgtcactaacttttctcattattatttttcgaatagtattaagcgtttatagagagttcaaaacatggcaagccctattttcagatttttctatgtattaactcatttaattatcaaaataatcctatggggtagttactaatcttgaacccccttttaaagaaattgaggcatggaggactaatgaggtgtccaagcccacaccgcagataagcagaatatccaggattctgaaccaggtgttttgcctcaaagctggctgtaccaaccaccccctactctttctctactttggagaataatttagtgacttccttcagagaatccttattgagcatttkctatgataccttggctcttccaaatgagattattttataacttggaggcagtgttgtatacgtacattacccaggcttcaaggttagataaatcttgattgaatttgactccaccactcactgaccatgtgaccttgtggcacttagcatttcaaagcttcaatgtccacaaacaaaagttgaagaaaattatacctacctt

SEQ ID NO: 876078 - DNA, 573 bp, Homo sapiens
aatgatagtttattttatctacctactgggttttgtaagtaaacatggctcctttgactggttgtctttttaatttatattcttaccaaatgaatttatattctcagtggaaagtctgtctgtttactcagagctcatgagattaatcaactcaaattatgagtcacaaaatctcatggattcttagcatatttacacagcagatgataattttgtattcttgaatacattaaatcaagtcaaaggtctgacatggtgagcactgggatttctaaaagactttgtttttcttttcagaaaactgattggtgcaaatatatctcaaatctaacagctaaagccagatgtacttaggaaagagctcacaatctmtgggcagattgaacagcagtccctgcacccaaagaataatataagttttgtgtccagtaaattgttgttgaatatattcttgaagagccactttttatttcatttttgtaaagcaacacagcaccatcttctttataattatttccactttaattccatctgtttaaattgaaataaactactatgtcataaaaagattcc

SEQ ID NO: 876079 - DNA, 587 bp, Homo sapiens
gtttttcttttcagaaaactgattggtgcaaatatatctcaaatctaacagctaaagccagatgtacttaggaaagagctcacaatctctgggcagattgaacagcagtccctgcacccaaagaataatataagttttgtgtccagtaaattgttgttgaatatattcttgaagagccactttttatttcatttttgtaaagcaacacagcaccatcttctttataattatttccactttaattccatctgtttaaattgaaataaactactatgtcataaaaagattcctcttttcaaagagtttataattgcagtagaacaaagataaaccatgcttattttcagaatatagttgaactttagaggatgttacatggttaagtgacaaaatcagtgctaggaaagaaaatccaaagatgttcagtaaacagaaatatcytagtggagtacagcagtcagaatgttttcaaagtacaaggtcatgattgcaaccccaaaaccatgaggaggtaatcaactcaattaccttaaagcagagatgtcctgcatacaagacaacttttgaataaaatatgcctctccagc

SEQ ID NO: 876080 - DNA, 551 bp, Homo sapiens
ttcttctgccagataccctaaattgtctttctgaagttcaaatttctacagatctctagggcaggggcaaaatgccaccagtttctttgctaaagcataacaagagtgatctttactccagttcccaataagtttctcatctccatcaaagaccacctcagyctggacctcattgtccacatcactatcagcgttttggtcaaatccattcaacaagtctctaggaagttccagagtttcccacattttcctgtcttcttctgagccctccaaactgttccaccctctgcctgttattcagttccaaagttgcttccgcattttcaggttatctttataagagtaccccactctactggtaccagttttctgtattagttcattgtcacactgctacaaagaactgcctgagactggctcatttgtgaagaaaagaggtttaattgactcacagttctgcatggctggggaggcctcaggaaacttccaatcatggcagaatgggaagcaggcacctcttacatggcagcaggtcagagagagcatatgaa

SEQ ID NO: 876081 - DNA, 622 bp, Homo sapiens
tttttgtgggttaccatgttcccagctaaaatctgtgtgttctatccctcaggtagaaggaaacaatggagattgtgaaagcttgcagtcttgatgccatttacataacacagaagcacaatttccagttaaaagataacagagtaaaagcatgttactctactgttctgtcttgaaccaaatagaggaaggaggaatgccaaataactcagcatgcaacatgccataaaaagaaaacaaatcmccaagtaataaatgggtaaatgatgtaaacagatacctcagcaagggaggcatatggaaggcaaaaaagtacatgaaaatatgtccaacatatttcccttagtcataagggaagtgccaactaaaaccacactgagataccactagaatgtattagaatggcaaaacagaacaaaaagaaatagaaacctgacagtacctggtgatggcaatgataaagatcaattagaactctcacacatcgctgatgcaaacgcaaaatggaactcctttggaagctagtttggcagtttcttctgatgttaaacatacactttcacgtaacccagtaattacactcccaaatgggatttaagcaaagtaaaggcttatatttata

SEQ ID NO: 876082 - DNA, 636 bp, Homo sapiens
agtgatttgctttcagtttcttggataaatgatggtagaactcaatacaggtctcctgaaaattgcttatttctaaagttgtttctgcgttttttttcaatctgggatgcagtgcctgacagaatcaagctcatacattccttaagctagagaggctgggtcccccacacaatatttccaacttcatctaatatcctattaaaacagccctattcatgtacctttaccatctacttttcttacttccttttctattttaattagtttaattgaggagactacactctaatataaacatggacagctttattatctcaagaattgctagtaattgtattctaagccctttctcttgtttccagtgagacttgactggaagttcctaaagcctggactataactaagggcataatcttctattytacaattagctcacctttctctatatttgatcagggtttgaaagggaaaaagaagtccccttacatgctcaattatgtagtaggtgtggtaatgtgtctgcctcattcatgatgatctttggcatcttcagcttatcttctacttattcaatgtatgtgaatgggaatcctaatggtggaatactcaagcacaatcctttcttctaggcataag

SEQ ID NO: 876083 - DNA, 683 bp, Homo sapiens
tatttatttcgtctattaaaaggttatgtttctgggaaaaatggcaacccaaaagcaaaaaaaaatctgattaaaacttgtcaaaaaccaggcttggtggctcgtgcctgtaatcccagctactctggaggctgaggagggaagatcactggagtccaggagtttgaggctgyggtgagctataatcacatcattccactcctgcttgagtaacagaaaaaaaagggggcaaaaaatctaaatagacatgtctcaaaagaagacatacaaatgtcctacaggtatatgataaaaagctcaatatcactaaccatcagagaaatgcaccaaaaccacaatgagatatcatctcactccagttaaagtcatctttatcaaaaagacaaaacaaaacaaaataaattttggtgaggatttggagaaaggagaatgctcatacattgttgatgggaatgtaaagtagtatagccactgtggaaaacagcatggaggttcttcaaataaataaaaatagaacaaccatgtgacccagcattcccactgctgggtacattcccagaataaaacaaatcagtatatcaaagagatatctgcattcccatccttattgcagcactattcacagtagccagaaatgaaaagcaatataagtgtccatcaacagatgaatggataaagagaat

SEQ ID NO: 876084 - DNA, 540 bp, Homo sapiens
tctagacaaccctgggcaaagtaaggagaccctgtctctacaaaaaatgttttaaagtagccaggtgtgatggtgtgtacctgtgatcccagctactcaggaggctgaggtcagaggatcccttgagtctggtaggttgagactgcagtgagccatgataatgccactacactccagtctgggtgacacagagcaagactctgtctcaaaaaacataaataaataaatatcccattgtctgcatataccacagtttgttcatccattaatctactgacatcttagttgcttccaaattttggcaattatgaataaagctgttatgggcatccatgtgcagctttttatgtgaacayaagttttcaatttatatagataaataccaaggaacacaattgctggatcatatggtgagagtgtgtttagttttgtaagaaactgctaaactatttttcaaagcagctgtaccattttggattctcaccagcaatgaatgagcgttcctgttgctctacatccttgtcagtgtttggcattgtc

SEQ ID NO: 876085 - DNA, 545 bp, Homo sapiens
cctgaattatgatagatgataagtaatttgtcaggggaaaaatactccaggaataaagaacaggtacaaaggtcaggttctgggaagagcttgtcttggtccaggaactaaaaaatgttagagtggctggatctgggaaggagacaaaaagttattaaatgaggcagcaggcttcagcaggtgccacattgctcagggccttgtaggccatgctaaggatttggatgttartgtcagtacaaacaattgagtcataagcagaaagtaaaagcatgattccatcaaatgtttttctctaaacagtaattttataaatacaggttaaatgtgtgtggtcccagctactcaggaggtcccagctactcagtattccttttcaacaaatattaggtgcctactattagccaggtacagcccttagctactttgaatgaagcatatattacaaactggcagaaattcttaaagaatctaaagattgtttatacaccataatctcggtattttataaatttcttgaaattatttttatttacactgctttg

SEQ ID NO: 876086 - DNA, 678 bp, Homo sapiens
cattacttaatccacagatttattgtcaatagtttgtatcaaattgtgataacatatttgaaattaatatttcaaattaaagcaaaatcacaaatttatactttatattatgaatgagattcacaaaaggagcatgataatatattctgttgtcatcgcatacaaaataataacatatagagtatgaatcaataatttttcaaatacaaagctattacaattaggaatacaaagaaatcataattaggaatactttttccatattaaccccccatagtggtaacacttgcaaaaagatgggggggggtttttttttttttttttttttttcccgacagtcttgctcttgttgcccaggctggagtgcaatggcrtgattttggctcactgtaaactccacctcctgggttcaagcgattctcctgcctcagcctccctagtagctggtattacaggtgcttgccaccacacccagctaatttttgtatttttagtagagatgggggtttcaccatgttggccagcctggtcccgaactcctgaccttaggtgatccaccagcatcggcctcccaaagtgctgggattacaggtgtgagccactgcgtccagccagtggtgggtctcatatctcaatgtggacttttactaactcctgatgcctcagtttcctcatcag

SEQ ID NO: 876087 - DNA, 597 bp, Homo sapiens
attattctcaagccttaaagtttaatgaagttttccctgtgaagttttagacttacttgggactgatttcccccttgcttattttcctgtttttccctttggaatgggaatatctattttatacatgccccaccattgtattatgaaagcacataactgtttggttacacgggttcayagctatagagaaagtttgcctcaaaataaattataccctgaatctcacgtatatctgtttacaatgatatttagatgagactttcgaatttagactctagagttgatgctgggaaagttaagactactgagtttggtgagataaaataaacatgtattgcctgcaagataaacaacctttggggaatcaggagtgggatgttatgggctgaataacaaatgtttttgtctcctgcaaattcatattttaaaattctagctcccagtgtgatggtattaggaggtggagcttttgggagataataaggtcttgagggcagagccctcatgaatgggattagcactctcattaaagagactccagagaactctttcatcttcttttcactttgtgagattcaatgagaaatcagtagtctg

SEQ ID NO: 876088 - DNA, 626 bp, Homo sapiens
aagtacttttctccaattctgtgaagaaggtcattggtagcttgatggtgatggcattaaatctataaattaccttggacaggatgaccattttcatgatattgattcttcctacccatgagcatggaaagttcctccatttgtgtgtgtcctcttttatttcattgagcagtggtttgtagttctccttgaaaggtccttcacatcccttgtaagttggattcgtcggtattttattctctttgaagcaattgtgactgggagatcactcatgatttggctctctgtttgtctgttattgtatgggaatgtttgtgatttttgcacattaattttgtatcctgagactttgytgaagttgcttatcagcttaaggagattttgggctgagacaatgggggtttctaaatatacgatcatgtcatctgcaaacagggacaatttgacttcctcttttcgtaattgaatacactttatttctttctcctgcctgattgccctggccagaacttccaacactatgttgaataggagttgtgagagagggcatccctgtcttgtgccagttttcaaagggaatgcttctagtttttgtccacagtatgatattggctgtgggtttgtct

SEQ ID NO: 876089 - DNA, 634 bp, Homo sapiens
acactttatttctttctcctgcctgattgccctggccagaacttccaacactatgttgaataggagttgtgagagagggcatccctgtcttgtgccagttttcaaagggaatgcttctagtttttgtccacagtatgatattggctgtgggtttgtcttaaaaagctcttattattttgagatatgtccaccaatacctagtttattgagagtttttagcatgaagggctgttgaattttttggaggcattttctgcatctattgagataatcatgtggtttttgtctttggytctgtctataggatggattacgtttattgatttgtgtatattgaaccagccttgcatcccagggatgaagccaacttgatcttggtggataagctttttgatgtgctgctggattcggtttgccagtattttattgaggatttttgcatcgaagttcctcagggatattggcctaaaattctcttttcttgttgtgtctctgccgggctttgatgtcaggatgatgctggcctcataaaatgagttagggaggattccctctttttctattgattggaatagtttcagagggaatggtgccagttctactttgtacctctggtagaattctactgtgaatt

SEQ ID NO: 876090 - DNA, 601 bp, Homo sapiens
ggcaacagatattgctagaaataagaattacctaagttaatatttaaaatgtattgctattacatatgattagcatctaaaaaagacaacaaatgctattagggcctggtaatgggcacttctctttgtaagggtggaagaaagtctgttgactccccttaatagtgggagactttccactcaaaaacaaggttattagaacctccatttggatgattacatgtttctaaagacaatatcatataggtggggatattttcaagagttttaaaagcatggagttgaaggctttatttgtcatgtttttattttaaaatatcaattcaataccctgtattactgactatctcaagtaatgttataaagtaggtttggaaggcytaaaatttgaaaatataaagaaatgacttttagcagtacatcaatacctggctgaaattctggtaaactgtttaaagaggcacattccctgtttcacaggagtgatgtgctaatacctttctacaaggactaccagactgcattgaaaagtcccattcaaactagagctaaaatggtgtttgtatcttgaactagttaaggttcatgaaatttcagaaaa

SEQ ID NO: 876091 - DNA, 614 bp, Homo sapiens
aggtgggtgcctataatcctagctactcaagagactgaggcaggagaatcacttgaacctaggcagcagaagttgcagtgagccaagatggcaccacagcactcctgcctgggcagcagagtcagaatctgtctcaaaaaacaaaaacaaaaaggtgatcttaaaattcatataaaaatgcaaatgacacagaacacccatgtgttagttcattttcacactgctgataaagatgtacccaaggctgggcaatttacaaaagaaagaggtttcatggactcacagctccacgtggctggggtagcctcacaatcatgggggaaggtgaaaggctagtctcatatggyggcagaaaagagaagagaacttatgcagggaaactcccctttataaagccatcatatcttgtgagacttattcactatcacaagaacagcatgggaaagatccacccccatgattcaattacgtcccaccaagtccccctcatgacatgtaggaattgtaggaactacaattcaagatgacatttgggttggggacccagccaaaccatatcaacccagaaccaatttggaaaaagaaaaacaaaatttgaaggctcacatttcttg

SEQ ID NO: 876092 - DNA, 558 bp, Homo sapiens
actttaatatacttaacaaacccaggctaaaataattttaaaaagacccaaaaacacaaattataaatatcagtatgtaaatggcagattcaacatacattgaaaaaaagaaattaggtgccaaaacttaaatgaaaatgaacccattcttgagaagggtgacttatacaagcttacttgagaagaagtaatatattcagaaaataaagaaattgagtacatcattttaaaagtcccagaaggcttcacctgtaattacttcaaatgtttaagaataaataatactcgagggaggagccaagatggccgaataggaacagctccggtctacagctcccagcgtgagcgacrcagaagacgggtgattactgcatttccatctgaggtaccaggttcatctcactagggagtgccagacagtgggcgcaggccagtgtgtgtgcgcaccgtgcgcgagccgaagcagggcgaggcattgcctcacctgggaagtgcaaggggtcagggagttccctttccgagtcaaagaaaggggtgacggacgcacctggaaaatcg

SEQ ID NO: 876093 - DNA, 637 bp, Homo sapiens
gaatctgatatccagtgttacctcataagctcaaatattcagttttcaacaacaaaaaatctcgaaacagaaaagcatggcccatgtagaggaaagacataaatcaacacaaactataaaagaaacctaaagggggattctgatgtcagcaagatggatgactagaagctcctagcacttgtcccctgacaaaaacagcaaaattaacaaacaaacaactacattttgacaaaaatgactaaaggaaagcaacaaagtttatcaaaggagtaacagaaaccctgatgagcacagaaactctagatagtcattgatatggtttggctstatccccaacaaaatcttaccttgaattgtagctcctataattaacacatgttgtgggaagaaactggtggaagataagtgaatcatgggggcagttttccccatgctgtttttgtgatagtgaataaatctcacaagatctgatgattttataaggggaaaaccctctcacttggttctcttgcctgccaccatgtaagacatgcctttcaccttccaccatgattgtgagacctctaaagccacatggatctgtgagttcatgaaaccttttttctttaaaaattacccactgttgggtatgtctttc

SEQ ID NO: 876094 - DNA, 666 bp, Homo sapiens
aatgctttcctttttcctacccccacggacaggcctcagtttgtgttgtttccaacccaccctaccatgtgtctgtgtgttctaattgttctgctcccacttagaagtgagcacatgtgtttagttttctgttcctgtgttagtttgctaaggacactaacttccagcttcatccatgttcctgcaaaggacatgatcttgttcccttttatggctgcatagtattccatggtgtatatgtaccacattttctttgtccagtctctcattgatgggcatttcagttgattccatatctttggtattgtaaatagtgaggcratgaacatatgcctgcatgcatctttataacagaatgatttatgttcctttgggtacatactcagtaatgggattgctgggtcaaatggtacttttgtttctagaattttgaggaattgccacactttcttccacaatgtttgaactaatttatactttcaccaacagtgtaaaaacattcctttttctcagcatcctcactggcatctgttgtttcttgactttttaataattgccattctgactggaatgagatggtatcttattgtggttttgaattggatttctctaatgttcagtcatgtgatttttttcatgttttttggccacaagaatgtcctcctt

SEQ ID NO: 876095 - DNA, 666 bp, Homo sapiens
aatgctttcctttttcctacccccacggacaggcctcagtttgtgttgtttccaacccaccctaccatgtgtctgtgtgttctaattgttctgctcccacttagaagtgagcacatgtgtttagttttctgttcctgtgttagtttgctaaggacactaacttccagcttcatccatgttcctgcaaaggacatgatcttgttcccttttatggctgcatagtattccatggtgtatatgtaccacattttctttgtccagtctctcattgatgggcatttcagttgattccatatctttggtattgtaaatagtgaggcaatgaacatatgcctgcatgcatctttataacagaatgatttatgttcctttgggtacatactcagtaatgggattgctgggtcaaatggtacttttgtttctagaattttgaggaattgccacactttcttccacaatgtttgaactaatttatactttcaccaacaktgtaaaaacattcctttttctcagcatcctcactggcatctgttgtttcttgactttttaataattgccattctgactggaatgagatggtatcttattgtggttttgaattggatttctctaatgttcagtcatgtgatttttttcatgttttttggccacaagaatgtcctcctt

SEQ ID NO: 876096 - DNA, 588 bp, Homo sapiens
attctcatcattttcagatacacaaatcagatgtagatttggtcttttcacatagtcctatatttcttggaggcgttgttcatttcctcttattcttttttctctaaacttcttttctcacttcatttcattcatttgatattccatcactsataacctttcttccagttgatcgaatcagctactgaagcttgtgcatttgtcacatagttcttgtgccttggttttcagctccatcaggtcctttaaggacatctctgcattgtttattctagttagccatttgtttaatctttttcaaagtttttaacatgtttgccatgggtttgaacttcctcctttacctcagagaagtttgatcttctgaagccttcttctctcaactcatcaaagtcattctccatccagctttgttccatttctggtgaggagctgcattcctttggaggaggaaaggtgctctgagttttagaattttcagttattctctctgtttttcctcacctttgtggatttatctacctttggtgttcgatgatggtgatgtacagatggggttttggtatggatgtcctttctctttgttag

SEQ ID NO: 876097 - DNA, 631 bp, Homo sapiens
ttctcgaggagtatctttgtggcgttctctgtatttcctgaatttgaatgttggcctgccttgctagactggggaagttctcctggataatatcctgcagagtgttttctaacttagttccattctcatcattttcagatacacaaatcagatgtagatttggtcttttcacatagtcctatatttcttggaggcgttgttcatttcctcttattcttttttctctaaacttcttttctcacttcatttcattcatttgatattccatcactgataacctttcttccagttgatcgaatcagctactgaagcttgtgcatttgtcacatagttcttgtgccttggttttcagctccatmaggtcctttaaggacatctctgcattgtttattctagttagccatttgtttaatctttttcaaagtttttaacatgtttgccatgggtttgaacttcctcctttacctcagagaagtttgatcttctgaagccttcttctctcaactcatcaaagtcattctccatccagctttgttccatttctggtgaggagctgcattcctttggaggaggaaaggtgctctgagttttagaattttcagttattctctctgtttttcctcacctttgt

SEQ ID NO: 876098 - DNA, 563 bp, Homo sapiens
gagtaacataaatgttgagtattagatctaaatagaattccagttctacagagagatgacaaattatccttttcgtttcctacgttaataccgaaagatggtaccgtattacctattacaagatcacagtatgcctgaactctatctgtgattcaaggaatatgactgttgtgctaattagccaaaaggtaaggagactaaaggtaattaaaatctttaaagcatattcctaatctttacagccaaatgtctaactcatctgtactacagattcatatttcaatttatttgcaaagayacaggtgtgttataataattattatagcacacaaaatagaaatccatatagaatatacccacataagtggccttttacagatttgtgtttcaacccaaggtgatattctagtaaaaatacataaataggccgggcacagtggctcacatgtgtaatcccagcactttgggaggccaaggtgggcggatcatgatgtcaggagatagagaccctcctgtctaacacagtgaaaccctgtctctatcaaaaatacaaaaaaattagc

SEQ ID NO: 876099 - DNA, 642 bp, Homo sapiens
gttcacttattggaaggacaaaatagccattttgatgtttcttcctattttcttgaggaaaataacaccaattttgttggtcttttctcctagaggcgtttctttcaaccctttcatcatgttaacatttcccattggcagccccacaatttacgaaaaaaaaatatacttctcactgacttccatcaaagcaggttaactacaccttgcaatagacattttgacagtctgaaataaaagcttgctggatcacttgtatctgagaaaggacagcataaggcataatgaccaaatagggccctggaagcctgtggcgatgcctccatctttatccacaccttcaggtgtggctgcaactcttacccagaggcagttttaacttttataycacaagacctggggcctggaagccaatgtccctaatcaaattgtcctgccttaataacaacaacaataataattgttctgattgctatatcattagtaataccaaataactattgttatattattattactattatttcagttgattctcattattcaccatagttgtgttctgtcaacttcccacgaacactgaattagcaaatcctgaactgctatttttaggagaactacaagattaggttcctgcaggcc

SEQ ID NO: 876100 - DNA, 639 bp, Homo sapiens
aagtcacaaggacagatcagtttcaaagagtgggaaaatagactccacctctttataggaggagctgcaaagaatctgtggtcgtatttaatctaacacatccggacaacagagagaaatcaggaagttgaatgagatgcagatttgctcttttttttccccccaccagaatatgtatttaaggatagaagtgatgttacaggtcattaatttatttattcagatatttcagtattttgacttctracaaatcaaacccatgccaatgctatgcttttatacaatttctacatcataactggcactcactaaacccacaatcaacaatgaagaaaaaagtaggcacaggcatgtttcatagaaactaaaatagacttggtcagcttatttattaagcacatattcttatctactatgaaaagtcatgaccttcttagctgaggaaagcaattacttttgcacagagaatctttatataacaacacaaaggatattcaaaatttaccagtttctggcaagactaaagcacttaaggcaggcagtgttaatcatgcaaactttgtgaagcaattcagcttatcagagcatgagatgaacgaagtcaaagctttgatcctcagataggccaatatatttcat

SEQ ID NO: 876101 - DNA, 602 bp, Homo sapiens
tatactctgcattcaggtactgatatctatcagatgggacagggaatgaaataatattgcaaaaaaataattcacttccccgttttcatgagcagaaatacaggatgcattttcggacactattaatgtataagcccacacaaaatgtgaattaaattattgcccttgtcctttgttttcaatgtaacactacctgaaatggatgtatttgctgcttcccaaagtgaacgttttattctttttcttctgagaaagatactgagattcaacagggggctccacaagcctcagagcaggttccagagagctcagtgctttgggacaatattccctggcagcaacttatttatggcagtggttttgctatttggattggactggcatattcctaagccctctgtattgtgtcttccaatttctgttttggggatgtgaagctacgtgggagcatgargcccaaggaagtgggtggggccagaggttccctattctactgcccagtcttgcttgtaagattggtctgatcctgcatgtctcaaaacttcttgcacattagactcctttggagaactttaaaatataacacagatgctcagcttcaa

SEQ ID NO: 876102 - DNA, 568 bp, Homo sapiens
tattttttatttttatttattattattattattattattattattattattattattatttgagacagagtcttgctctgtcgcccaggctggtatgcagtggcgtgaacttggctcactgcaaactccgcctcccgggttcatgccattctcctgcctcagtctcctgagtagctgggactacaggtgcctgccaccacgcctggctaattttttttgtatttttagtagagatggggtttcactgtgttrgccaggatggtctcgacctctgacctcgtgatccacccacttcagcctcccaaagtgctgagattacaggcgtgagccaccgcacctggcctgggtttgccagtattttattgaggattttcgcatcgatgttcatcagggatattggccttaaattttttttgttgtgtctctgccaggttttggtatcaggatgattctggcctcataaaatgagttagggaggagtccctcttcttctacggtttggcatagttacagaaggaatggagtttcagaaggaatggaaactttgtacctccagtagaattcggct

SEQ ID NO: 876103 - DNA, 615 bp, Homo sapiens
gaaaatgtatatttctaaagtataccaaaacaacaaaaataaaaaggcaaaaccatacccattttcatacttaagataataaagaactgctttaaatagacatatttatttggtagtaaagatatggaaatcattgcaaatatctcaaaggctttaggatactggctctctgaaaataagacaaagcgattttttacaatgtttgtaaccttgtcaatcatgaccaccaaataaccaatatgggtatgcctctttaaaaaaaatcaatttgctcacgcctgtaatcccagcactttgggaggccgaggcgggtggatcacaaggtcaggagatcgagaccatcctggctaacatggtgaaaccccatctctactaaaaatacaaaaaattagccaggcgtggcggcatgcgcctgtagtcccagcyactcaggaggctgaggcaggaggatggcatgaaccccggaggcagagcttgcagtgagcagagatcgcaccactgcactccagcctgggcgacagagcgaaactctgtctcaaaaaaaaaaaaataaataaataaataaataaataaataaataaataaataaatttaggtcactttcagctttgaaga

SEQ ID NO: 876104 - DNA, 681 bp, Homo sapiens
gcatctacataagaagcagaagaggatagcacccactctactttatcaaataagtcagaaacaatcatattagaaatcattctactataaagacacatgcacatgtatgtttactgcagcactgttcacaatagcaaagacttggaaccaacccaaatgcccatcagtgatagactggataaagaaaatgtggcacaaatacaccatggaatactatgcagccataaaaaggatgagtttcatgtcctttgcagggacatagatgaagctggaaaccatcattctcagcaaactaatacaggaacagaaaaccaaacaccgcatgttctcactcataagtgggagttaaacaatgagaacacatggacacagggaggggaacatcacacaaygggacccgtcaggggatgggggcttaggggaaggatagcattaagagaaatacctaatgtagatgacaggttgatgggtgcagcaaaccaccatggcacttgtatacctatgtaacaaacctgcacattctgcacatgtatcccagaacttaaagtaaaataaaaataaaaaagaaattccagaattcagatcatagtcattttctgtttccactgagtcctctttttagtcaaacatgcccagtattccttgtcttgaaaaacaaacatacaaacaaatgcacaaaag

SEQ ID NO: 876105 - DNA, 681 bp, Homo sapiens
gcatctacataagaagcagaagaggatagcacccactctactttatcaaataagtcagaaacaatcatattagaaatcattctactataaagacacatgcacatgtatgtttactgcagcactgttcacaatagcaaagacttggaaccaacccaaatgcccatcagtgatagactggataaagaaaatgtggcacaaatacaccatggaatactatgcagccataaaaaggatgagtttcatgtcctttgcagggacatagatgaagctggaaaccatcattctcagcaaactaatacaggaacagaaaaccaaacaccgcatgttctcactcataagtgggagttaaacaatgagaacacatggacacagggaggggaacatcacacaacgggaccygtcaggggatgggggcttaggggaaggatagcattaagagaaatacctaatgtagatgacaggttgatgggtgcagcaaaccaccatggcacttgtatacctatgtaacaaacctgcacattctgcacatgtatcccagaacttaaagtaaaataaaaataaaaaagaaattccagaattcagatcatagtcattttctgtttccactgagtcctctttttagtcaaacatgcccagtattccttgtcttgaaaaacaaacatacaaacaaatgcacaaaag

SEQ ID NO: 876106 - DNA, 622 bp, Homo sapiens
acagttgccaaacacatgaagtgatgggcaaatagaaagaggaaggattgtgttaacactgggtgggagagtggcagctctaactgaggttccagggaagatgtgagagggcattctgaaagtagagctagacctacccagaattcccaggtggtgaccaaaaatctgctcttgattctccctggaaatacccattgtctgctcagatgtaacactatctggggcaaacatcactgtaggattttatcataaaacaattttatttttgtccccactgttgctttaaaatattgagtggggctagttattctcttttccctggatgatatagctgaggagggtcracttctatggccccctagttagtcaaaggacatatagtcactatacattgaaaaacaatctcaattccacaattcaaacatcctggcctatttggtaatgaaaactttgaacttaacttaaattgaaggcttctattcttacccccacctcagatctgctgggagcaggagaccaacagtgtggaagggagtaaatatctttctttctcttccttcattttatttctattctgccaccctgtgtaaggcttctttctcccataggctcagactggcag

SEQ ID NO: 876107 - DNA, 663 bp, Homo sapiens
atccaaaggatccacctcacacaagtccagggtaattataatgtattggcaacacccactcactatattgtacattttgaaaaagctatgaatttcactacatctgcatttaacagttcagcacaaaaatgcagatgctgtgtgcagagtctttttcttggaatgctgatttcttgggctcagtgctttctccagaggttttgcacaatttggggattttctctacagaacggagaaggcttttttttttttgctaaatacaaaagacaagctcttgagaggaaaaaatcatgtttctatataaaagtaaatgtgattcccaaaggcctactttgaaagaaaagggaaaaaactgaggtgtcattccagacagtgtgataggtatgtcaacaaatgatagatatgtccaacggacatatccaaatacacgcttcgtaaacatggatcaatttttatttattcaaaaaatctctttgtgggytgctttccaaaaaggcaaaatcaattattttgagcgggtagaaaatcttcaaattttgagggtaaattggaagttgaagaacaatcaagtcattcatagcagggtctgataagtcaggaggatgaatgaatggaaagaatgctgttggtgtccaaaggtaaacctggcttgcttctggcaag

SEQ ID NO: 876108 - DNA, 592 bp, Homo sapiens
tctcctctgaattttttcctccttcccttgtttcttccttataaacactgctgggtacttaacttttaaaaacatgggctttgaggaaggacatagctgggtaccaatcccatctctgctctttaagaagttgggttacctctgacaagttacaaaccttgcttagcatctatctctttacctttatattagccacaatacccactccatagagtgggttttatatattactatttgtacagacttgcaagaatgcaaagtgcgtagaaagtgctcrataaacagtaactagtggtgactggggtaggggtagtgccaatagttgctttaagaacagttgaactagcagcaatggccaatgccattggcaaccaaattgtgctcataactctatggaccagatcttaagactccaacactgggaaatttgctgtcattctttgatccctgggcttaaatgtctacttcttaatgctatgagctaaatattcaatgttaaaatggacagggggtcatgctccatctcatttatcataagtgaataactgggttattttgaccatagatcaaactccaaaaatttaagcaaaga

SEQ ID NO: 876109 - DNA, 475 bp, Homo sapiens
agccaaatgaagaatgcaatgaatgcaatcccatttacaatagccacaaaaaaataaaatacctaagaatatatctaaccaaacaggcaaaagatctatacaaggagaactacaaaacactgctgaaagaaatcatagatgacacacaaaacaatgaaaaaaattccatgctcacggattggaagaatcaatattgtttaaatggtcatacttctcaaagcaatctacggattcaatgctattcttatcaaactactgttattttttcacagaattagagaaaactattttaaaattcttatggaatcaaataagatcccaaatagtgaaagyaattctaaacaaaatgaacaaagctggaggcatcacattacccaacttcaaactatactataagactaaaataaccaaaacagcacagtactggtacaaaaacagacgcatagaccaatgaataaaacagaatagaaaatgc

SEQ ID NO: 876110 - DNA, 654 bp, Homo sapiens
aaaaaggtaaggagaaactagtctgtaatgagaagaaacttgtttattgcaataaaattttatctttttttttctttttttttaattttattattattatacttgaagttttagggtacatgtgcacgacatgcaggtttgttacatatgtatacatgtgccatgctggtatgctgcacccattaactcgtcatttagcgttaggtatatctcctaatgctatccctccccgctcccccmaccccacaacagtccccggtgtgtgatgttccccttcctgtgtccatgtgcaacatcaatagactggatcaagaaaatgtggcacatgtacaccatggaatactatgcagccataaaaaatgatgagttcatgtcctttgtagggacatggatgaagctggaaaccatcattctcagcaaactatcacaaggacaaaaaaccaaacaccgcatgttctcactcataggtgggaattgaacaatgaaattttatctttttaaaaaaagagatattagtgacactgaattctttcaaaaaccttttctttgcaaatttcaaatgattgatgagttgataattttcacatccactagaattcatcatattaagttaatgcattttagttagaagaatttaaatttctgtgcttaata

SEQ ID NO: 876111 - DNA, 654 bp, Homo sapiens
aaaaaggtaaggagaaactagtctgtaatgagaagaaacttgtttattgcaataaaattttatctttttttttctttttttttaattttattattattatacttgaagttttagggtacatgtgcacgacatgcaggtttgttacatatgtatacatgtgccatgctggtatgctgcacccattaactcgtcatttagcgttaggtatatctcctaatgctatccctccccgctcccccaaccccacaacagtccccggtgtgtgatgttccccttcctgtgtccatgtgcaacatcaatagactggatcaagaaaatgtggcacatrtacaccatggaatactatgcagccataaaaaatgatgagttcatgtcctttgtagggacatggatgaagctggaaaccatcattctcagcaaactatcacaaggacaaaaaaccaaacaccgcatgttctcactcataggtgggaattgaacaatgaaattttatctttttaaaaaaagagatattagtgacactgaattctttcaaaaaccttttctttgcaaatttcaaatgattgatgagttgataattttcacatccactagaattcatcatattaagttaatgcattttagttagaagaatttaaatttctgtgcttaata

SEQ ID NO: 876112 - DNA, 645 bp, Homo sapiens
tttaaataattgaagagaaattaaagaaagtatggaaatcccagaaggaatactttgatagaagaaggtctccttaacacaattcttcacctaaaattgtgagaaactctttctgttgtgtcttagtaaatggagatttccagatttcactgacattgctgaagacaggcaaagtaggattagggctgcaattctagataatgtgtttttttttaattattattgtattttaagttctgggatacacgtgcagaacatgcaggtttgttatataggtatatatatgtgccatggtggtttgctgcacccatcaacctatcatctacattaggtatttctcctaatgctatccctccccttgctccccacccacctccaggcaccagtgtgtgatattcctctacccatgcccatatgttctcattgttcaaatcccaattatgaatgaaaacmtgcggtgtttggttttctgttcctgtgttagtttactgagaatgatggttttatgaacagacacttttcaaaagaagacatttatatggccaacaaacatatgaataatagcttatcttcactggtcattagagaaaagcaaatcaaatccacaatgagttaccatctcataccagttagaatggtgatcat

SEQ ID NO: 876113 - DNA, 585 bp, Homo sapiens
ctagcaaaccaaatccacaacacatcaaaaagacaatatgctatgataagttgagatttatcccagtgatacaaaaatagttcaatgtacaccaaatcaataaatatcacctcaacataatgaaggacaaagaaatattatatcaatatacactgaaaaagcatttgataaaattcaacatttcttcatgatgaaaattctcaacgaattagcatagaaggagagacatctcaacatattaaaggccctatatgacaaacttatgggtagcattatacaatatggggaaaagctaaagtatttttcctytaggaaatggaacaaaacagctagtctactttcatgaaccctattcaacataatactgcaagtcctagctagagcaatcaggcaagagaaagaaataaaaggtatcccaattagtaaaaaaaaaaaaaaaaaaaaaaaaagtcaaggctgagtgtggtggctcatgcttgcaatcccagcatttttggcggccaaggcaggcggataacccgaggttaggaatttgagaccagtctggtcaacagggtgaaacctcatctctactataaatacaaa

SEQ ID NO: 876114 - DNA, 585 bp, Homo sapiens
ctagcaaaccaaatccacaacacatcaaaaagacaatatgctatgataagttgagatttatcccagtgatacaaaaatagttcaatgtacaccaaatcaataaatatcacctcaacataatgaaggacaaagaaatattatatcaatatacactgaaaaagcatttgataaaattcaacatttcttcatgatgaaaattctcaacgaattagcatagaaggagagacatctcaacatattaaaggccctatatgacaaacttatgggtagcattatacaatatggggaaaagctaaagtatttttcctctaggaaatggaacaaaacagctagtctactttcatgaaccctattcaacataatactgcaagtcctagctagagcaatcaggcaagagaaaraaataaaaggtatcccaattagtaaaaaaaaaaaaaaaaaaaaaaaaagtcaaggctgagtgtggtggctcatgcttgcaatcccagcatttttggcggccaaggcaggcggataacccgaggttaggaatttgagaccagtctggtcaacagggtgaaacctcatctctactataaatacaaa

SEQ ID NO: 876115 - DNA, 612 bp, Homo sapiens
gtatttaaagatttcaaagttattaagagaaacaatctatagataaactggagggcttatcacatatactacactgctttgcatgacaaagctgggtgggtgctcgaggagagcttatttactcccttgcaatgcttcctcagcctcacctagcagccaggttcatttctgtctgcatgctcgaccttcccagctgaagcactgtctagcattctgcttacttattgctctggcyttaagggaacttagatctctgtgaggaagccctttgaaatccaaagaattagtgtacagtttttctgttcagacagaactttcagcaaggtcatgtctgtttcctgaatgaacaggattaggatggaaaactggagcctttcccagctcaaagggagccaagtttcactgtgtcatttcattattctctttgaagtaaattcccagaaaaatcagatgcatccatattaagcttaaatagaaaacacatctcaaagccaaatggacatgattcagggagtttgccaccattttggattgcctatgcttttgttcccttctgttagtgagaataatcacattttttctgtaacttcatagaatgcggattaatccagt

SEQ ID NO: 876116 - DNA, 612 bp, Homo sapiens
gattatgtaaagaaactgaatttatgactgattggcagagaatggaaccaatttgtaaaacatatttcaagatatcatccatgagagctatctcaaccaagctagacaggccaacattcaattcaggaaatgcagacaacctcagtaagatactctatgagaatatcatccttgagacacataatcatcagattccccaaggtaaaaatgaaagaaaaaatgttaagggcagctagagagaaaggccaggtcacctacaaagggaaacacatcagactaacaatggacctctcagcagaaaccctacaagccagaagagattgagaggcaatattcaacattcttaagaaaaagaaattccaatccagaattttatatcyggccaaattaagcttcataagccaaggagaaatatgatccttttcagacaagcaaatgctgagggaattcattacctccagacctgccttacaagagctcataaaggaagctttaaatatagaaagtaaaggccattaccagcctctacaaaagcatgtttaaggaggcagaccagtgatactataaagcaaccacataaagaagtctgcagaataaccagctaacatcatg

SEQ ID NO: 876117 - DNA, 601 bp, Homo sapiens
aaaaactgaaaacaaactaaacatccttcagttggagaatagagaaacaaactacggtgcagatatataactgattactactcagcactaaaaaaaataataaactgttgacataagcaacaatctggatgaatttcaaaggcattatgctgagtgaaagaagccaatctcaaaaaagtttatattgtgtaattcaatttttatgataatttcaaaaaataaaactatggtggttgaaaacagtgatttctatggattaagggttaggggagggtgtgataggatagagttctttggcttatagcacttttcagtatcccaattgtrgtggtggttacaaatatctatatatgtgttaaaatgcatagaactaaatagcaaaaactcagtaataataaaaataacaaacacatgctaatcaacattttagcacgcaaaggtgcacagtaagcatttgttgtatcaatttaaaaatgatattaaagaccattactggtatgttccacattgccacagcttagtttaaattcctgtgtctagctgaatactgaacatgttatatacacgttatgtgttaatgtgtacataagcaagaatgact

SEQ ID NO: 876118 - DNA, 584 bp, Homo sapiens
  misc_feature 572, 573, 574, 575, 576, 577, 578, 579, 580, 581, 582, 583,584: n = A,T,C or G
gtatctatagcaacacatttagtataaattagaagagtcctttctccttcacttggccagacaaaacatggggcatatgtaatcaaaaaccactggcaataaaaaaaatgcgtcagcatctattctatgcgagacacactgctaaatgctagctgccaatctagttaaggaaaagaaacacacatgggatttgggcgaaragaacatactgaggaaccatgggaataaatgtgtgaaatgtgtaaagtcatattagagaagacttgaaatggagcacttaacatttattgaatgttttctataatataggcaccaagctgtgttcttgaattcacaagacacatcttcaattcattgatgaggaagctgaagtccaaatgcttaagtgatattttatcagggcataatgcatgcagggagacaatgtctcattttctgatgttgattttatcacccaaagtgatgtttaatttctgtattctgtgatccctataatttcctttgcaactgttacccaatatgttaggagacattttaagacactgcgaatatcttgtacctcaccaaaattnnnnnnnnnnnnn

SEQ ID NO: 876119 - DNA, 584 bp, Homo sapiens
  misc_feature 572, 573, 574, 575, 576, 577, 578, 579, 580, 581, 582, 583,584: n = A,T,C or G
gtatctatagcaacacatttagtataaattagaagagtcctttctccttcacttggccagacaaaacatggggcatatgtaatcaaaaaccactggcaataaaaaaaatgcgtcagcatctattctatgcgagacacactgctaaatgctagctgccaatctagttaaggaaaagaaacacacatgggatttgggcgaaaagaacatactgaggaaccatgggaataaatgtrtgaaatgtgtaaagtcatattagagaagacttgaaatggagcacttaacatttattgaatgttttctataatataggcaccaagctgtgttcttgaattcacaagacacatcttcaattcattgatgaggaagctgaagtccaaatgcttaagtgatattttatcagggcataatgcatgcagggagacaatgtctcattttctgatgttgattttatcacccaaagtgatgtttaatttctgtattctgtgatccctataatttcctttgcaactgttacccaatatgttaggagacattttaagacactgcgaatatcttgtacctcaccaaaattnnnnnnnnnnnnn

SEQ ID NO: 876120 - DNA, 584 bp, Homo sapiens
  misc_feature 572, 573, 574, 575, 576, 577, 578, 579, 580, 581, 582, 583,584: n = A,T,C or G
gtatctatagcaacacatttagtataaattagaagagtcctttctccttcacttggccagacaaaacatggggcatatgtaatcaaaaaccactggcaataaaaaaaatgcgtcagcatctattctatgcgagacacactgctaaatgctagctgccaatctagttaaggaaaagaaacacacatgggatttgggcgaaaagaacatactgaggaaccatgggaataaatgtgtgaaatgtrtaaagtcatattagagaagacttgaaatggagcacttaacatttattgaatgttttctataatataggcaccaagctgtgttcttgaattcacaagacacatcttcaattcattgatgaggaagctgaagtccaaatgcttaagtgatattttatcagggcataatgcatgcagggagacaatgtctcattttctgatgttgattttatcacccaaagtgatgtttaatttctgtattctgtgatccctataatttcctttgcaactgttacccaatatgttaggagacattttaagacactgcgaatatcttgtacctcaccaaaattnnnnnnnnnnnnn

SEQ ID NO: 876121 - DNA, 600 bp, Homo sapiens
atccactaagtagtgaatgctttccactatgtacttaaagccatacctacatgtggtgactatacatgaatgacacaataagaatcagcaatttgactgcgcgctgctatttgtcaacctactaaaaggyaatgtaacatccacctgccacttaccagctgaactgccttggtcaaactttccatgccattagctaccttatagagttttttttgtaaacattaagtaaattaacaaatgcaaagcatttaaatggaatatggcacatacacaaaagaaaataattatttaagtcatctctattcaaaagttcagtgtaaattttaggatatctatatttagtgatgcctacgtggtccttttgaattcccaagcaacctcagattccttcaatgttacatacagagacagttgccactaaactactgggattggcacagaatgctattcaccatttcctaaaatagatgttggcagcaaattgttttcattgtcaggacagactaagggattatatagagatatcttggggcacaagttggccagatataaccaagtttcaacttttttgtcctttcaatttatcaattaccatctaat

SEQ ID NO: 876122 - DNA, 665 bp, Homo sapiens
ttttattttttctagctattcttataagtataaaaaaagctactgccttttttatattaaccttttatccagccatactgttaagttctattatttgtagtattggtctataagtacacttgggttttctatgtaaggtgacagaacaaggtaagatttatcttgaaagagaacatgaaaagtttcttcaggctgggcaaggtggctcacacctgtaaatcccagcacattgggaggccaaggcaggcagataacctgaggtcaggagttygagtccagcctggacaacatggcaaaatagtgtcgctacaaataatacaaaaattagccaggtgtggtggcaggcacctacaatcccagctactcataggctgaggcaggagaatcccttgaattctgcagcagagggtacagtgagctgagatgcagcaacttcactctagcctgggctgaagagtgaaacttcaataaaaaagaagacaaacctgggctgaagtggacaagacaggatcaggcctgaaaagcccagacaggaccataccaaaccagaccagacccaacaaaactggactacactgaaatgcactggaccagactggaccaaagcggacaagaccgggccagactgcataagactgggtcaggactggactaggccaaaccag

SEQ ID NO: 876123 - DNA, 665 bp, Homo sapiens
ttttattttttctagctattcttataagtataaaaaaagctactgccttttttatattaaccttttatccagccatactgttaagttctattatttgtagtattggtctataagtacacttgggttttctatgtaaggtgacagaacaaggtaagatttatcttgaaagagaacatgaaaagtttcttcaggctgggcaaggtggctcacacctgtaaatcccagcacattgggaggccaaggcaggcagataacctgaggtcaggagtttgagtccagcctggacaacatggcaaaatagtgtcgctacaaataatacaaaaattagccaggtgtggtggcaggcacctacaatcccagctactcataggctgaggcaggagaatcccttgaattctgcagcagagggtacagtgagctgagatgcagcaacttcactctagcctgggctgaagagtgaaacttcaataaaaaagaagacaaacctgggctgaagtggacaagacaggaycaggcctgaaaagcccagacaggaccataccaaaccagaccagacccaacaaaactggactacactgaaatgcactggaccagactggaccaaagcggacaagaccgggccagactgcataagactgggtcaggactggactaggccaaaccag

SEQ ID NO: 876124 - DNA, 582 bp, Homo sapiens
agtttgggaacactgtttttctaggatatttgtagggacatttgggagcacactgacgtctatggtgaaaagtgaatatctccatatataaactagaaagaagccatctgagaaaatgctttgtgatgtgtgcattcatctcgcagagttaaacctttcttttgattcagcagtttgtaaacactgtttttgtacaaccctagaaagaacatttaggagggcatcgagtcctatggtgaaaaaccgaatatccccagatgaaaagtagaaagaagctatttgtgaaactgctttgtgatgtgtggattcatctcacagttgaacatttcttttgattcaatagtttggaagcagagtytctgtagaagcttcagaaagatgaagcaaatatcttcagataaaacatgaaagaagctatctgaaaaactgctttgtgatgtgtgcattcaccttacaaaattaaacatttttttgaccttgcagatcagaaacactttttttatagaatctgtgaggtgatatttcggagctcatagaggtctattgtaaaaaagtgaatattcccagataaaaaactagaaa

SEQ ID NO: 876125 - DNA, 579 bp, Homo sapiens
aaataaaaacaccttatttaaaagaaacaaggatacaaatcgcataagacttctattcaagaagcattcaaggacgaaaaatgtggagtgaaatttttttttttttttttgagacagagtcttgcactgttgcccaggttggagtgcggtgacgcgatctcggctcactgcaacctctgcctcccrggttcacgccattctcctgcctcagcctcccgagtagctgggactacaggtgcctgccaccacatccggctcatttttttgtattttttagtagagacagggtttcactgtgttagccaggatggtctcgatctcctggccttctgatctgcccacctcggcctcccaaagtgctgggattacaggcgtgagccaccgcacccggcctggagtgaaatatttaaagtgtgacaataacccaccaagctacaattattatccatagaaattttccttcaaaagtaaaggaacaataaagactttctcagacaaacagcaactgagggaatttgtgagcaatagacttgccttgaaaggaatgttaaaagaagttcttcagaaagaagggaaatt

SEQ ID NO: 876126 - DNA, 579 bp, Homo sapiens
aaataaaaacaccttatttaaaagaaacaaggatacaaatcgcataagacttctattcaagaagcattcaaggacgaaaaatgtggagtgaaatttttttttttttttttgagacagagtcttgcactgttgcccaggttggagtgcggtgacgcgatctcggctcactgcaacctctgcctcccaggttcacgccattctcctgcctcagcctcccgagtagctgggactacaggtgcctgccaccacrtccggctcatttttttgtattttttagtagagacagggtttcactgtgttagccaggatggtctcgatctcctggccttctgatctgcccacctcggcctcccaaagtgctgggattacaggcgtgagccaccgcacccggcctggagtgaaatatttaaagtgtgacaataacccaccaagctacaattattatccatagaaattttccttcaaaagtaaaggaacaataaagactttctcagacaaacagcaactgagggaatttgtgagcaatagacttgccttgaaaggaatgttaaaagaagttcttcagaaagaagggaaatt

SEQ ID NO: 876127 - DNA, 646 bp, Homo sapiens
ctcctctgcaaagttttcattagtggaagaaaaacatttgcatatgactggtcttggtgtagtgactctggtataccttttggtactttgtggtatgattattcatattgtctgaaataaatttaatgactttttttgttagaaacattgctgattctattaatgtttggttttccagggtaaagagaacttttttttctttgaagctatttataacttacaacaaattgggtaaaatatacttttgcaagcaaaatgaaagcatttttctttctctctaccagatttctccagaatttgaaatgatttgtgagtattcttaatttaaggcaatatagttatttgcataaattcaataagaatctgttttcttttgtaacaggacacaattggaaacactggttattttaccaaggctttgactggagtggcatatgaccagactgctttgaggaactgaagtgaattaatagaactgataaaaarccccttcaaaatactggcctcttaccttgcctaagcaatttctttacaaaatttctgacctgtggtaagtaaagaatgtcactttcttgaccggcccaggaacctcaagttattttgggaactcaagaagagaagaatttacccaatttatacgggtatc

SEQ ID NO: 876128 - DNA, 625 bp, Homo sapiens
ggaactacagctcaggttgacatccaagactgaagcttagaagcaggaatatttggggagtgggataaagaaaggggattgcaaagaggtgttttttggttttgttttgttttttgatttttttttttttttttttggtgttttgtttttgagatggagagtctcgctctgttgctcaggctggagtgcagtggtgcgatctctgcttactgcaacctccgccccccgggttcacgctattctcctgcctcagcctcccaagtagctgggastacaggtgcccaccaccacacccagctaaatttttttttgtatttttagtagagacagggtttcaccatgttagccaggatggtctcgatctcctgacctcgtgatccacctgcctcggcctcccaaagtgctgggattaaaggcgtgagctaccacccccagccgcaaaaaggtttttataccaataaactttcttataatctaaatcatacacacacacacacacacacacacacacgttgagccccagaaacagagagtggctagagaaagtctcgtgagtggtcaaagaatcttattcgtgccatgcaggtaccatctgtttggataggattcttgcactacatggaat

SEQ ID NO: 876129 - DNA, 625 bp, Homo sapiens
ggaactacagctcaggttgacatccaagactgaagcttagaagcaggaatatttggggagtgggataaagaaaggggattgcaaagaggtgttttttggttttgttttgttttttgatttttttttttttttttttggtgttttgtttttgagatggagagtctcgctctgttgctcaggctggagtgcagtggtgcgatctctgcttactgcaacctccgccccccgggttcacgctattctcctgcctcagcctcccaagtagctgggactacaggtgcccaccaccrcacccagctaaatttttttttgtatttttagtagagacagggtttcaccatgttagccaggatggtctcgatctcctgacctcgtgatccacctgcctcggcctcccaaagtgctgggattaaaggcgtgagctaccacccccagccgcaaaaaggtttttataccaataaactttcttataatctaaatcatacacacacacacacacacacacacacacgttgagccccagaaacagagagtggctagagaaagtctcgtgagtggtcaaagaatcttattcgtgccatgcaggtaccatctgtttggataggattcttgcactacatggaat

SEQ ID NO: 876130 - DNA, 672 bp, Homo sapiens
agcgttattgatataatttaccctttgaaagtgcatactccagcctgtcatttattttaacattcatttttaaactttcatgggaaactaccaaaggaagcttaaggcacagaaagactttctgttcaggcaaaggattgaaatacagtaacatcaggatcatatcctaggagtacgggcacagctgagggaagaacactagacaaaaaacactagaaagaagcattctcaatgaagaaggtcaggaacaggataattacaatatgtttcacctggggcttcttgcygcttaacttgaatgtaactttcctttttcctgattattcccccattcccccatcacaggagcaaacagtattaagaagaaaagatcatggctaaacatttgactaacacttcattctaaaaagatttttacctctgtcatcctttcctttgacttgcagctctaccccagatggacacatgcatttaaaagaacagataatagtgacacatgccacaattccagggggcgcccatcctttcctcccggagttgtgcagtgaggcagttctggcctcatgaggtttaaatattgaaaatcctatctatctatctatatctatctatctatctatctatctttctatctatttatttatttttagacagattctcactctgtcaccc

SEQ ID NO: 876131 - DNA, 569 bp, Homo sapiens
agaaaaagaataaggggcaatttgttcagaggagtccaagccctcactagaggaatctcactgagtgttctttatacacaaaaaattggaaatctcaaaagggacaggcttttctaagcagtgaatgtcttttcccccaagttttccttctgtttctctcctaytcaataaatttgattatataattgtcagtcatttttacatgcaaatattggaattgtgtaagattttttttctttgcccaagaatatatcacatgggtttatacttgattcattccatcaataaaaagagtatggttcaaggataatttggggttgtctcacccctatgtttaagttcttcacagcttctttttcccaggttcttatatgttaattttcctattctgtctttcatctagaaaaagatttagtttaataatatcatacctacttcattatttaatagtacatcacttagttggatgagacaggagtttatagtttgtaaaggtataaccctgtaatgccatttagtttcttgccccaatttctagcagcttgggataatgtatctattacattaaa

SEQ ID NO: 876132 - DNA, 619 bp, Homo sapiens
aatggggggaaaaaaataacaccatttaactcgtaaaattgtcacgtggtttaaagctatgtacctgtaaagtgctttggaacagtccctggcaaatagtccttggcctacaataactaatagctattactacatttttattcttatgtccagagtttgggtaatccagtggagtaagtaaaagcargatggaatggaagagactatgaaaaaggcatgaatttgggggatacttcaaagttctgagagtatattgtagcaacactatagtactcaaagtcccattgaataacagactaaatcacaggatctcttcatttccaaaatgtcccagctctctgttcacaagagttgtccatggaaacatgaaacacctcttaggctttataattaagaaactcccaggtttcataaataaaacttcaaggacagactactacatatttaaaaggattgctaaagtaaaaaagacagacaatgccaagcgttggagaaagtgtgaggcaaatggaactcacatacacaaacaggggttacataaactcctaaaaatcacttcagaaaactggctggccatatctgagagagctgagcatatgcattcctcatagtctatatg

SEQ ID NO: 876133 - DNA, 610 bp, Homo sapiens
ttggaagaatgatatattttgttttggatgtttacctagtaatggggttgctgggttaaatggtagttctgttttaaggtctttgagaaacctgaaaactgctttccacaatgggtgaagtaatttatgttcccaccaacagtgtgtaagcgttcctttccccctgcagccatgtcagcatctgttgttttctgactttttagtaatagctrttctgactgatgtgatgtggtatctcattgtgcaatcatccatttaaaaaatatgtttgatctgctgtggattgaatccatggatgtggaacccagagaaatgaagggctgactggatagagtaaaattaaatgagtagtgaagataaggttaaaaaaaggcaggttggaaatatttatgaaggaagttgaatacaaggaggagaacagtgttcttaaatagtgaagctttttaattaagtcagtgatacgttcaaaaagtaataatgtgattaatgctggtaagaaatggaagccatgaatcaatttggagagtattccaacattgaggaattatgtgaaatgtctgaatttaaggtcttgacaactgaaaggaaataaaaaggaaaatatattctt

SEQ ID NO: 876134 - DNA, 571 bp, Homo sapiens
atttcagaataaagctgtttggtcataggaggaggggggttatgaaaggctataggtgagagatgatcacaagaaattgaagaatgattaggatttagaaacatgtaaaagagagcaaaagccttttaggtatgatgagaatagctgatcttgccttcctactgggtggctctggttcttcatgttcttgcatgtggctacctaggctgagagacaagcatcagttctaagcctatggggaagtgttgggaaggtaagctggagaagactcagagcaaagaactcgaggaaagcatcagagattagtccggcatgcagccatgtgacagatactagcagggaatagtaagtaggagtgcagcaataagagataagaacttggagatgtyctagaggcattgttccttggtgagcaggtgtgttagtccatttttatgctgctcatacctgagactggacaatttatgtgggaaaaagggtttaatggacttacagttccatgtggctgggaaggcctcataatcatggtggaaggtgaggaggagcaagtcacattttacatggttggcag

SEQ ID NO: 876135 - DNA, 631 bp, Homo sapiens
cttagccttcaaaggcatgtaaacaatgaataggtcgggtctgtttgaaagtgctgagaaaggacaggaacaaagtaagagtgtaatcaaaacatagctgtgtgcattatatggggcaaaataataatgataataataataataataataatgatacagaatggctggactccaggataaaccccacccttaagcatggaactatgaccctaagtgaaaacagaagaccccgtttttccacccaagtcttgcttttttggcctgccacactcctatcctgtgccaataaaaagacttcagctggcagagcaacacaagtggctgatgcaaggactcaggggtgcaagttgctgagtgtcatcgaggatacaakttgctgaatgtcatggatacgagtggctgagtcttggagactatggatagatgtggctaacttcagatggcatggtttaagggaaagatcaccatcttcctgcaccatcccctttccaactccccattccactgagagccacatccatcacccagtgaaaatctctgcatatgcaacccttcaatccattcgaatgacctgattcttcctgaacagcctggacaagaacctgggtgctgagaggcaggggcttgaata

SEQ ID NO: 876136 - DNA, 597 bp, Homo sapiens
tagagtttctgccaagagatccactgttagtctgatgggcttccctttgtgagtaatccaacctttctttctggctgcccttaacattttttccttcatttcaaccttggtgaatctgaaaattatgtgtcttggggtagctcttcttgaggagtacctttgtggttttctctgtatttcctgaatttgaatgttggcttgccttgctaggttggggaakttctcctggataatatcctgaagagtgttttccaacttggttccattctccccatcactttcaggtgcaccaatcaaacatagatttggtcttttcatatagtcccatatttcttggaggctttgttcatttctttttactcttttttctctaaacttgtcttcttgctttatttcattgatttgatattcaatcactgatatcctttcttccacttgatcgaattggctactgaagcttgtgcatgcatcacgtagttctcgtgccatggttttcagctccatcaggtcaaggtcttctctacactgtttattctagttagccatttgtctaatcttttttctagtttttagtttctttttagtttctagttttta

SEQ ID NO: 876137 - DNA, 675 bp, Homo sapiens
tgagcatggaatgtttttccatttgtttgtatcatctctgatttctttgagcagtgctttgtagttctacttgtagaaatctttcacctccatggttagctgtattcctgggtattttatcctttttttagcaattgtgaatgagactgccttcctgatttgactttcgtcttggctgtcgttggtttataacaatactagtgatttctgcacattaattttgtatcatgaaaytttgctaaagtttttttttttgttatcttaaggagcttttgtgcttagactatggggttttctagatatagaatcatgtcattggcaaacagggatagtttgacttcctttcttcctatttggatgccttttattctttctcttgtctgattgctctggccaggacttacaatactatgttgaataggagtggtgatagaggacattcttgtcatgctgattttcaaggggaatgcttccagcttttgcccattcggtatgatgttggctgtcagtttgttatagatggctctcattattttgaggtatatttcttcgatacccagtttattgagggtttttgaacatgaaaggaagttgaattttattgaaagccttctctgcatctactgagagacaatcatagttttcatctttaattctgtttatgtggttaatcac

SEQ ID NO: 876138 - DNA, 675 bp, Homo sapiens
tgagcatggaatgtttttccatttgtttgtatcatctctgatttctttgagcagtgctttgtagttctacttgtagaaatctttcacctccatggttagctgtattcctgggtattttatcctttttttagcaattgtgaatgagactgccttcctgatttgactttcgtcttggctgtcgttggtttataacaatactagtgatttctgcacattaattttgtatcatgaaattttgctaaagtttttttttttgttatcttaaggagcttttgtgcttagactatggggttttctagatatagaatcatgtcattggcaaacagggatagtttgacttcctytcttcctatttggatgccttttattctttctcttgtctgattgctctggccaggacttacaatactatgttgaataggagtggtgatagaggacattcttgtcatgctgattttcaaggggaatgcttccagcttttgcccattcggtatgatgttggctgtcagtttgttatagatggctctcattattttgaggtatatttcttcgatacccagtttattgagggtttttgaacatgaaaggaagttgaattttattgaaagccttctctgcatctactgagagacaatcatagttttcatctttaattctgtttatgtggttaatcac

SEQ ID NO: 876139 - DNA, 693 bp, Homo sapiens
ggcaaaagaaagaaacagagggcatcaaataggaagacaggaagtcaaactatcactgtttgcagatgacactattctatatctagaaaacaccatagtccaagcccaaaagcttcttaagctgatcaacaacttcagcaaagtctcaggatacaaaatcaatgtctaaaaatcactagcattcctatacaayagcaacagccaagctgagagccaaatcagaaaggcactctcaaaaggataaaatacctaggattacagctaaccagggaggtgaaagatctctgcaagtagaactacaaaacactgctcaaagaaatcagagacgatagaaacaaatggaaaaacatttcatgctcatgggtagaaagaatcagtattattaaactggccatactgctcaaagcaatctgtagatccaatgctactcctatcaatctagcaaggacattcttcaaagaactagaaaaaactattttaaaattcatatggagcccaaaaagagcccaaatagccaagataatcctaagcaaaaagagcaaagctggaggcatgatgttacctgatatcaaactatcttacaaggctacagtaaccaaaacagcatggtcctgctacaagaacagacacatagaccaatggaactgagtagagagcccagaaataggtctacacatttacaaccatctgatc

SEQ ID NO: 876140 - DNA, 626 bp, Homo sapiens
gatagatgttcagggatgttaactgcctcattgtaaaaagaatgtcatagaggaatagttggatttattatggcatatcaacagcatggaatattagactgtcattaaaaagattgagttagcatagttggcctgaaaagtcccatgaaatagcattaagcaataaaagtaagatgcaaacagatgcatataaatatattttcaaaaagctaataaagcccctatatatgtaagaaattatataagcaaatttttatagattaccatctgggagtgaaaataaaatggctaaatggttatcagattgaatgaaagtttaaaaaaatagtagttaaaaaaatacacatgacttgcttccatttcagtaaaatggaagcaaagtctgtgyaaataatatatacataaacaatttgaatagttatacagaatcagatctatctgcttcttaggtgatcatgataaactgttaagtgaaaaaagagaattgcaaaataaagagcataataaaattttggtaaaagaagctagaaactaatgtttaaatatgtatagttttgtagcacccagaagaaaaatgtggaaagatgcacccaggcttgttaacatttttacttcagtgggacaaa

SEQ ID NO: 876141 - DNA, 603 bp, Homo sapiens
gagaacagccgagagaagttcaccagagctccactacttatagtcaatactgggcgcgaaaataaagctgtgccattggctcaaattacagttttatttcaaccaatggaatcgctgttatgaaacatgcttctttggattggacaaacgtgtatatgacgtcatctagaatcgccaccagtcctacacactattttattaatcacctcatttgcataagaattcgtgaacaggacgttacaacacacagctttttcttcttcttctttttttgtttttttaagacagggtctccctctcgcccgggctggagtgcggtggtacgatctccggtcgctgcaacgtccgctcctgggttcaagtgattctcctgcctcggcctcctgartagctgagattacaagcgtcagccaccatagcccggctaatttttgtattttttagtagagacagggtttcaccatattggtcatcctggtctcaaacccctgagctcaggtgagccacctgcctcaacctcccaaaatgctgggattaaaggcgtgagccacagcgcccggcgacttttttttttttttttttttttttcccttgagacagggt

SEQ ID NO: 876142 - DNA, 627 bp, Homo sapiens
ggccagggcaatcaggcaggagaaagaaataaagagtattcaaataggaagagaggaagtaaaattgtctgtatttgcagatgacatgtttgcatatttagaaaaccccatcatctcagcccaaaaactccttaagctgatatgcaacttcagcaaagtctcaagatacaaaatcaatgtgcaaaaatcacaaacattcctatacaccaatattagacaaacagccaaaccatgagtgaactccattcacaattgctacaaagagaataaaatacctaggaatacaacttacaagggatgtgaaggacctcttcaaggagaactacaaaccgctgctcaaagaaataagagaggacacaaacaaatggaaaaacmttccatgctcatagataggaagaatcaatattgtgaaaatggccatacctcccaaagtaatttacagattccacgctatccccatcaagctaccattgactttcttcacagaattagaaaaagaacactttaaatttcatatggaatgaaaaaagagcccgtatagccaaaacaatcccaaaaagaacaaagctggaggcatcacactacctgacttcaaactatattacaaggctacagtaacaaaaatag

SEQ ID NO: 876143 - DNA, 660 bp, Homo sapiens
aatcactccccaaacctcagaatcacacgatatatctatgtaacaaacctgcacatgtacccctgaatctaaaagttgatatttaaaaaaataaaaatttagctgcataaatgtcttcttttgagaagtgtctgttcatattcttccccacttgttgatggggttgttgttttcttgtaaatttgtttgagttcattgtagattctggatattagscctttgtcagatgagtaggttgcgaaaattttctcccattctgtaggttgcctgttcactctgatggtagtttcttttgctgtgcagaagctctttagtttaatgagatcccatttgtcaattttggcttttgttgccattgcttttggtgttttagacatgaagtccttgcccatgcctatgtcctgaatggtattgcctaggttttcttctagggtttttatggttttaggtctaacatttaagtctttaatccatcttgaattaatttttgtataaggtgtaaggaagggatccagtttcagctttctacatatggctagccagttttcccagcaccatttattaaatagggaatcctttcccaatttcttgtttttgtcaggtttgtcaaagatcagatagttgtaaatatgtggcattatttctgagggctctgttctg

SEQ ID NO: 876144 - DNA, 688 bp, Homo sapiens
ttccctttcaattttttggaatagtttcagtggaaatggtaccaccttctctttgaattctacctttggtagaattcagctgtgaatttgtctgggtctgaggtttttttttggttggtaggccattattgcctcaatttcagagcacatttttggtctattcagggattcaatttcttcctggttcagtcttgggagggtgtatttgtccagaacaytgttcatttcttttagattttctagtttatgtgcagagaggtgtttataatattctttgatgtttgtttgtatctctgtagggtcagtggtgatatctctgttatcatttctgattgtgttttgtttatttgatttttctctctttctttattagcttagctagttgtctattttattaatttcttcaaaacactagctcctggatttgttgatttttttaagagtttttcatgtctttatctccttcagtttggctctgatcttcattatttcttgtcttctactagctttggggtttgtttgctcttggttctctagttcttttatttgagatgttaggttgttaacttgagacatttctagatttttcatgtgggcattttgtgttagaaatttccctctaaacactgctttagctgcatcccagaaatcctggtatgttgtctttgttttcttcagtttcaaagaa

SEQ ID NO: 876145 - DNA, 688 bp, Homo sapiens
ttccctttcaattttttggaatagtttcagtggaaatggtaccaccttctctttgaattctacctttggtagaattcagctgtgaatttgtctgggtctgaggtttttttttggttggtaggccattattgcctcaatttcagagcacatttttggtctattcagggattcaatttcttcctggttcagtcttgggagggtgtatttgtccagaacactgttcatttcttttagattttctagtttatgtgcagagaggtgtttataatattctttgatgtttgtttgtatytctgtagggtcagtggtgatatctctgttatcatttctgattgtgttttgtttatttgatttttctctctttctttattagcttagctagttgtctattttattaatttcttcaaaacactagctcctggatttgttgatttttttaagagtttttcatgtctttatctccttcagtttggctctgatcttcattatttcttgtcttctactagctttggggtttgtttgctcttggttctctagttcttttatttgagatgttaggttgttaacttgagacatttctagatttttcatgtgggcattttgtgttagaaatttccctctaaacactgctttagctgcatcccagaaatcctggtatgttgtctttgttttcttcagtttcaaagaa

SEQ ID NO: 876146 - DNA, 700 bp, Homo sapiens
ctgtttttctcctttctcttgtattttaacacttttattttctgtatgggacagactgcatgcagtgatctactcagacctgacagggcccttgttgcttctctcttattgctgtctgttctgtctctgttttttctctcttataccacctgtccaacttcaatacaaagtgacttactactctctgctaacatttccactcagtctacgttcccaaggccgttggatcaaagattctcttcttccctcaaaatgcggctttttctatgatttattttaattatgtgtggtttgaatgattatctttgtttctgaaaaaaatgtattctttgaacaacaacaacaaaaatctttgaggattttgttggtggtgttttgttttatttttcatcaatgttcccagagagaccagtactctgaaattcttttctatttacttgaaagagtcctccccacctaaaaaaagttatatgtcaaaaattgtcagctctttatgaatagaaaaagtatcgcttcaagacttacccacttaagattttattgaccagtttatgtcaatartaaactgctagattctctagaaatggcaatctcagtgtcttttcattgagtttacaaagaaactgcaatttacttaattttacaatggctcctcctagcacaaacagattgaaggctatcactttagtttaccaacagg

SEQ ID NO: 876147 - DNA, 683 bp, Homo sapiens
gcactctgcttctctgttgttggtgtataggaatgcttttgatttttgcacactgattttgtatcctgagactttattgaagttgcttaccagctaaagaagcttttgggctgagatgatggggttttctagatgtaggatcatgccatctgacaacagagagagtttgacttcctctcttcttatctgaatactctttatttctttctgttgcctaattgcctttaccagagcttccaatactatgttgaatagaagtggtgagagagggcatcctygtcttttgccagttttcaaggggaatgcttccagcttttgcccattcagtatgatattggctgtggatttatcataaatgcctcttattattgaggtatgttccatcaatacttagtttattgagagtttttaacatgaagggatgttgaattacattgaaggtttgtgctgtgtctattgagataataatgtggtttttgtctttatttctgtttatgtgatgaattatatctattgatttgtgtatcttgaaccagccttgcatcctggagatgaagcctacttgattgtggtggacaaggtttttgatgtgctgatagatttggtttgctagtattttattgaggatttttacatcaatgttcatcagggatatttgtatgaagttgtcttttattgttagc

SEQ ID NO: 876148 - DNA, 617 bp, Homo sapiens
ttgtccaagatttctaaagtgtttgcatctcactaaaacactgactttgtagagataatttaaataaggttaaaagataggcgatgacgtgcaaagtaagatccaactgcatgtttacataacagatacttaatttaaacacaaatcataacttgtgtttgaatttaaatgtctgttattttccaaggcccatcttatraagggccttttaccctgatcctaactccataaatgtccctaaccagtaaactggggattcatttttcgtgagacttagcctactttctcagtcaccttcctttttcacttttcacagttttcctgaatcatcttatcaatatccataagttttatatctagtgtcccaaatctctacctttacaattctagccctgtctttctttctcttgattcatatatgtgatttcctgttaggcacctttttctggtgctaccacatgtgtcacatatataacatgctcaaattataaccaattctcatttttcacaaactgcctttatctgtattacaatatcagcttcatccaattccccaacagtgaatactaggcatcctgcttaacttatctagcccctctttatccccatgctaaatg

SEQ ID NO: 876149 - DNA, 611 bp, Homo sapiens
ccatttcaatatggataccttttaatttttttttttttttggtcttattgcacttactagaatctacagtgtaatgttgaattaagatggtgagtgaagacatatttgcgctgttcttgaccttagaaggaaagcatttggcttgtcaccattaagtatgttaatgagttgcttcttttgtttgttcaattgttttttatagacgctggtttttgtttttttttttcttttttttgagatggagttttgctcttgtgatccaggctggggtacagtggcgtgatctctgctcactgcaacccacacctctagggttcaagtgattctcctgcctcagcctccagagtagctgggattacaggtgcccacyaccacaaccggcttattttttgtatttttagtagagacaatgttttgctatgttgggcaggctgatctcaaactcctgacctcaggtgatccacccaccttggcctcccaaagtgctgggattacaggcatgagccaccatgcctggccagtagatcctgtttaaagacaggaagttatttctttgtactcttggtttgctgataatttttttaaaaatcataaatggatgctgagttttt

SEQ ID NO: 876150 - DNA, 654 bp, Homo sapiens
aaatccttgtccttttagagtttacattttagtgctgagaaacagaatataaacatataaaaataagtaaaataaataatataatttaaaatatcaataaaatttacaaagaaaataaaaatgtgtaatggaataaataattatccgtttagatattcaagaaagatctttctgaagaaggaacatgtaaatgagtctgaataagagaaggtattatccttgcagtccctcaagttagatatttcttcaaaaatacaaagcttgtcagcaagggcaaaggcccggaggcacaaatgagttttgcttattcaagggagaaccagaaagaagccagtatacctggtgaatgttaatcaaggaagaaaatattaggatatgaagacagagaaataagtgaataccattctaaatgcaagaagacattgggaaggagagggagaagtatgcctcactcaaattctttggataccctctgaaacccctaatatatttctgtgcttttagaggacttcatttgctccagggataagacagacttcataccacctccacatgaatgtttttttggataaaaaagaattggattataagagactgtgaaaggaaaataaaatmtcaggaacccaaactcactatgccaaggggaaaagtcag

SEQ ID NO: 876151 - DNA, 629 bp, Homo sapiens
aaataagcatttataaggtacattactttttccagtcattaatacataagtgagattattttagaatcttcagatccaacaagggcatgaattgtatatagttaataaaaatagtggggacagttttgcaagtgtcatccattttagccaaaatgaaacatgtgctagtttttctgttagatttagtggattatataagtagtgtatcttcttcagtagtaaaattcataataaaaaatagtttaccatttaatgtgttttataacactagaggaacatcaatatcagcaagtgttaagaagctctttgagcttgttaaattatttgtattctccaacaaagggcggcgtttgcaggcaagcatgctgcagtgtttgaaggggcagaagttttacacaatcgaataattcggcataggagatttrttgaatctttttcctgcattttcacttctttagtcttcaaaatactcactgcgtgtattagtctgttttcacactgctgataaagatataccccagactcggcaatttacaaaaggaagaggtttaatggacttacagttccatgtggctggggaggactgacagtcatggtggaaggtgaaagacatgtatcacatggcagca

SEQ ID NO: 876152 - DNA, 643 bp, Homo sapiens
tgataccaacactgggaagaggcacaacaacaacaacaaaaaccttcaggccaatatcactgatgaacattgatgtgaaaatcctcaataaaatactggcaaactgaatccagcagcacttcaaaaagtttatccaccacaattaagtcggcttcatccctgggatgcaaggttggttcaacatacacaaatccataaatgtaatacatcacgcaaacagaaccaaagacaaaaaacacatgattatctcaatcgatgcagaaaaggtctttgataaaattcaacatcccttcatgttaaaaactctcaatagactaggtattgatggaccatatttcaaaataagagctatttatgacaaacccacagccagtatcatattcaatgggcaaaagctggaagcattccctttgaaaactggtacaagacaaggatgccctctctcacraaaactggtacaagacaaggatgccctctctcaccactcctattcaacatagtattggaagttatggccagggcaatcaaccaagagaaataaaaagtgttcaaacaggaagaggggaagtcaagttgtctgtttgcagatgacatgattttatatttagaacaccccatcatctcagccccaaaacttcttgaa

SEQ ID NO: 876153 - DNA, 643 bp, Homo sapiens
tgataccaacactgggaagaggcacaacaacaacaacaaaaaccttcaggccaatatcactgatgaacattgatgtgaaaatcctcaataaaatactggcaaactgaatccagcagcacttcaaaaagtttatccaccacaattaagtcggcttcatccctgggatgcaaggttggttcaacatacacaaatccataaatgtaatacatcacgcaaacagaaccaaagacaaaaaacacatgattatctcaatcgatgcagaaaaggtctttgataaaattcaacatcccttcatgttaaaaactctcaatagactaggtattgatggaccatatttcaaaataagagctatttatgacaaacccacagccagtatcatattcaatgggcaaaagctggaagcattccctttgaaaactggtacaagacaaggatgccctctctcacaaaaacyggtacaagacaaggatgccctctctcaccactcctattcaacatagtattggaagttatggccagggcaatcaaccaagagaaataaaaagtgttcaaacaggaagaggggaagtcaagttgtctgtttgcagatgacatgattttatatttagaacaccccatcatctcagccccaaaacttcttgaa

SEQ ID NO: 876154 - DNA, 657 bp, Homo sapiens
aggagggagtcttttgaggtgctggtggtattctacacattggtcagctacacagttgtacacatatgtaaacactcattgacctcctcttcactgtatccaagttagacttcagtaaaaaagagagaagtttgaactgccctttcaaatctattttcctattatcttttccttgtcaaatcataagtatattttaatgttatagwgtattattagtctgttttcacgatgctgataaagacatacctgagactgggcaactcacaaaagaaaaaggtttaactggacttacagttccacatggctgcagaggcctcagaatcatggcagaaggcaaggaggagcaagtcacatcttacatggatggcggcaaacaaaaaagacttgtgtggggcaactctcatttttaaaaccatcatacctcatgagacccactcactatcatgagaacagcacaggaaagatccatcccccaaaattcaatcatctcccaccaggtccctcccacaacacatgggaattatgggagccacagatgagatttgggtgggaacacagagccaaaccgtatcatataggtattatttcttgatctattagaagtattacatttttcacatctattatttattaatttggtccactgattatgtttat

SEQ ID NO: 876155 - DNA, 660 bp, Homo sapiens
ggtaagttaactagcttggttgtgataatcatttcacaatttatacatatatcaagacatcatgttgaacctgtaaacacatacaatttttatttataatgtatatcaataaaactgataaaaaataaagtatggagaaaattgtaacrtgcactatattagctataggagtgtggttcattaatatccagggagacgatgaagccctgaagtaatagaggccaggtggctatacttaacccccagaagccaggaggccacaactaatataagaactagcaagaccatgggaacagtcaaggagactttatgctcaaggagttgtgaagatggttaatagtacacactgtctctgagggaaaacagacgggcggtcaacaaggatgttgctcaatatatataatttttttaaaaaagcaagaatgaaggagcaggaatatgagggcaatcaccccaatataagtcacaattgtttgctcagttcccagagctgagtcaaacttgcatatttaggcccattgattaaagatgtatccaggttcctaggagaaaggaccctacaataccatgaaaaatatataccataatgattcctctggcccttcttcaaagggatatacaaccgcttactcaatctcaatggactgtgcactgtggaaa

SEQ ID NO: 876156 - DNA, 660 bp, Homo sapiens
ggtaagttaactagcttggttgtgataatcatttcacaatttatacatatatcaagacatcatgttgaacctgtaaacacatacaatttttatttataatgtatatcaataaaactgataaaaaataaagtatggagaaaattgtaacgtgcactatattagctataggagtgtggtkcattaatatccagggagacgatgaagccctgaagtaatagaggccaggtggctatacttaacccccagaagccaggaggccacaactaatataagaactagcaagaccatgggaacagtcaaggagactttatgctcaaggagttgtgaagatggttaatagtacacactgtctctgagggaaaacagacgggcggtcaacaaggatgttgctcaatatatataatttttttaaaaaagcaagaatgaaggagcaggaatatgagggcaatcaccccaatataagtcacaattgtttgctcagttcccagagctgagtcaaacttgcatatttaggcccattgattaaagatgtatccaggttcctaggagaaaggaccctacaataccatgaaaaatatataccataatgattcctctggcccttcttcaaagggatatacaaccgcttactcaatctcaatggactgtgcactgtggaaa

SEQ ID NO: 876157 - DNA, 660 bp, Homo sapiens
ggtaagttaactagcttggttgtgataatcatttcacaatttatacatatatcaagacatcatgttgaacctgtaaacacatacaatttttatttataatgtatatcaataaaactgataaaaaataaagtatggagaaaattgtaacgtgcactatattagctataggagtgtggttcattaatatccagggagacgatgaagccctgaagtaatagaggccaggtggctatacttaacccccagaagccaggaggccacaactaatataagaactagcaagaccatgggaacagtcaaggagactttatgctcaaggagttgtgaagatggttaatagtacacactgtctctgagggaaaacagacgggcrgtcaacaaggatgttgctcaatatatataatttttttaaaaaagcaagaatgaaggagcaggaatatgagggcaatcaccccaatataagtcacaattgtttgctcagttcccagagctgagtcaaacttgcatatttaggcccattgattaaagatgtatccaggttcctaggagaaaggaccctacaataccatgaaaaatatataccataatgattcctctggcccttcttcaaagggatatacaaccgcttactcaatctcaatggactgtgcactgtggaaa

SEQ ID NO: 876158 - DNA, 605 bp, Homo sapiens
ggcagggccctcatggagaacctctgctagggcagtgcagaagggaaatgtggggttggagcccccacacagagtcactactggggcattgcctagtggagctgtgagaagatggccaccatctttcagatcccagaatggtagatccactgacaatttgcaccatgctcctggaaaagctgcagacactcaacaccagcccatgaaagcagtttggagggaggctgtaccctgcaaagtcacaggggtggagctgtccaagaccaggggaacccacctcttgcatcagcatgacctggatgtgagacaaggagatcattttagagctttaagatttgactgccttgctggatttcagacttgtatggggcctgtagaccctttgttttggccagttcctcccattcggaatggctgtatwtacccaatgtccatacccccattgtgtctgggaagtaactacttgcttttgattttacaggctcataggcaaaaaggacttgccttgtctcagatgagactttggattgtggacttttgagttaatgctgaaatgagttgagactttgagggactattaggacggcatgattggttttgaaatg

SEQ ID NO: 876159 - DNA, 725 bp, Homo sapiens
tgattcctggaaatatccatctcctttgctcattcaggctccctcttcaccatggtatgtactgagcagatttgctcttggatttcactttgaccttcgctctaccctgtgtccttggagtgctccacggaaataagagtaacgagttggcagaagatgttaacagacaacccatttcctgcactctcaaacacatccagcctgcacagaatctcctgctgccctttcatgtgtatgccctgacaaggaggccttattgtctctgtccctgtcccctgtaggcactgccctgctcagaatattatcaggttctgcttataaaatacacatgaccaggaggttgaaatccaaatgcaaagagtcaagagtacccttctgtgttgcccagtgatgatttttaatgtgatagcatcagccacatttctgcctataaaaatccccagaagtaaaactctcttctgacagttcactgccatcatccagagcctcatcacaattgaacctrtctgtttgtttgtggacatatggcacttgcattcacctcaagagaccctaaaagatttcaaaactttatgataatggaggttggatattttttaattgataaaacctttatggaataattttaactgacactcatgagaatcagacactacttataatcacagattatcatttaaaatacagtgtgcagacatactaggggataaccatattaattactc

SEQ ID NO: 876160 - DNA, 591 bp, Homo sapiens
cttccacagtgaatatatgttaacaacatatacacttaatatatgttaaacagaaaagaatcaagttgtttaacaaaaaatagagaaaatcctaaaggcacttgctatggagaagagaacaatcacagaataaataaragctgcttccaaattctttcaaatagaattttctattcgaaataaatttcaaacagaaggactgttctggagaaaaaattaaactcttctgtgacacctcaaatggcaaaactgggatggatgaaagttacacatttagagataaatttggcttcgtgtgaaggggaactctgctgacaaagttaacaaagcctgtacgaggttgttctttcaatagatttaacaaatatttaacaagctcctttaatatgtcagaagtattgggattacagcatggatcaatacagactaaatgttgttctcatgaaacacacattctgggtgaggagaagcaggcaaaaagctaatgaaaacaaagataaatatagtaacttcagattgtggaaagtactgtgaaaacataaagcagggttgtgtgatagagaactggcttcttcactattaaagtgatct

SEQ ID NO: 876161 - DNA, 625 bp, Homo sapiens
atgaagctaatcaaggacgcaccaaagaaaggtgaagtccaacttaaagaaatcaaaaccctaatacaggatatgaaaggaaaattcttcagtgaaatagataacataaataaaaaaaatcacaacttctggaatcaaagacactcttagaaaaatgcaraatgcactggaaggtctcaacaaaaatagaactgaataaacagaagaaagaacttcggagctcaaagacaaggcttttcaattaacccaatccatcaaagacaaagaaaaaaagaattgaaaaaatgaacaaagcctccaagaagttaggggctatgttaaatgtccaaacctaagaatgattggtattctcaaagaataagagaaataaaaaagtttggaaaacacttgagggaataatcgaggaaaacttctccagccttgctagagatctagacatccaaatacaagaagctcaaagaacacctgggaaattcattgcaaaaagatcatcgcctaggtacatagtcattagtttatctagagtcaagactaaggaaagaatcttaagacctgtgatgcaaaagtatttggtaacctataaaggaaaacctatcagattaacagcagatttctcagcagaaac

SEQ ID NO: 876162 - DNA, 594 bp, Homo sapiens
acatgttatgggagggacctggtgggagataagtgaatcatgggggtgggttcctccatactattcttgtggtagtgaataagccttacgagttttgatggttttatcagggatttccacttttacatattcctcattctctctttgtctgctgccatccacataagatgtgatttgctcctccttgcctttggccatgattgtgaggcttccccagccacatggaactgtaagtccaattaaacctctttcttttataaattgcccagtctcaggtatgyatttatcagcagcatgaaattgaactaatatgtaaattggtaccagtagagtggggtgctgctgaaaagatacctgaaaatgtggaagcaactttggaactgggtaacaggcagaggttggaacaatttggagggcttagaaaactcgaaaatgtgcgtaagtttggaacttcctagacacttgttgaatgactttgcccaaaatgctgatagcaatatggacaataaaatccaggctgaggtggtcttagatggaaatgaggaacttattgggaactggagcaaaggtggctcatgttatgttttagcaaag

SEQ ID NO: 876163 - DNA, 594 bp, Homo sapiens
acatgttatgggagggacctggtgggagataagtgaatcatgggggtgggttcctccatactattcttgtggtagtgaataagccttacgagttttgatggttttatcagggatttccacttttacatattcctcattctctctttgtctgctgccatccacataagatgtgatttgctcctccttgcctttggccatgattgtgaggcttccccagccacatggaactgtaagtccaattaaacctctttcttttataaattgcccagtctcaggtatgtatttatcagcagcatgaaattgaactaatatgtaaattggtaccagtagagtggggtgctgctgaaaagatacctgaaaatgtggaagcaactttggaactgggtaacaggcagaggttggaacaatttggagggcttagaaaacwcgaaaatgtgcgtaagtttggaacttcctagacacttgttgaatgactttgcccaaaatgctgatagcaatatggacaataaaatccaggctgaggtggtcttagatggaaatgaggaacttattgggaactggagcaaaggtggctcatgttatgttttagcaaag

SEQ ID NO: 876164 - DNA, 638 bp, Homo sapiens
ggatgagattagcacttaaattggtagactgaataaagcggattgccctacctaatggagcggggggcctcaatcaatcagttgaaagcctgaacacaacaaaaaagcttactctcctctgagtaagaattctttctgcctgacttctcttgaactggaacatcagacttttcctgccttcaatcttgaactgtaacattgacccttcctgggtgttgagcatgctggtcttcagaatggaactacgctatcagctctccaggtccacagcttgctaactcaccctgcagagcttgggactggtcaaccccacaatcacataagccaattccttataatgaattcctatcatctrtctatctatctatctatctatctatctatctatctatctatctattgtcttcacacatccttttgattctgtttctctggagaaagctgagtaatatacatcctatgctgtggcagctttatcagaactgtaactcccaatctcatctaccatccatgaccagatccaggtatctgtgcaagtgcattcatcttttacacctctcagatactgggacaaatcatctacctttgtttagacatcttcatatatttgctagggatattcctagaataggactgac

SEQ ID NO: 876165 - DNA, 647 bp, Homo sapiens
cagagttctttctggcattttgattggccttgtgttggatctatagatcaattaggtgataattcacatgctaacattattgtcttccactccatgaacacagtatatattaatatgtatttagatcttccttcatttctttatcagtattttgtaattttcagcttcagacatattttatatttgtaactaagtgggtttttttggagctattgtaaagggtacttttttaaaatttgaatttctaattgttcrtttgcagtgtatggaaatacaatttttgtgtgtatattgaccttgtatcctgcaaccttgctgatatgatctggctctgtgttcccacccagatttcatcttgaattgtaattcccatgtgtcgaggtgtgggggggcatgtaatccccttgtgtcaagggaaagaggcgactggatcatgggggctgtttcccccatgctgttcttgtgatagtgagtgagttctcactagatctcttggttttataaggggctcttcccccttctctttctcttctctctcctgctgccatctgaagaaggtccttgcttccttttcaccttccaccatgattgtaagtttcctgagacctcccaaaccatgtggaactgcgagtcaattaagcctcttt

SEQ ID NO: 876166 - DNA, 647 bp, Homo sapiens
cagagttctttctggcattttgattggccttgtgttggatctatagatcaattaggtgataattcacatgctaacattattgtcttccactccatgaacacagtatatattaatatgtatttagatcttccttcatttctttatcagtattttgtaattttcagcttcagacatattttatatttgtaactaagtgggtttttttggagctattgtaaagggtacttttttaaaatttgaatttctaattgttcatttgcagtgtatggaaatacaatttttgtgtgtatattgaccttgtatcctgcaaccttgctgatatgatctggctctgtgtycccacccagatttcatcttgaattgtaattcccatgtgtcgaggtgtgggggggcatgtaatccccttgtgtcaagggaaagaggcgactggatcatgggggctgtttcccccatgctgttcttgtgatagtgagtgagttctcactagatctcttggttttataaggggctcttcccccttctctttctcttctctctcctgctgccatctgaagaaggtccttgcttccttttcaccttccaccatgattgtaagtttcctgagacctcccaaaccatgtggaactgcgagtcaattaagcctcttt

SEQ ID NO: 876167 - DNA, 556 bp, Homo sapiens
agtgtcccagtcagtaggaatcatccgactggaaacagcaacattctttaacagtcccatttcaaaaggagaacctggtccatactgatttatagcttgtttaattttttgagtaatttaaaaggaaaaggctcaaatgtagctataatatttccctgttgatctgggggggtgtattcaaacagggaactgccaagcctmtaaatcccacttttgtctagcttgctgaattcctgcctgaatagaactaagcagtcgctcaagtcaccagggcaactacttttcacccagtgtcctccagaaaagaaagatctggagggtcgttttcttcaaaataataatgagggggtgcagaagggtagggatgaacctctccctccttttctgctttagctttaggtggcaaataaacctggtctgtaacctctactgttactttgttatactctccttcctcctcattatcagtgtgaaaaagttccaaggtagaacgaaccacagcccacacttgtcccattgttaccctgatgcttctgagctccccttctgactcacc

SEQ ID NO: 876168 - DNA, 555 bp, Homo sapiens
tgcccactaagttttaaattgtaagaactgagcaggagttagacaagctagagtaagagtgtcccagtcagtaggaatcatccgactggaaacagcaacattctttaacagtcccatttcaaaaggagaacctggtccatactgatttatagcttgtttaattttttgagtaatttaaaaggaaaaggctcaaatgtagctataatatttccctgttgatctgggggggtgtattcaaacagggaactgccaagcctctaaatcccacttttrtctagcttgctgaattcctgcctgaatagaactaagcagtcgctcaagtcaccagggcaactacttttcacccagtgtcctccagaaaagaaagatctggagggtcgttttcttcaaaataataatgagggggtgcagaagggtagggatgaacctctccctccttttctgctttagctttaggtggcaaataaacctggtctgtaacctctactgttactttgttatactctccttcctcctcattatcagtgtgaaaaagttccaaggtagaacgaacca

SEQ ID NO: 876169 - DNA, 609 bp, Homo sapiens
caggctggagcacaatggtgcgatctcggctcactgcaacctccgcatcctgggttcaaacgattctcctgcctcagactactgagtagctgggactacagacgtgtgccaccacacccagataatttttgtatttttagtagagatggggtttcaccgtgttrgccaggatgatctcgatctcctgaccttgtgatccacccaccttggcctcccaaagtgctgggattacaggcatgagccaccgtgcatggccttgctttgtaatttttacatcatatatcccgtgttagaccaagagcttgtaaaagccagaagacatacaccatttatagttcaattagatgttcactgataaaactgattcttccatctgagggtggtatttgtagttacagtaatgtagatgacaatctaagttatgttctataaactgtgtcactgacatctcaatctacagctaactttaattttttaaaagcagaggagtgggttgtacaggtttagaaatacatccattaagctagttaagtgagatagattcaaaccttcaactcactggaatatttaccaaattgtctattcattagctaaaggaaccatataaac

SEQ ID NO: 876170 - DNA, 529 bp, Homo sapiens
ggctggtcttcactgtccatccttctgtcagccttttactcacaactatttaataagtctctgcaatggtgcaaaatttccctcatcttcctgtcttcttccaagctctccaaactctctaacctctggccactacccaatttggaacctgcgtctacactgtcagctatctttgctgcagcctggtaatgtggtaaaagaagraaagtccattatcaggggaaacatcaagatggcctccaatatttgcattgaaagaagctcagcgctaatagccaagagaatgggggaaacacctagaagtcatttcataacttcacttcacagcattaattttctgtatctacataaagaaaagaggtctaattgactcacagttcttcacgctgtaaagaaagcatagtggtttctgcttgtagggggactcaggaagcctcccaattataccagaaggccaagcagcaatgaaatgtttcatatggcaggagtagaagcaagacagagagaggaaagaagtgcaatatccagt

SEQ ID NO: 876171 - DNA, 585 bp, Homo sapiens
tcttatttttatctgaggccccctcagcctggccttcactgtccatgtttttgtcagcattcttgtcacagccatttaaccagtctctaagatgatccaaaaatgttctcatctgtctgtcttctttggagccctccaaactcttccaacctctacccattacccagttccgaagttgcttccacattttcaggtatctttatagcaatgctccagtcctcatttgccatttttggtaagatatatattgaaaaaaaggggtaattggctcatgggtctgcacagaggacacgaaactcagtgctcctgcttctgggggggctcacaaatctctcaatcattgtgcacggtgatgaaagagtgaattgtctcayatggcaagaggaaatcacggagaagacagagtgatatagagttttcagtggccagatctcacgagaagtcactcatgattgtgaggacagtaccaaggggatggtgctgaaccactcatgagaaatttgccttcatgattcagtcaccttataccaggatccacctccaacattaggaagcataactcaacatgagatttggtggggatac

SEQ ID NO: 876172 - DNA, 585 bp, Homo sapiens
tcttatttttatctgaggccccctcagcctggccttcactgtccatgtttttgtcagcattcttgtcacagccatttaaccagtctctaagatgatccaaaaatgttctcatctgtctgtcttctttggagccctccaaactcttccaacctctacccattacccagttccgaagttgcttccacattttcaggtatctttatagcaatgctccagtcctcatttgccatttttggtaagatatatattgaaaaaaaggggtaattggctcatgggtctgcacagaggacacgaaactcagtgctcctgcttctgggggggctcacaaatctctcaatcattgtgcacggtgatgaaagagtgaattgtctcacatggcaagaggaaatcacggagaagacagagtgatatagagttttcagtggccagatctcacgagaaktcactcatgattgtgaggacagtaccaaggggatggtgctgaaccactcatgagaaatttgccttcatgattcagtcaccttataccaggatccacctccaacattaggaagcataactcaacatgagatttggtggggatac

SEQ ID NO: 876173 - DNA, 641 bp, Homo sapiens
aatggtgattattaaaaagtcagcaaacaatagacattggtgaggttgcagagaaaaaggaaagcttttacactgtgggactgtaaattagttcaaacattgtggtagacagtgtggtgatttctcaaagacctagaggcagaaataccattggacccagcaatcccattactggatatatacccaaaagaatataaattattctactataaaacacatgcatgcatatgtttattgcaacactatttccaatagcaaagacatggaatcaacccaaatgaccatgaatgatagactggatacaaaatgtggtacatatacaagatggaataccatgcrtccatgaaaaggaacaagagtatattttttgcaggtacatggatagagttggatgccattatccttagcaaactaatgcaggaacagaaaatcagacactgaatattctcacttataaatgggagctgaatgataagaacacatggacacatggaagggcaacaacaaactctgggtcctgctgggggtcagtggggggagtcacagtatcaggaagaatagctaatggattctgggcttaatatctaggtgatgggatgatttgagcagcaaaccaccatggtacacgtttacatttaccc

SEQ ID NO: 876174 - DNA, 606 bp, Homo sapiens
ctatattcaggatttcacagttgtagccattgtggtgtggcacagttgggtgtgggtgctaattaaagccttgtaggatgggaatctctggttgtgctccactacagatactcccacaccaaaccctctgggcttcagactggctggagttctgcttctaccacctctctaagcagctctcccacacaactcaattgtctgtgagggtcatgggttttcctgctgccaggattcsaaaggtttgtggtgagagtgggttgcttcttaactgctcaacttactccttccccagaagtcactggtggccagaaatgagtcccagtgtgtggtaccccatgctgaatttccatcttcctccaacttcagccactatttttgtcttccctttgtccactctccatgtcttccctccaaagctctgcttggagtgtgccagcctttccaatgtcctggtacctcagtggcatatattcctgcttgctgcatgtagtcagccattgtgcctcctagcctaattctgaaggtcttttttctcacgactggagcaagatatgtatgcccacttacaccactgctgttgaacattgcacttagtgtttatccaga

SEQ ID NO: 876175 - DNA, 549 bp, Homo sapiens
gctggttccaagtctttgctattgtaaatagtgctgcaataatcatacatgggcatgtgtctttatagtagaatgatttataatcctttgggtatatattcagtaatgggatcgctaggtcaaatggtaattctggttctagatacttgaggaatcaccaaactgtcttccacaatggttgaactaatttacactcccaccaagagtgtgaaagtatttctatttctccatatcctcaycagcaactgttgtttcctgactttttaataattgccattctaactgatgtgagatggtatctcgttgtggttttgatttacatttctccaatgaccaatgatgatgagttttttttcatatgtttgctaaccgcataaatgtcttcctttgagatgcatctgttcatatacttcgcccactttttgatggggttgtttgtttttttcttgtaaatttgtttaagtttcttgtagagtctggatattagatctttgtcagatgaggagcttgcaaaaattttctcccattctgtaggttgcctgttcactg

SEQ ID NO: 876176 - DNA, 620 bp, Homo sapiens
gatcaagtggaagaaacaatatcagagattgataaaagaaggtggaagacaagatcaacttaataaaagaaggttgaagacaagcctccaagaaatatgggactatgttaaatgaccaaacctatgaccgattggtgtacctgaaagtcatggggagaatggaacaaagttggaaaacacacttcaagttattatccaggagaacttcccccaaccaagcaaaayaggccaacattcaaattcaggaaatacagagaacaccactaagatactcctcgagaagagcaaccccaagacatataatcgacagattctccaaggttgaaaaaaaggaaaaaatgttaagggcagccagagagaaaggtcaggttacctacaaagggaagcccatcagactaacagcgatctctctgcagaaactagaagagagtgggagccaatattcaacattcttaaagaaaaaaatttataatccagaatttcatatccagccaaactaagcttcagaagcataggataaataaaatcctttccagacaagcaaatgctgagggattttgtcaccaccaggcctggcttacaagagcttctgaaagaagcactaaatatggaaagaaaaa

SEQ ID NO: 876177 - DNA, 630 bp, Homo sapiens
agccttctcagcatggacaccacaatttccaggcttcatacctccacaggttttttgattccctctgcccacctgtgtacctgggcccttgctaactttggcctgtggcctgcttgcagttaagaatttgtcattaaaaaaaaaaaaaaaaaaaagaacttgtcattggcagccgggygcggtggctcacgcttgtaatcccagcactttgggaggccaaggagggcggatcacgaggtcaggagatcgagaccatcctggctaacacggtgaaaccccgtctctactaaaaatacaaaatttagccgggcgtggtcgcgggcgcctgtggtcccagccactctggaggctgaggcaggagaacggcgtgaacccgggaggcggagcttgcagtgagcccagatcacgccactgcactccatcctgggcgacagagtgagaccacgtctcaaaaaaaaaaaaagactttgtcattggctcactccttctatatccttttacctagatccactgaaagagattcaactgtgtggaacctatgccgcggagaattgctttctgccattgttattgtccagcagttgccgaatagctctgacctgagcaaagcagtgaaacgcggtgctgttg

SEQ ID NO: 876178 - DNA, 630 bp, Homo sapiens
agccttctcagcatggacaccacaatttccaggcttcatacctccacaggttttttgattccctctgcccacctgtgtacctgggcccttgctaactttggcctgtggcctgcttgcagttaagaatttgtcattaaaaaaaaaaaaaaaaaaaagaacttgtcattggcagccgggtgcggtggctcacgcttgtaatcccagcactttgggaggccaaggagggcggatcacgaggtcaggagatcgagaccatcctggctaacacggtgaaaccccgtctctactaaaaatacaaaatttagccgggcktggtcgcgggcgcctgtggtcccagccactctggaggctgaggcaggagaacggcgtgaacccgggaggcggagcttgcagtgagcccagatcacgccactgcactccatcctgggcgacagagtgagaccacgtctcaaaaaaaaaaaaagactttgtcattggctcactccttctatatccttttacctagatccactgaaagagattcaactgtgtggaacctatgccgcggagaattgctttctgccattgttattgtccagcagttgccgaatagctctgacctgagcaaagcagtgaaacgcggtgctgttg

SEQ ID NO: 876179 - DNA, 619 bp, Homo sapiens
tcccaaagcaacaggaaccactgctctcaaacatcagaaatacaaggtgattatcctgatgatggagttgcacctgagaaaaacacgatcatgccatgcaagatggtcatggtcaccatgactgtctgtcacagtggatggcacttgtgtttygcttggattcttgtacctgctggatggttgccacacgaggttgggccaccaaatgctgggcttggggtactgctggaggaatgactgcagaggtagtgggaggagatgacacctcatttggcttctggattctgagaaattattaaaatatagattataaaatagacctatcactctttgtgaaaattattttaggaaaactagtaatggcatcactgcttacaggtgagtgtaataaaaatcttggtttgatgatattttacaaacgttgaccaagggcatttttgctacacattttgttaggcaatgcaaacacgaaaatgcataagacaccattcctgtccttgggccgttgttctcagtgtagccagggagtcaaacatattaacagttaactgagatccaagacaaatgcagtgatggaagcatgtgcagaaggtaattttttgagatttgttttgttgtt

SEQ ID NO: 876180 - DNA, 594 bp, Homo sapiens
tcaggggagcaggctcaataagagtttttgctgatggatctggagggcctgtatagtaccaggcacataactaacacgtaaccagtgcttaataatcatcagctaaatgaatgactgaatgtgctctaagcaatcctgcctgggagtctgcctttccagcgaagcttctgtcagcataattctgcttatttctaatttatatgttgagcataaaggaaggtgttcattaaaaaaagtaaagaatgattttatggttgaaaccaagtctgaaatatctattgataattctgtgttactatttctggttattatttaaaaacaacaacaacaaattacaacacctcttactctcattttcttctatgtattactaaattctatgagaaagctgtgtctatactgtattcatggtagaaagaargataatctgtgctttgacagataaatcagtgatgactagacagagaaagggaagatgggacatgccagtaaaaaggaaaagcatgtgtgaaggcaaagagtaatgggagaacatggcaagcttaggtggtgagaaaggtgatgttattggaaggcatggttggaggacggtag

SEQ ID NO: 876181 - DNA, 618 bp, Homo sapiens
ggtgttgagttgtttgctgtgcagcaagagattacaaaaaaattgaaataaaataaaattttggctcaaagtcaatcacgtgccactgaaaataagtgaaatttatttgttttggaattaggtggttctttcataattctttcacttttcagaatatagtgattactgaaaaggtggtaaaaaacttgctgttggggactacagataagaggatgtgaattgtgtastggtaaaatcattagggaaactgccacctgcaataatgtgaaagaaagaagatgtgcctaaggaacttgtggatatggcgaaggaaattcctcagcagaacatcgaaaataccatctgggttcatttagctgcttatgataatgtataggaggactgagatgagcaaaaaaaggggctgttccattttcaagcagaatttaaaagaaatacacatgacccaggaaatgatgggttgaaaatgaaaattgtttctcatctccgtctttcctgtgaaagactataaaagtaataaatagtctcagggcaaagatcaaagctaggactctgccaataaaatatagcctcagggtaaaggtcatatgaaaagggactataagacctcttgctgtg

SEQ ID NO: 876182 - DNA, 618 bp, Homo sapiens
ggtgttgagttgtttgctgtgcagcaagagattacaaaaaaattgaaataaaataaaattttggctcaaagtcaatcacgtgccactgaaaataagtgaaatttatttgttttggaattaggtggttctttcataattctttcacttttcagaatatagtgattactgaaaaggtggtaaaaaacttgctgttggggactacagataagaggatgtgaattgtgtagtggtaaaatcattagggaaactgccacctgcaataatgtgaaagaaagaagatgtgcctaaggaacttgtggatatggcgaaggaaattcctcagcagaacatcgaaaataccatctgggttcatttagctgcttatgataatgtataggaggactgagatgagcaaaaaaaggggctgttccattttcaagcagaatttaaaagaaatacamatgacccaggaaatgatgggttgaaaatgaaaattgtttctcatctccgtctttcctgtgaaagactataaaagtaataaatagtctcagggcaaagatcaaagctaggactctgccaataaaatatagcctcagggtaaaggtcatatgaaaagggactataagacctcttgctgtg

SEQ ID NO: 876183 - DNA, 521 bp, Homo sapiens
gacacagtctttttatagaatatgcaaacggatatttcggagccctatgaggctgtagtgaaaaaggaaataccttcacataaaaattagacagaagttttctcataaaattctttgtgatgtgtgtattcatctcacagagctgaacctttmttttgattgagcaatttggaaacagtctttttgtagtatctgcaagtggatatttggagcactttgaggcctatagtgcaaaaggaaatatcttcacataaaaactagacagaagcattctgagaaacttctgtgatttgtgcattcatctcacagagttgaacctttcttttgattgaacagtttggaaacagtctttttgcagaatctgcaaagggatatttgggatccctttgagacctctgatgaaaaacggaataccttcacataacaactggacagaatcactctgagaaacctctttgtgatacgtgcattcaactaacagagttgaacctttcttttgattgagaagttaggaaagtgtg

SEQ ID NO: 876184 - DNA, 521 bp, Homo sapiens
gacacagtctttttatagaatatgcaaacggatatttcggagccctatgaggctgtagtgaaaaaggaaataccttcacataaaaattagacagaagttttctcataaaattctttgtgatgtgtgtattcatctcacagagctgaacctttcttttgattgagcaatttggaaacagtctttttgtagtatctgcaagtggatatttggagcactttgaggcctatagtgcaaaaggaaatatcttcacataaaaactagacagaagcaktctgagaaacttctgtgatttgtgcattcatctcacagagttgaacctttcttttgattgaacagtttggaaacagtctttttgcagaatctgcaaagggatatttgggatccctttgagacctctgatgaaaaacggaataccttcacataacaactggacagaatcactctgagaaacctctttgtgatacgtgcattcaactaacagagttgaacctttcttttgattgagaagttaggaaagtgtg

SEQ ID NO: 876185 - DNA, 567 bp, Homo sapiens
gtggtttgaggcctatggtgaagaaggcagtatcaacatataaaaactatacagaagatttgtgagaaacttctttatgatgtgtgcattaatcacacaaagttgaacctttcttttttgagcagtttggaaacagtctttttttagaatttrcaaagtggtatgtgggatccctttgaggtctatggtgaaaagggaatatgttcacataaaaactggacagaagctttcagagaaactactttgtgatgtgtgcattcaactcacagagtttaaaatttcctttgattgagcagtttggcaacagtccttttgtagaatctgcaaagggatatttgggagacatttgaggactactgtgaaaaaggaaatatcttcacataaaaactagacagaagatttctgagaaacttatttgtgatatccgcattcatctcacagagttgaatctttcttttgatagagcactttggaaacagtcattttgtagaatctgcaaagggatatttctgagcaatttgaggcctatgatgaaaaaggaaatatattcacataaaaactggacag

SEQ ID NO: 876186 - DNA, 567 bp, Homo sapiens
gtggtttgaggcctatggtgaagaaggcagtatcaacatataaaaactatacagaagatttgtgagaaacttctttatgatgtgtgcattaatcacacaaagttgaacctttcttttttgagcagtttggaaacagtctttttttagaatttacaaagtggtatgtgggatccctttgaggtctatggtgaaaagggaatatgttcacataaaaactggacagaagctttcagagaaactactttgtgatgtgtgcattcaactcacagagtttaaaatttcctttgattgagcagtttggcaacagtccttttgtagaatctgcaaagggatatttgggagacatttgaggactactgtgaaaaaggaaatatcttcacataaaaactagacagaagatttctgagaaacttmtttgtgatatccgcattcatctcacagagttgaatctttcttttgatagagcactttggaaacagtcattttgtagaatctgcaaagggatatttctgagcaatttgaggcctatgatgaaaaaggaaatatattcacataaaaactggacag

SEQ ID NO: 876187 - DNA, 627 bp, Homo sapiens
gacttttgaggcctgtggtgaaaatgggaatatcctcacataaacactagacagaagcttttgacgaacttctttttgatgtgtgcattcatctcacagagttgaatttttattttgattgagcagtttggaaacattctctttgtggawtctgcaaagggacacttgggggcgctttgatgcctatggtggaaaaccaaacatctttgcataaaaactagagagaagctttctgagaatattctttgtcatgagtgcattcacctcacagatttgagactttcttatgactgagcagtttgtaaacagttttttccagaatctaaaaagggatatttgggagccctttgaggcctatggtgaaaaagggaatatcttcacataaaaactagacagaaggtttctgagaaacttctttgtgatgtgtgcacgcatctcacagagttgaacctttcttttgattgagcagtttggaaacagtctttttctataatctgcaaggggatatttctgagtattttgaggcctacggtgagtaaggaagtatcttcacataaaaactagacagaaattttctgggaaacttcttagtgatgcatgcattcaactggcagagttaaactttat

SEQ ID NO: 876188 - DNA, 627 bp, Homo sapiens
gacttttgaggcctgtggtgaaaatgggaatatcctcacataaacactagacagaagcttttgacgaacttctttttgatgtgtgcattcatctcacagagttgaatttttattttgattgagcagtttggaaacattctctttgtggaatctgcaaagggacacttgggggygctttgatgcctatggtggaaaaccaaacatctttgcataaaaactagagagaagctttctgagaatattctttgtcatgagtgcattcacctcacagatttgagactttcttatgactgagcagtttgtaaacagttttttccagaatctaaaaagggatatttgggagccctttgaggcctatggtgaaaaagggaatatcttcacataaaaactagacagaaggtttctgagaaacttctttgtgatgtgtgcacgcatctcacagagttgaacctttcttttgattgagcagtttggaaacagtctttttctataatctgcaaggggatatttctgagtattttgaggcctacggtgagtaaggaagtatcttcacataaaaactagacagaaattttctgggaaacttcttagtgatgcatgcattcaactggcagagttaaactttat

SEQ ID NO: 876189 - DNA, 627 bp, Homo sapiens
gacttttgaggcctgtggtgaaaatgggaatatcctcacataaacactagacagaagcttttgacgaacttctttttgatgtgtgcattcatctcacagagttgaatttttattttgattgagcagtttggaaacattctctttgtggaatctgcaaagggacacttgggggcgctttgatgcctatggtggaaaaccaaayatctttgcataaaaactagagagaagctttctgagaatattctttgtcatgagtgcattcacctcacagatttgagactttcttatgactgagcagtttgtaaacagttttttccagaatctaaaaagggatatttgggagccctttgaggcctatggtgaaaaagggaatatcttcacataaaaactagacagaaggtttctgagaaacttctttgtgatgtgtgcacgcatctcacagagttgaacctttcttttgattgagcagtttggaaacagtctttttctataatctgcaaggggatatttctgagtattttgaggcctacggtgagtaaggaagtatcttcacataaaaactagacagaaattttctgggaaacttcttagtgatgcatgcattcaactggcagagttaaactttat

SEQ ID NO: 876190 - DNA, 632 bp, Homo sapiens
ttttctagaatctgcaaagggatatttcttagcagtttgaggcgtatggtgaaaaaggaaatatattcacatcaaaagtagacagaagctttctgagaaacttctttgtgatgtgtgcattcaactcacaaagttgaacctttcttttgattgagcagtttggaaacagtctttttctagaatctgcaaagggatatttctgagcggtttgagccctatggtgaaaaaagaaatatcttcatataaaaactacacagaagatttctcagaaatttctttgtgatgtgtgcattcatctcatggagttgaaactttcttttgagtraacagtttggaagacgtctttttgtagcttctgcaatgggatatttgggatccctttaggcctatggtgaaaaagggaatatcttcacataaaaactagacaagacctttctgaaaaactactttgtgatgggtgcattcatctcacagagatgaaacttttttttggttgagcagtttggaaacagtctttttgtagaatctgcaaggggatatttctgagcggtttgaggcatatggtgaaaaaggaattatcttcacaaagaaatagacagaagctttctgagaaactgctgtgtgatgtgtgc

SEQ ID NO: 876191 - DNA, 632 bp, Homo sapiens
ttttctagaatctgcaaagggatatttcttagcagtttgaggcgtatggtgaaaaaggaaatatattcacatcaaaagtagacagaagctttctgagaaacttctttgtgatgtgtgcattcaactcacaaagttgaacctttcttttgattgagcagtttggaaacagtctttttctagaatctgcaaagggatatttctgagcggtttgagccctatggtgaaaaaagaaatatcttcatataaaaactacacagaagatttctcagaaatttctttgtgatgtgtgcattcatctcatggagttgaaactttcttttgagtgaacagtttggaagacgtctttttgtagcktctgcaatgggatatttgggatccctttaggcctatggtgaaaaagggaatatcttcacataaaaactagacaagacctttctgaaaaactactttgtgatgggtgcattcatctcacagagatgaaacttttttttggttgagcagtttggaaacagtctttttgtagaatctgcaaggggatatttctgagcggtttgaggcatatggtgaaaaaggaattatcttcacaaagaaatagacagaagctttctgagaaactgctgtgtgatgtgtgc

SEQ ID NO: 876192 - DNA, 617 bp, Homo sapiens
tgagaaacttctttgcaatgtgtgcgttcatctcagagagttgaaactttcttttcattgtgcagttttgaaccactctttttgtagaatctgcaagtggatatttggagtgctttgaggcctatgtttgaaaaggaaatatcttcacataaaaactacacagaagtattctgagaaacttctttgcaatgtgggcattcatgtcactgagatgaacctatcttttgattgagcagttttgaaactctctttttgtagaatctacaagtagatatttgaagccctttgtggactatggtggaamaggaaatatcttcacataaaaactacacagaagcattctcagaaacttcattgtgatgtgtgcattcagctcacagagttgaacgtatcttttgattgagcagatttgaatctctgttttcatagaatctgcaaggggatatttggagccctgtgcggcctatttaggaaaaggaagtatcctcataaaaactacacagaagcatgttgttaaaattctttgtgatgtgtgcattcacctcacagtgttgaacctttcttttgattgagcagttttgatacacgctttttatagaatctgcaatgggatattt

SEQ ID NO: 876193 - DNA, 595 bp, Homo sapiens
tgcaagtggatatttggatcgctttgagtcctatggtggaaaaagaaatatcttcaaatagaaactaaacagaagcattctgagaaacttcttcatgatctgcacattattctctcagagttgaacctttcttttgattgagcagctttgaaacactctttttgtagagtctccaagtggatatttggagtgcttttgagrcctatggtggaacaggagatatcttcacataaaaactagacagaagttttctgagaaatttttttgtgatttgtgcactcgtcttacagagttgaagctttcttttgattgagcagctttgaatccctctttttgtagaaactgcaagtggatatttggagcgcttttaggtctgtggtggaaaaggtaatatattcatataaaaactagacagaagcattctgagaaacttcattgtgatgtgagcattcatctcacagagttgaacctttcttttgattgagcagttttgaaacactctttttgtagaatctgcaagtggatatttggagtggtttgtggcctatggtggaaaagttaatatgttcacataaaaattacacagaagcgttct

SEQ ID NO: 876194 - DNA, 601 bp, Homo sapiens
gaaaaactggaaactctaaaaagcagagcacctctcctcctctaaaggaccagagttccttaccagcaatggaacaaagctgcatggagaatgactttgatgagctgagagaagaaggattcagatgatcaaattatgccgaactatgggaggacattcaaaccaaaggcaaagaagttgaaaactgtgagaaaaattaagaagaatgtataactagaataaccaatacagagaagtgcctaaaggagctgatggagctgaaaaccaaggctcgagaactacgtgaagaatgcagaagcctcaggagccgttgcgatcaactggaagaaagggtatcagcaatggaagatgaaatgaatgaaatgaagtgagaagggacgtttagagaaaaakgaataaaaagaaatgagcaaagcctccaagaaatgtgggactatgtgaaaagaccaaatctatgtctgattggtgtatctgaaagtcacagggagaatggaaccaagttggaaaacactctgcaggatattatccaggagaacttcaacaatctagcaaggcaggccaaccttcagtttcaggaaatacagagaacaccacaaagata

SEQ ID NO: 876195 - DNA, 654 bp, Homo sapiens
cctacattggaaaaggaaatattttcacataaaaagtagacagaagcattcccacaaacttctttctgatgtgtgcattcaactcacagtgttgaacgtttctttcattggagcagttttgaaacacactttttgtagaatctgcaagtggatgtttggagcactttgaggcctatggtgggaaaggaaatatcttcacatgaaaactggacagaagcattctcagaaacttctttctgataagtgcattcaactcacagagttgaacttttcttttcatagagtagttatgaaacactctttttgtargatctgcaagtacatatttggagcgctttgaggccttaggtggaaaagaaaatatcttcacataaaactagatggaagcattctccgaaattttttgtgaagtgtgcattcaactcacagagatgaagctttcttttgatggagcagttttcaaacactcttttagtacaatctgcaagtggacatttggagcgctttgaggcctatggtggaaaaggaaatatcttcacataaaaactagacaaaagcattctcagaaacttctttgtgatgtgtgcattcaactcagagttgaacatttcttttgattgagcagttttgaaaaaatctttttgtagaaagtgc

SEQ ID NO: 876196 - DNA, 587 bp, Homo sapiens
cacataaaactagatggaagcattctccgaaattttttgtgaagtgtgcattcaactcacagagatgaagctttcttttgatggagcagttttcaaacamtcttttagtacaatctgcaagtggacatttggagcgctttgaggcctatggtggaaaaggaaatatcttcacataaaaactagacaaaagcattctcagaaacttctttgtgatgtgtgcattcaactcagagttgaacatttcttttgattgagcagttttgaaaaaatctttttgtagaaagtgcaagtggatgtttggagcactttgaggcctatggtggaaaaggaaatatcttcacataaaaactagacagaagcattctcagaaaattctttgtgatgtgtgcattcaactcagagagttgaacatttcttttgattgagcagttttgaaacactctttttgtagaatgtgcaagtggatatttggagcgctttgaggcctatggtggaaaaggaaatatcttcacataaaaactaggcagaagcattctcagtaacttctttgagatgtgtgccttcaacacactgagttgaacatttct

SEQ ID NO: 876197 - DNA, 587 bp, Homo sapiens
cacataaaactagatggaagcattctccgaaattttttgtgaagtgtgcattcaactcacagagatgaagctttcttttgatggagcagttttcaaacactcttttagtacaatctgcaagtggayatttggagcgctttgaggcctatggtggaaaaggaaatatcttcacataaaaactagacaaaagcattctcagaaacttctttgtgatgtgtgcattcaactcagagttgaacatttcttttgattgagcagttttgaaaaaatctttttgtagaaagtgcaagtggatgtttggagcactttgaggcctatggtggaaaaggaaatatcttcacataaaaactagacagaagcattctcagaaaattctttgtgatgtgtgcattcaactcagagagttgaacatttcttttgattgagcagttttgaaacactctttttgtagaatgtgcaagtggatatttggagcgctttgaggcctatggtggaaaaggaaatatcttcacataaaaactaggcagaagcattctcagtaacttctttgagatgtgtgccttcaacacactgagttgaacatttct

SEQ ID NO: 876198 - DNA, 639 bp, Homo sapiens
cagaaggtttctgtctagttttcatgtgaagatatttctgtttccactgtaggctgcaaagcgctccaaatatacacttgcagaaactataaaaagagtgattaaaaactgctcaatcaaaagaaaggttgaactctgagagatgaatgcacacatccaaagaagtttctgagagtgcttctgtctagtttttatgtgaagatatttccttttctgctataggccacaaagcaatccaaatatccacttgcagattctacaaatggagtttttcaaagttgctcaatcaacagaaagtttcaactctgggagttcaatgctcacatcacaaagaagtttctcagaatgcatatgtctagtttttatgtgaagatattttctcttccaccataggcctcaaagagctccatatatmcacatgcacattttacaaaaagagtgttcccaaactcctcaatcaaaaagaaggttcaactctgtgggatcacaaacaagtttctcagaatgctcctgtctagttaatacgtgaagatatttccttttacactagaggccgcaagcactccaaatatccacatgcagatcctataaagagtgtttcaagcatgctcaatcaaaagaaagattctcctctgtgag

SEQ ID NO: 876199 - DNA, 632 bp, Homo sapiens
aatccttctgtccagaattcatgtgaaggtgtacccttttccaccataggattcaaagcgctctaatatccacttgcagattctacaaaaacagagcttcaaaactccacaatcaaaagaaagtttcaactctgtgaggtgaatgcacacatcacatataagtttctcagaatgcttctgtctagttttcatgtgaagatacttccttttccaccatagggctcaaaacaccccaaatatccccttgcagattctacaaaaattgtttatcaaaactgctcaatcaaaagaaagtttcaactctgtgaggtgaatgcacacaccacaaagaagtttctcagaatgcttctctctagtttttctgtgaagatatttcctttttctgtayatgccacaaagcgctccaaatatccacttgcagattccaaaaaaagagtgttttaaaactgctcaattgaaaggaatgttcaactctgagtgttgaatgcacaccatcacaaaatagtttcccaaaatgatcctttctagtatttaagtgaagatattaccttatccatcacagggcacaaacctctccaaatatccaattgcagatgctacaaaaagagtgtttcaaaactgctcaatcaaaa

SEQ ID NO: 876200 - DNA, 604 bp, Homo sapiens
ttccaacgaaggcctcaaagctgtacaaatatccaattgcagactgtacaaaaagagagtttcaaaactgctctatgaaaacgtatgttcaactctgtgagttgaatgcaaacatcacaaagaagtttctgagaatgcttctgtcttgtttttatgtaaagatattcccatttccaacaaaggcctcaaagtggtrgaaatatcgacttgcagattctacaaaaagagtttttcaaaacttctctatcaaaaagaaggttcaagtctgtgagttgaatgcacacatcacaaagaagtttctgagaatgcttcagtctagtttttatgtgatgatattcccgtttccaatgaaggcctaaaagcagtccaagtatacacctgcaaatcctacaaaaagagtgtttcaaaactgctctatgaaaagaaaggttcagctatgtgagttgaatgcaaacatcacaaggaagtctctgagaatgcttcagtctagtttttatataaagatatttccttttccaccatagtcctcaaagtgctccaagtgtccacttgcagattctataaaaaaagagtgtttcaaactgctctatcaaaagaaaggtta

SEQ ID NO: 876201 - DNA, 583 bp, Homo sapiens
gcaaacatcacaaagaagtttctgagaatgcttctgtcttgtttttatgtaaagatattcccatttccaacaaaggcctcaaagtggtagaaatatcgacttgcagattctacaaaaagagtttttcaaaacttctctatcaaaaagaaggttcaagtctgtgagttgaatgcacacatcacaaagaagtttctgagaatgcttcagtctagtttttatgtgawgatattcccgtttccaatgaaggcctaaaagcagtccaagtatacacctgcaaatcctacaaaaagagtgtttcaaaactgctctatgaaaagaaaggttcagctatgtgagttgaatgcaaacatcacaaggaagtctctgagaatgcttcagtctagtttttatataaagatatttccttttccaccatagtcctcaaagtgctccaagtgtccacttgcagattctataaaaaaagagtgtttcaaactgctctatcaaaagaaaggttaaactctgtgaaatgaaggcacacatcacaatgtattttctgagaatgcttctttactagtttttaatatgaagaaatttccctttg

SEQ ID NO: 876202 - DNA, 583 bp, Homo sapiens
gcaaacatcacaaagaagtttctgagaatgcttctgtcttgtttttatgtaaagatattcccatttccaacaaaggcctcaaagtggtagaaatatcgacttgcagattctacaaaaagagtttttcaaaacttctctatcaaaaagaaggttcaagtctgtgagttgaatgcacacatcacaaagaagtttctgagaatgcttcagtctagtttttatgtgatgatattcccgtttccaatgaaggcctaaaagcagtccaagtatacacctgcaratcctacaaaaagagtgtttcaaaactgctctatgaaaagaaaggttcagctatgtgagttgaatgcaaacatcacaaggaagtctctgagaatgcttcagtctagtttttatataaagatatttccttttccaccatagtcctcaaagtgctccaagtgtccacttgcagattctataaaaaaagagtgtttcaaactgctctatcaaaagaaaggttaaactctgtgaaatgaaggcacacatcacaatgtattttctgagaatgcttctttactagtttttaatatgaagaaatttccctttg

SEQ ID NO: 876203 - DNA, 583 bp, Homo sapiens
gcaaacatcacaaagaagtttctgagaatgcttctgtcttgtttttatgtaaagatattcccatttccaacaaaggcctcaaagtggtagaaatatcgacttgcagattctacaaaaagagtttttcaaaacttctctatcaaaaagaaggttcaagtctgtgagttgaatgcacacatcacaaagaagtttctgagaatgcttcagtctagtttttatgtgatgatattcccgtttccaatgaaggcctaaaagcagtccaagtatacacctgcaaatcctacaaaaagagtgtttcaaaactgctctatgaaaagaaaggttcagctatgtgagttgaatgcaaacatcacaaggaagtctctgagaatgcttcagtctagtttttatataaagatatttccttttccaccatagycctcaaagtgctccaagtgtccacttgcagattctataaaaaaagagtgtttcaaactgctctatcaaaagaaaggttaaactctgtgaaatgaaggcacacatcacaatgtattttctgagaatgcttctttactagtttttaatatgaagaaatttccctttg

SEQ ID NO: 876204 - DNA, 683 bp, Homo sapiens
agaggttcaacactgtgagttgaatgcatacatcacaaagaagtttctgtcagtgcttctgtctagtttttatgtgaaggtattccgtttccaacgaaggcctcatagtggtacaaatattgaaatgcaaattccacaaaaaacgggtttcaaaactgctctaataaatgcaatgttcaactctgtgagttgaaagtaaacagtaaaaagaagtttctgagaatactactgtgtagtttttatgtgaagatttttcctttttcaccatagtcctccaagccstccaaatgtccacttgcagattctacaaaaagagtgtttcaaagctgctgtaacaaaacaaaggttgaactctttcagctgaatgcatacatcacaaagaagtttctgagaatacttctgtgtagtttttatttggagatattccctttttcaccataggcctcaaagcactctaaatgtccacttgcagattctacaaaaagagtgttacaaaactgctctatcaaaagaaaggttcaactctgtgagttgaatgcatacatcatgaagaagtttctgtcaatgtttctgtccagtttttatgtgaaggtattccttttccaacaaaggcctcaaagtggtacaaatataaacttgcgagttccaccaaaagagcgtttcaaaattactctatgaaaagg

SEQ ID NO: 876205 - DNA, 683 bp, Homo sapiens
agaggttcaacactgtgagttgaatgcatacatcacaaagaagtttctgtcagtgcttctgtctagtttttatgtgaaggtattccgtttccaacgaaggcctcatagtggtacaaatattgaaatgcaaattccacaaaaaacgggtttcaaaactgctctaataaatgcaatgttcaactctgtgagttgaaagtaaacagtaaaaagaagtttctgagaatactactgtgtagtttttatgtgaagatttttcctttttcaccatagtcctccaagccgtccaaatgtccacttgcagattctacaaaaagagtgtttcaaagctgctgtaacaaaacaaaggttgaactctttcagctgaatgcatacatcacaaagaagtttctgagaatacttctgtgtagtttttatttggagatattccctttttcaccataggcctcaaagcactctaaatgtccacttgcagattctacaaaaagagtgttacaaaactgctctatcaaaagaaaggttcaactctgtgagttgaatgcatacatcaygaagaagtttctgtcaatgtttctgtccagtttttatgtgaaggtattccttttccaacaaaggcctcaaagtggtacaaatataaacttgcgagttccaccaaaagagcgtttcaaaattactctatgaaaagg

SEQ ID NO: 876206 - DNA, 572 bp, Homo sapiens
acttctttgtgatgtgtgcattcaattcacagaattgaacatttattttgatagaacagatttgaatctctctttttgtagaatcttcatgtggataatattaaccctttgcggcctattttggaaaaggaaatatcttcacataaaaactacacagaagcatcctgagaaacttgtttgtgatgtgtgcattcatctcacagagttgaaactttcttttgatagagcaattttgaaacactctttttggagaatctgcaagtggatatctggagcactttgtggcctatggtggaaaaggaaacatcttcccatagaaactacatagaagcattctgaaaaactattttctgatgtgttyattcaagtcacagtgttgagcctatatgtttattgagcagttttgaaagtcttttttctagaatctctaagtggatacttggagccctttctggcctatggtggaaaagcaaatatcttcggataaaaactacatggaagcattctgagaaacttctttgtgatgtgtgcattcacctgagagagttgaacctctcttttgattgagcagt

SEQ ID NO: 876207 - DNA, 496 bp, Homo sapiens
aaaagaatgtttcaatactgctcaatcaaaagaaagtttcaactctgtgcgatgaatgcacacatcacaaagaagtatctcggaatgcttctgtgtagtttctatgtgaagatatttcctttttcagtataggcctcagatcactccaaatatacacttgtggattctacaaaaagagttcttcaaaactgctcaaccaaaagaaagrttcaactctgtgacatgaatgcacacatcacaaggaagtttctcaggatgcttctgtgtagtttttatgtgaagttatttccttttcctccataggcctcaatgagctccacatatccacttgcagattgtacaaaaggaatgtttcaatactgctcaatcaaaagaaagtttcaactctgtgcgatgaatgcacacatcacaaagaagtatctcggaatgtttctgtgtagtttctatgtgaagatatttcctttttcagtataggcctcagatcactccaaatata

SEQ ID NO: 876208 - DNA, 569 bp, Homo sapiens
agtaaccaaagcagcagggtactggtaccaaaacagaggtatagatcaatggaacagaacagagccctcaaaaataatgccgcatatctacaactatctgatctttgacaaacctgagaaaaacaggcaatggggaaaggattccctaaataattaatggtgctgggaaaactggttarccatatgtagaaaggtgaaactggatcccttccttacaacttatacaaaaattaattcaagatggattaaagactgaaacgttagaccaaaaaacataaaaacccaataagaaaacctaggcattaccattcaggatataggcataggcaaggacttcatgtctaaaacaccaaaagcaatggcaacaaaaaccaacattgacaaatgggatctaattaaactaaagagcttctgcacagcaaaataaactactatcagagtgaacaggcaacatacaaaatggaagaaaattttcacaacctattctgtgtagtttttatgtgaagatatttccttttccacaataggcctcaaagcgctccaaatgtccacttgcaggtacaacaaaa

SEQ ID NO: 876209 - DNA, 569 bp, Homo sapiens
agtaaccaaagcagcagggtactggtaccaaaacagaggtatagatcaatggaacagaacagagccctcaaaaataatgccgcatatctacaactatctgatctttgacaaacctgagaaaaacaggcaatggggaaaggattccctaaataattaatggtgctgggaaaactggttaaccatatgtagaaaggtgaaactggatcccttccttacaacttatacaaaaattaattcaagatggattaaagactgaaacgttagaccaaaaaacataaaaacccaataagaaaacctaggcattaccattcaggayataggcataggcaaggacttcatgtctaaaacaccaaaagcaatggcaacaaaaaccaacattgacaaatgggatctaattaaactaaagagcttctgcacagcaaaataaactactatcagagtgaacaggcaacatacaaaatggaagaaaattttcacaacctattctgtgtagtttttatgtgaagatatttccttttccacaataggcctcaaagcgctccaaatgtccacttgcaggtacaacaaaa

SEQ ID NO: 876210 - DNA, 604 bp, Homo sapiens
cctcaaagcgctctaaatactcacttgcaaattctacaaaaagagtgttacaaactgctctatcaaaagaaagtttaaactcagtgatttgaatgcacacgtcacaaagtagtttctgagaatgcttctgtgtagtttttctacgaacatatttccttttctaccacaggmcccaaagcgctctaaatatccacttgcaaattatacaaaaagagtgtttcaaaactgctctatcaaaaggaagtttcatctctgtgagttgagtacagacatcacaaataagattctgagaatacttctgtctactttttatgtgaagatattccagtttccaaagaaaacctcaaagcgatccaaatatccagatgcagactttacaaacagagtgtttcaaaactgctctatcaaaaaaaaggttagactctgtgagttgaacgcacacatcacaaagtagtttctgggagtgattctgtctagtttttatatgaagatatttccctttctaccataggattcaaagcactctaaatatccacttggaaattcttcaaaaagagtgtttccaaatctgctgtatcaaaaggaagattctactctgtgagtt

SEQ ID NO: 876211 - DNA, 660 bp, Homo sapiens
ttcaatgcttctgtctagtttttttgtgatggtattccttttccaacgaaggcctcagagtggtacaaatatcgacttgcaatttccacaaaaagagtgtttcaaaactgccccatgaaaaggaatgttcaactatgtgagttgaargcaaacagcacaagcaagtttctgagaatacttctgtgcagtttttatatgaagatatttcctttttcaccataggcctccaagcgttccaaatgtccacttgcagattctacaaaaagagtgtttcaaaacttctctatcaagagaaagattcaactctgtgagttgaatgctcacaacacaaagaagtttctgagaatgcttctatcaaggttttatgtgaagatatcttgtttccaacgaagacctctaagcggtccaaatatacaccagcaaattcagcaaaaagtgtttcaaaaccactctatgaaaagaaaggttcaactctgtgagatgaatgcacacatcacaaagaagtttctgagaatgcttctgtgtagtttttaggtgaagctatttcgtttttctccattggcctcaaagcactccaaatgtccacttgcagattctacaaaaagagtgttacaaaactgctctatcaaaagaaacgtacaactctgtgagttgaatgca

SEQ ID NO: 876212 - DNA, 589 bp, Homo sapiens
aagattcaactctttgggctgaattcactcatcatgaagaagtttctgaaaaagcttctgtctattttttatgtgaagatatttcctttttcaccatagccctcaaagcactccaaatgtccacttgcagataccacaaaaagagtgtttctaatctgccccatcaagagtaaggttcatctctgtgagttgaatgcactcatcacaaagaagtttctgagaatgcttctgtctagttttatgtgaagatatcccgtttccaacgaacacctctaagcggtccaaatatacgctagcaaattcagcaaaaagagtgtttcaaaactgctctatgaaaagaaaggttcacctctgtgagttgaatgcacacatcacaaagaactttctgggaatgcttctgtgtagtttttatgtgaagtgatttcgtttttctcctttgkcttcaaagcgctccagatgtccacttgcagattctacaaaaagattgttacaaaactgctctatcaaaagaaaggttcaattctgtgagttgaatgcatacatcacaaagaagtttctgtcaatgcttctgtctagtttttatgtgaag

SEQ ID NO: 876213 - DNA, 589 bp, Homo sapiens
aagattcaactctttgggctgaattcactcatcatgaagaagtttctgaaaaagcttctgtctattttttatgtgaagatatttcctttttcaccatagccctcaaagcactccaaatgtccacttgcagataccacaaaaagagtgtttctaatctgccccatcaagagtaaggttcatctctgtgagttgaatgcactcatcacaaagaagtttctgagaatgcttctgtctagttttatgtgaagatatcccgtttccaacgaacacctctaagcggtccaaatatacgctagcaaattcagcaaaaagagtgtttcaaaactgctctatgaaaagaaaggttcacctctgtgagttgaatgcacacatcacaaagaactttctgggaatgcttctgtgtagtttttatgtgaagtgatttcgtttttctcctttgtcytcaaagcgctccagatgtccacttgcagattctacaaaaagattgttacaaaactgctctatcaaaagaaaggttcaattctgtgagttgaatgcatacatcacaaagaagtttctgtcaatgcttctgtctagtttttatgtgaag

SEQ ID NO: 876214 - DNA, 626 bp, Homo sapiens
cacaaagaagtttctgagaatgcttctgtctagttttatgtgaagatatcccgtttccaacgaacacctctaagcggtccaaatatacgctagcaaattcagcaaaaagagtgtttcaaaactgctctatgaaaagaaaggttcacctctgtgagttgaatgcacacatcacaaagaactttctgggaatgcttctgtgtagtttttatgtgaagtgatttcgtttttctcctttgtcttcaaagcgctccagatgtccacttgcagattctacaaaaagattgttacaaaactgctctatcaaaagaaaggttcaattctgtgagttgaatgcatacatcacaaagaagtttctgtcaatgcttctgtctagtttttatgtgaaggtattccttttccaacgaaggcctcaaagtggtacaaatatcaacttccaaattccaccaaaasagtgtttcaaaactgctctatgaaaaggaacgttcaactctgtgagttgaaagcagacagcacaaagaagttcctgagaatgcttctgtgcagtttttatgtgaagatatttcctttttcactataggcctccaagcactcaaaagtccacttgcagattctacaaatagagtgct

SEQ ID NO: 876215 - DNA, 666 bp, Homo sapiens
cattacaaagaagtttctggaaatgcttctgcgtagtttttatgtgaagatatttcctttttcaccacaggcctccaagcactccaaatgtccacttgcagattctacaaaaagagtgcttcaaaactgctctatcaaaagaaagtttcaactctgtgagttgaatgcaaacatcacaaagaagtttctgagaatgcttctgtgtagtttttatgtaaagagatttcttttttctccattggcctcaaagcgctccaaatgtccactttcagattctacaaaaagagtgttacaaaactgcactatcaaagaaagattcaagtctgtgacttgaatgcactcatcacaaagtcgtttctgtcaatgattctgtctagtttttatgtgaaggtattccttttccaaagaaggcctcaaactggtacagataccgacttgcaaattccacaaaaagagggtttcaaaactgctctaagaaaaggactgttcaactctgtgagttgaaagcaaacagcacaaagaagtttctragaatgcttctgtgcagtttttgtgtgaagatatttcctttttcaccacaggcctccaagagctccaaaatgtccacttgcagactcgacaaaaagattgtttcaaaactgctctatcaaaagaaaggttcaactc

SEQ ID NO: 876216 - DNA, 639 bp, Homo sapiens
cagatccatttttcataatgtttctgtgtagtttttatatgaagatatttccttatacgaaaagagtgtttcaaaactgctccatcaaaagaaatgttcaactctgtgagatgaatgcacacatcacaaaaaagtttctctgaatgcttctgtgtagtttatatatgaagatatttccttttctacaataggcctcatagcactccaaatatccatttgcagattctacaaaaagagtgttgcaaaactgcgcagtcaaaagagaggttcacagctgtgagaagaatgcacacatcacaaagaagtttctgagaatgcttctgtctagtttttatgtgaagatatttccttttccaccrtaggcagcaaagggctccagatatccacatgtacatattacaaaaagagagtttcaaaactgcactatgaaaagataggttcaactctgtgagttgaatgcacacatcacaaagtagtttctggtaatgcttctgtgtagtttttatgtgaagatatttccttttccacaataggcttcaaagcgtgcccaatatccaattgcagattctacaaaaagagtgtttcaatactgcccattcaaaagaaagtttcaactgtgtgagatgaatgcacacatca

SEQ ID NO: 876217 - DNA, 561 bp, Homo sapiens
aaagtaactcgtatatgtgcacaagcatattgcattttttttaactaaacagccaatggtatgttttgattgacatcaagtggagacgggatggggaaaaatactgattctgtgaaaatatccccttcctccattagtggcatgctcattcagctcttatctttatattccagtaagttattttgctctcactgttttaacaacaacaaaaatataaaaatccttgcataccttgttcaactagagaattttaatgwttttcatttatcattgtaaaaccaaggacaattgtgtaacttttttgtatgtagctgttgcatgtagcgcaatctgtctttaggtagggataaattactctaaaacaaaaaacaatcctagatagttttcccttcaagtcaagtgtcttgttgtttaaataaaattcttgtttaaaatgaaaagaaaaatgtagaatgcaaaggccaagaatgtcctttatttcatgttagggatcagggactatgattatgtcactacagaataaaataaacggaaatggatatctgacagcggtgtgagcaa

SEQ ID NO: 876218 - DNA, 619 bp, Homo sapiens
tgaaagtgacagggagaatggaaccaagttagaaaacactcttcaggatattatccaggagaacttccccaacctggcaaggcaggccaacatttgaattcaggaaatacacagaatcccacaaagatactcctcaagaagagcaaccccaagacacataactgtcagattyacaaaggttgaattgaaggaaaaaatgttaaaggcagccagagagaaaggccaggtcacctacaaagggaaacccattagactaacagtggatctctcggcagaaaccctacaagccagaagagagtgagggccaatattcaacattattaaagaagagaattttcaacccagaatttcatatccagccaaactaagcttcataagtgaaggagaaataacatcctttacaaagaagcaaatgctgagatattttgtcaccaccaggcctgccttacaagagctcctgaaggaagcactaaatgtggaaaggaacaattggtaccagccactgcaaacacatgccaaattgtaaagaccatcaatgctatgaagaaactgcattaattaacaggtgaaataaccagctaacgtcataatgacaggaccaaattaatacataacaata

SEQ ID NO: 876219 - DNA, 619 bp, Homo sapiens
tgaaagtgacagggagaatggaaccaagttagaaaacactcttcaggatattatccaggagaacttccccaacctggcaaggcaggccaacatttgaattcaggaaatacacagaatcccacaaagatactcctcaagaagagcaaccccaagacacataactgtcagatttacaaaggttgaattgaaggaaaaaatgttaaaggcagccagagagaaaggccaggtcacctacaaagggaaacccattagactaacagtggatctctcggcagaaaccctacaagccagaagagagtgagggccaatattcaacattattaaagaagagaattttcaacccagaatttcatatccagccaaactaagcttcataagtgaaggagaaataacatcctttacaaagaagcaaatgctgagatattttgtcaccaccaggcctgccttacaagagctcctgaaggargcactaaatgtggaaaggaacaattggtaccagccactgcaaacacatgccaaattgtaaagaccatcaatgctatgaagaaactgcattaattaacaggtgaaataaccagctaacgtcataatgacaggaccaaattaatacataacaata

SEQ ID NO: 876220 - DNA, 619 bp, Homo sapiens
tgaaagtgacagggagaatggaaccaagttagaaaacactcttcaggatattatccaggagaacttccccaacctggcaaggcaggccaacatttgaattcaggaaatacacagaatcccacaaagatactcctcaagaagagcaaccccaagacacataactgtcagatttacaaaggttgaattgaaggaaaaaatgttaaaggcagccagagagaaaggccaggtcacctacaaagggaaacccattagactaacagtggatctctcggcagaaaccctacaagccagaagagagtgagggccaatattcaacattattaaagaagagaattttcaacccagaatttcatatccagccaaactaagcttcataagtgaaggagaaataacatcctttacaaagaagcaaatgctgagatattttgtcaccaccaggcctgccttacaagagctcctgaaggaagcactaaaygtggaaaggaacaattggtaccagccactgcaaacacatgccaaattgtaaagaccatcaatgctatgaagaaactgcattaattaacaggtgaaataaccagctaacgtcataatgacaggaccaaattaatacataacaata

SEQ ID NO: 876221 - DNA, 562 bp, Homo sapiens
ccagaactttcaatactatgttaaataggaatggtgaaagagggcattcttgtcttgtgctggttttcaaggggaatgcttctggcttttgcccactctgtatgatgttgtctgatatggtttgtcatacatggctcttattgttttgaagtatgttcctttaatacctagtttattgagagtttttaatatgacgggatattgaattttattgaaaaccttttctgcwtctattgagatagttgtgtggttttgaactttagttctgtttatgtgatgaatcacatttatttatttgcgtgtgttgatccaaccttgcatcccaggattaaagcctacctgatctcaatggataagatttttgatgtgctgctggtattggtttgtccatgttttgtttaggacttttgcagtgatgttcatcaaagatattggcttgaagttttctctctctctctctcttttttttttttcttatctctgccaggttttgatattaggatgatgctagcctcatagaatgagttagggaaaagtcctttatccttaaatttttggaata

SEQ ID NO: 876222 - DNA, 650 bp, Homo sapiens
gtatagaattttcaactatgtcatgtaactattttgccttacccaataacatataaatttcacaaaacagaatttgcttcattatatattttaagcccctagaataatctctaacacatacttagatttcaataaatgtctatygaatagatgaattaattagaaacaattttttattatactttaagttctgggatacaggggcagaacgtgcaggtttgttacataggtacacacgtgccatggtggtttgctgcacccatcaacctgtcatctacattaggtatttctcctaatgctatatctcctctagcccccccaccccctgacaggccctggtgtgtgattttcccctccctgtgtccatgtattctctttgttcaactcccacttacgagtgagaacatgtggtgtttgattttctgttcctgtgttagtatgctgagaatgatggcttccagcttcatccatgtccctgcaaaggacatgagctcatcctttctttttatggctgcatagtattccatggtgtttatgtgccaccttttctttatccagtctatcattgatgggcatttgggttggttccaagcctttgctattgtgaatagtgctgcagtaaacatacgtgtgcatgtgtctttatagta

SEQ ID NO: 876223 - DNA, 650 bp, Homo sapiens
gtatagaattttcaactatgtcatgtaactattttgccttacccaataacatataaatttcacaaaacagaatttgcttcattatatattttaagcccctagaataatctctaacacatacttagatttcaataaatgtctatcgaataratgaattaattagaaacaattttttattatactttaagttctgggatacaggggcagaacgtgcaggtttgttacataggtacacacgtgccatggtggtttgctgcacccatcaacctgtcatctacattaggtatttctcctaatgctatatctcctctagcccccccaccccctgacaggccctggtgtgtgattttcccctccctgtgtccatgtattctctttgttcaactcccacttacgagtgagaacatgtggtgtttgattttctgttcctgtgttagtatgctgagaatgatggcttccagcttcatccatgtccctgcaaaggacatgagctcatcctttctttttatggctgcatagtattccatggtgtttatgtgccaccttttctttatccagtctatcattgatgggcatttgggttggttccaagcctttgctattgtgaatagtgctgcagtaaacatacgtgtgcatgtgtctttatagta

SEQ ID NO: 876224 - DNA, 604 bp, Homo sapiens
tgcttttgataatacaggcatacctcatagatattgtgagttcagttccaggcaacctcaataaagtaaatcccacaagctatttggttaccagcacatataaagcttatgcttacactatactgtaatctattaagtgtgcaataacattatgcctaaaaaacaatgtgcatatcttaaattaaaaatactttcttgctaaaaaattccagtgatcatctgactctccagcaagttatgatgtttgtgctggtggaggatcttgcctcaatattggcttttgctgactgatgaaggaaggttgggatatctttgacaatttcttaaaataagacaacmataaagtttgatacatcaattaacttcctttcatgaaagatttttctgtagcacgcaatgctatttgataacattttacccacagtagaacttctttcaaaattagagtcaatcctctcaaaccctgccactgctttctcaactaactttatgtaatatgctaaatccctgttatttcaacgctgttcacagcatcttcaccaggaatagattacatctcaagaaaccacgttatttgctcatccataaaaagcaattctcatct

SEQ ID NO: 876225 - DNA, 676 bp, Homo sapiens
gaagaagtcaaatccttgcatagaccaataacaagttctgaaattgaggcagtaattaatagcctaccaatcaaaaaagccaaggaacagacggattcacagccgaattctaccacatataaaaagagttgcttctgaaastattccaaactgaaattattccttctgaaactattccaaacaatggaaaaagaaagactcattcctaactcattttatgaggccaccattattctgataccaaaacccagcagagacacaacaaaaaaagaaaatttcaggccaatatccctgatgaacgttgatgtgaaaatcctcaaaaaacaacaacaaaaaatactggcaaaccgaatccagcagcacatcaaaaagcttatccaccacaatcaagttggcttcatccttgggatgcaaggctggttcaacatatgcaaatcaataaacgtaatctatcacataaacagaatcaatgacaaaaaccacatgattatctcaatagatgcagaaaaggccttcaataaaattcaacacctcttcatgctaaaaactcccaataacctaggtattgatggaacatatctcaaattaataagagctatttatgacaaacccatagccaatatcacactgaatggacaaaagctgaaagtattccttttgagaactggtacaagac

SEQ ID NO: 876226 - DNA, 647 bp, Homo sapiens
aatctgacaattatgtgtctcggggttgcttttctcaaggagtatctttgtggtgttctctgtatttcctgaatttgaatgttggcctgccttgctaggttagggaatttcccctggataatatcctgaagagtgttttccaacttggttccattctccccatcactttcaggtayaccaatcaaacatagatttggtcttttcacataatcctgtatttcctgggctttgtttgtttctttttactcttttttctctaatcttgtcttctcactttatttcattaatttgatcttcaattgcttataccctttcttccaattgattgaatcagctgttgaagcttgtgcatgcatcacgaagttcttctgccatggttctcagctccatcaggtcatttaaggtcttctctacactgcttattctagttagccattcgtctaatcttttttcaagtgttttagcttccttgcgatgggttcgaacatcctcctttagctcggagaagtttgtgattaccaaccttctgaagcctactcctatcaactcatcaaagtcattctccatccagctttgttccgttgctagtgaggagctgaaatcctttggaggagaagaggtgctctgatttttagaattttcagctt

SEQ ID NO: 876227 - DNA, 448 bp, Homo sapiens
agatctttcaaaaacactttgaattccataaccaatcctcagagttacccagtttccactaaagtaaaaagtgctgataaacaagaaatctcaagtacagaacttgttttattttatttatagatagatgtagatatagatataaatttttttttttttttgagacggagtttcactctgttgcccagggctggagtgcagtggttcgatctcggctcactgcaccctccgcctcctgggttcaascaattctcctgcctcagcctcccaagtagctgggattacaggcgcccgccaccatgcctggataatttttgtatttttagtaaaggcagggtttcaccttgttggtcaggctggtctcgaactcctgacctcatgatccacccacctcagcctcccaaagtgctgggattacaggcgtgagccaccatgcccggcccagaac

SEQ ID NO: 876228 - DNA, 635 bp, Homo sapiens
ttacgatttgagtacacatttgtacactttcctaaaatatctacaactaacaaatcatctgacattaaaaaaaggttacttttaaatttccactgtgctatttcttttttctctattattaatctttaatcattcttatataggtcacatgaaagcctagactgtttcaatttgcctttgtctctcattttttgggaaagccaggstggacatctgtgaccaccaaagctgcctgcccctcagttttcaccattgttctctttcttctttcccggttcacccattctccctgctctgattgtctcagttgaggaattattgcctgggagaattcacctgtcttgctttcatgcgtggcttattactttactgtgtttcttggccaaaacctcaaggtagctaatcatttgtacctccagcacttcattttctaaattaggataggcagatgtattgctccatacaaagatttttcagaattctgggataattaggtaatgccaattactaatttcattattttctaatgggtttgtactttgtctttttatgagccatgctattcagagcccttgagatttgtctagaccatttggtttcaacatccatcaggtgaagcggctctttggtgccaa

SEQ ID NO: 876229 - DNA, 633 bp, Homo sapiens
gacatgactgcaactatcctttcagtcctctgatggctttttctgtcttaagtggaaatgaagaacatctgttcaccattctttctatgttagtttttaaatatttgaaggcaattaagtcaccctgagtctcttctcttcacaaaaacattgccagtacctttagctttccccttactcttacttgcctgtcctttaatcatgtctgtctctctgctttggctattttccaggttgtgtacatctttcataagttattagattttcaacatacttagccaatctttctggcttctaacttaaaaggacaaagctaaactaaaaacaaaccaacctgccaattgtccaagattcagctcttctttattttgttagatttctatgtaattatgcatcttccaaccrtatctttgcttgtaatccatcaaatgtggcttacatcctttacattactcttttttcctccaaaattggtgcaacagttagacttactgtggttgattctcactttctgagtctggcctcaatgatgtcaaacatttgtcatgatggttttcactatcatctgatatttttcactggctgaccagttcataaaacatactccaggtatccaactttcattttacattt

SEQ ID NO: 876230 - DNA, 649 bp, Homo sapiens
tctcccccaaaatgggttattcttttctactgcattgtcagcctgcaaattttctgaacttttatgatctgtttcccttttaaaatggaatgcttttaacagcatccaagtcacctttgaatgctttactgcttagaaatttcttccaccagacaccctaaataatctctcttaggttcaaagtctcacaaatgtctagggcaagggaaaaatgccaccagtctctttgctaaaacataacaagaatcacctttkctccagttcccaacaagttcctcagctccatctgagaccacttcagcctggaccttattgttcatatcactatcagcatttttgtcaaagccgtttaacaagtctctaggaggttccaaacttttccatattttcctttcttcttctgagccttccaaactcttccaacctctgcctgttacccagttccaaagtcacttccctattttcagctatcttttcagcgacgccccactctactcgtaccaatttacttactgtattagttcattttcacactgctgataaagatatctgaaaccgggaaaaaaaagagtaagtttaattggacttatagtttcacacggccagagaggcctcagaatcatagcaggaggcaaaaggcacttctttc

SEQ ID NO: 876231 - DNA, 666 bp, Homo sapiens
tgcagctggcttgaatttctcccccaaaatgggttattcttttctactgcattgtcagcctgcaaattttctgaacttttatgatctgtttcccttttaaaatggaatgcttttaacagcatccaagtcacctttgaatgctttactgcttagaaatttcttccaccagacaccctaaataatctctcttaggttcaaagtctcacaaatgtctagggcaagggaaaaatgccaccagtctctttgctaaaacataacaagaatcacctttgctccagttcccaacaagttcctcagctccatctgagaccacttcagcctggaccttattgttcatatcactatcagcatttttgtcaaagccgtttaacaagtctctaggaggttccaaacttttccrtattttcctttcttcttctgagccttccaaactcttccaacctctgcctgttacccagttccaaagtcacttccctattttcagctatcttttcagcgacgccccactctactcgtaccaatttacttactgtattagttcattttcacactgctgataaagatatctgaaaccgggaaaaaaaagagtaagtttaattggacttatagtttcacacggccagagaggcctcagaatcatagcaggaggcaaaaggcacttctttc

SEQ ID NO: 876232 - DNA, 649 bp, Homo sapiens
tctcccccaaaatgggttattcttttctactgcattgtcagcctgcaaattttctgaacttttatgatctgtttcccttttaaaatggaatgcttttaacagcatccaagtcacctttgaatgctttactgcttagaaatttcttccaccagacaccctaaataatctctcttaggttcaaagtctcacaaatgtctagggcaagggaaaaatgccaccagtctctttgctaaaacataacaagaatcacctttgctccagttcccaacaagttcctcagctccatctgagaccacttcagcctggaccttattgttcatatcactatcagcatttttgtcaaagccgtttaacaagtctctaggaggttccaaacttttccatattttcctttcttcttctgagccttccaaactcttcyaacctctgcctgttacccagttccaaagtcacttccctattttcagctatcttttcagcgacgccccactctactcgtaccaatttacttactgtattagttcattttcacactgctgataaagatatctgaaaccgggaaaaaaaagagtaagtttaattggacttatagtttcacacggccagagaggcctcagaatcatagcaggaggcaaaaggcacttctttc

SEQ ID NO: 876233 - DNA, 669 bp, Homo sapiens
ttgttaagtacatgcacattaagaactgttatactttggagaattaacacctttgtcatttatgtaatacccttctttgtacaccacaattttcctcactctgaagttttctttgtctgagattaatatagctaccctagctttctttttgttagtgttaacgtggttttttatatattcctttacttttaatctgcctgtgtcttcatatttaaagctagactccatcttttaattggtaatatttagaccagtattaaaacataaagtgattgttcacagagttgtattaatatgtttcacagagttgtattaatatgtaccatgtttgtaartgttatctgttcatttcacttgtttcttttttatcttccctctttttctgccttctctggtttcgattgagcattttatatgccttgattatatcttcatggcatattaattctacttctttttaatacttttatgtggttgcactagagtttgcaaagtacatttaaaacgaatctaaattcacttgcaagtaacatgtgaggggcagtgcaggcaccttgtaatagagcattcctagttcctccctccctacccttataatgttgttgtctttcatttcacttatccatatgctataatcacccaatacattattgttatttttgcttcgaa

SEQ ID NO: 876234 - DNA, 669 bp, Homo sapiens
ttgttaagtacatgcacattaagaactgttatactttggagaattaacacctttgtcatttatgtaatacccttctttgtacaccacaattttcctcactctgaagttttctttgtctgagattaatatagctaccctagctttctttttgttagtgttaacgtggttttttatatattcctttacttttaatctgcctgtgtcttcatatttaaagctagactccatcttttaattggtaatatttagaccagtattaaaacataaagtgattgttcacagagttgtattaatatgtttcacagagttgtattaatatgtaccatgtttgtaagtgttatctgtkcatttcacttgtttcttttttatcttccctctttttctgccttctctggtttcgattgagcattttatatgccttgattatatcttcatggcatattaattctacttctttttaatacttttatgtggttgcactagagtttgcaaagtacatttaaaacgaatctaaattcacttgcaagtaacatgtgaggggcagtgcaggcaccttgtaatagagcattcctagttcctccctccctacccttataatgttgttgtctttcatttcacttatccatatgctataatcacccaatacattattgttatttttgcttcgaa

SEQ ID NO: 876235 - DNA, 443 bp, Homo sapiens
agacagattctgttgctccttcttttatatatatgactgttgatgcatcctaacattacagcaacttcttattgtattgtaatactaatattttatcttctctcactacactgtgagatatttaagagcaagtgttgagtctctttattttagggggagtcaaaaatagttcacatttaattttgatgcaaatattctaaataaaatattgacaaactcaatcctttacaattaaaagagtaattaggcatgaccaaacagaacacagggctgcagaaaagcagagcattttgttcacagyaggtgcttcaaacacctaatccacagtaggtgttcaaaaagtatcttcagaatgaatgacctactgttttttcttgcctcttgatctttgttatgaattggtaaacccataaataaataaaaccctacttgatacatagtag

SEQ ID NO: 876236 - DNA, 575 bp, Homo sapiens
tttaaaggagtttaactgagcaatgagcaatttctaaattgggaagcccccagaattacagcagattcagagagactccagggatgcctcatggtcagaataaatttatagacaaaaaaaggaagtgatgtgcagaaatcagaagtgaggtacagaaacagctggattgattacaggttgatgtttaccttatttgaacacagtttgagcactcggcagtgtatgagaggttgaagtatggctgctgagattggccaagactcagttattgttaaaagcacatactcytaaattagggtttcaatcttgtccacctattaagttaggttgtggttcatccacaaggactcaaatatagaagtacagagtccttctcaggttatatttagtttactttaacaagactaaaaggttatagcatttctctcccactgacaatcattacccaagaaaagttttcgtttgaatgaggtggatcaagctaaaacaattatgcatatagtttagcaattaatttagctccaagtaagttaaagaactaacgggtgttcaaaaatagatttctaaagatatca

SEQ ID NO: 876237 - DNA, 679 bp, Homo sapiens
tctgcaaacagggacaatttgacttcctcttttcctacttgaataccctttatttccttctcctgcctgattgccctggccagaacttccaacactatgttgaataggaatggtgagagagggcatccctgtcttgtgccagttttcaaagggaatgcttcccatttttgcccattcagtatgatattggctgtgtgtttgtcatagatagctcttattattctgagatatgtcccatcaatacctaatttattgagagtttttagcatgaagagttgttgaattttgtcaaaggccttttctgcatctattgagataatcatgtggtttttgtcattggttctgtttatatgctggattatgtttattgatttgcatatgttgaaccagcctcacatcccagggatgaagcacacttaatcatagtggataagctttttgatgtgctgctggattcagtttgccagtattttactgaggatttttgcatcaatgttcatcagggatattggtctaaaattmttttgtgtgtgtgtgtgtctctgccaggctttggtatcaggatgatgctggcctcataaaatgagttagggaggattccctctttttctattgattggaatagtttcagaaagaaactcccagagtggccattttagagacctcctcctgggaaatg

SEQ ID NO: 876238 - DNA, 580 bp, Homo sapiens
ttacccagtctcaggtatgtctttatcagcagcatgagaactgactataacaacaaggactaaatgaaacaaactaatcctaaccatcgctaatgagggaaggcagagcctacatctatttcacaggaggttttattaaaagcacctgtctgtgtggggcgctttgggctctggtttctgctctgccactaagcaccattgtgcaatattgtataagccataaactctctgaatcaaaatttcttggtcttttgattatcyataatagactgggtattttaaataacatatctccaatccttcaaacaaccctgtaatgtagaaattattatttctactttatagatgaaacaatagaggctcaggtcagttaggtatttcaaggtcaagcagcttctaaatggcataaccagaacttgaacccattccctatagctccaaagtcagacaagtctttttcatttttttctccttcttcctgggagccatgaaagaggggtttgggataaatcattgctgtcttcatggtttcttacagatctaaacatttatggtgtacgctactatcctcatttgacag

SEQ ID NO: 876239 - DNA, 625 bp, Homo sapiens
ttggtcattatttctttttaaatgctttgagtgcctttgctacaacttatgatcttttctgaaattctattaaaagtacaattgtttctatttcacttatactcaaagacaaaaccaaaacaatgataaagttgttttaaattcartctttacattcatatactaagcagttacatggagttaatttgaattttttattcatttagttgaaataggcaacgatgctatagggggaaaaagtttattagtcagaatgtcctttctgtatatccttagtagtcactcacacagattgatattgatacaacttaatttcctaattctgaaaattattaattaaagcaacttggcctggttttcagatctaaatgtttctccttgaaccattttctgatccctttgcaatattcgtcctaaacattagaaatcctagtttattctggctctgattcaatcttccaaaatttcctctgtgtttactttggtcttttggaagaggtccaagtttgtctccagtctctgaaaggagatgaatgaaactgaaattgcatttactgttcttttgactctcatgtttgtgctcaaagacagatctaatttctctggcaattttcataaagaaaaa

SEQ ID NO: 876240 - DNA, 584 bp, Homo sapiens
aaattccctcagcatttgcttgtctgaaaaagatggccagataagaaattttaggttgaaattcttttctttaagaatgttgaatattggctcctaatctcttctggcttgtattgtttccactgagaggtgtgctgttagtttgatgggtttccctttataggtgacctggcttttctctctggctkcccttaacatttttttcccttcatttcaaacttggagaatctgatgattatatgtcttggggttggacttctcatggagtatcttactggggttctctggatttcctgaatttgaatgttggcctgtcttgctaggttggggaagttctcctgaatcatatcctgaagtgtgtttttcaacttggttctgttttccccatctctttaggtaccccaatcagtcataggttcagtctttttacataatcccatagttcttgaagattttgtttgttccttttcattatttttctccaatcttgtctgcctgccttttttcaacaagatagtactcaagctctgatatcctttctttcacttggtctatttggctgtttatacttgtgcttgcattgt

SEQ ID NO: 876241 - DNA, 584 bp, Homo sapiens
aaattccctcagcatttgcttgtctgaaaaagatggccagataagaaattttaggttgaaattcttttctttaagaatgttgaatattggctcctaatctcttctggcttgtattgtttccactgagaggtgtgctgttagtttgatgggtttccctttataggtgacctggcttttctctctggctgcccttaacatttttttcccttcatttcaaacttggagaatctgatgattatatgtcttggggttggacttctcatggagtatcttactggggttctctggatttcctgaatttgaatgttggcctgtcttgctaggttggggaagttctcctgaatsatatcctgaagtgtgtttttcaacttggttctgttttccccatctctttaggtaccccaatcagtcataggttcagtctttttacataatcccatagttcttgaagattttgtttgttccttttcattatttttctccaatcttgtctgcctgccttttttcaacaagatagtactcaagctctgatatcctttctttcacttggtctatttggctgtttatacttgtgcttgcattgt

SEQ ID NO: 876242 - DNA, 627 bp, Homo sapiens
tgggacttctagcccctttgctttggccaatttcttctttttgaaaaggaagcatttacccaatgactgtacccccattgtatctaggaagtaactaacttgcttttgattttacaggctcatagggggaaggaacttgccttttctcagatgagactttggaattggacttctgggttaatgctggaatgagttaagattttgggggattgctgagaaggcatgattgtgttttgaaatgtgagaagaacatgagatttgggagggacctggggtgggatgatgtagtttggctctgtgttcccaccaaaatttcatcwcaaattgtaatcaccacatgttgagggagggaccaggtggcaggtaataggaccatggggacagtttcctccatgctgttctcatgatagtgagtgagttctcaagagatatgatggtttattgtctcagtcccaaaacttaaggtgataagcaacttcaacaaagtctcaggatacaaaattggtgtacacaaatcacaaccagtcctatacaccaacaatagacaagcagagagccaaatcatgagtgaactcccattcacaattgctacaaaggaaataaaatactcagcaatacaacttacaa

SEQ ID NO: 876243 - DNA, 635 bp, Homo sapiens
aatttttgcaagctacccatctgacaaaggtctaacatccagaatctacaaggaacttaaacaaatttacaagaaaaaacaaccgcatcaaaaagtgggcaaaggatatgaacagacacttctcaaaagaagacatttatgcacccaataaatgtacaaaaaaaaaaaactcatcatcactggtcattagagaaatgcaaatcaaaaccacaatgagataccatcttatgtgttagaatggcaatcattaaaaagtcaggaaacaacagacactggagaggatgtgcagaaataggaatgcttttacactgttggtgggagagtaaattagttcaaccattgtaagacggtgtggtaatgcttcaagtatctagaacaagaaataccatttgacccagcaatcccattactgggtatatacccaaaggattataaatyattctactataaagagacatgcacacatgatgtttattgcagcactatttacaatagcaaagacttggaaccaacccaaatgcccatcaataatagactggatagaagaaaatgcgacacatatacaccatggaatactatgcagcaataaaaaataattagttcatatcctttgcagggacatggatgaagctgga

SEQ ID NO: 876244 - DNA, 515 bp, Homo sapiens
ctctctgtaaaaccccatgcatttcaccacaggactagcaacccatttttctctgggacccctctttttgcagcagagagggctgcttttcttttgtctattaagcttctgctcttaacttcactctggtgtgtctgtgtcctagttttcatggccatgggacaatgaaccgtggctattaccccagacaatgacactgcttcaacaccacgaagaggaaactaggatgtaartccagagggagggctgggcgcggtggctcatgcctataatcccagcactttgagaggccaaggcaggaggatcacaacgtcaggagtttgagaccaggctggccaatatggtaaattggctggtcaatttagtctctactaaaaatacaaaaaaaattagctgggcgtggtggcatgtgcctgtagtcccagctactcaggaggctgaggcaggagaattgcttgaacccgggaggtggaggttgcagtgagctgagatcgtgccagtgcactccagcctgg

SEQ ID NO: 876245 - DNA, 653 bp, Homo sapiens
ggtcacaaactcctgggtcactgctttttcaccattttaatccaatatacacttaaggtgcatttagaaagaaggaaagtaaaagccagtatgcatagcattctgtgaggcctctgtgttttaattctccctttaattataaccttaagttatagctctccagctcatttcatttagcagaagcttgatgaccaattcagatgaaatcctttcataagtaagatcatggatgttggcttacactgaaatatcttcccccaccccccrccgccctattaaattctttatttcactccaaggcatactgactttactttgccccctttttatggatgcaaaatactaagtagtcttgattgaatcttagaatagccaggcacagttttaagggccttacatgcatgacttcacttatttataccaataacacccctgaagttgttgtgaaaattaagtgcttagaaagagaaagtgttcagtaagaaggacatgctcaagaaacaatgaccattattaaatcttctcagatgccttgtgaattgcttattgttatcattcccgttttacagatgagaaaatagatgttaaacaactccccaaggtcacccatgtggcacagtcaaccttggaacccagacactctggctttagaa

SEQ ID NO: 876246 - DNA, 653 bp, Homo sapiens
ggtcacaaactcctgggtcactgctttttcaccattttaatccaatatacacttaaggtgcatttagaaagaaggaaagtaaaagccagtatgcatagcattctgtgaggcctctgtgttttaattctccctttaattataaccttaagttatagctctccagctcatttcatttagcagaagcttgatgaccaattcagatgaaatcctttcataagtaagatcatggatgttggcttacactgaaatatcttcccccaccccccgccgccctattaaattctttatttcactccaaggcatactgactttactttgscccctttttatggatgcaaaatactaagtagtcttgattgaatcttagaatagccaggcacagttttaagggccttacatgcatgacttcacttatttataccaataacacccctgaagttgttgtgaaaattaagtgcttagaaagagaaagtgttcagtaagaaggacatgctcaagaaacaatgaccattattaaatcttctcagatgccttgtgaattgcttattgttatcattcccgttttacagatgagaaaatagatgttaaacaactccccaaggtcacccatgtggcacagtcaaccttggaacccagacactctggctttagaa

SEQ ID NO: 876247 - DNA, 574 bp, Homo sapiens
cgcagtttttgcaaagttactaaagtttccaaattctaaaaccacatggtagtctgccagctacacatggagcaaattacctgccctgatgctccccacttgtaatccagccagcaagccctgtctctccattcccaaggctgtgttcacagacagcattgacgaaaaccagccagttmcccccaaacccctgctgcacagtatctgacagatatcagtgatggcttatcttcacttgtctttcaacccctctttattctctacccctctttatgcaccccaaaactgccaatatctctataaatagcatgactctggctttcctgggcttgaacttccatgtggatttggctgacggagatcaatgtaaggtgatgggatgctcagaagacagagagttgggggtaattttctcccactccttttctgcagtgggaactgcagtgatggcaacagtattctctccatgaaaacactccctgcctcctgctatggtttcaacatttgtgtccctccaaaattcatgttgaaacttcatcctcagtgtgacaggattaagatgtgaggccttgag

SEQ ID NO: 876248 - DNA, 658 bp, Homo sapiens
tacctgccctgatgctccccacttgtaatccagccagcaagccctgtctctccattcccaaggctgtgttcacagacagcattgacgaaaaccagccagttacccccaaacccctgctgcacagtatctgacagatatcagtgatggcttatcttcacttgtctttcaacccctctttattctctacccctctttatgcaccccaaaactgccaatatctctataaatagcatgactctggctttcctgggcttgaacttccatgtggatttggctgacggagatcaatgtaaggtgatgggatgctcagaagacagagagttgggggtaattttctcccactccttttctgcagtgggaactgcagtgatggcaacagtattctctccatgaaaacactccctgcctcctgctatggtttcaacatttgtgtccctccaaaattcatgttgaaacttcatcytcagtgtgacaggattaagatgtgaggccttgaggaggtgatcatatacccttataacagcactctaggggactagctagatcctgtttgcttttatattccttctgcaatgtgaggacacagcaagagtcgccatcttggaagcagaaagcaaccctctccagcccccagatctgctggcaccttgatcttgga

SEQ ID NO: 876249 - DNA, 590 bp, Homo sapiens
ggcctcttcacactactctggcaaaatcaacctgaactgctggattataggtcttggcatctggagctgcctgcttgagccctggcaggtctggaggcttggggctctttcattgactcaggaaatatttctgcttcccacccaggacttctgttgtctcttcctcccttctcctsccctgctctcaggactcttagatgtagcccaggtttgcttccacacagttgacattggcggtgcacggtcttctcccctctacgccctcagatctccacgcctgtgcctatgacacgtgccaccagcacctgtgttgccaagcctggctcctcatccgtggccactcctgcccccacaacctgccagtcctgcctcctttttgcctgcctcctgcctatctttacttcactgatttctttggctggaaaatatttctacaacttcccctcccacactcacctggggctatgacattgttgtgggcactggttgggcctcgcccctgccacctaacaagtacatcctacaggcccaggagggcattatctgtggttttgaatttctagtgtctcgaactgtactggcccagagag

SEQ ID NO: 876250 - DNA, 666 bp, Homo sapiens
gggtgcataggacgttaacagctagggaaggcggggtttctttttgaagagatgaacatgctctataattcattgtgatggcggctccacttatctgtgcatatactaaaagccactgacttgtagacattaatgtgtgcactctacactatgtaaattatatctcaataaatcctttcaaaaatacacagaagagtaaggggttttggaatgttgcagctgggatgcagtttgaaatactgaataggcctcatcgagaatgtgaagtttcagtaaagacctgaggaagttgaatgagctgatcaatggatatatggagggctatctttccaagccaaaaaattaactagagtcttgatcrtaaggcagcagcatgttggtatgtccagaggacagtgaggtggccaggaccactggtaagatcaagggtgaagatataaaagaattttggcggttaacatgaggcagatgatgatgggcttgcagaccattgtaagaaatgttgtttttagtgtacatgaaatggggagacaactcattatcccattatcaatattttaataaattggatccatgaaccaaatccaatgagattaaatcaattaataataatatgcaaatttgtattaaaattacaagaattacttgcacatttgagaacaggag

SEQ ID NO: 876251 - DNA, 706 bp, Homo sapiens
aaacaccatttgacccagcaatcccattactaggtatatacgcaaagtaatataaatcatcctattataaagatacatgcatgtgtatgttcactgcagcactattcacaatagtgaagacatggaatcaacccaaatgcccatcaatgatagaatggataaagaaaatttggtacatatacaccgtggaatactatgcagccataaaaaggaatgagattatgtccttttcagggacatggatggagttggaagccgttatcctcagtcaactaacacaggaacagaaaaccaaataccacatgttctcacttataagtgggagctgaacaatgagaacacatggacacatgttgggaaaaacaacaatttctcatatcttagaggaagaagttgcttatttattttcactttgattctcagcctttcttatttacactgcgtgatcctgatgagctctcatagtctctcagcctctgttatattaatatttaagacaatctttctcattaggcaaatcacaatgtgtcactactcttttaaaacattttsatagccttttatggcctaaagaaaagtctcaaatcctcatcatgatatgtagaactcaccacataaaagttccactcgtttttgtttttttttaagtacagtattatttcaaatcaacgtaataatgagtcaaatgatctcctgaaactctctc

SEQ ID NO: 876252 - DNA, 615 bp, Homo sapiens
tgtcggcatcaggggaatttaaaaaaaatgaaaaataaaattccagtcaatagtaaggacagtgataagaagcttgaaggactttttaaaaaatataaagtagggtaatatattgtgattctttcagagttcacatcaaatgtatttgtgtgtgtgtataacaattttgttaaagctgcaggtcttaagatgaaaaaaactaaagagtgtactctgaagtataaattagatatacattcatggaaaagatagaccctctttatggatgagaatattaaatgttgtaaagatggcaatttacctaaaaataatttaaaaatttaaagaatagtaaattttcaagcaaatattttgagtkaacaattatttagaaatatttcagtaaaaataaacattttagactaggtagaatttttttaaataaaagatgttgactttctctgtcaggtaatgaatatactataaaaccataattataatagtttagtcctggaaataagaacaaggcaacagatcaacagagcagaataaaagaactccaatctgctataccagaatctattcatatttctatcttatttctctataatcaactactattaatcttatttagaa

SEQ ID NO: 876253 - DNA, 581 bp, Homo sapiens
ggtaataacatacttttccaagctaaaggaatatcttctaacccatcacaaggaagctaaaaaccttgaaaaaaaggttagacgaagggctaaatagaataaacagggtaaagaagaccttaaatgacctgatggagctaaaaccatggcaagagaacttcgtgatgcatgcaaagtttcaatagccaattmaatcaagtggaagaaagggtatcagtgattgaagatcaaattaatgaaataaagcaagaacccaagtttagagaaaaaagagtaaaaagaaatgaacaaagcctccaagaaatatgggactatgtgaaaagaccaaatctatgtttgattggtgtacctgaaagtgacagggagaatggaactaagttggaaaacactcttcaggatattatccaggagaacttctccaacctagcaaggcagaccaacattcaaattcaggaaatacagagaacaccacaaagatactcctcaagaagagcaactgcaagacacataattgtcagattcaccaaggttgaaatgaaggaaaaaatattaagcacagccagagagaaaggtcggattac

SEQ ID NO: 876254 - DNA, 587 bp, Homo sapiens
aatagggaacttcaacagcagactagaacaagaagaataaaacataaataaacccagagatagagagagatagatagaacaagaagaataaaaaataaataaacccagtcagaggatgatttataattatttttcttttcagaaaaaagaatgaagaaagcctgtttaatctatgggcaccatcaaaakaattaaatttgtattacagaatttctacaaggagaagagaaacaaaatgacagaaagcttatttaaaatatagaggctgaaaacttcccaaatctagggaacaatgtaaacatccaggtatataaagctcaaaagtcttcaattcattcaccctaaagaagacctcaccaaaacatagtatgattgacctgtcaaaaatcaaagacactcagaaataaagccacaaacctacaaccgtctgatctttgacaagaccaacaaaaacaagcaatggggaaaggactccctattcaataaatggggctgggtaaccagatagccatataggaaagactgaagctggacccctgcctttcatcatataaaacattaactcaaaattaaagagaggctgagca

SEQ ID NO: 876255 - DNA, 622 bp, Homo sapiens
ggccatttatttgctcatgcatatgagcataggtggttggaagcaaccaggctacatcttgaacatgctgctaagaaattccaccaaatgccctaaattatctctcccaagttcaaagttccacagatccccagggcaggggcaaaatgcaaagaaaaagaaaaaagaaaagaaaagaaaactgtcaacagagtaaatggacaacctacagaatgagagaaaatattcacaaactgtccatctgacaaaggcctgatatcaagaatctatgcagaacttaagtcaaaaagcaaagagcaagtaatctcattataaatgagcaaaggacatgaacagacacttctcaaaagaagacatatgagtggtyaacaaacctataaaaaatgttcagtatcactaatcattagaaaaatgcaaatcaaacccacaatgagataccatctcacgccagtcagaatggctattcaaaagtcagaaaacaacagatgttggtgaaactgctgaaaaaaagggaatgcttatacactgttggtgagaatgtaaattagtccagccactgtagaaaacagccttgagatttctcaaagtacttaaaacagagctatcattcaacccagccatc

SEQ ID NO: 876256 - DNA, 503 bp, Homo sapiens
gcaaaactatcattctaaaggtaaggaaaagaagagacatttctagataaagagactgagaaaatttattgctagcgcatctgacttaaaaggaagtccttcatgctgataggaaatgacaccatatggtaaattgaatttatagaaaaataggccaggtgcagtagctcatgcctgtaatcccagcactttgggaggccgaggtgggtagatcacctgaaagtcrggagttcaagaccagcctggtcaacatggtgaaaccccacctgtaatgaaaatacaaaaaattagctgggcgtggtgacggacgcctgtaatcccagctactcaggaggctgaggcaggagaatcacttgaatctgggaggtggaggttgtagtgagccaagattgtgccactgcactacagcctgggcgacaaaagcaaaactccatctcaaaaagaaaagaaaagaaaaagaaagagcataaagagcagtggaaatggtaaatatgtgggtcaat

SEQ ID NO: 876257 - DNA, 503 bp, Homo sapiens
gcaaaactatcattctaaaggtaaggaaaagaagagacatttctagataaagagactgagaaaatttattgctagcgcatctgacttaaaaggaagtccttcatgctgataggaaatgacaccatatggtaaattgaatttatagaaaaataggccaggtgcagtagctcatgcctgtaatcccagcactttgggaggccgaggtgggtagatcacctgaaagtcaggagttcaagaccagcctggtcaacatggtgaaascccacctgtaatgaaaatacaaaaaattagctgggcgtggtgacggacgcctgtaatcccagctactcaggaggctgaggcaggagaatcacttgaatctgggaggtggaggttgtagtgagccaagattgtgccactgcactacagcctgggcgacaaaagcaaaactccatctcaaaaagaaaagaaaagaaaaagaaagagcataaagagcagtggaaatggtaaatatgtgggtcaat

SEQ ID NO: 876258 - DNA, 521 bp, Homo sapiens
agtgcaaagaattctggcatttgtgtaaatcacttacctggatatagtacattatctcattaaacgtgacaacaaagttcaaattaatacttcctaaaattaatacttcctaagcaatagttctttagttcttaattccacataaggtttgaaagagttaatttatgttaagtgattatttaatctgaatcatattttctcaytctaaagggaaaagtcatcaatataaaaatggatgctgaaaagaaaaagtgttcaaattcaattaactgtgtgtgcataataattgacttctgatttttctgattttcagataatccatcccctgctactcttactagctttaagaaaaatatttgacatcttcttagattctaaaatcactttattcatactcatattcaagggtcatggagaccttaaaagccaacagtatttttgaacttcacggctccctcatcctcccacagccacactccttgctccagccctcgggccccccgcttgtccctctacacacc

SEQ ID NO: 876259 - DNA, 599 bp, Homo sapiens
attttttgtcacttctttcatcaggatcttgttcatgggcctctctgtacttggtctccagggacctttccccaatcccaacgcagccaactcctgcttgtccccagaagtcagcttagcagctcttcctccaagaaggcttgcccacccacagctctggaccaggagttcccccacccccatggccacctgtactgcccctcgcatgacaggtatcccatactccagtgaaagttcctgttgattagayagggagctctctggacttgtaccatttcatgatcacttcccaaacatctagtgcagtgcctggcatgctacttatgtcaaatgaataaacaaatgaacaataatatctggagaacccttcctgttcttaaattctagggaccaacaagacagcaggagtccgctgggtagctctgcccaactcattcagctttcttttataacctaagaataaaaataatccctgaaaagggaggcatacgttttgaaaatagctccatcatgctgcaaattgcctaagaagatactaaattttatttattctagatttaaggaatgaaagtaattacccaattgacaaaaactcaaat

SEQ ID NO: 876260 - DNA, 646 bp, Homo sapiens
aaatatgtctttattggtttctctgttcttagctttatcagtcctaaaaataggctaaaggagatgtatctatttgagcttttctgtgatttgagcttacctataaaaagcttactgtactgcagactggtgaaccacaaatgcatttgttttaaaataaggaagctttagtgtttgggaagtttgatctgcagttgaaggagaaaaatcaatatttaagtcacttagacatttacacacataaatcaactctatggcattacttttcccagcttctgtatattaggataatagtgtaaattctagcacctagtaatatatactttrtaagttataaatgcattttcaatttgttatgatatataggcaaacaacatactctctgtattaggaagacacatagtgtatagattaaaggaaacggcgatccaggagcagtcatagctagtcagagcacatccagagcactgtgatcaattcatgacaccaccatttaagagagtagttgacaaattagacttcatccatagaggtgtgaccaggatgttgatggtcccaacagctgaacaaaaggtttggaaaggtaatgggagtatttaaaaagagaagacttaggaaaagcatgattgttttcttggaacatttg

SEQ ID NO: 876261 - DNA, 646 bp, Homo sapiens
tggtctggaactcccgacctccaggctatccacccacctcagcctcccaaagtgctgggattacaggtgtgagccaccatgcccggccagataattatttttatgccatttttatttggccattgcctcatttccagcaagtatgggggaaggtgttccctaaggaacccttaatctcttacttctgaatacaatgattcttttttaaggggaaacaaccatgatacctcaattgtccacttgaaaattaacacccagcttttactattttgactcacggtaaccttgcttttcctggagccttgtcttggatctgtctccaaagtgagtcagaaagaaagtggctctgtttacatrtggaagcatttgaagtcatttataataaattttgttatggtttcaagtcaggaattagctaattttaatctagaaataaaagcctctattatgtagcttacacatgaggaatctaagtcttaagagggttaggatgacttccctaaggctacacctccatttctaggcatattagagacatcagtctaccataactacctgcctaggttcttgaccttctatttcaagctccttaattttcatctattcattcatccacccgttcattcattcactcattcaaaaatat

SEQ ID NO: 876262 - DNA, 624 bp, Homo sapiens
aaaaagcctggggtcttggcaagttgtcaatatgacctaagtcacttagaaagccccgttttaggaatcccagcacagttgttagggacatagcatcccagagaggtgtggctgaggctgaatccaggccacttcagtcccactccttgggcaggtgacacagtctttggggatttgcttcctcctttttgaaatggsggcaataggtcctaccttgcagaatggttaaaggagacaatccaagcgaagagctgagggtagaacccagcaaaagacacctcttatggtcctccttttactcattatagaccccacctttcatagttctagaataaggtgttaagtcccctgcagagatgcactctggcaagagaaggaggcagggaggccgacgaatcgctctcaattaacctgcagggagccctggactctagttgaccgcacagctggttagaggagacagctgagaaaactgacttaggtgggaatgtttcggagggaacgtttcttaggcaagttttgattgtggagtagcggggagggcacaggagaaagggagaccaaccagggagccaggctctggggtcaccacagtccagcatggccggctgcaccaggggaggt

SEQ ID NO: 876263 - DNA, 624 bp, Homo sapiens
aaaaagcctggggtcttggcaagttgtcaatatgacctaagtcacttagaaagccccgttttaggaatcccagcacagttgttagggacatagcatcccagagaggtgtggctgaggctgaatccaggccacttcagtcccactccttgggcaggtgacacagtctttggggatttgcttcctcctttttgaaatgggggcaataggtcctaccttgcagaatggttaaaggagacamtccaagcgaagagctgagggtagaacccagcaaaagacacctcttatggtcctccttttactcattatagaccccacctttcatagttctagaataaggtgttaagtcccctgcagagatgcactctggcaagagaaggaggcagggaggccgacgaatcgctctcaattaacctgcagggagccctggactctagttgaccgcacagctggttagaggagacagctgagaaaactgacttaggtgggaatgtttcggagggaacgtttcttaggcaagttttgattgtggagtagcggggagggcacaggagaaagggagaccaaccagggagccaggctctggggtcaccacagtccagcatggccggctgcaccaggggaggt

SEQ ID NO: 876264 - DNA, 624 bp, Homo sapiens
aaaaagcctggggtcttggcaagttgtcaatatgacctaagtcacttagaaagccccgttttaggaatcccagcacagttgttagggacatagcatcccagagaggtgtggctgaggctgaatccaggccacttcagtcccactccttgggcaggtgacacagtctttggggatttgcttcctcctttttgaaatgggggcaataggtcctaccttgcagaatggttaaaggagacaatccaagcgaagagctgagggtagaacccagcaaaagacacctcttatggtcctccttttactcattatagaccccacctttcatagttctagaataaggtgttaagtcccctgcagagatgcactctggcaagagaaggaggcagggaggccgamgaatcgctctcaattaacctgcagggagccctggactctagttgaccgcacagctggttagaggagacagctgagaaaactgacttaggtgggaatgtttcggagggaacgtttcttaggcaagttttgattgtggagtagcggggagggcacaggagaaagggagaccaaccagggagccaggctctggggtcaccacagtccagcatggccggctgcaccaggggaggt

SEQ ID NO: 876265 - DNA, 621 bp, Homo sapiens
acccagtctcaggaccaccaactactcctgtttatttgggactttccaggtgacagcactaaagtcttacatcccagggttttcctgggactgtctgaattttaaaactgagagtcctacattccagaaacccccttagtgctggacaaaccaagatggttggtcaccctgccaggtccccacccakagaagggcaaccaggtcataaaggtaccggcaaggacgtggtactgtttttagaggagcctagtcaacctgccctgggaggagacccagagctgctcccactagcccccctggctccctacccaggaagaggcatttgctgatgtctctgctcctctgggtgatgtcctggctcaggagctggtatctgccagttgtcacctgattctctgaaggctgagtaaggctggttttgcagttctcttttgtgttgtaattggttttctttttatcagttgtggaaatgtgtcttcatattctttgaaggaattgctacggattgcttgtgaaatcctgaaacattttcccttgactcctaggtctaagggggtgccctgaccagcatggatgcctctgcacttgtagcagggcagggccagggacactggcccccag

SEQ ID NO: 876266 - DNA, 707 bp, Homo sapiens
tccatagtgaaaagcatggcttctgttatccttaatgtattaactcatttgatcagtctctttgaatgtagccagtgttctgttgcagccatcccttcttccatataaacatattcattcccaaactcaggttctaactccctgtgtttattttctcctcctgcatgaagtcctcattgtatttggcctctgacaccaagtaaaagctctcctcaccctgcaaaggttttgaagcctcataccaggctggccctgatgcaggacaccagccttgggctctgacatcccacactagaccactcttctacggaaacactctccttactctacttggaacctgatacctgaactggctcacccctctgaatgggtgcccttctcaccctgcagaaggttctggcagcccattctgtgttactatgtgttgccctcaatgaaatgtcttctttaccccaccaaggctctacacccsaggcaaggccatccctctgtggaaatgttctccttattctgctcaggatctgatggccaccaccaggctgcccatctgggctctctccccacgccaagtccacctcttcatatctttcttcccatcctggcatggacatcctgttcaccctgctggtgtgccacgtgccactcctctgtgaggacaccctcctcaccctgcttggacataattgattttttttaacttttatttt

SEQ ID NO: 876267 - DNA, 617 bp, Homo sapiens
aacttgtaatcatgttactccccaaatacaaaaatttttggatgatattcaaggttctttgacaatttggaccttgctttcatctccagttacagctcctctggtatattcttaatctttcctgaatacacatacattcattcattcattcatccatccatccatttgtccacagatgtttatatgtcagctatgtggtgctgtcctaggtactttgaagatacagaggtaaataaatatgactgccgtgattattgcccattagtgcttatagaatgccatgtatattatttctgtctttaaccatgctatttcaaatgtacttttactatttatagaggttctattccttttttataccctactcaagtgtcatctmttctaaagcgttttatgactttctcaggtagtgcttctttgtgctccagtaataatttatagtaatatctctattatagtatttactgtatgtgatactcactcgcttatagaggatctctcccattaggttgaattttagggcacgagaaagatgaaagaggaacgtagaaatatggattgaggcaagggatagaaagaggcaagaagaggagagaaggaaaacagaagcagtatga

SEQ ID NO: 876268 - DNA, 674 bp, Homo sapiens
aatgactattattaagtcaaaaaataacatgttggcgaggatgtggagaaaagggtatgcttatatactgttggtgagaatgtaaattagtacaccctctaaagaaaacactatgtagatatctgaaacaattaaaagtagatctaccattcaatccagcaatcccaatactggggtgtatacctaaaggaaaagaaatcattatatcaaaaaagatacctgcacttctatgtttatcatagcactattcacagtagcaaaatatggaatcaacctaagtgttcatcaacagaggattgaataaagaaaatgtggtttacacataccagggaatactactcagccataaaaaattgaaatcatgtcttttgcagcaacatggatggaactggaggccattatcttaagtaaaatacctcagaagcataaagtcatatactgcatgatcccrcttttaagtggaagctaggtaatatttacacacagagagtgtaataatagaaactgaacatagaaattggacatagagagtggaataacagaaactgaagattcagaaaagtggagggaaagtgggtgggtgagggatgagaattgcctaatgagtacaatgtactctatttgggtaatggttacactaaaagcccaggcttcaccactatgcaatatatcta

SEQ ID NO: 876269 - DNA, 609 bp, Homo sapiens
tctcattgtggtttgatttgcatttctctgatggcaagtgatgatgagcattttttcatgtgtatgttttctgcataaatgtcttcttttgagaagtgtctgttcatgtcctttgcccactttttgatgggttttttttttttcttgtaaatttgtttgagttcattgtagattctggatattagccctttgtcagatgagtagattgcaaaaatgttctcccattctgcaggtkgcctgttcactctgatgttagtttcttttgctgtgcagaagctctttagtttaattagatcccatttgtcagttttggcttttgttgccattgcttttggtgttttagacatgaagtccttgtatttttataattcaactcagcctggaagttttctgcttatataaattaagtaagaattcacttcctattaatttcacttctaggaacactctagccagtgccagaactctacacaagtcagactattctgattgctgctgtctgtgctgtccactctagtagctacactgactttgcccttgacagttgagtgccaccacttggcccatgccaccttgggatacaattattcctatagcatttaagttttc

SEQ ID NO: 876270 - DNA, 659 bp, Homo sapiens
cattgaatctaaatgtgaatacaagagaagctttgcttgttttaatgatttcacaacttctaatattacagcaaaactagccttaactaataccgcttaatgggttattgatctaatgttctccctcataaccacaaaactgtttgaaaaagattgtgtagggataaataaatgtaatccttctctcaccctakggaaagtgcccacatatatcttgctgaattcttaaagtggtatttgccttaaaaagaataataaccatggcaaattgttgaatagaaaagacattcacaactagtggtgacaaatattctaaggaagaaggctttagcagttttctacattccactgatttactctgtgtgagtcttttgcaatctatcatatgagaaaaaaaattagtgtgcctgcttaaggcaggcagctctaaggtagcattcattcattgagcaaaatatacagtaaacactaactatgctagagagtaagggaagcaccagtgatgaagacatggtttctatattcctaaatcttaagagaaagactgtagaaatctaaaaaccacacacgcagcaaagtaatgtaattagtggatctggatttcagcctacctatgagtaataaacataagataaaatcctggtattttccataagttc

SEQ ID NO: 876271 - DNA, 463 bp, Homo sapiens
ggggaggcctcagaattatggtgggaggtggaaggcacttctctggcagcggcaagagaaaaatgagagagaagcaaaagaggaaacacctgataaacccatcagatcttgtgaggcttattcactatcacaagaatagcatgaaaaagaccagcctccatgattcaattacctccccatggatccctcccacaacttctgggaattctgggagatatgattcaagttgagatttggatggggacacagccaaacyatatcattccacccctgacctctacaaaatctcatgtcctcacatttcaaaaccaataatgccttcacaacagtcccctagagtcttaactcatttcagcattaacccaaaagtctacagaccaaagtttcatctgagacagggcaagtctcttctgcccaggagcctgtaaaatcaaagggaagctagttacttcctaggtaaaac

SEQ ID NO: 876272 - DNA, 579 bp, Homo sapiens
atatatcttatatattgtgggatcacaaggtcccacaataggctatctggaagctgaggagaaagaagagccagtctgagtgccaaaactgaagaacttggagtgcaatgtttgagggcaggaagaatccagcatgggagaaagatgtagtctgggaggctaggtgagtctctgctaaaatgtaacaagagtcacmtttgctccagtttccaacaagttcctcttctccatctgaaaccacctcagcctggaccttattgttaatatcactatcatttttgtcagagccattcaagtctctaggaggttccaatgtttcccacatgttcctgtcttcctctgagccctccagagtgttccaatctctgcctgttacccagtttcaaagttgcttccacatttttgggtatcttttcagaaacaccccactctcctggtatcaattcaatgtattagtccattttcacactgctgatagagacatacccgaaactgggaacaaaaagaggtttaattggacttgcagttccacatggcttaggaggcctcagaatcatggtgggaggcagaaggcacttc

SEQ ID NO: 876273 - DNA, 676 bp, Homo sapiens
ttattgttaatatcactatcatttttgtcagagccattcaagtctctaggaggttccaatgtttcccacatgttcctgtcttcctctgagccctccagagtgttccaatctctgcctgttacccagtttcaaagttgcttccacatttttgggtatcttttcagaaacaccccactctcctggtatcaattcaatgtattagtccattttcacactgctgatagagacatacccgaaactgggaacaaaaagaggtttaattggacttgcagttccacatggcttaggaggcctcagaatcatggtgggaggcagaagrcacttcttatatggtggcagcaagagaaaaatgagagaaaagcaaagaggaaacccctgataaactcaacagatcttgtgaggcttattcactatcacaagaatagcaggggaaacaccagcccccatgattcaattacatccccctaggtccctcccacattatatgataatgtgggtgatacaattcaagttgatatttgggtggggacacagcagaaccaaacttggagtccacaaactgcagaaaatttagaagctacagaattatttcaggaaagttgctgaacaataagcaggaaaaagaaaaacaggaatagcaaaaacaaatgttagagaattaataaatctgatacca

SEQ ID NO: 876274 - DNA, 520 bp, Homo sapiens
tttacaatttggcatgtttttgcagtggctggtaccacttgttcctttccatgtttgatgcttccttcaggagctcttttaaggcaggcttggtggtgacaaaatctctcagcattagcttgtctgtaaagtattttatttctccttcacttatgaagcttagtttggctggatatgaaattctggattgaaaattyttttctttaagaaggttgaatactggcccccactctgttttgccttgtagtgtttctgctgagagatcagctgttagtctgatgggcagccctttgtgactatctcgccctttctctctggctgccctgaacaccttttccttcattttaaccttggtgtatctgacaattacaagtcttgtgtgcacttcttgaggagtatttttgtggtgttttctgtatttcctgaatttgattgttggcctgccttgctatgtttggaaagttctcctggataatatcctgaagagtgttttccaacatggttccattctccccatcac

SEQ ID NO: 876275 - DNA, 520 bp, Homo sapiens
tttacaatttggcatgtttttgcagtggctggtaccacttgttcctttccatgtttgatgcttccttcaggagctcttttaaggcaggcttggtggtgacaaaatctctcagcattagcttgtctgtaaagtattttatttctccttcacttatgaagcttagtttggctggatatgaaattctggattgaaaatttttttctttaagaaggttgaatactggcccccactctgttttgccttgtagkgtttctgctgagagatcagctgttagtctgatgggcagccctttgtgactatctcgccctttctctctggctgccctgaacaccttttccttcattttaaccttggtgtatctgacaattacaagtcttgtgtgcacttcttgaggagtatttttgtggtgttttctgtatttcctgaatttgattgttggcctgccttgctatgtttggaaagttctcctggataatatcctgaagagtgttttccaacatggttccattctccccatcac

SEQ ID NO: 876276 - DNA, 520 bp, Homo sapiens
tttacaatttggcatgtttttgcagtggctggtaccacttgttcctttccatgtttgatgcttccttcaggagctcttttaaggcaggcttggtggtgacaaaatctctcagcattagcttgtctgtaaagtattttatttctccttcacttatgaagcttagtttggctggatatgaaattctggattgaaaatttttttctttaagaaggttgaatactggcccccactctgttttgccttgtagtgtttctgctgagagatcagctgttagtctgatgggcagccctttgtgactatctcgccctttctctctggctgccctgaacaccttttccttcattttaaccttggtgtatctgacaattacawgtcttgtgtgcacttcttgaggagtatttttgtggtgttttctgtatttcctgaatttgattgttggcctgccttgctatgtttggaaagttctcctggataatatcctgaagagtgttttccaacatggttccattctccccatcac

SEQ ID NO: 876277 - DNA, 598 bp, Homo sapiens
tatctcattctggttttgatttgcatttccctgataattagtgatgttgagcattttttaatatactagttggctatttgtatatcatcttttgagaaattctatacctgtatcaaaatctcacatgtgcctcataaatatgtacaaacatatatcaattaaaatattttttaatttacagaagagaaatacagtctaaagccctataccagaattaattcaatgtgaatccacactttaacaacatccaagtggttcttgtaaacytgaaagttgaataagtaattgtctagcacatgtctaattcaattacaatttttaaaacaaattgccttaaccaagtctcttcaaaatattaaagttgattttcataaaaataacttccttgcttgctctctcttacacattagtattttactgggttaggtgtgtgcacaaaacactcgatatatcacgcctgagaaaagtgggcttgaaaagttggcccttgttgatattaatggaacttgactgccaaacaggtgtctaaactggtataaagttgtccctaattgataaaagtggcttgctgtgcctaaattgtacaaacaatgccatt

SEQ ID NO: 876278 - DNA, 583 bp, Homo sapiens
agttctcttagcatgatcaactcttagtaaagtacaaaaatttgtaccaattttctaccaattaatcagggttggtgacttgcccctccccagctttaataaggtataattgacaatttaaatttatatgtatttcaggtgtacaacttgatgactctatacacacacacacacacacacacacacagcaaaataattattttttgatgagaatactaaaggtctctccacttaaataatacagcattgttaactatagttgcattattgtacattaggtctccagaacttattcatcttgtataactgacactttttacctctttaccagtatctctctattttctgccccccctgccccacccccacccctggcaaccaccccactatgctctgcttcaatgagtttgactattttacatttcacatataaagtgatgtattaawacaaagacaaaatacagaaggaaaactgcctcaaggaaaaagtacaattcgaattttagatgagtttttcttatgtaaaaataggctagaatatttatagaaaatctattgataacaaaaaacacattataataac

SEQ ID NO: 876279 - DNA, 653 bp, Homo sapiens
tatttttccttactaagtgtgattctctctgctattttctaatctattttgcttaattagaaaaagttggaatatctaaattgattttacccccgctaacagattgtgattcatacattatgtaacactgctcaagttgatttgcagttttgttcattcttttattttattaattcaacatataattatttagcacagtagttcaattttcattctgggcagtacaaatctgaatgaaacaatgatttgttcagaggaacatagaatctacttgagcagtctgttaaaagtgaaaatactattgacaagagacatgacattgaagattttcaagtggaggtattgtgattatacctatactaggaaatcaattytggtgttgacataaatgttgcataggtagtggggagaaatcagaatctagtataccagtttagggctgttgcagttaagtcaagaaacattatgtgaacccaaatttaaatgttataatagcattagataagtgagagttgagagatgacaatataaaatacatgtaggatatagactcagtaagatgcagtaatagggtgatatcagcataagaatgctctcgtgcagtggaggatgcatgtaacatcatttacttaacaaggggaaaaagtgagaga

SEQ ID NO: 876280 - DNA, 480 bp, Homo sapiens
ctgcttcagtggctttccttttgtctcctcattagcattgtcctctggcaagacataacatctacataccacaatgtagtcctgtgcttttctcagttccaacacttttcaattttatatacctattctctagccaaacaggttattattttacaaaaawgccaaaattttttatctgtagccttgctttacactattttgcctggaatttccttcttcacccaaaaagaggtactattccttcaaaataatccctaatggcacctcctaattgacaaagcaggacctaatctgtcctcatgtgaattcccacagaacttgacttgtacctctgtaattacagatttataatggtttacattaatagttatttgtgtatttgtctcattcctctcctggtatgtaatatttctaacaggcccaaaactacactgtgtgcgtgtataaagttatatttgttataattaaagttaagttgaa

SEQ ID NO: 876281 - DNA, 628 bp, Homo sapiens
aagattgaattgtatttgtcaatgcaacatcaatcgggtcttatacttcgttgttgtatttggcacttcagtaaggtacttttgcacaattatgtcaacacactgagttagcctttgtcaagaaaggcaagcacttaaattcttgtcagcctatcatgtcattaaaaaaaggatctaagagtcaagaacaataagcaactattcttggcttcattagtgcctgtattttggtattttccttttgacactctttctcaggcacatctgggcaagtctagttacattaagcctagtttaaaggaaactgaaaattccacagtgaagttctccacttgactgacagatatttcactctcaggaagagtggaaattgagtatgattgtctttcactttgagatgcgtttgtaatacgaacaggtgcatccaagctaagttggggttagtaatgaatggaagaatctgtagtgactgttrgaaccaaaattaatgtgaataaagcagagaggctgccagagagatgagatcaagtacagattaagtaccacaagtctcattagttggtacctaggacaataaatagtagatggtttaattatgttttataatgaaagaaagcatatattgagg

SEQ ID NO: 876282 - DNA, 629 bp, Homo sapiens
tagatgtctattagatccacttggtccagagctgagttcaagtcctggatatccttgttaatttactgtctcgttgatctaatattgacagtggggtattaaagtctccattattattgtgttggagtctaagtttctttgtaggtctctaagaacttgctttatgaatctggatgctcctgtattgggtgtgtatayatttagtacagttagctcttcttgttgaattgatcgctttaccattatgtaatggcctcctttgtctcttttgatctttgttggtttaaagtctgttttatcagagactaggattgcaacccctgctttttcttgctttccatttccttggtagatcttcctccaactctgtagtttgaacctatgtatatctttgcatgtgagataggtctcctgaatacagcacactgatgggtcttgactctttatcccatttgccagtctatgtcttttaattggggcatttagcccatttacatttaaggttaatattgttatgtgtgaatttgatcctgtcgttatgatgctagctggttatttcacacattaattgatgcagtttcttcctagcatcaatggtctttacactttggcatgtttttgcagtggtt

SEQ ID NO: 876283 - DNA, 629 bp, Homo sapiens
tagatgtctattagatccacttggtccagagctgagttcaagtcctggatatccttgttaatttactgtctcgttgatctaatattgacagtggggtattaaagtctccattattattgtgttggagtctaagtttctttgtaggtctctaagaacttgctttatgaatctggatgctcctgtattgggtgtgtatacatttagtacagttagctcttcttgttgaattgatcsctttaccattatgtaatggcctcctttgtctcttttgatctttgttggtttaaagtctgttttatcagagactaggattgcaacccctgctttttcttgctttccatttccttggtagatcttcctccaactctgtagtttgaacctatgtatatctttgcatgtgagataggtctcctgaatacagcacactgatgggtcttgactctttatcccatttgccagtctatgtcttttaattggggcatttagcccatttacatttaaggttaatattgttatgtgtgaatttgatcctgtcgttatgatgctagctggttatttcacacattaattgatgcagtttcttcctagcatcaatggtctttacactttggcatgtttttgcagtggtt

SEQ ID NO: 876284 - DNA, 544 bp, Homo sapiens
gtaccatcttctctttgtacctctggtagaatttggctgtgaatctgtctggtcctaaactttttttggttggtagactattaattactgcctcagtttcagaacttgttattggtctattcagggattcaatttcttcctggtttagtctttggagggtgtatatgtccaggaatttatccatttcttctagattttctagtttatttgcatagaggtgtttatagtattctctgatggtagtttgtatttctatgggatcagtggtgatatcccttttatcattttttattgcatctatttgattcttctctcttttcttctttattagtctggctagcggtctatctattttgttaatcttttcaaaaaaccaactcctggattyattgatttttgaagggtttttttgtgtctctatgtccttcagttctgctctgatcttagttatttcttgtcttctgctagcttttgaatttgtttgctcttgtttctctagttcttttaattgtgatgttagggtgttgattttagttcttttcta

SEQ ID NO: 876285 - DNA, 471 bp, Homo sapiens
gcagcctgggcgacagagtgacactctgtcgaaaaaaaaaaaaaaaaaaagttaagcccaaaaagtaagtaaggaagaggtttggaattagatatttgttgtatgaatgagtgagctaaagtgcaaaagaacgggcagaataactgagctggtacagagggaaaaaatcacatttaaaatctaaaaatatctgcttcttagttcaggctttcccacttagcagctttggcaccttaggaacacttaacttatctgagcctctrttacttctaaaaagtgcataaagtgcagactaagacagtttttttggcaaaattcagtcagactacatcaagtaaactccctaagtctcctagtataattcatggcacaaaaaattggggaaaaaacagggaggatatgattataagttcagtttatgttttttgttgagtgaatgtctccagtcatagagatgcaagtgtagataca

SEQ ID NO: 876286 - DNA, 593 bp, Homo sapiens
gcttaggattgctttggctattcaggctcttttttggttccaaatgaattttagaatgacttttttctaattatgtgaaaaaatgtcataggaagtttgatagaaatagcattgaatctgtaaatagctttgaggagtacggccagtttaacaatattgattcttcctacccatgaatatggaatttttttgagttgtttgtgttttctttgatttttttcagcagtgctttataattctcattgtagaggtctttcaactccytagttagctgtattcagaggcattttaaggcattgaagggacatacatcaaaatagtaagagccatctacaacaaacccatagccatcatcatactgaatgggcaaaagatagaagcattccccttgagaaccataacaagacaatgatgcccactctcaccactcctattcaacataatactggaagtcctagccagagcaatcagaaaaaagaaagaaagaaaaggtatccaaataggaagcgaggaagtcaaaatatctctcttcacaggcaatataatactatactagaaaaccccatagtgtgtgcccaagggctcctagatct

SEQ ID NO: 876287 - DNA, 639 bp, Homo sapiens
tcggaggctaggataggtcccttcagtcgcaaagaacaagggcgtgcaagggggcgcagaatgagaaggcaggctgtggctctgtgtgaaggcccaggatatggagctgctctgggtctactgagagggtagcatggcttccctgccctcccacagtgacccagagagtgcctcacgcttccagccactccccagggaatgggccagaggaactgaagacagctgagtcagcagcctgacgactcytgagaaagggagcaggagaggattgggcagcctggaggggctttcaacagaatccagtgaaggcgtttgatatgggaagggcttctgagagcaaggcttagatggattagtgcctccagcgtggccactaaccccacccactggagacatttctcctcctcctcctcaaagaaggaattcaccagcctgggcaaaggcactgtaactagagaaacaggatgcaggaagggaaggagttcctaaagctgtgggaccatgccattccacaggtcccacctaggggctggcaggctggctgccgggccaataccaccagacctaatgggagccaggctacactagctgagcttccagggtgcagccaggggtcagggtggcccaagtcaagccaat

SEQ ID NO: 876288 - DNA, 639 bp, Homo sapiens
tcggaggctaggataggtcccttcagtcgcaaagaacaagggcgtgcaagggggcgcagaatgagaaggcaggctgtggctctgtgtgaaggcccaggatatggagctgctctgggtctactgagagggtagcatggcttccctgccctcccacagtgacccagagagtgcctcacgcttccagccactccccagggaatgggccagaggaactgaagacagctgagtcagcagcctgacgactcctgagaaagggagcaggagaggattgggcagcytggaggggctttcaacagaatccagtgaaggcgtttgatatgggaagggcttctgagagcaaggcttagatggattagtgcctccagcgtggccactaaccccacccactggagacatttctcctcctcctcctcaaagaaggaattcaccagcctgggcaaaggcactgtaactagagaaacaggatgcaggaagggaaggagttcctaaagctgtgggaccatgccattccacaggtcccacctaggggctggcaggctggctgccgggccaataccaccagacctaatgggagccaggctacactagctgagcttccagggtgcagccaggggtcagggtggcccaagtcaagccaat

SEQ ID NO: 876289 - DNA, 558 bp, Homo sapiens
aaaaatagtggatatgcttgaagaagctatttactttgcatttgagctaagataaaggatggttatccagaatatatttttaaaaacttataaattaattcagtgacgataagtactacaataggaaatttattgaaaatcttgtcaaaatgtctaatggacatgatatgattctcatttccagtagtaattaaggaaatgaaaattaaaatatcaatgagctattattagagcatgaacattggcaaaatatcaatgttttatattaacaaatattaatgataacgcagtgatggggattctcatacactcttgatggaagtgtaaatggtagactattctggaaagcatcttgacaayatctaataatattgtagatgaaaaatattctaccaaccaaaaactctacttgtacatccacaaccaagagaaagtctcacacatatttatactagtattcaatgttaactgtgacattttaattgaaaaacagaaaaaggactacatgctcatcaagttaaaaatggatagatcttttatttctttaaatcctctaat

SEQ ID NO: 876290 - DNA, 556 bp, Homo sapiens
gggacctggtgggaggtaattgaatcatggggcaagtctttcctgtgctgatatcatgacagtgaataagtctcacaaggtctgatggttttaaaaggaggaattcccctgcacaagctcctctctgcctactgtcattcatgtaatatgtggcttgctcctcctggccttctgccatgctcatgaggcttcccagccatgtggaactgtaagtccaattaaacctctttctttgtaaattacccagtcttggrtatgtctttatcaacagtgtgaaaatgaactgatacagtcaattggtaccagtagagtcaggtgctgctgaaaagatacccaaaaatgtggaagtgactttggaactgggtaataggcagaagttggaacagtttggaggcctagaagagggcaggaaaatgtgggaaagtttggaacttcctagagacttgttgaatgactttgaccaaaagcctgatactgatataaataataaggtccaggccaggtggtctcagaagttgatgaggaacttgttgggaactggagcaaaggtgactct

SEQ ID NO: 876291 - DNA, 677 bp, Homo sapiens
ctcagaagttgatgaggaacttgttgggaactggagcaaaggtgactcttgttatgtttagcaaagagactggtgacattttacccttgccctagagatttgtggaactttgaactagagagagatgatttagcgtatttggtggaagaaatttctaagcagcaaagcattcaaaatrtaacttgggtgctgttaaaggcattcagttttattaggaaagcagagtataaaagttcagaaaatttgcagcctgacaatgcgatagaaaagaaaaatcaattttgttgagtgagaaatgccagcctgcagcaaatctgcataattaataaggagtcaaatattaatccccaagacaatggggaaaatggctccagggcatgtcagaggtcttcacagcagcccctctgatcacaggcccacaggcctatgaggaaaaagtggtttcctgggccaagcccagggtgcccatgctgtctgcagcttatgggctcggtgccgtaggttgcacccactccagccatggatgaaaggggccaatgtatagcttgggccgcggcttcagatgctgcaagtctcaagccttggcagtttccatgtggtgttgagcctgcgggtacacacaagtcaagaattaagatttgtgaatctctgcctatatttcacaggatgtatggaaa

SEQ ID NO: 876292 - DNA, 654 bp, Homo sapiens
tagcctgttaatttgggtaccttttggagtgatattttgttaggtggatgtgagcaaattacttttaatagtcgtagcatcctttcaactctaaaagtacctgcttgttcccagatccaagtccctttgtggcagttttcagcatttcatgagwttgaggacataatctcaccccctattgctggaattctctttgatagtcgaaatctttcaaagattgttggctactgttgtttcttagcagggtttggcaggcacaatgacaagtatctgacagacatgtgtttttccattgataagaagaaaagtttcctgagacaagtgtgttgaatattcatgctaaaattttaaaaatgtgttgtacattttcctcctgcccagcacatgcactagtatgtacacgacataaaatggtatcatcagcccccaaacaaacatctataacaaaatcttttcacctggtgctggcaaggcccaggttcacattgtgaactggtgaggcaggaacttcttagtgagattgtctacagctctgttaatattcagctgacagagcctcaccagcatctgctgctagagactatgaacttgtttttctcacaataattaggtgaactgaattatcctcccaggagtattataccagtctgaggt

SEQ ID NO: 876293 - DNA, 667 bp, Homo sapiens
tgtggaagacagtgtggcgattcctcaaggatttggaaccagaaataccatttgacctagcaatcccattactgggcatatacccaaaggattataaatcattctataaagacacatgcacatgtatgcttattgcagcaytgttcacaatagcaaagacttggaaccaacccaaatgcccatcaatgatagactgggtaaagaaaatgtggcacatatacaccatagaatactatgcagccataaaaaaggatgagttcatgtcctttgcagggacatggatgaagctggaaaccataattctcagcaaactaacacaggaacagaaaaccaaacaccatatgttctcactcataagtgggagttgaacaatgagaacacatggacacagggaggggaacatcacacactggggaacatcacacactactcctacaaatacctaatgtagatgacagagtgatgggtgcagcaaaccaccatggcacgtgtatacatatgtaacaaacctgcacgttctccacatgcattctagaacttaaagtataataataataaaaatctatgctatagctaatctatttgaagattaaatgagaaaatttatataaaatgcctgcctggcatatgagacaagctccaaaatatataatcgttcaaaaacaac

SEQ ID NO: 876294 - DNA, 543 bp, Homo sapiens
gcataaactgtttcaattccaagtagttatgtaatatatcatcacactttgcggccataggtaatatatgtgtgttctgccaaaatacctatacagttgcccgagttgctgggaatgtcctagtttctgctgcaagagaacagatcgactatatataacatgaagaaattacttctgggataattagaatgtcaaagagcctccattacagaagaaaacctcactttatgatttattcctgcattctattatcaaacatcctttgtaaaagtcacagcctgggtttttactatctaatattttaatgctgttatgtgtgggttatatatctctttttgttgggaaggaaagaagatcctcatctatctcagctttstagcacatgttcattctctcctggaggttcctgcatggaaaatgcacattgtaaatcctcagagttcaaagcactcaaagaacaaaggcaacaactgaaagcatgacctggctgccctgctaatccccactacccactgtgtctccttgcttgccccacccaaaaga

SEQ ID NO: 876295 - DNA, 587 bp, Homo sapiens
attcacatgccatacaatttgctcacttaaagtgtacaacgtgggattctgcaaccatcatccgaatctaattttagaatatttctgtttcccctttaaaagaaacccatacccatcagctgttaatttgacattctakcacgtcttttggaaaacgtgtgtatacacttctttagggtatctacctagaatagaatttctagatcaaagctttgcatgtgtgcagcttcagtaggcagtgtgaaacagtttttcaaagtgactgtactgagttatgtgtctatcagagcataagagtcgcatttgttacacattctcattaacattcgatatttgcaatgcatttcattttagccattctaatagtatgtggcagtattaaattttggatttaatcttctattctttgataactaatgaagttgaatgcatttttatgtatttcttgaccatttagattttctcttttgagaatcatctgttcaagtcttttgtttgtttttctattaagttgtctaatatttctatcttccttaataccaaaaagagaaggaattccaaataagatcacattttgtggtactgag

SEQ ID NO: 876296 - DNA, 528 bp, Homo sapiens
tgacaaaaaatatattttaaataatatgacaatgaaaaaaaaatccagaagaggtatcagcctttactgtagaggatttggtttgacatctatggaaacagtgccatgctttcattttaggtaattgggctattaaaatcatcaggccgagtgtgggggctcactcctgtaaccccagcactttgggagactgaggcaggtagatcacttgaggccaggagctcgagaccagcctggacaatacggtgaaaccagtctctagcaaaaatcagccgggaggggtgrcatacacctgtaataccagctactcaggaggctgaggtgggagagtcacttgagctggggaggcggaggctgcagtgagccgagaccgcaccactgcactccagcctgggcgacagagagagactgtctcaaaaaaaaaaaaaaaaaataacaacaaaaaaagtctctcttgctttagtccataagacaagtgaaattttaaatattttaaatatttcctgtaagttattgactccctaacga

SEQ ID NO: 876297 - DNA, 644 bp, Homo sapiens
gaaggaagtaatttttgcattacttagaagacatgattaatgaattatataaggaaaagcttttggtctttatcgggtaattcctatgttcctggaagatagcccttctaggatcagatttaaagaataagtctttagaaacagaggcactgacagagttctgagggcttttcacagcctcatctataattgggacttctaagagcagactgtatctcataaggctgatttgagatttaaaaataataataatatgttcaaaaaaattgaactagtgcctggtacatagctgccaataaatattggtcatcattcctatcctcatcatcaacttgagtgtcttaaaacactgagccctgaatagcccctacattctttgaaaataaatatccagctccaggttgtttgrtgcctagctgtctttggtcatacataccacgtcccccatctatggccagcctggtccagtgggtgatcagtgccaatctcattggaaatgtggcattagaggaaaaacataaaggagaaaataaccatgtagacatcagttgggaagtggcaatggtggtggtggtagtgtttcaaacaaaagaaattgctagtgcaaaggccctaaacaaggagtttcattggtatattcgagg

SEQ ID NO: 876298 - DNA, 667 bp, Homo sapiens
gatatctttaatgcatattttttttggatccttcgttctttgttcttagagcaagcaagaaagagaaacagagaaacagacagaaacctacaaacacatctacgaagtttatttgatatatatgagattaaacagagtagctgctccctattgcttttcccactaatcaatgtttctttaaagtcagtaaagattttcactgtgcatttgttttacctaagtattcaaatgccaacagacatcccaaaatgcacgtgcttcagccatgccaaaaaaaatcaagacacaaggcgaggctggagaaatagctagatataaaatcatgcctaccttgtaggccaagtgaaggggaacccttgtctgatgataaatatattttgacaaaatacataarttaaatcttagaatgtcaaatcatgctaaatggagagtctgggtcactatgtaatataatcctactatgttttgcataatgtagatgtttttgataaagaattcacctaaataaatctgaatttaatttggagtttttaatatatatttttaatatttttaaaaggtattcttgaagtgctatcattttgaaataaaatgaaccatcatttaaattatagtcacaaaatgttttaagatatagaatcagaaaataaaatatcttctgtctctc

SEQ ID NO: 876299 - DNA, 600 bp, Homo sapiens
gataaccttttgaaaattcaccatggaagaatgactatcacaggagaactggtacttggaaaccttgaggcattacaagaaaagtctcggtgtaatgtgcaaatgcttataagcaagaaggtgatttgccatgaccttcataaccctagtgtttacaacagtgcctgttctagagtaagcaatcagtagattttttatttttttttttgagatggagtttcactcttgtcacccaggctggagtgcaatggcgggatcttggctcactgcaacctccrcctcccaggttcaagtgattttcctgtctcaacctcccaagtagctgggacgacaggcgcccgccaccacacgcagctaatttttgtattttcagtagagacggggtttcaccatgttgaccaggctggtctcgaactcctgacctcaagggatccacccacctcagcctcccaaagtgctgggattataggcagagccactgcgcctggccccagcaaggtatttttttgaagtccaatgcaagtggtgattgtccgaccaaaaaaaaaaaaaaaagaaaaaatctcaaatatttcctagctagaaaatgtcaccacatcc

SEQ ID NO: 876300 - DNA, 610 bp, Homo sapiens
cacaaaaattaagctatgataatagagaacacagagaattataaattgtgttaaattttgttaatcaatttaatacttagttggccagaaccttcatttggaccccattattaccttaaagaatatgtaacagttttctaaagatctgcatttttcaaatagtactgagtaaaacaaagaaataaatccctaccacttttaagataaaaggcactgaacactgaaagcagctcttactttttcaaatctgataaaacagagataaaaatgaggtcaaattagggtactgacacaaccacaaaatcagactgtatgcatacataagcaatctaagaggcagcatcttaggcaagcagatggaagtcagttatattattatcatttacaaaatgagcaagaagagccaatccacagggcaccaaaactcaaatatctatgactgyggccaaaattaaaatggatattcagatatcaataacagccatagattttgcttctgtcttataactaatgaattttagtgtgcatttgtgactggccttacctgaaggcatcttaagacattgcttggcttctgacagtgatcaacaaagatggtaaccacaggtac

SEQ ID NO: 876301 - DNA, 485 bp, Homo sapiens
aagtttctcaaaggtatttacgatgctttatttcttaatctgtatagattattgggcatactatacttaataccattttagttgtatatctatattttatatactctttacaggtgatatatttcatagaactaatttttaaaatgctacgaatagatgaatccaagctatatctataaacctccataaattccacagcttttcagaggttcacaccttcactgtgtaaactattgtcaccttttatagtgactcagacttccgagttatacatatctgtcactaaatttcaaatacagcgatagtatttttaaagaatactattttgcctgcaacascatttagatgtaggtataatataggaaaagacctagaagacattcataagtacaacacttttattggaggccatagtttaaaattatatttaatattaaattggacactctgggtttgaatgtcagttttcacagattttagttgtt

SEQ ID NO: 876302 - DNA, 661 bp, Homo sapiens
ttcattctattattaggcattacgtatattattaatgatattactaaagagtcatagtgattatttcagtaacttaaggatcatataatctattctatagcaagacagaatttcttaaagttccaggttgttaaaayttgttattcctatctctgcctacattataaaaatgggaacaatattatcttatatttactttccttttcctcaaaaaaaagagagaaatatcaggtgccaagcatagtactatgtgccaaagacagagtgctgagtcagatatgacctctgtcttcaaaaagattacatggatcttttaaatgaatgagctcatttatatgattttgttacacattatatatacaccatttcatattattttatatgagattcttacacattatatataccattgcatattatgtattgtgttacatattatagaatgctatatattatacatttttaattctcaccacttgccaaacctataaaatgtgttcaattgtgtacacataaattcagatctttctgctgtcccttcccattatcctctaatgtgctccaccactctactcaatatttctctgactctttagaaactctcacatattattttgtgctattattctatacacgggttttatccctaagataacaatac

SEQ ID NO: 876303 - DNA, 610 bp, Homo sapiens
cactttcaccttctgtcactcccacaacacaatttaatgagatttggggagatttgtttcctgatttgtttcctttttgcttctggatggccacagacagaaatctggttaagggcaacctctagataagcaatagatatcagcccagagccctctagctgctactcaatccttatgctataccatgtcgcaggggaaagattagacagattaattagtactcattactgtggagccagaagatctcctcttagtatgacaaaacataataaaagccatcacatattgggctcaactggtcagaaagatggggcttcacaccgcagatgcatactttagcrttctctatcctgggacacaaaactaagctaaataaacaaaccaagaaacctttgcttggctctcccgttacctctggtaaccatccaattaatcttttttccttttattcacagcatctcagataattcggtttctatttggaatgcattcttctccaaataacagactgtctgactgattgttgtttaaactggagatgatttttctcacataacaagaagtctggaggtggttgtttgctgatgtttattcagtggctcacaaagtg

SEQ ID NO: 876304 - DNA, 554 bp, Homo sapiens
catgaagctgtggccagcacagtagcacatcagccactttgcattccatctgccctggccttacttccctcattcttcactctcaccatcctgggctggcatctcccagataaagtattggcactgttcccggggagcagcyctatgtaaacctatccctaaaggctgaggaagctgagaggccaaagacagaggctgacaaatgtagtttctctgaaagaaacatttaataataacttaggcacagaagccattgtctcagtagctgcaagaggagatggtggagccctgccattatcccccagaccaagggcttatataccatagggaaagaatgtgtaggacaactgaagttggccctgcagggaaaggcaaaagtattatgtgaatctgcctaaggggaggatttacgctccccaaaacaaaaaataagattgttttgacctaggagcagggtttatggtagcagtagataaattagaagtcttagaggcattctttgaacaggggttaatcagaagtcaacatggcaggttggcatccaagatggagtt

SEQ ID NO: 876305 - DNA, 554 bp, Homo sapiens
catgaagctgtggccagcacagtagcacatcagccactttgcattccatctgccctggccttacttccctcattcttcactctcaccatcctgggctggcatctcccagataaagtattggcactgttcccggggagcagccctatgyaaacctatccctaaaggctgaggaagctgagaggccaaagacagaggctgacaaatgtagtttctctgaaagaaacatttaataataacttaggcacagaagccattgtctcagtagctgcaagaggagatggtggagccctgccattatcccccagaccaagggcttatataccatagggaaagaatgtgtaggacaactgaagttggccctgcagggaaaggcaaaagtattatgtgaatctgcctaaggggaggatttacgctccccaaaacaaaaaataagattgttttgacctaggagcagggtttatggtagcagtagataaattagaagtcttagaggcattctttgaacaggggttaatcagaagtcaacatggcaggttggcatccaagatggagtt

SEQ ID NO: 876306 - DNA, 757 bp, Homo sapiens
gccttattttaggatcttcagcaatagtcatgtatgtttttaaaacattttatttatttgtatttatttatttatttatttatttatttatttatttatttatttagagagagataggaggtcttactatcttactatgttgcccagggtagtgtcaaactcctgggttcaagtgatcctcctcagtagctgggactgcaagtgtacaccaccgaggcgaacttgttctgaaaactttttaaagtctacaggcttatttcagagatgtcagctttactgtcacacagtatcctagaagtagacattacaatgttctaggaagaaaataagactccagattgcccaaagtcatcggccaaaaartaacaaggctattaaatttgtatgtaagatttcagtctctaaatcaacggcttgcttcatgcttttctgcctccaattgtttttgttttgttttgttttggtgcacaatggggttcatattagggaaaaagtgatctagaaagacagctatttagccacggccttaattatctccttcctttctagagtgcaaatttgcctctaatggatggaaatgctaatgattttaaaccttactacaaaaaaaacagtctaaaaatttttaaagaaatactttagcaagctttatatattctattgggaataagacgtcctttaggcaacaattatctacaaaagaaaggaagtcatgagaaaggtgggggtgaaatgaacaagggaatgggatggtggt

SEQ ID NO: 876307 - DNA, 717 bp, Homo sapiens
caggttctcatccaggacattacattttatttgattgccatgtctccttaggcttctcttgactatgatagttttttagaccttccttatttttcatgaccttaacggctttcaagagtattggtgaggtattttgtagaatacctcacttttgaataccttaatagcaacttgtctgatttttttttttttttttttttttttttttttttttaaaaggagtctcactctgtcacccaggctggagcgcagtggcacaatcttggctcactgcaagctccgcctcctgggttcacatcattctcctgcctcagccttcygagtagctgggactacaggtgcccaccacaagcaggcccagctaatttttgtatttttagtagagacggggtttcaccgcattagccaggatggtctcggtctcctgacctcgtgatctgcccgcctcagcttcccaaagtgctgggattaccggcgtgagccaccgcacccggccacttgtctgatgttttaattaggctttatttaggtaaatgcaaataaaaacccataagctaccaatttgcagccattaggatatgaaaatagcaagtgttggtgaggatgtagagaaactggaaccttgtgcattggggaggaaaatgtaaaatgatgtggccactgtggaaaacaatctggcagttcctcaaagattaaatatggagttaccatatgatc

SEQ ID NO: 876308 - DNA, 717 bp, Homo sapiens
caggttctcatccaggacattacattttatttgattgccatgtctccttaggcttctcttgactatgatagttttttagaccttccttatttttcatgaccttaacggctttcaagagtattggtgaggtattttgtagaatacctcacttttgaataccttaatagcaacttgtctgatttttttttttttttttttttttttttttttttttaaaaggagtctcactctgtcacccaggctggagcgcagtggcacaatcttggctcactgcaagctccgcctcctgggttcacatcattctcctgcctcagccttccgagtagctgggactacaggtgcccaccacaagcaggcccagctaatttttgtatttttagtagagacggggtttcaccgcrttagccaggatggtctcggtctcctgacctcgtgatctgcccgcctcagcttcccaaagtgctgggattaccggcgtgagccaccgcacccggccacttgtctgatgttttaattaggctttatttaggtaaatgcaaataaaaacccataagctaccaatttgcagccattaggatatgaaaatagcaagtgttggtgaggatgtagagaaactggaaccttgtgcattggggaggaaaatgtaaaatgatgtggccactgtggaaaacaatctggcagttcctcaaagattaaatatggagttaccatatgatc

SEQ ID NO: 876309 - DNA, 717 bp, Homo sapiens
caggttctcatccaggacattacattttatttgattgccatgtctccttaggcttctcttgactatgatagttttttagaccttccttatttttcatgaccttaacggctttcaagagtattggtgaggtattttgtagaatacctcacttttgaataccttaatagcaacttgtctgatttttttttttttttttttttttttttttttttttaaaaggagtctcactctgtcacccaggctggagcgcagtggcacaatcttggctcactgcaagctccgcctcctgggttcacatcattctcctgcctcagccttccgagtagctgggactacaggtgcccaccacaagcaggcccagctaatttttgtatttttagtagagacggggtttcaccgcattagccaggatggtctcggtctcctgacctcgtgatctgcccgcctcagcttcccaaagtgctgggattaccsgcgtgagccaccgcacccggccacttgtctgatgttttaattaggctttatttaggtaaatgcaaataaaaacccataagctaccaatttgcagccattaggatatgaaaatagcaagtgttggtgaggatgtagagaaactggaaccttgtgcattggggaggaaaatgtaaaatgatgtggccactgtggaaaacaatctggcagttcctcaaagattaaatatggagttaccatatgatc

SEQ ID NO: 876310 - DNA, 593 bp, Homo sapiens
aattaccaaaaaccattctacaaaaaagagaaataaaatttatagggtatattagggaattgtatattgaagttatcctcacccacgaagaccaggtttctgtagttctctaacatcacattcctatataaattctgctgtgcggtgtccaggcattgccactcctccagagagaattctatggccacatccctaaatgtcaacactccctgaaaaacatacaaacacacatacatatttaccaagtggccatgaacagaatttttaatttgactcaaggtaaaacaagagtaaagagaactggttcttacttataggagtgactgatatatttaataaataactttcagcacagaagtatattctctaatgcattctctaactctgagaaaagagagtggcataagatccacaacatcgaggtaagtatgatacttyttcggatgatgaagtataaaattgagggcattaacactaacatgtacatttttgagtgctacatttacatcatacagaataagttgtgtaaatttttcagatggaaaagacatattcagttagaaaatactgctcacatgttaatgtgtacaata

SEQ ID NO: 876311 - DNA, 593 bp, Homo sapiens
aattaccaaaaaccattctacaaaaaagagaaataaaatttatagggtatattagggaattgtatattgaagttatcctcacccacgaagaccaggtttctgtagttctctaacatcacattcctatataaattctgctgtgcggtgtccaggcattgccactcctccagagagaattctatggccacatccctaaatgtcaacactccctgaaaaacatacaaacacacatacatatttaccaagtggccatgaacagaatttttaatttgactcaaggtaaaacaagagtaaagagaactggttcttacttataggagtgactgatatatttaataaataactttcagcacagaagtatattctctaatgcattctctaactctgagaaaagagagtggcataagatccacaacatcgaggtaagtatgatacttcttyggatgatgaagtataaaattgagggcattaacactaacatgtacatttttgagtgctacatttacatcatacagaataagttgtgtaaatttttcagatggaaaagacatattcagttagaaaatactgctcacatgttaatgtgtacaata

SEQ ID NO: 876312 - DNA, 595 bp, Homo sapiens
ttaatgtgctaaaaaatggattttaagtggagaatttgcttgccaatataactttcagattagttaattaaaataagagacatacactgtccacacgtggaataattaaatcagttaacattgtttttctttgtttgtaaaagaagaatcttattggattcttacacaaagtgtggcaagcataaaatttgttacaaaatatatcttataagttatatttaaaagagagttagtggtaagtaaggattctaaatttaattttctatgatacagcacgttacatttttatacagactcctatttttaagtgtaaatgttaaatgttgaaaaataataaaatgtactctgttgattagacatttgaagtgtttatttttcatactgatattacaatttggagaaaatttttactgttgtataatttttgaagtkggtgaagttcagtctacagtttttatttttagtcacctcactgtaggcaactctttggtcattttctctgaaaaaattttggagatgaggttacgatggctttcagattaaaacatttcctattattttgcatgcaaacttgtttactgtgttcaaacagtgg

SEQ ID NO: 876313 - DNA, 650 bp, Homo sapiens
ggccacaatcaacgtgacgtgagtctcctgcttgaaccctaaccatagagaccattgtgacatggtctctggaagctcaagtatttgaagtggttaccatattatacctgctctttgcccataggagagaatgtgacatatctctgggtccagcacttagttgatgtaactctgctctcctgcctgggctatgcctacagaagagagtgacttatgactgggcccagcacacagatgatgtgattctactrccttgatccttgcccataggaatcatcattacatactttgggcttttctgctagatgatgtgtgtctccttttcttcctgggacctgtccacagaggaggttgtgacatatcacttgacccagcacctacatgatgtgcctcatgccttggcttttcccactgggctgattgtgacatatagctgggcacagcttctaggtaatttaactcttctcttcttcctgagtcctacccataggggtcattgtgacacatctctaagcacttcacctaggtaatatgactcttttcctggatcctcccctaatacggtattgtgacatattcctggaccagcacctaggtgatgttactcttttctcctacctgttacctgttactggaagtgaattcatgtg

SEQ ID NO: 876314 - DNA, 650 bp, Homo sapiens
ggccacaatcaacgtgacgtgagtctcctgcttgaaccctaaccatagagaccattgtgacatggtctctggaagctcaagtatttgaagtggttaccatattatacctgctctttgcccataggagagaatgtgacatatctctgggtccagcacttagttgatgtaactctgctctcctgcctgggctatgcctacagaagagagtgacttatgactgggcccagcacacagatgatgtgattctactgccttgatccttgcccataggaatcatcattacatactttgggcttttctgctagatgatgtgtgtctccttttcttcctgggacctgtccacagaggaggttgtgacatatcacttgacccagcacctacatgatgtgcctcatgccttggcttttcccactgggctgattgtgacatatagctgggcacagcttctaggtaatttaactcttctcttcttcctgagtcctacccataggggkcattgtgacacatctctaagcacttcacctaggtaatatgactcttttcctggatcctcccctaatacggtattgtgacatattcctggaccagcacctaggtgatgttactcttttctcctacctgttacctgttactggaagtgaattcatgtg

SEQ ID NO: 876315 - DNA, 567 bp, Homo sapiens
ccacttttttctgcacataaccagttttccctgtaccatttattattattattacttttgaaacaaagtctcactctgtcacccagggtggagtgcagtggcgccatcttggctcactgcaatctccacctcccaggttcaagtgattcttctgcctcagcctcccgagtagctgggactacaggtgcctgctacctcgcctggataatttttgtatttttagtagacagggtttcaccctgttggccaggctggcctcgaactccggaactcgtgatccaccagcctcagcttcccaaagttctgggattacaggtgtgagccactgcatccagcccccacttattaaatagrcagttattttccctttgttaatttctgtgggctttgtgaaaattaacttggttgtaaaagtgcagatttcagggctttctcttctccattgatctaaatgtatattttcataccagaaccatgtaatactggttactgtagcttgtagtacaattttaaatcaggtaataggaggcctctggttttttttttttttttttttctgacgttgcc

SEQ ID NO: 876316 - DNA, 567 bp, Homo sapiens
ccacttttttctgcacataaccagttttccctgtaccatttattattattattacttttgaaacaaagtctcactctgtcacccagggtggagtgcagtggcgccatcttggctcactgcaatctccacctcccaggttcaagtgattcttctgcctcagcctcccgagtagctgggactacaggtgcctgctacctcgcctggataatttttgtatttttagtagacagggtttcaccctgttggccaggctggcctcgaactccggaactcgtgatccaccagcctcagcttcccaaagttctgggattacaggtgtgagccactgcatccagcccccacttattaaataggsagttattttccctttgttaatttctgtgggctttgtgaaaattaacttggttgtaaaagtgcagatttcagggctttctcttctccattgatctaaatgtatattttcataccagaaccatgtaatactggttactgtagcttgtagtacaattttaaatcaggtaataggaggcctctggttttttttttttttttttttctgacgttgcc

SEQ ID NO: 876317 - DNA, 571 bp, Homo sapiens
agccctgaatatacttgttaattttccgtctcgttggtctgtctaatattgacagtggggtgttaaagtctctcgctattattgtgtaggagtctaactctctttgtaggtctctaagaacttgggttatgaatctgggtgctcctgtattgggtgcatatatatttaggatagttagatctttttgttgcattgatccctttaccattatgtaatgacattttttgtctcttttgatttytgttggtttaaagtctgttttatcagagactaggattgcaacccctgtctttttttttttttttttttttttgctttccatttgcttggtaaatattcctccttcccattattttgagcctatgtgtgtctttgcacgtgagatgggtctcctgaacacagcacaccgatggatctcaactcgttatccaatttaccagtctgtgtcttttaattgaggcatttagcctatttccacttaaggttaatattgttacgtgtaaatttgatcctgtcattatgatgctagccagttgttttgcctgttagttgatgcagtttattcatagtg

SEQ ID NO: 876318 - DNA, 565 bp, Homo sapiens
tttctcacaactcctattcaacacagtattggaagttctgaccggggcaatcaggtgagagaaagcaataaagtgtaatcagataggaagagaggaagtccaattgtctctgtttgcagatgtcatgattctatatttagaaaaacccattgtctcagcccaaaacctccttaagctgataagcaacttcagcaaacttgcaggacacaaaatcagtgtgcaaaaatcacaggcaatcctatacaacaataacagacaaacagagagccaaatcataagtgaactcccattcacaattgctgctaagagaataaaatacctaggaatacaacttacaagggatgtgaaggacctcttcaaggagaactagaaacaactgctcaaggaaataagagaggacacaaaaaactggaaraacattccacggtcatggataggaagaatcaatatcgtgaaaatggctatactacccaaagtaatttatagattcaatgctgtgcccatcaagctaccactgactttcttcacataattggataaactactttaaacttcatatggaaca

SEQ ID NO: 876319 - DNA, 604 bp, Homo sapiens
attaaatcatatggtttagaattggaaacgttcagtttattcagcaccttattttctaggtgtgaatatagagatatcagaggtaaaattatgaccctgaagccacagttcattgcagaggggaaattagaagcaagtcatattatacataattctgtattcagtaaccattacccttaaatgtctactaatttttctcattttcccaagtgaatgatttgtacaaaggtcaccactggaatttacatacttttcagcctaatagtagactggtagtttggcaataaagtaatagctttacaaagaagtcttytgaaaaaaaaaaaaaaaatcctaaagaaagagtattggctcagtaataaaattgaattactgggctgtcaatcagttagattttttaatgtcctggcccttcatgtaattatgcgttaattgaaatcagacattgcgaatagattgaataacttattacataaagtttttaacattttagagaataactagaatgtaataaattgcacatatttacttacagggtacagtcacataagttctaaaataaaaacaaccataaaaccatcactacaatcaagaaaatgaacat

SEQ ID NO: 876320 - DNA, 641 bp, Homo sapiens
aaaagacgaaaatagtaattttttgtacattagacaatgcatgtgaaaacatttatttaaaaataaggtgttacacatattaggggttattagcatgaaaatcaactaaactgattattctaatttcctgaatcacaaatagccacagccttaagacctccaacctcacctctcctgcttcctcgacatcaggctcttagcagatgacctgcctcctacttcacaaagaaaataggccattctataaaattactttaaagttaggctaccagatctacaagcctacctgagtctacactcaacttctcttccatccttctgaatagaggcctgtttctccacaaatgttctattacagtgtatgccttctcagaagtcacatgstattgattatttcctgtctctcctgcatactgatcctttctgtgttggtcattcctattgacatttaaaaatattctgtcgttaaacaaaaccacaccactacaataattacaataataatgaaaaccactgaccttggaattatgttcctgtccacttacctttctaattatcccttccctacactgccagctcctcaaaagagttatctgtaccaattgtctcaaatttctcaattctcattcactccatctttt

SEQ ID NO: 876321 - DNA, 633 bp, Homo sapiens
aagtgttgattccaaaattgttggaaagaccgcaacaaacagaaacataatccttgagttaggagttgagcaggtgggcctcctcttggcctgacagcaggccttgataagtccctttattgctcctgacaaataggctttcagtatctcctgtgaagagaaacagggtggcccagttataaaaggccccttgaaagatttaaatacgctgccttgtgtaagatgaagggtgtcaggaccttgaagaccacagaggaaatagctgtatgctgccaagatttaatacatctagaggttatttagggggccatctataccttggtaaaaggaaataaagaatctgtcaattaaaagagttattaatttttttatactgtaacagaatattaaatctcagtgaacatatttatttacctggctgggtttctgtgcaattgctagccmtgagctgtcagcagtcacttatctttagtgatccccttgcaaattttgtgagaattttcagggttgatagggaatcactattctctttcatgttattacagtaatctaataaaccacctgaataaaaaaattcatgaaacaacacttcagcaaaaggagatcatggcttttggggtataaattttcatt

SEQ ID NO: 876322 - DNA, 619 bp, Homo sapiens
atgctttcttaaggtataatctacctgccatagaattcatttttagtacatatccaattcaaataattttagtacatttacgtgttgtacagccatcactgcaatctaattttagaacatttccatcatcccaaaaagaaatcttgtgcgcatttgcacactattctttttcacattttctagtttcttaaggtagaaagttagattattcaaaatctttcttctttgtaatgtagacatttatagctataaatttccctctgaacactgtactagctatatcctatcaatttgctatgctgtgttttttattcagttcaaaatattttataatttcccttgttctttatttttgatccatgagttatttagacatgtgttgtttwatttccacatatttttggattctccaaatttgctgtggtgttgatttgtaatttcattccattgtggtcagagaacattctttgtatagtttcaatccttttaaactgaggcttgtttttatggcctaccatatggtctatcctggaaaatgttccaaatacatttgagaaggatttgtattcttctactgcggatggaatgttctacagatgtcatttaggtcagttggtca

SEQ ID NO: 876323 - DNA, 628 bp, Homo sapiens
ttattgatagttaaggattaatattgccattttgttgactgttttctgactgtttgtagtccctttgttccttatgctgtcttgcattgtgatttgacaattttgtttggtagtgataatggtttgatttctttcactttatgtatctgctacaggtttctttttctttgtgatcaccatgaggcttacataaaacatcatataacagcctgttttaagctgacaacaacttaactttgttcacaaaaattctacactttcacttctcccccatttatgtttttgatatcacagtttacatatttttatattgtgtatccattaacaaattattgtagctcaaattattattacttttgtcttttaacttttatactagagttaaaagtgattagataccaccattacagtattacaatattcttaatttgactatatactcagtgttaccagtgagttttatagttttatatattgtctttttttwaaaaaaaactatttttcttatgaggaccatctctagaatccaggaagtctctggatctgagggatggaaagttcttcctgctatgaatgagagtggactcttcccatcacccccaactgaaaccacaaacacccagaattt

SEQ ID NO: 876324 - DNA, 628 bp, Homo sapiens
ttattgatagttaaggattaatattgccattttgttgactgttttctgactgtttgtagtccctttgttccttatgctgtcttgcattgtgatttgacaattttgtttggtagtgataatggtttgatttctttcactttatgtatctgctacaggtttctttttctttgtgatcaccatgaggcttacataaaacatcatataacagcctgttttaagctgacaacaacttaactttgttcacaaaaattctacactttcacttctcccccatttatgtttttgatatcacagtttacatatttttatattgtgtatccattaacaaattattgtagctcaaattattattacttttgtcttttaacttttatactagagttaaaagtgattagataccaccattacagtattacaatattcttaatttgactatatactcagtgttaccagtgagttttatagttttatatattgtctttttttawaaaaaaactatttttcttatgaggaccatctctagaatccaggaagtctctggatctgagggatggaaagttcttcctgctatgaatgagagtggactcttcccatcacccccaactgaaaccacaaacacccagaattt

SEQ ID NO: 876325 - DNA, 648 bp, Homo sapiens
tgtggccacctcctttaccatggctgggctagttctgcttagtaggcagccttagagatggcccaggatacacagtgagagactcgggaaaccagttaacatttttgagttagtacaggttcactaggacaagccgttgaggatttcatgtcactccctctgcrtgctgctgagacctctggctgagcagcagatgctccaagtcttgagagatgtgctgagtcccctgggagtcactggctcctctatgggcaattagtgcattactacaattatagctggttttctaggaagccactaaatggcaccctgatgactagaaaaaggtaattttcaaccctatatacctaacttcctattagaaaattacttagacactagacacaatctggcacattaattaataaattcgtttctatgtttcctaatccagactgtaagtagtttaccccatgccctgatccttggatttataaccctttctcattttctcccctttatccatccctttattttttaacagcttgactgaggtataattgacacacaaaaactatatatattttaagcatacaatctgataattttgacatacagatgttccttggtatctgcctgggattggttccaggcccccacgagggtacc

SEQ ID NO: 876326 - DNA, 648 bp, Homo sapiens
tgtggccacctcctttaccatggctgggctagttctgcttagtaggcagccttagagatggcccaggatacacagtgagagactcgggaaaccagttaacatttttgagttagtacaggttcactaggacaagccgttgaggatttcatgtcactccctctgcatgctgctgagacctctggctgagcagcagatgctccaagtcttgagagatgtgctgagtcccctgggagtcactggctcctctatgggcaattagtgcattactacaattatagctggttttctaggaagccactaaatggcaccctgatgactagaaaaagrtaattttcaaccctatatacctaacttcctattagaaaattacttagacactagacacaatctggcacattaattaataaattcgtttctatgtttcctaatccagactgtaagtagtttaccccatgccctgatccttggatttataaccctttctcattttctcccctttatccatccctttattttttaacagcttgactgaggtataattgacacacaaaaactatatatattttaagcatacaatctgataattttgacatacagatgttccttggtatctgcctgggattggttccaggcccccacgagggtacc

SEQ ID NO: 876327 - DNA, 523 bp, Homo sapiens
ttttgagatggagtctcgttctgtcacccatgctggagtacagtggcttgatcttaactcactgcaacctccgcctcccagattcaaaggattcttgtgcctcagcctcccaagtagctaggattacaggtgccgccaccatgctcagctaatttttgtattttttgtagaggcggggttttgccatacttgccaggctggtctcaaactcctggcctcaagagattcgcccacctcagcctcccaaaatgctgggattacaggcatgaaccacggcgcccagccttattattttttagagacagggtctcactcctgttgccaaggctgcagtgyagtggcttgatcttggctcactgcaatctccgcctcctgggttcaatccattctcctgcctcagtctcccaagtagctgggactacaggcatatgccaccatgctcagcttttttttttttttttttttttttttttggtaaaaactggttttcaccatgttgcccaggctagtctggaacccctgg

SEQ ID NO: 876328 - DNA, 548 bp, Homo sapiens
atcgcctatcttttctcctgttaatctgtctattgtcagttaactcatgggccttcaaccactggaactaaattggatgaggaaaagttttctcccaataattttggtgatgaggatgggatggctgggactctctgctcctccagaaagtgcagctaagatgtcaggatctctgactatgctgacaaagataaatttcttagcagccaggttcccagatttctgctcagaatcccgtcaagtgaggatggtaagaccatctttctgtcttttcttcccaagatttagatttccgggagaaaacactcagaacttatacttactgtattgtgacttggtttgaatactttttaaaatagatcttttccttcccarggatagctcctgtatcctttctgtctcattttgtgtcctgatagtttggtttggattcagtcagagtgctcactctctggctttctgcatgctgtggggtgcagattgtctgttctgtgctcagaagcagccaattgtcaggttggggctcaagcatttgtagttgactgaag

SEQ ID NO: 876329 - DNA, 562 bp, Homo sapiens
agatggaatctcactctctgtctcccaggctggagtgcagtggcacgatctcggctcactgccatctccgcctccctggttcaagcgattctcctccctcagcctcccgaatagctgggactacaggtgtgtgccaccacacctggctaatttttgtatttttagtagagatgaggtttcaccatattggccaagcttgtcttgaactsctaacctcagctgatctgcccacctctgcttcccaaagtgctgggattacaggcatgagccactgcacgcggccaactgcttcctataattgggaagaaactgggttgctaaagccctgtggaggttaggaggaagctgggggcctgtattgccttgtgtccccacaacccctagcagtgaaaaacagcaaatgaccacactctagccttgctgagggcaggagaaaagagagttcgtggaggtccaaaggccagtctgtcttcctaactggttgcaggcctggcctaagtttcttatttttttcctcaggaaagtaaagaattctatcccaccaccctccttttgtttttct

SEQ ID NO: 876330 - DNA, 625 bp, Homo sapiens
aatgcttctgtctagattttaggggaagatatttccgttggcactatagctttcaaagcgctccaaatatccactggcagattctaccaaaagagtctttcaaaactgctctgtgaaaagaaatgttcaacgttgttagttgaatgcccacatcacaaagaagattctgagaatatttctgtctagtttttattagaagatattcccgtttccaccaaaggacacaacgcgaagccaattatccgcttgcagatcttacaaaaacacgtttcaaaactgctctatcaaaggaaaggttcatctctctgggttcaaagtaccctctgkctcggagggtcctatgcccttggagtatcgctgatttctagcacagcagtctgaaatcaaactgcaatgtggcagcgaggctgggggatggtcacctggcatagcccagtcgtgcttaggtaaagaaagcaactgggaagcacgaactggggggagaccaccatagctcaaagggacctgcattcctgtatagactccacctctgggggtaaggcacagacaaacaaaagacagcagtaacctctgcagacttacatgtccctgtctgacagctttgaagagagcagttcttctccca

SEQ ID NO: 876331 - DNA, 625 bp, Homo sapiens
aatgcttctgtctagattttaggggaagatatttccgttggcactatagctttcaaagcgctccaaatatccactggcagattctaccaaaagagtctttcaaaactgctctgtgaaaagaaatgttcaacgttgttagttgaatgcccacatcacaaagaagattctgagaatatttctgtctagtttttattagaagatattcccgtttccaccaaaggacacaacgcgaagccaattatccgcttgcagatcttacaaaaacacgtttcaaaactgctctatcaaaggaaaggttcatctctctgggttcaaagtaccctctggctcggagggtcctatgcccttggagtatcgctgatttctagcacagcagtctgaaatcaaactgcaatgtggcagcgaggctgggggatggtcacctggcatagcccagtcgtgcttaggtaaagwaagcaactgggaagcacgaactggggggagaccaccatagctcaaagggacctgcattcctgtatagactccacctctgggggtaaggcacagacaaacaaaagacagcagtaacctctgcagacttacatgtccctgtctgacagctttgaagagagcagttcttctccca

SEQ ID NO: 876332 - DNA, 669 bp, Homo sapiens
ttgaagattctacagaaagagtgtttccaaactgctaaaccaaaacaaatgttcaaatctgtgagttgaatgagtacaacacaaagtagtttctcagaatgcttctgtctagtttttatgtgaggatatttccttttacaccataggcctcaaacctctccaaatatccttttgcagataccacaaaaacactgtttccaaaacgcgcaatcaaaagaaagattcaactctgtgagttaaatgcacatatcgcaaagtagtttcccagaatgcttttgtgtagttttcatgtgaagatatttccttttatacaaaaggcctcaaatcgctccaaatattcacttgcagattctacaaaaagtatgtttcgaaactgctcaatcaaaacaaaggttcaactgtgtgaggtgaatgcacacaccacaaagaagtttctcagaatgcttctgtctagtttttaygtgaagatatttccttttccaccataggcctcaaagcactcaaaatatccacttggacactctacaaaaagagtgtttcaaaactgctcaatgaaaagaaatgttcaactctgtgaaatgaatgcacagatcacaaacaagtttctcagaatgcttctgtctagtttctttgtgaggatatttccttttccaccataggcctcaaacc

SEQ ID NO: 876333 - DNA, 583 bp, Homo sapiens
  misc_feature 235: n = A,T,C or G
atattggagctctttgagggctatggcggaaaagaaaatatattcacattaaactagacagcagcattctcagaaacttctttagggatgtctgagtaaactcacagagttgaacatacctttccgtagagcagttttgaaacactctgttgtggggtccgaagtggatattggacagctttgagatctttgtggaaatgggaatatcttcacatataaactagacagaagcatnctcagaaacttcttcgtgatgtgtgcattctactcgcaaattgaatcttccttctcatgaagcagtttgaaactctctatttgtgcaatctacaatggataatggaacccttgatgcccatggtagaaaaggaaatatcctcatataaaaactagacagaaggattcacagaaaatgcttgtgatgtgtgcattcaaatcacggrgttgaatctttctttgttagagcagttttgaaacactgtttctgtggaatctgccagcggacacttggagcgcttgagggctatggtggagaaggaaacatcttcccataaaaactagaaagaagcattctcggaaacattta

SEQ ID NO: 876334 - DNA, 624 bp, Homo sapiens
gtgttaaattctcccactattattgtgtggtagtctaagtctcattgtaggtctctaagaacttgttttatgaatctgggttctcctgtattgggagcatatatgtttaggatagttagctcttcttgttcaattgaaccctttgccattatgtaatgctcttctttgccttttttgatgtttgttggcttattaaagtctcctttgtcagaaactaggattgcaacccctgcttttttctgctttccatttgcttggtaaattttcctccatttctttattttgagcctrtatgtgtctttgcatgtgagaggggtctcttgaaaacagcacaccaatgggtcttgactctttattcagcttcccattctgtgtcttttaattggggcatttagtccatttacatttgaggttaatatttttatgtgtgaatttgatcctgtcatcatgatgctagctggttattttgcagacttgttagtgtagttgcttcatggtgtcattggtctttgtacttcagtgtgtttttgtagtggctggtaccagaatttcctttacatatttagtgcttccttcaggagtttttgcagggcagcttggtggtgacaaattccctcagcattt

SEQ ID NO: 876335 - DNA, 663 bp, Homo sapiens
tgaaagtatagagtccaactcaaggagaaacgttgagctcaaaaccttacaggacaggtgggaccaataagatggccgtttctggcccttgcattcctttgtgagaagtctgtgatttcgcttaatctagaagacccatgggtcaacttgttcctctgctggtagtggtctgagcctcacacttggctcagtcttcatttgacagtgcctgattcgctcgtcagccatagcacatttcctgtacacatcatgcttgatagaccatttctctagtcttccagggtctggggaagagtccagggtagtctggccacacagagcttcaggacacttccttctctccttgcccccaaacaaggcaaacaagataaaaaatcttcaagctgtagtctcaacatggactccagaaacatggagatgagaagaaaaatttctaggggattgggatgaggagtgagrtgaggaaatgagctgtttggaggatatttaagccttatctgacgaaagagaaaggagaaagactggaaagaaagacaattgaggaagaaaaagagtgaaagaattttgaaattgttgctggaagacatcctaggtaaacattatcctaggcttggctttccttaaatgttatgtatagagtgaccatataatttaccatccaaa

SEQ ID NO: 876336 - DNA, 602 bp, Homo sapiens
acccagcagatctcatgagacttattcattatcacaagaatagcatgggaaggactggcccccatgattcagttacctccccttgggtccctcccacaacatgtgggaattctgggagatacaattcaagttgagatttgggtggggacacagccaaacyatgtcattcccctcctggcctctccaaatatcacgtcctcacatttcaaaacaaatcatgccttcccaacagttcccccaaagtgttaactcatttcagcattaacacaaaagtccacagtccaaactctcatctgagacaaggcaagtcccttccacctgtgagcctgtaaaatcaaaagaaagctagttacttcctggatacaatgggggtacaggtgttggataaatacagccattctaaatgggagaaattggagaaaacaaaggggttacagagtccatgcaagtccaaaatccagtggggcagtcaaattttaaagctgtaaaatgatctccttgactccaggtctcacatccaggtcacgctgatgccagaggtggttcccatagtgttgggcatctccactcctgtggctttgcatggtacatcctcccttcta

SEQ ID NO: 876337 - DNA, 602 bp, Homo sapiens
acccagcagatctcatgagacttattcattatcacaagaatagcatgggaaggactggcccccatgattcagttacctccccttgggtccctcccacaacatgtgggaattctgggagatacaattcaagttgagatttgggtggggacacagccaaaccatgtcattcccctcctggcctctccaaatatcacgtcctcacatttcaaaacaaatcatgccttcccaacagttcccccaaagtgttaactcatttcagcattaacacaaaagtccacagtccaaastctcatctgagacaaggcaagtcccttccacctgtgagcctgtaaaatcaaaagaaagctagttacttcctggatacaatgggggtacaggtgttggataaatacagccattctaaatgggagaaattggagaaaacaaaggggttacagagtccatgcaagtccaaaatccagtggggcagtcaaattttaaagctgtaaaatgatctccttgactccaggtctcacatccaggtcacgctgatgccagaggtggttcccatagtgttgggcatctccactcctgtggctttgcatggtacatcctcccttcta

SEQ ID NO: 876338 - DNA, 602 bp, Homo sapiens
acccagcagatctcatgagacttattcattatcacaagaatagcatgggaaggactggcccccatgattcagttacctccccttgggtccctcccacaacatgtgggaattctgggagatacaattcaagttgagatttgggtggggacacagccaaaccatgtcattcccctcctggcctctccaaatatcacgtcctcacatttcaaaacaaatcatgccttcccaacagttcccccaaagtgttaactcatttcagcattaacacaaaagtccacagtccaaactctcatctgagacaaggcaagtcccttccacctgtgagcctgtaaaatcaaaagmaagctagttacttcctggatacaatgggggtacaggtgttggataaatacagccattctaaatgggagaaattggagaaaacaaaggggttacagagtccatgcaagtccaaaatccagtggggcagtcaaattttaaagctgtaaaatgatctccttgactccaggtctcacatccaggtcacgctgatgccagaggtggttcccatagtgttgggcatctccactcctgtggctttgcatggtacatcctcccttcta

SEQ ID NO: 876339 - DNA, 656 bp, Homo sapiens
agcaaaataagagcaggattgcacctcaatacataggacacggtgaagagaaagttgttagggctagagaagaaaccaaatgagatagggaaaccggagaggggtggggggaataacaagtttgccatctgcctggaggcatgtctcctaaattggccagcatcacactgatagcaggggcccagataccttcactgagggatgcattttgcagaatctcccttcagcattgaccaggcacacacacacaaagcaaaccttctaataacagtaataatgatgatgatgatgtacttggtggaygggttggggagattataaaaggaagcacattagtaaaaaatactttttgacatccacctaccccaacagtagagttataaatgttaaaaggatcccatccaaaatacaacttcaagaaaagtttactcctaaagagacatcattgattcaaccccagtaaaacataatcaaactggaaatctatctagacacaaatacctctctgccttcagaaaatccaaactggaccacatgtatttgacattttttaaaggctattttaattaatacccacccaagaaaaataccagaaaagataaactgcttcctactagacacagtcttgtatacaacttttagagcttcttcctttc

SEQ ID NO: 876340 - DNA, 634 bp, Homo sapiens
atgaaaatgacgtgtcttcgcacaacaaagcggaaaatagcagtaagtgttccgggtaattcaaacaccagctgtctctgtggtttcggagctgtggttcgcttcttaatcaaaaggcattcggcctacaggaaaggggttctataaatcacaggaagtttcaagaagtcaacaaaaggattccaagcaggaggcagccagaaagagggaaatctgatctttgcccatattattaagttaacatttttctaccaacatttgtcttctcccctctaaaattcctcaactgactttaaggataaagaagcaaatctatcgttggcaaaccctagagtgggtgggccatgagtctgctactcactcaaatatcagcttcaagacaaaatataataaccccaaattagctcttcctcrtgagcaataaattataaataagttgaagttcacagccagagaacttgagacaaccctgatacagccttaaaaaaaaaaaaatcacatctcaggttacaatataaaaggcctgtctggctttttactcaatattatagttgtcataatggcggtacatgttcagaaactacctcctagtgttttaggaaacatttcacgctactctaattcagagcatggc

SEQ ID NO: 876341 - DNA, 625 bp, Homo sapiens
cttgctagaagacatttatgcagccaaaaaacacatgaaaaaatgctcatcatcactggtcatcagagaaatgcaaatcaaaaccacaatgagataccatctcacacccattagaatggcgatcattaaaaagtcaggaaacaacaggtgctggagaggatgtggagaaataggaacacttttacactgttggtgggactgtaaactagttcaaccattgtggaagtcagtgtggcgattcctcagggatctagaactagaaataccatttgacccagccatcccattactgggtatatacccaaaggattataaatcatgcwgctataaagacacaggcacacgtatgtttattgcggcactattcacgatagcaaagacatggaaacttttcttgaagttgcatctgcacagcaaacatactgttctttttaagttagagattttgttactagcaagtaaaaatagagatggctttattcatgttttacataaaatagagaaaatatcagttttccatgttaaggaatactcttatttttacttggggatagctttgggaaggggtaatagagaatatggccatcaatcccccctgcaaagctaccccaagttaccaccttaa

SEQ ID NO: 876342 - DNA, 625 bp, Homo sapiens
cttgctagaagacatttatgcagccaaaaaacacatgaaaaaatgctcatcatcactggtcatcagagaaatgcaaatcaaaaccacaatgagataccatctcacacccattagaatggcgatcattaaaaagtcaggaaacaacaggtgctggagaggatgtggagaaataggaacacttttacactgttggtgggactgtaaactagttcaaccattgtggaagtcagtgtggcgattcctcagggatctagaactagaaataccatttgacccagccatcccattactgggtatatacccaaaggattataaatcatgctgctataaagacacakgcacacgtatgtttattgcggcactattcacgatagcaaagacatggaaacttttcttgaagttgcatctgcacagcaaacatactgttctttttaagttagagattttgttactagcaagtaaaaatagagatggctttattcatgttttacataaaatagagaaaatatcagttttccatgttaaggaatactcttatttttacttggggatagctttgggaaggggtaatagagaatatggccatcaatcccccctgcaaagctaccccaagttaccaccttaa

SEQ ID NO: 876343 - DNA, 625 bp, Homo sapiens
cttgctagaagacatttatgcagccaaaaaacacatgaaaaaatgctcatcatcactggtcatcagagaaatgcaaatcaaaaccacaatgagataccatctcacacccattagaatggcgatcattaaaaagtcaggaaacaacaggtgctggagaggatgtggagaaataggaacacttttacactgttggtgggactgtaaactagttcaaccattgtggaagtcagtgtggcgattcctcagggatctagaactagaaataccatttgacccagccatcccattactgggtatatacccaaaggattataaatcatgctgctataaagacacaggcacrcgtatgtttattgcggcactattcacgatagcaaagacatggaaacttttcttgaagttgcatctgcacagcaaacatactgttctttttaagttagagattttgttactagcaagtaaaaatagagatggctttattcatgttttacataaaatagagaaaatatcagttttccatgttaaggaatactcttatttttacttggggatagctttgggaaggggtaatagagaatatggccatcaatcccccctgcaaagctaccccaagttaccaccttaa

SEQ ID NO: 876344 - DNA, 605 bp, Homo sapiens
tggaaatggggaaaagaaaacatggcacaaaggagcatattttccaggttgtgacttttctactggagaagcccatgtcaaccaacacagccttggttaagcgtaacctgccctggttctactgggctaatctggtgtgctgggtttggataatggacctgtgtcaagtgaagccaagaaaatccagactcacttaaaggtccaaatggaaacgagaagtctcggaagcctcctctgtggatatgcatcttaccaatagacggactcctaggtttgaccctgagcaatcctcctmataaaacagaaggactcagagatcagcagatgtgtcaaaggtccactgatggtctgggggtgcttagtactcatctcaccaatgtatattcagacttagcaaaatgcttttagtggagacccagattgaaaccctgactcagtttactagctgcagaaacttgagcctatctgagactcaatcaagataataaaattaaaaggagtaaagaatattaggcacacaagtgctcagaacagtagccagcattaactatccttagtataatatagctttcagaactctgtcaaaagtgctctttattgtaaga

SEQ ID NO: 876345 - DNA, 588 bp, Homo sapiens
aatgcttttagtggagacccagattgaaaccctgactcagtttactagctgcagaaacttgagcctatctgagactcaatcaagataataaaattaaaaggagtaaagaatattaggcacacaagtgctcagaacagtagccagcattaactatccttagtataatatagctttcagaactctgtcaaaagtgctctttattgtaagagaaaatggggcccatctttaccccaacttaaagcattatctagtctcatttcaagctttgaagagatgagtaaactctcctctccattttcctccatggtcacaatcgatagtgttttcaattgagaagatatgagtttacctaagtgtgtgtgcaaaagcccagttgsaaatggcaatgatgcattacagtactccatccatctgttccaagagactgaaagctttctcttcctggcagatggctgggatcctgatacctacatgcatgagaagccacaccagaatgccagccgacatttgcatgcagagacgttgcctgtggagctgtctccagaagaggatgcagctgcaggtacttgaggaccacactccccctcc

SEQ ID NO: 876346 - DNA, 488 bp, Homo sapiens
ggaatatgtaaatcctatataaataataatatcaaatataaatggattaagcaactgaatcaatagtcagagattttcagaatggataaaaaaacaaaatccaactataggttgtttataaaacacacactttagattcaaagatacagatagtttgaaagtaaaagaattgaaaagatgtwtcatgcaaacaacaacaataagaaaattggagtggctatacgaatagcagaaaaaaatagactttaagacagaaaaagttactagagtaaaagaggacattttgtgatgataaaagtgtcaatttgtcaggtatgtaaaacaatcataaacatatagacatggctacatagccacagagccccaaaatacacgaaggaaaaactgacagaccagaagggaaaaataagctttcaacaataatagttgtagtgttcaataccccactcttaataacagatagaacaactagacaaaatatcaaggaa

SEQ ID NO: 876347 - DNA, 555 bp, Homo sapiens
ctagccaccatgggatctttagcatctctcctacatagatgcctccatttttagctttccagctctgacttttgcatgagccacatcacatctgtattagtctgttctcacactgctaataaagacatacccaagaccaggtaatgcacacagaaaaagaggtttaatggagtcaccgttcyacctggctggggagacctcataatcattgaggagggcaaaaggcacatcttacatggcagcaagcaagaaagaatgaaagccaagtgaaaggggtaatcccttacaaaaccatcagatcccctgagacttactcactaccatgagaacagtatgggggaaactgaccccatgactcaattatctcccaccgggtccctcccacaacacatgggaatgatgggagttacagttcaagatgagatttgggtgaggacacagccaaaccatatcaccatctgattctcaaactaaaaaatagtataaaatttatctattttatttattgcatggtgttcctttttagaagaaagctccccaaaggcagggatgtct

SEQ ID NO: 876348 - DNA, 612 bp, Homo sapiens
gatttttcatagcctccatctctggcagaatacagaaattaaaatttattgggttactgacaatattactgtataaacatttaacataatttgaactttgggattgcaaacattagcagtttattggatgaagtaatttctctcaaacactacacttactctaaaaaacacgattttcacttttaaatttttaaaaatcatatttgaatgacttaacaaagaataaccatcattcatagctggtatggtgttttatataaccaatcacaaactgagagaatatgtttaatcttcaccctttcgaataaagcctctggcaaatgtgtcagagaaaacacgataaagaaactatactattaactatataaacatactgctgtattttacagagaatctttcaacgttttccttctgatttggaaatttttgaaatgtaatatatcatatttgatatacttagcaaaattytggaaatagcattttcctaaaaacttctggggccttaattctagtttataatctgtagctttttgaaacaaacaacaaaaaagggatttattcaacatcaaagtccagtgagtaactgctgtaaattaagaaaattatgtcatt

SEQ ID NO: 876349 - DNA, 513 bp, Homo sapiens
ctgaaaatgattaacaatggaattggtgcttggggtttgcccatagcagctgacgggcctgggaacattctcaggcatgcacccctcattggtccagggccactttgcactgtcaaagtctctcatctcacaggtgaggaaactgagaccaagtcgggcaggaatttggcaatgtgacagagcaaagtgttaacactttgctgacttctccagttcccattatgacttggtgattaagaccagtattgaatccttgctcggctgcttgttagtggtggagtcagagamaagttcaatacattctctgtcccatcattttctcatttgtaaggtgaggactccctccctccttccttccctccctccctccttccttccttccttccttttcttttctttgtaggataaccaacttatttctacaaacccagacctctcactggtttcagactgaaagtccagcatttcagaaaaacccttgccccctggcaaatcctatttgttcaaaaatac

SEQ ID NO: 876350 - DNA, 513 bp, Homo sapiens
ctgaaaatgattaacaatggaattggtgcttggggtttgcccatagcagctgacgggcctgggaacattctcaggcatgcacccctcattggtccagggccactttgcactgtcaaagtctctcatctcacaggtgaggaaactgagaccaagtcgggcaggaatttggcaatgtgacagagcaaagtgttaacactttgctgacttctccagttcccattatgacttggtgattaagaccagtattgaatccttgctcggctgcttgttagtggtggagtcagagacaagttcaatacattctctgtcccatcattttctcatttgtaagktgaggactccctccctccttccttccctccctccctccttccttccttccttccttttcttttctttgtaggataaccaacttatttctacaaacccagacctctcactggtttcagactgaaagtccagcatttcagaaaaacccttgccccctggcaaatcctatttgttcaaaaatac

SEQ ID NO: 876351 - DNA, 637 bp, Homo sapiens
ttagccatttgtctaatttttttcaaggtttttaacttgtttgctatgggttcgaacttcctcctttagctcagagtagtttgatcatctgaagccttcttctctcaacttgtcaaagtcattctccatccagctttgttctgttgctggtgaggagstgtgttcctttggaggaggagaggcgctctgatttttataattttcagtttttctgctctgttttttccccatctttgtggttttatctacctttggtctttgatgatggtgacgtacagatggggttttggtgtggctgtcctttctgtttgttagttttccttctaacagtcaggaacctcagctgcaggtctgttggagttcgctggaggtccactccagaccctgtttgcctgggtatcagcagcggaggctgcagaacagcggatattgttgaacagcaaatgttgctgcttgatcgttcctctggaagttttgtctcagaggagtacccagctgtgtgaggtgtcagtctgcccctactggggggtgcctcccagttaggctactcgggggtcaggaacccacttgaggaggcagtctgtctgttctcagatctccagctgtgtgctgggagaaccactactctcttcaaagc

SEQ ID NO: 876352 - DNA, 637 bp, Homo sapiens
ttagccatttgtctaatttttttcaaggtttttaacttgtttgctatgggttcgaacttcctcctttagctcagagtagtttgatcatctgaagccttcttctctcaacttgtcaaagtcattctccatccagctttgttctgttgctggtgaggaggtgtgttcctttggaggaggagaggcgctctgatttttataattttcagtttttctgctctgttttttccccatctttgtggttttatctacctttggtctttgatgatggtgacgtacagatggggttttggtgtggctgtcctttctgtttgttagttttccttctaacagtcaggaacctcagctgcaggtctgttggagttcgctggaggtccactccagaccctgtttgcctgggtatcagcagcggaggctgcagaacagcggatattgttgaacagcaaatgttgctgcytgatcgttcctctggaagttttgtctcagaggagtacccagctgtgtgaggtgtcagtctgcccctactggggggtgcctcccagttaggctactcgggggtcaggaacccacttgaggaggcagtctgtctgttctcagatctccagctgtgtgctgggagaaccactactctcttcaaagc

SEQ ID NO: 876353 - DNA, 637 bp, Homo sapiens
ttagccatttgtctaatttttttcaaggtttttaacttgtttgctatgggttcgaacttcctcctttagctcagagtagtttgatcatctgaagccttcttctctcaacttgtcaaagtcattctccatccagctttgttctgttgctggtgaggaggtgtgttcctttggaggaggagaggcgctctgatttttataattttcagtttttctgctctgttttttccccatctttgtggttttatctacctttggtctttgatgatggtgacgtacagatggggttttggtgtggctgtcctttctgtttgttagttttccttctaacagtcaggaacctcagctgcaggtctgttggagttcgctggaggtccactccagaccctgtttgcctgggtatcagcagcggaggctgcagaacagcggatattgttgaacagcaaatgttgctgcttgatcrttcctctggaagttttgtctcagaggagtacccagctgtgtgaggtgtcagtctgcccctactggggggtgcctcccagttaggctactcgggggtcaggaacccacttgaggaggcagtctgtctgttctcagatctccagctgtgtgctgggagaaccactactctcttcaaagc

SEQ ID NO: 876354 - DNA, 554 bp, Homo sapiens
caaatgaacccctagctaggcaattacaatgatgacagaaggaattttttaattaatatttttggagtgaatattaattgatatgtatttgtaccacatttgccaagtatttatatatcaagatggcttattctagttaacgtttattagaaactgataggtaagggttactaatactccctctgtttttttttttgtttgtttgtttgttttagtgttttttttttattatactttaagttttagggtacatgtgcacattgtgcaggttagttacatatgtatacatgtgccgtgctggtgcgctgcacccactaactcrtcatctagcattaggtatatctcccaatgctatccctcccccctccccccaccccaccacagtccccagagtgtgatattccccttcctgtgtccatgtgatctcattgttcaattcccacctatgagtgagaatatgcggtgtttggttttttttaacagatgaaaaaaatggaggcttagtagcttgctttagggtcacacagctagtaactggcagagttaacaactga

SEQ ID NO: 876355 - DNA, 584 bp, Homo sapiens
aattcagaagaggaactaaaaatcaaaccaaatatactgattccaggaagacatgctttccaacctactggtgcatcttggcataacaaggggtaccagaaaacatagtgaaaaaaataaaagcaacttaagggtctgaagaccctgggcagtcactctctgtgcctctccctgatgcccttgacctgcctagaagccccttcgacagctccgtgcactcccaaggctttctgggtctacctgagcaagcaccttccctggcagtctgcacacagggctggctaggtatactggaggaggtaatagccgagagagtctcttaaggtgttgaagggatctaaattcaaacagcagaatgtgaatttccttgccccttactataaccctgttgaagggacaatagcagctrtatttttagagactctagcagagtcctagattcattttcctatatagccaagcccatctggtcccagaaccataccccacaacccatagtagtggctaaggcatatgcagctgaatctctgagggagaactggtgagttaatttaaaggtgttcttggaatgcactgtgtgtagt

SEQ ID NO: 876356 - DNA, 592 bp, Homo sapiens
ttggggttcaagattccacatctccagacctgggaggtggcagtttgcatgggagaagcccaagagtgctcagggaaagctgcaaggaatcagggaagcaggcaccaggaggcgggtgcttaaggaggcaggtggctaggagggcaagagatgagaggaactgcccagagagtgtggccggcagaagggtgggctttgcagttagattgagtgggctcaaagctcaactctgttacattcaaggcgtgcgctctctagcaagtcgcttaaccttcgcaagccttgacttcctcatctctgaaatggaaatgatactggtaccttccacttgaggttgttgagggccacctgagaatgcagaatgtctagctcatgttacacactgaattagcactggcttctttcactaaaacyaaagtgacttgaagatgcggggatgatgtcaggggatggagttgaggtgaggcccgcctgtcagaggcaggcatcagagaccagaggggagtgtcctgaggaccctgcagacctggggaagaaggggagggaggtttagtccaggctttgcctctgtcttggcctgtagccttggaga

SEQ ID NO: 876357 - DNA, 625 bp, Homo sapiens
taattattataaagctttctggtagaattctttctggccctaattgaaatttatagaacctttgccttcaaatgcaataaatctgtcatcaccagggaagcagtttgcacctgaggctaccgcctgacattgtaatatggggctgacattctgatgaagaggctgtgagtggtagtcaggctaatatgaactctagcaagcacaaaggccactgttaaaccaaggaagggcctggcctgtggtacacaggggccctaggcctgcgaggagaagaaagttgaggcctacctcactggacttcacaacccctcatccagacacaccaatgagctgttataagttcacctagcyaatctgcaattttcctcattcctccccaaaactttatcacaagtggggttggaaacatcaataaacatttaattaaggagagtttgggaaattgtaccttttaaagctaataaacagtcactttaaatcttatttcaaaaataacacatgctcattttaagacatttagtcaatataaacaaaaatgaaaaattaaaaagtcaaattattgttagaatagcctttaggtcttttttctatgcacacataaacatgtgatttccacaaagcaata

SEQ ID NO: 876358 - DNA, 662 bp, Homo sapiens
cactcattctctttgggcattcttacaaaactaaaaacaaaaacacttctcaatttcgtatttgcaactgatatcagtaagctgggagaggtccccaaatgccagtagtgttactggggaatccttgctcccagaggtcccaagatggtggcaggccrcttcgaagatggcggcaggccaatttcaagacggtggcaggcctcgtgttctctgacctggggttcttggcctcagggattccaaggaatggaatcttgggccatgtggtgagtgttatagctctgttagaagctgtgggtcatggaagagaaccatggaacccagtgactagtgttcagctcgattaggacgaacctgggcacttagccatgcaggaacaatggcaagccgctagcccgatcaggagtggcaatgggcgcctcactggatcaggagcacagcggacaccctgccggttctggagggatggaagtcagcggcaggtctgcgatggcggcaaacagcagtggtggactgcaagcaaaagctcagctccagccataacaaacacggaccaaagagagtgcagttgcaagatttaatagagtgaagacagagctctggtacagacggaggggacccaaagagggtagctgttgctggcttgaatgcctggatttata

SEQ ID NO: 876359 - DNA, 597 bp, Homo sapiens
tatggagctgtaaaagatctatcatatccaaaacaaatatctaaaaaaagaacaaatgcggagaaaatttttagggcattaaaatattctaattttttgtagttggttaaataagtgtattcacttgtcaaagctcatcaaactatataggtaaggtctatgytttgtagtttgtaaacattgcctctgttaatgacagaaaaagagagagagagtaaaagaaacagagaagtcacaaaagaatgtcgaagacggtgcaatcccaataccatcttctagggctgagaagaataatgtgtgtctccgtggaaagaggtcttgaaatcagatcctatccatccttccactatgttcttcttgttcaaagtgttgttagctattctagatcctttgcatttctgtatgacttttagaatcagcttgtctactgctatagtaaagtctgcagggattttgactacaatcaactggatgtagagattcaattggagagaagaggcatcttaaaaatattgagtgatccatgaagagagtatatctcctcacttatttagatattctttatctaacattatttctgtaatgttttatagcttt

SEQ ID NO: 876360 - DNA, 597 bp, Homo sapiens
tatggagctgtaaaagatctatcatatccaaaacaaatatctaaaaaaagaacaaatgcggagaaaatttttagggcattaaaatattctaattttttgtagttggttaaataagtgtattcacttgtcaaagctcatcaaactatataggtaaggtctatgttttgtagtttgtaaacattgcctctgttaatgacagaaaaagagagagagagtaaaagaaacagagaagtcacaaaagaatgtcgaagacggtgcaatcccaataccatcttctagggctgagaagaataatgtgtgtctccgtggaaagaggtcttgaaatcrgatcctatccatccttccactatgttcttcttgttcaaagtgttgttagctattctagatcctttgcatttctgtatgacttttagaatcagcttgtctactgctatagtaaagtctgcagggattttgactacaatcaactggatgtagagattcaattggagagaagaggcatcttaaaaatattgagtgatccatgaagagagtatatctcctcacttatttagatattctttatctaacattatttctgtaatgttttatagcttt

SEQ ID NO: 876361 - DNA, 573 bp, Homo sapiens
taattttgttcatttccccttaaaggagatgtttaaaattcaacactgaaggaaactctttttttaacctaaagttccagtcacctcagaaattaagataaatggctttaaagagaccatcttgcgtatcaagagttttgtttccaaagcactatcttaatgaggttaatagaaatgaatttggaacaaatggactgaatagccttgggatacaaaactgagaatgtaatgaaaaaagggtttggtacaaatgttttagattttactgaatcccaaatatttaggtagtataatggtgaatgtccagtccaaaacatagtttcaaatacactctttaatgctartctgaaattattgatacaccatatgtaataaatgtaccttttggtgtttctaaaataggttttaatattatattattctatgaccaagtcatatttaaagtaaaaaaagatttaaataaataaaatgtatcttaattcccttagcatgtataatgcaaacctcattgttccagtgagaacccacagtatttatagttagcttgatgcttgggtttgacaggcagccatc

SEQ ID NO: 876362 - DNA, 667 bp, Homo sapiens
catgaactccaaaagccagatcagagaccacaaactactttcccaacattgctggacacagccttcaagttcttcagtaattgagaacagaataaggggaacagagctacagagaaagaaaaatgcaaggacaagagacaggcttaactgctggctgctttagaagcctccagcccattctagattgtcctaaggacacttctccaagtaagtgttcttgatgcasaaggacaggccaccggatatggtttgactctgtgtccccacccaaatctcatcgtcaatccccatgttttgaggaagagaattgtaatctccatatgtagagtgagggaagtgattagatcatgggggtggttcccccatgctgttcttgtgatagtgagttctcaagagatctaatggtttcataaatggcagtttcccctgccctccttacttctctctcctgccaccctgtgaagaaggtgtctgcttcctcttctaccatgactgttaagtttcctgaggtctccccagccatgcagaactgtgagtgaattaaacctcctttgtttacaaattacccagtctcaggtatttctttatagcagtgtgaaaacagactaaatagaaacttcaacttagatagtcatacttcaggggtttaaaatatagcccacactta

SEQ ID NO: 876363 - DNA, 694 bp, Homo sapiens
aataggtatggctttgcatctgagctcccctacggggtcttaacactgttgtacttcagggccatccaagaaactctgggggctgggggcagcggggaggaccttagcagggcctgtttgtttagattcctcatggcctctttgtgcagcattccttccctccaggtatatatggcaggatccctctgaaatgaggtcttatgacttcatttcaggggaggtaggccagaattcttttatggccagctctcagggaggaaggatgggatatggtcagagagtgaccatccttgcttctgctattttctcagtttctgaggtgctaggttttggggtagcattttttgcaccccgacactaaggaggtatgtaaaataagttccaatacatgtatgtgctaggcaatggcctacctgtttctcagggctttttccaatacactatgcagcaatcttatttctttgcgtttataatctgtttcttcctcttccatatttaaagaccaaaaagcaaaaaaaacaaaagaaaacaacactyttctaggtgaaccttgtaaagaattaacattaataacttagtaaggtcatttatgaaaaaagaaaaaaagaattaacgttaatatgttgatcatttaatggtaagagactctaatctgatgctctgtattttttagtttttttttcccctaagggga

SEQ ID NO: 876364 - DNA, 616 bp, Homo sapiens
tgtgtcctcttcaatttcttgcatcactattttatggtttttattgtgaaatctttcacttatttggttaaagttaattcctaggtattttatttctagctattataagtagtattattttctcgatttttttgccaaattggttgctgttggcatrtagaaattctactgatttttttatgttgacttcgtgtcctgcaactttactgaatttctttttcagttctaatagttttacggtggagtctttagggttttacaaatataagatcatctgcaaacaagaataatttgacttatttctttccagtttggatgccctatatttatttctcttgtctgattgctctagctaggaattccagtactgtgttgagtaggagtggtgaaagtggacatctttgtcttgttacagatcttagaggaaagacttttggttttaccaattcaaaatgatactagctgttggcttgtcataaatggttttcattgtgttgaggtatggtccttttgtacccagtttgtttggtttgctagttttgggcatttatgagacagggtctcacattgtcactcaggctggagtgcagtggcacgatctcagatcactacagcc

SEQ ID NO: 876365 - DNA, 622 bp, Homo sapiens
ttcttcctggacacataaggatactatactggctaacatctactccctactttgcatctaaatactaccaaatactggaatgtggataaaaatatcaaatattccaggtctgaatactaaggtatctgccatgattgtycatcctgtctcttttccttatacaaggagttggaagtgaaagaccaggaggtaacagatacaaataatagaagaagatgcatccttactcctggaggaaaacatttaagaaaactatctgaccagaatctgactgtcatgcaattaggaaccagtctttattgagttaagtcactgacttctgtttcttattttaactaatacatgaaaataattatatttggaatttaagtaatgaacgtggcctatcactcatggaaactctctttttctttcttttcctttttttctctctctctccagtaaaccaaattgccttgattgtgtacataagactcaacaactgttactttgtctgaatttccatttttaaaatacgagatatgcttcctaatataaaatataaagttattcaagtggatacaaactagaatttattatgctcattgctattgagtcattttatcactttaaatgtatcttt

SEQ ID NO: 876366 - DNA, 622 bp, Homo sapiens
ttcttcctggacacataaggatactatactggctaacatctactccctactttgcatctaaatactaccaaatactggaatgtggataaaaatatcaaatattccaggtctgaatactaaggtatctgccatgattgtccatcctgtctcttttccttatacaaggagttggaagtgaaagaccaggagrtaacagatacaaataatagaagaagatgcatccttactcctggaggaaaacatttaagaaaactatctgaccagaatctgactgtcatgcaattaggaaccagtctttattgagttaagtcactgacttctgtttcttattttaactaatacatgaaaataattatatttggaatttaagtaatgaacgtggcctatcactcatggaaactctctttttctttcttttcctttttttctctctctctccagtaaaccaaattgccttgattgtgtacataagactcaacaactgttactttgtctgaatttccatttttaaaatacgagatatgcttcctaatataaaatataaagttattcaagtggatacaaactagaatttattatgctcattgctattgagtcattttatcactttaaatgtatcttt

SEQ ID NO: 876367 - DNA, 682 bp, Homo sapiens
accttctatatcccactgtaggataggcagaaaaattctaatcccacttgtaccctgccttgaccataagatacaagggtttatttttcagtttatctgtttagataccttgtacataaagagccttaataattcactcgaatttcccccaaattatgtcctggaaatgagaaacaagcacttttgtattggtatgcaccacccccaaaaaatcatttggctgttttcctttcccttccaaccttatctgatcaagtttaatattctaatgcagaatagaaagtggcatagaaacaagcagacttatctctagcacatgaattcttagtctttccttgcagttcttggcaaaacaacacagtcagaaacctggctcttggtattttatttttattctaaatttyctgattagaagttgaatttatagtttgtttttattgatatgttaaactatatgcaatatttaagataaaacttctacaataatagtaatacccatacaacttttaaaaatcataatttatgcaaattctttgaatgtatttttcacgttataaagttaaatatcttaattacacaaagtacaaaatacatatccagaattccatatttacatcaataaattattaaataaataaattgagcttcagacaaatctgcaagcagagtaattctgttatat

SEQ ID NO: 876368 - DNA, 682 bp, Homo sapiens
accttctatatcccactgtaggataggcagaaaaattctaatcccacttgtaccctgccttgaccataagatacaagggtttatttttcagtttatctgtttagataccttgtacataaagagccttaataattcactcgaatttcccccaaattatgtcctggaaatgagaaacaagcacttttgtattggtatgcaccacccccaaaaaatcatttggctgttttcctttcccttccaaccttatctgatcaagtttaatattctaatgcagaatagaaagtggcatagaaacaagcagacttatctctagcacatgaattcttagtctttccttgcagttcttggcaaaacaacacagtcagaaacctggctcttggtattttatttttattctaaatttcctgattagaagttgaatttatagtttgtttttattgatatgttaaactatatgcaatatttaagataaaacttctayaataatagtaatacccatacaacttttaaaaatcataatttatgcaaattctttgaatgtatttttcacgttataaagttaaatatcttaattacacaaagtacaaaatacatatccagaattccatatttacatcaataaattattaaataaataaattgagcttcagacaaatctgcaagcagagtaattctgttatat

SEQ ID NO: 876369 - DNA, 592 bp, Homo sapiens
cacaagtgtaatatgatcaaaccggtttaatgtcatcaaagaactgtggtttcccaaatctggactatttttcacaccttttcaaagtcatttggggagtagctcttgaaaaacatttgcacaaagaaagtatactatatgccaacgcatgtggcatacaaatttaatagaaacactagaaaggctttgtagattaatgtcctttaaacatacttctaacaacacattagtaaattasatgttattaaggaaggaataatttgatatgtaatttcaatgcacatagaaagtgtgctaaatacaagtggatttaaagaaaccactaagcgaaataaaaagatgcaacctggtgagttgtatgatcttgggaaagtccctgtccctcatgtggacgtaaagattacctgatctatagctttacagagttgtaaagtgtaagaatggaagaaaatgcaaggaaaagtgctttgtaattgtatgttgctattcacatattacctagaagcctaacccacactgttatgcaaaggacaagtgatgagtataaatgaataaacccattagtaatgcagttaacatggtagttttacta

SEQ ID NO: 876370 - DNA, 639 bp, Homo sapiens
catatcagtgctaagaaaatggtgttgaacccacatagacaagtcttcgtgcctgtgaagtatttccagttgtggattttgacatgtatgctggtaattacaatattgctttagtcagtttgggctgctatgacaaatgccatagactaggtggcttaaataacacatatttctgctctggaggctggaagtccaagactagggtaccaatatggtagagttcttagtgatggctctcttcctggttatgtcctcacatggccagcctttggtgcatgcaagcagaaagagatcttgtgtcttgtccttttttttttttttttgtaatggcattaatcccatcatggagctccacctttatgaccttatcgaaacctaattactccccaaagcttatccttcaaatactatcacattatgggttagggtttaacatgaactggggagtgggactcataaacacacagtccatagcraatatagtgtggtcagtgctgtgataggaatgccagaaagatacagtggaaactgggttagaaggactgcttaaccaatagtgggaggacagtgtgaagaacctggagaaagtaatatttaagctgaagcctgaacttggagcagaaattaggttaaaagaat

SEQ ID NO: 876371 - DNA, 629 bp, Homo sapiens
ctcccaagtagctgggataacaggcatgcgccaccatgcctggctaattttgtatttttagtagagatggggttttaccatgttggtcaggcagtctcaaactcctaacctcaagtgatccatctgcctcagcctcccaaagtgctgggattacagacatgagccactgcacctggcctatttccaccttttttactaatcaagatagtctttccttttgaagggatcatgatgatagatgttaaaaatagccttatttgacaaaagtgacacttggccacctcttgtccttgtgttgtcttctctctcctaccttcagttttactcattagaaatycttgatgtattggaaccacaggtctaagatacgtgatgagaatctgttccattgatttctttctcaagtcgtatcttcagggagtgtttaagcttcatgaaattatttattgtatcctttgtgtttatcaaagactgttataagaaatggtcatacaaagatacttttgctctctcatattcaaaggatacttttcatcccattttcagcattcttctaacatgaaaggacctacaagatacattattcgtaggatttaatgccagcaaaatctgcctctcaaatgagcttg

SEQ ID NO: 876372 - DNA, 614 bp, Homo sapiens
gtgtagggggctaggtcatggagaatgcagactgattgtgttggggatgaaatcataaggagtcagagcttgtcttcttgccctgaatcagttcctgggtgagaaccacaatacaagatgacccagtttaccggtatgggtggcaccagctgctccatcagaaggtatggtctgaaaaayaccacaaacaccaatcttaggttttgtaatggtaatgttatctataggagcaattggggagcttagaaatcttgtgacctctggctgaatgactgctgagacataatatctaatcttgtggttaatttgttagttttgcaaaggtggtctttcccccaagcaaggaggaagtttgttttggggagggactgttatcttctctgcttcaaaatcaaactataaattagtttgcttggcctatgtccagaaattagccaaagttagcttggcctatgtccagaaatgaacaaggggcagctcagaggtaagaagcaacatggagtcagctaggtctaatgtctttcactctcataatgttcctatgtcagatttttctcactaacagcttttacaaaggcagtttcaatctatgagtagtaggcaatgtttggcta

SEQ ID NO: 876373 - DNA, 646 bp, Homo sapiens
atgtgtagtggtacatgattgttattttaatttgcaactccattatgataaaagatgttgagtgtcttttatatgcttatttgccatctatttattttgtttggaggtgtcagaactttgacccaatttttaaacagattatttgttttcctattgctgaattttaagaattatttgtatattttgggatataagacttttataggatatgtgatgtgcaaatattttctcccattccatggctttttttgcccattctagtcacagtgcttttcactaaataaacattttaattttgataaagtccaaattatttttttcatagacttttacttttgatgctgtatctcaaaattcatcataaatccaagatcatatstattttatcttatgttttcttttagaagttttgtagttttgcattttatattgttggagctcagaacatgctactgcaaaatgtagtgcctaagaggtcaatctctgactttcccttgcttttctgtatgagatttggtgataaaggaattctctgacatacctctcctgaaagtaggtcctaagaccctcatctgacagatggtccttccttacacccataggaaaggaatactacacaggaaaaccaagaagaatttgaacgaac

SEQ ID NO: 876374 - DNA, 679 bp, Homo sapiens
aaatgagccacaaaatagttcctcaggttgtaaccaaatttctgtaatcattgtcatcttcctaactatagtgcctttaaaacggatcataattgtaagtattataaataattcatttataataaattataaattataattcattttctagtaaaatatctataagttgtattagagaataaaataatatatacyttttcttttttgctcaaaatgtaaagattttgtaaagcattataagttacactaccaacagcattgtaaatgttgcagctttcttcacatctttgccagcattagatattaagaggtttttacctttaaaactttgctactgataaaaatgtaattgttttaatttatatatttcagcttggaaatttttcatgtttacttgctggtggcatttttgctttaattttatattcatgctctttgaaaatgtatctatttatgttttaccgtatttcacatcaatttgtgtaaactaactaattaacaatgacactggattgttattacactggatgtgaatttgtcctagtattttgttcattctattatttaatgtatttcctgtaaaattatgttttttctaatcaacttaccttttcctcaaataattatattttgtttaagctcaagataatttttactctagaaatttgataaggattcc

SEQ ID NO: 876375 - DNA, 577 bp, Homo sapiens
tattaaatggcaggcactgttactaatagcctatacctgttacaaaggaaaagtgggagagggtgtgaagaatttggacaccaaagacaatatttcctaacattttccaagtcatagcacacataggcatcaatgatatctatgcagctcactggaaccattggtttatgggtaactggatgtgtagattcaaagctggtggtgtctacccagaggtcgagacacccaaatctctatcagttccctcaaagttcaagtggaccagaatctgggcacaattacaacccattcatagcacagtggtgaaaagctctgactcatgggaatatgaaagcaagaatgcactaaaaagaagaaacagaatacacagaggcaaaaggcaaaggatactgttttttttactaacagttttgamtcagctgtgtccagtcacctatatgcagctactgggtccataatttgtttatcacaaacaactggtggcaatatgttgtttggaaaacaatttttcccattttaaaaaggtacactgatgtatatatcattagcaaaatgatggaataagagttttctactg

SEQ ID NO: 876376 - DNA, 606 bp, Homo sapiens
aaaggatgacctggagcacaggatggaatgagacagcacagcagtccgaaatgggtaatggctcaaagatagagtgaggattccttttcatccttttagaataaataaaattgaatttgaaaatgtaacagtaaggtttgttaaaaatctcccaaatcaataataatattacattcttttctccttgtctagactgaagcttttcttagctctgaatctgggcaaacaccattctctcttctaagaacttaattcttttttgcctttaccttcttagaccccatacctacactgtaaggtataagaagatatcaattgtattcakagggttgcattttctaaatagagtaggcaatcaatagatatttgttgaattgcctctagtgggatgcccttcccccacacatcttttctcaccgtggacttctttcctacctggctccaaagttcaggaattacaatccagtttttttctctttttagattagaccaacttgtcccaaaactttgtgctatagaaaatgaccttaaaagatactctgaaaagaaaaaataattattccagagttaaataggtttgggaaatgtgttatccagtattttttc

SEQ ID NO: 876377 - DNA, 545 bp, Homo sapiens
tttaatttcttttcttctcctagtctcgggtttggtttgttcttacttttctagttccttgaggtgagatgttagatttttaattggagatttctctatggttttgatttaagcatttaatgctataaactttcctcttagcactactttttctgtgtcccagaggtttggctatgttttctctctattgtcattcatttctatttttttwaatttctgccttaattttgtcacttatgcaacgatcattcagcagcaagttgtttaatttccatgtatttgcatattattgagggttccttttggtattgatttctaattttattccactgtggtctaagaagatattatatatatatatatatatatatatttatatatatatatatatatataaaatataaatattttaatttgttgagacttgctttgtggccacgcatatggtcaattttggagaatgttccaagtgcagatgagaaaaatgtatattctgtgtatattctgtaaatgtctattaggtctgtttggtctagagcccagtt

SEQ ID NO: 876378 - DNA, 545 bp, Homo sapiens
tttaatttcttttcttctcctagtctcgggtttggtttgttcttacttttctagttccttgaggtgagatgttagatttttaattggagatttctctatggttttgatttaagcatttaatgctataaactttcctcttagcactactttttctgtgtcccagaggtttggctatgttttctctctattgtcattcatttctattttttttaatttctgccttaattttgtcacttatgcaacgatcattcagcagcaagttgtttaatttccatgtatttgcatattattgagggttccttttggtattgatttctaattttattccactgtggtctaagaagatattatatatatatatatatatatatwtttatatatatatatatatatataaaatataaatattttaatttgttgagacttgctttgtggccacgcatatggtcaattttggagaatgttccaagtgcagatgagaaaaatgtatattctgtgtatattctgtaaatgtctattaggtctgtttggtctagagcccagtt

SEQ ID NO: 876379 - DNA, 629 bp, Homo sapiens
taggtgggaattgaacaatgacaacacatggacacaggaaggggaacatcacacaccgaggcccgtcatggggtgggggaggaggagggatagcattaggagatatacctaatgtaaatgacgggttaatgagtgcagcacaccaacatggcgcatgtatacatatgtaacaaacctgcacgttgtgcacatgtaccctagaacttacaataaaaaaaaaaaagaatttctttcaaaggtgataaatagtactgattggacaagtatactttgaatatagtccctgattttgcaatgatagtttcataataagaaagcctactttaaggaagccaatttttttgtgtttgtttgtttgagacagagtctcgctctgtggccaggctggagtgcagtggtgtgctcttggctcactgcaacctccacctcccaagttcaggtggttctcctgcctcagcctcctgagtagttgggattagaggcrtgcaccaccatgcccagctaatttttgtatttttagtagagatggggtttcaacacgttagccaggatggtctcaatctcctgacctcgtgatctgcctgccgcagcctcccaatgtgctgggattacaggcatgagccaccaca

SEQ ID NO: 876380 - DNA, 662 bp, Homo sapiens
aagagaaatgataaaatataagtaagcatttagtaaatttagcaacttttcttcttttaagagacaggttctcgctctgtcaaccaggcgggagtgcagtggcatgatcatggctcactgaaactcaaactccttggctcaaatgatcatcccacctcagcctcccaagtagctaggactgcaggtgagcaccctgccaaggtaatttttttttagagacgaagtcttacaatgttgctgaggctggtcatattattattttattactattaattatatattagctggtacataatattccatagtgttctgggctacatatttgtgtaccctgagaattcctgttgaaatcctaracctcaatgagatggtttcaggagatggggcctttgggaagtgattagttcatgtaaatcctcataatgggtttaatactcttgtaaaagagactcccccgcaaaaaaacagagacctcagagctcttggccctttctttaagaagacagcaatatatgaaccataaaatggtgctccccagctaccaaatctgctggcaccttgaactaggacttcccagcctccagaactgtatgaagtaaatgtctgtggtttaagccacccagcttatggtacttttgttatagtagcctgaactataacag

SEQ ID NO: 876381 - DNA, 590 bp, Homo sapiens
tgaagggctccatctcaacacacatttccgtaatcattgcagtagaagagggcactgggtgctctcacactggaaatcaaatattctagcatggaagtgatgcaagccacctccaacatatgcctggaaggaaagaaaaagtggctatggggaacattaacagtctctaccacagatgatattaagacacaacctgtggaataacaaagggatttgttaaagatgatgcacaaataaaacatctgaacagctataagattcacataatcatgaaccaggaagggtgtgtaggtgtcattttagagcagtggcctcaacataaagacacttcatacaacataaatctkgaccctaaatttccagaacagctctgctttctataaatatactgagggtccagataaatttttatttaggaaacaaagttttaacagctgaaaaacatttgaaaactatgaatgtaaaccaaatcctttattttacaaatttaaaaagtaaagagaagaaaaaaaggagacacagacagttaaagtaaccccaatctacccctcaaggaaggtctagaatgtttagcagaaataagtccatgg

SEQ ID NO: 876382 - DNA, 500 bp, Homo sapiens
gcttgaacctgggaggtggaggcggcagtgagctgatcacgtcactgcattccagggtgacagtctgagactccacttcaaaaaaaaaaaaaaaaaaaattcaagatggattaaatagttaaatgtatgacccaaaaatgtaaacctactagaagaaaacatacggaaaacacttcaagacactggtatagagtttgtggtcgagacctcaaaaacacagggaccaaaaacakacgaatagggctacattgaactaaaaatcttctgcacgggaaaggaaacaataaccagagtgaaagagacagtctgtcccccagtttgaatattcagtagtttgaatattcaatagcttgcatattcagtagtttgaatatctgcaaactattcatccaacaaagggctactatccagaatgcctaagaaactcaaactaaacacacacacacaccaaaaatccaaataattccattaaaaagtgggcaaagaacattaataaacat

SEQ ID NO: 876383 - DNA, 603 bp, Homo sapiens
cagcaaagaaaacaatcagcggtggggtgtggtggctcacaccagtaatcccagcactttgggaggccaaggtgggtggatcacctgaggtcaggagtttgagaccatccaggccaacatggtgaaacctggtctctactaaaaatacaaaaataagcttggtgtggtgtcaggcacctgtaatcccagttacttgggaggctgaggcaggagaatcacttgaacctgggagggggaagttgctgtgaactgagattgcgccattgcactccagtctgggcatcaagagtgaaactctgtcttcaamcaaaaaaaaaaaaaaaaaaaagaagaagaagaaaacaatcagaatattattaggtaatttctatgttacaaacaaactactactcttttgtgtgttttccttatattaagaaataactctaataaaatattgaatagaagcagagataatgggcactattgtctcattgctgatattaatgaaaaaatttcctctatttcatcagtaagtttatttattatagattttcaaagatactctcaaattaagacagtttctactattttcagttttatgttttctcagttatatttgca

SEQ ID NO: 876384 - DNA, 573 bp, Homo sapiens
gaaaatgtgactaattttaagcttatttctcattttgttatgttattgaagagacaaaagagaatttttatgcagacattttataatagatgcattgtaaaacatgttggtttaactgaaaatctgattttgtactcataattgaaagatagttctttgttaggctgagaaggtaaactgggcaatggctttttagagtgaagactgtgctcagaataagctggaggagattcagttcaccgtcttaaccccgagttgattttttctacctttctactccatcatccataaatgaatatagtgtgctgttatatgtatgagacactaaataaacttatgctgaatrttgagtgaataaatggtcgtattcaacaataccccaactacataaatatctcagctaaataaaaataccatcattcattttctgaattccaatatttctgatttccactttcctcatggttcaactggcaattaatataatttcttttttattatactttgagttccgggatacatgtgcagaacgtgcaggtttgatatataggtatatgtgtgccatggtggttt

SEQ ID NO: 876385 - DNA, 573 bp, Homo sapiens
gaaaatgtgactaattttaagcttatttctcattttgttatgttattgaagagacaaaagagaatttttatgcagacattttataatagatgcattgtaaaacatgttggtttaactgaaaatctgattttgtactcataattgaaagatagttctttgttaggctgagaaggtaaactgggcaatggctttttagagtgaagactgtgctcagaataagctggaggagattcagttcaccgtcttaaccccgagttgattttttctacctttctactccatcatccataaatgaatatagtgtgctgttatatgtatgagacactaaataaacttatgctgaatattgagtgaataaatggtcgtattcaacaataccccaactacataaatayctcagctaaataaaaataccatcattcattttctgaattccaatatttctgatttccactttcctcatggttcaactggcaattaatataatttcttttttattatactttgagttccgggatacatgtgcagaacgtgcaggtttgatatataggtatatgtgtgccatggtggttt

SEQ ID NO: 876386 - DNA, 553 bp, Homo sapiens
aggtcgtttagtttccttgtagttgtgtggttttgcacgagtttcttaatcctgagttctcttttgattgcctgtggtctgagagactgtttgttatgaaatctgttctcttgcatttgctgaggaatattttacttccagttatgtggtyaattttagaataagggcaacatggtgctgaaaagaatgtatattctgttgatttgggatggagagttctgtagatgtctattaggtctgcttggtctagagctgagttcgagtcctgaatatccttgtttattttctgtctcattgatctgtctaatattgaccgtggggtgttaaagtctcccagtattattgtgttagagtctaagtctttttgtaggtctctaagaacttgctttatgaatctgggtgctcctgtatcgggtgcatatatatttaggatagttagctcttgttgttgcattgatccctttatcattatgtaaagcccttctttgtcttttttgttctttgttggtttaaagtctgttttatcagagactacaattgcaatttttgcttt

SEQ ID NO: 876387 - DNA, 566 bp, Homo sapiens
gatagttggagtggaatgtgattcttcgctaaatgtttttttgaaaataaaaatttacctgaggggttggatattggtttatatggggcactgaaaacagctattatgtgggttgccttctgttagtgtaaatgtgtacttgtcctggcacttggtgagagctgtcttatgayttcaattgtcatcgatctgttcaatgttaaaggatgtcttagaaaatcagtccaaagccagcctcataggctacaaatctagttttagtgctattataattttttgtggccaaggtaacagaaattccataatcctaacttggtataaccttttcttttccctataatgtattcaaaaacatatatacataatagactatgatgaatgggaattcaaaacatcaatttattattattggttgagtttatgcttaaaattcaagtgcagatttctctgtaagctaaacaggcatatgtggcctagttagaaggcctaagggactttactctcttgctaaggccaactacaaatctaaaaatcttacccctctcctgcaaattacatatgactgg

SEQ ID NO: 876388 - DNA, 565 bp, Homo sapiens
tccgatactatcttagtcaaaattcctctgtaaaatgttcagggatcctctgcttcagtgccttccacatatcccaacagtttattccattactgtttatgctatccctttaattaaaaaaaaaactaaatattgaaggtatatacttcatctaaagtcacagaagactagacctgaaacctaaatcttttcacatcaccctaaagatctttcatcttcattttacagcttgaacgtattttgtaggatgagaatttttattttcctggtcttaagtctttctatcagtacagatgacaacacactatggtggtccctaatggcatcttgagcagatgggggctgccttctcagatgcmccatggagctgaatccatagatcataaaaaggcaattatatcgatcacatgattcatttaggctatggatttatattaatactatgtaaaaatccactggactagaatcagctgtcctcatgtgcctgagcaaaaaataatccaaacaattctctttggtatcagttagatacaggtactccttcagaatcagagaattccagctt

SEQ ID NO: 876389 - DNA, 589 bp, Homo sapiens
tcacccctgctttgtttttcttcaaaatacttgttcctatttgatattaaccctattattgtttaaagtgtatctccccccatctcatgccagttagaatggcgatcattaagaagtcaggaaacaacagatgctggagaggatgtggagaaataggagcgcttttacactgttggtgggagtgtaaattagttcaaccattgtggaagacagtgtggtacaaggatctagaactagaaataccatttgacccagccatcccattactgggtatatacccaaagaattataaatcatgctgctataaagacatatgcacacatatgtttattgcggcactattcacaatagcaaagacttggaaccaacccaaatgtctatcagtgatagactggattaagaaaytgtggcacatatataccatggaatattatgcagccttaaaaaaagatgagttcatgtctttgcagggacatggatgaagctggaaaccatcattctcaacaaactaccacaagaacagaaaaccaaacactacgtgttctcactcataggtgggacttgaacaatgagaacacttggacacagg

SEQ ID NO: 876390 - DNA, 629 bp, Homo sapiens
cacatttcaggtacttgtcagaataccacttcatactttttcccatataccagactcttgtgagaatataatcaatatatttaaaatgtcttgggtgatattaatggaaacataaattctgagtaagaaattcagtggttaagtgtaaaatgtttattttagtgaaatacaagaaggtgagcaatttccaatttccgtttaacttgacttattaaaaataagtctcattcacattcttctagtattattgtatactgctataaaatttaaaccagaaaagtgcttctccttgtcagtagctatctgcccaaaaaaatgaatatgacaattccagatctcatctgccatctctaagaaagccacttggaaatgttagrtaggtcccatgggtcctgatccagggatctgtccctgggtccccatcaggctcggctgcaggcagttgcctaaggcgtcttccgccttcagccacgctgcaatccttgctccaggcactgcggcaggttctctccatgcccccaggaagactctccaaacccgaccagctcatttctcctgccccggaggatccagacgccctggcagctcctgggctccagaaccgagaatgggatgctgcctccaatccc

SEQ ID NO: 876391 - DNA, 561 bp, Homo sapiens
agtgcagtgatgcaatctcggctcactgcaagctccgcctcccgggttcaagcaattcttctgcctcagcctccagagtagctgggattacaggcgcatgccacagcgcccggctaatgcttatatttttagtagagacagggtttcaccatgttggccaggytggtctcaaactcctgacctcagatgatctgtctgcctcagcctctcaaagtgctgggattacaggtgtgagccaccacacccagcccaagtgattatttttaatttgaataatcatgattcaaggaaagcagatttaactatagaaaaaggatatcttctaaccattctctcctggtggctatcttccatgtttctcagacatttttttttttttttaatggaattaagacatgacttgagggcctaagtcttactctgcccatagctctgagtaatttcaggatccacaaggaaccatgtttaacaccccagtcactcttttcactcatctcttcatcttcagggatcttctccactcccttctagttctcccacttccgcaggcactccctggac

SEQ ID NO: 876392 - DNA, 575 bp, Homo sapiens
caattgtaagaggaaaaaaataccaattgctggtgaatttgcagagcattaggaacactcattcacttctggtagaaatgcaaaatgatacagccactttagaagataatttggcagtttcttacacagctaaacatatggtaaccatatgatacagcaatcactattttgggtatttacccaaatgggttgaaaacttatgtccacacaaaaacytgctgattaatgtttacaaaactttatcgataattgcccaaaatggaaagcaaacaaaatatctttcaatatgtgaagggataaataaaaactggtacatccatgcaatgtaatattattcagtgctaaaaaaataatgagctattaagccacagaaaagatatgaaaagaatcttaaatgcttgtctgaaaaggctacattccatatgattccaattatgtgacattcgggaaaaggcaaaactataaaaatagtaaaaaaaaaacagtggttgtcaggggttgggggaggaagagaagaattaataggtataggacaatggatttttaggactgtgaaacgttttgtattatactgc

SEQ ID NO: 876393 - DNA, 638 bp, Homo sapiens
ctccaggtcccacatccaggtcatgctgatgcaagaggtagattcccatggttttgggcagctctgcccctgtggctttgcagggtacaggctcccacctggctgctttcacgggctggcactgagtgtctgcagcttttccaggtgcacagtacaagctgttggtggatctactattctagcttttggaaggcagtggccctcttcttacaactccactaggcagcrcccctgtagggactctgtgtgggggctctgaccccacatttccctcccacactgccctagcagaggttctacatgagggtcttgcccctgcagcaaacttttgcctggccatccaggtgtttccatacctcttctgaaacctaggcagaggttcccaaatctcaattcttgacttctgtgcacctgcaggttcactgacacatggaagctgccaaggcctgggacttccaccctctgaagccacagcccaagctgtactttggcccatttcagccatgactggagtggctgagacacagggcaccaagtccctaggctgtacctagtacgaggaccctgggcccgatccatgagaccactttttcctcctgggcctcagggcctgtgatgggaggagctgctgtgaaggt

SEQ ID NO: 876394 - DNA, 644 bp, Homo sapiens; identical to SEQ ID NO: 865585

SEQ ID NO: 876395 - DNA, 502 bp, Homo sapiens
cagcggataccaaggcgagagattctaatcacaaggaataccagaaaaaaaaaaataagcaggagacaagtttattacgaagggttgtgaacagtatttgtgattaatgtggaatgaaaaaggttatttctacattaaaatcattcacatttgcaataatttaaacaatttatctggtttscccaagtggggatgtgttctttccacatataacatgctcagtgaaggaagaacaaggaaggttacgctgccctgaaacatatctgggagagcttttcggctctgggaggatcaccaagttatgttgttaagtgacaaaaacaatatccggaagagtgtcaaacagctaattattgtgtaagaaggaaaaaaagaagactacattagtcacatttacttatatttatatgaaaagctaataaaagtagctaggtatacgtaaggcagtcagaaacaagacttttcaattataacttttatatcattttaatttaaaagttac

SEQ ID NO: 876396 - DNA, 641 bp, Homo sapiens
tgtatttaaaagggaaggacagcttgaaaatttggaaaatgtgcagcctagccatgtgacaaagaaagacaaagtttttggcgttttgttttgttttttttttttttagatggagtctagtgcttttgccagtttggagtacagtggcacgatgtcagctcactgcaacctccacctccctgattcaaatgattctcctgcctcagcctcccatgtagctgggactacaggtgtgtgccaccatgyccagctaatttttgtattttcagtaaggatggggtttcatcatgttggccaggatggtctcgatctcttgacctcatgatctgcctgccttggcctcccaaagtgctgggattacaggcatgagccactgcacccagcccaaaaagcttttctgggagagaaattaaagcagactatggagcaaccacttgctagagagattttcataactaaaaaggaggcaaatgctaatatcaagacaatgtgaaaaagacctcaaaggcattttaaagacttttgcagcagcccctcccatcacaggcccagaggccaaggagggaagaatggttttgtaggccaggcccagggctctgtcatccttgacagcctcatgacacagctccctgcatccagat

SEQ ID NO: 876397 - DNA, 641 bp, Homo sapiens
tgtatttaaaagggaaggacagcttgaaaatttggaaaatgtgcagcctagccatgtgacaaagaaagacaaagtttttggcgttttgttttgttttttttttttttagatggagtctagtgcttttgccagtttggagtacagtggcacgatgtcagctcactgcaacctccacctccctgattcaaatgattctcctgcctcagcctcccatgtagctgggactacaggtgtgtgccaccatgcccagctaatttttgtattttcagtaaggatggggtttcatcatgttggccaggatggtctcgatctcttgacctcatgatctgcctgccttggcctcccaaagtgctgggattacaggcatgagccactgcacccagcccaaaawgcttttctgggagagaaattaaagcagactatggagcaaccacttgctagagagattttcataactaaaaaggaggcaaatgctaatatcaagacaatgtgaaaaagacctcaaaggcattttaaagacttttgcagcagcccctcccatcacaggcccagaggccaaggagggaagaatggttttgtaggccaggcccagggctctgtcatccttgacagcctcatgacacagctccctgcatccagat

SEQ ID NO: 876398 - DNA, 574 bp, Homo sapiens
acatgattacttttgtatttttttaaatttataagtaaaacaaaactcctggaactgataagcaattatagcaagtttgtgggatataagattatacacaaaagccagctgctttcctgtgtatcagtaattaaaaatgaaatttaaatttaaaaagatattaccatttaaattagcacctcaaaaatgaaatacttaggtataaaccaaatatgttcaaaattatatgaggagaactataaacctccgatgaaagataacaaggaaaaagtaaataaatggagaaatactctacrttcatgggtaggaaagaaaaacattaccaatatgtcagttttcccatctcaatatatagatttaacataattttcatcaaaattccagcaggttattttgtgcatatcaacaagccaattccagattatatgggaaggtaaaatatccagactaacaagtcagtattgaaggaaaagaacaaaactagaggactctctctaacttaaagacaaactataatgttacaataatcaagacgtggcaatgatgaaagaatagacaaatagattaatacatt

SEQ ID NO: 876399 - DNA, 557 bp, Homo sapiens
agaagggaggaccgctctcaggatatatagtgaaagggagttgtggcttagtgggattggggtggaagttctcagtaattgctatggactggcagggtgtggtggctcatacctgtaatcctagcactttgggaggctgaggtgggaggatcacttgagcccaggagtttgagactagcctgggcaatatagtgagaccccacctttataaaaaataaataaatacaatttttaaaaggtgttatagactgaatgtttatgccctccccctgtccccctaccaaatccatacattgaaatctaacccaatgtgatggtatctggaggtggagtctttgggaggttactaagtcatkaggatggagccctcatgaatgagattagtaatcttataagaagaggccagagagctagctctgtttccttccaatatgtgaggatacaataagaactcagcagtctgcaacctggaagagggcccacatcagaactccactatgctggcaccctgatctcagcttgcagcctccagaactaagaaaaataaatttccactg

SEQ ID NO: 876400 - DNA, 617 bp, Homo sapiens
gaacaaaaggaaataaattgtacctggaagagggccaagcaggcaacttgagagatcaagtgccctgtttgatctttgacttggagttttacatgttggcatacttctgaggtctttcatcccttctcccaattcttcccttggggtggcctatttgtatgtgcagtggcctgccagctcttgggagtggctgcatgctcagtgtgtttactggaattgtgcatgtgctcacttcaagcatttttctcataccagttgagtgttcctaggggaattcatacaccagttaaactttgccatttttcctcttagtgttcatgctcgagcccagtcacccaactcytgagaccttatcaggaagctgatcaccagtttcaggtttttctatctattgggagactacctttccctggcgctggatgtgcccaactattattttagagagaccgctaacaactgcctgaccgtcatctgatgttcagctgacatttctggtgggatgcaaggagccctctcttgccctgatcatgtgtgaccaactacctactgtaacaccattactgattctattagattcatgaaaatgctgtgtaacacacagaagctgctaatatttt

SEQ ID NO: 876401 - DNA, 639 bp, Homo sapiens
atttcgtggcctacccagtttttaagtccaaaaagaaaagcctcctgcttggtctgtatccaatagaaagtcatttctctatcagattgatgccactcttttaggtagacaaaaacactgtttcttcaactcagttttagtcatcattgcacactgagttacataatatagtagcatactctttctaataaaccctctttctggtagaaataaaaagaaatttatttgcaacttcagcaaagcctcaggatacaaaatgaatgtccaaaaatcacaagcgtttctatacaccaatagacaagcagagagccaaatcatgaatgaactcatgttyacaactgctacaaagataacaaaatacctaggaatacagctaacaagcgatgtgaaggacctcttcaaggaaaactacaaaccactgctcaaggaaataagagaggacacaaacaaatggaaaaacgttccatcctcatggataagaagaatcagtatcatgaaaatgaccatactgcccaaagtaatttatagattcagtgctatttccatcatactaccattgatattcttcaaagaattggaaagaaaaaaccactttaaattttatatggaatcaaagaagatcccatatagccaagacaa

SEQ ID NO: 876402 - DNA, 639 bp, Homo sapiens
atttcgtggcctacccagtttttaagtccaaaaagaaaagcctcctgcttggtctgtatccaatagaaagtcatttctctatcagattgatgccactcttttaggtagacaaaaacactgtttcttcaactcagttttagtcatcattgcacactgagttacataatatagtagcatactctttctaataaaccctctttctggtagaaataaaaagaaatttatttgcaacttcagcaaagcctcaggatacaaaatgaatgtccaaaaatcacaagcgtttctatacaccaatagacaagcagagagccaaatcatgaatgaactcatgttcacaactgctacaaagataacaaaatacctaggaatacagctaacaagcgatgtgaaggacctcttcaaggaaaactacaaaccactgctcaaggaaataagagaggacacaaacaaatggaaaaacgttccatcctcrtggataagaagaatcagtatcatgaaaatgaccatactgcccaaagtaatttatagattcagtgctatttccatcatactaccattgatattcttcaaagaattggaaagaaaaaaccactttaaattttatatggaatcaaagaagatcccatatagccaagacaa

SEQ ID NO: 876403 - DNA, 706 bp, Homo sapiens
atatttcacatactcttatttataggagtctccacttggcacattatctactcaacttgttcaaggttctggtctccctaaaacacagctcaaattaaaatataaaatctaagtacctagtgaaagaaagagccatatcctaccagttgcaaaacctaatattctctgtttaaagttaggaatttcaaattaatcatttgtttaattaataaatggtcccaagacactttgcagaagttttcttatgggccagaattctgaactgtatcttaattcttggccatttctcacataaaacaaattattttatcaaagatgccaaatgctagtactttaggctccaaatacaggaggcttactttcactgagagcattacaattgatctcagaccagagtgggcagggctccgtagaaaggtaaggtaattaattgtcaagasatctgggttcatgtactggcttcatgttactactgacttgtctccctgggtaagccacttagataaagtcatactttatttttctgtaaatgatatttattctaaaaagttattgtgagatgaacgaagttacaaaatgtgaatttactaaatgaactcaaaagttacatatgagtacaggaaatgttatcagagctagagtcaccaactcaaacacctataagggccatactaacttctcaatgcatgaagtggatcaaccaggg

SEQ ID NO: 876404 - DNA, 581 bp, Homo sapiens
actctatagaatattgagtcacaagacaaaataatttttgtacctatgtcacaagtgtaatacaacagatgcagcaaagtgttttctccacttttgacacagaacccagagttactctggcacatcaggagaatacctagggctcgggtggcagaagaataggaggaggcagtgcctagacgtggctgtgtgagggcagaaggatgatagagggttgaagggtagattactacattgatggcatgaatgagattgattaagaagaggtacacagcttcttgggtggagctgctgtggtcatacactttctttgccaatagccaccattccttcttcctacactctccgtttggggaaggctgagatgccatgtacacaggcacagtgaggacaccatgcaggaatgytcagaataggtgagtaagattatcagaggtctcaaagtctgcaagagcaggtttgggtgaaagccagagaaataataataatgattagaaccatacaaataacatctattgagtttaacgtgtgctaggttctgtgccaactgctttacatttagtgtttctttcagacttcat

SEQ ID NO: 876405 - DNA, 632 bp, Homo sapiens
gggaagtggagagaaaatggggaaatacaggtcagggaattcaatgtagcagatctgtaggacaaacaagtctagagaacaaatgtacaaatgaggactataggacataaaagtgtactgtatttgggattcatggtgagtagattttaactgctcctgccacaaaaacaaataaacagataaatatgtgagatgatggmtgtattaatttgctttattccagtagcctttttactatatgtatcccacaacatcatgttgtataccttaaatatacacaacatttatttttttaaaggaggagatacttccatatttggcatatttttaatagctccaaaaatgtcttcctgactccagaaagttccatatttaaaatcccactacacacaacacaatcttttattacataacagaatttgaaaagcaaaacttaaaacataaatcttcctagaagagtctatatttcaattagatttttattaaagttaaaattactggtagctgagcttttcctgagagaccactgtgatcacagaaaattactgacatcctaaattgaagggtgactctttggagagaagagaagggtagaaaaagaggagagatattggccactgtcccattttacc

SEQ ID NO: 876406 - DNA, 632 bp, Homo sapiens
gggaagtggagagaaaatggggaaatacaggtcagggaattcaatgtagcagatctgtaggacaaacaagtctagagaacaaatgtacaaatgaggactataggacataaaagtgtactgtatttgggattcatggtgagtagattttaactgctcctgccacaaaaacaaataaacagataaatatgtgagatgatggatgtattaatttgctttattccagtagcctttttactatatgtatcccacaacatcatgttgtataccttaaatatacacaacatttatttttttaaaggaggagatacttccatatttggcatatttttaatagctccaaaaatgtcttcctgactccagaaagttccatatttaaaatcccactacacacaacacaatcttttattacataacagaatttgaaaagcaaaacttaaaacataaatcttcytagaagagtctatatttcaattagatttttattaaagttaaaattactggtagctgagcttttcctgagagaccactgtgatcacagaaaattactgacatcctaaattgaagggtgactctttggagagaagagaagggtagaaaaagaggagagatattggccactgtcccattttacc

SEQ ID NO: 876407 - DNA, 496 bp, Homo sapiens
tagtagtagggttacctgaatctggcttaataatcaattaagcagtatttatctttaaacattttttcctttatgaattgcgtcacacttttaaagagcccttcctacaagcatatataaaatatattcttatactattttagaataatttcagaagttagattgttttctagtttttagtgttttcattgacaccaaatttatttttatgtacataaatgtatgattttaagtcagattatttcaaactggtatccctgcaattatctgaacaraatttttaagtagtcacattgacttttttttttttaaagttagttttaagctatttgataacatatggatctacttcactaaagttttatttttgtgtgtaattctttaatccatctggagatattttggttgtttttcaatcagatagccagttaaaccagaaagaaaaatcttaccaaaaagtttccacttagaaaatttaatagccaaaaaatctaat

SEQ ID NO: 876408 - DNA, 657 bp, Homo sapiens
aaatatattgagaaggggaatttgaatcagaaagaaagggcagtgatcagttggaaatatctgaatacatattgcctaatgggcatgtcctctctctgacaaaaagcctgatctgactgcaaatgaggcaaattgtggccggtagcagcatgaacctccttctccaccaaaggattgctcagtaataacagtctagcagaaactcaccttgaaaaaaaaaatgtagacaacatgaaaaaaagaaagaaaggaagaaaatcaacagtcattcagagaagtgccatcattgtaagtgcatagggtaagatttaaaataacataaagcaaatgaaagatgcataaaatacaaaagaaagacggcagagagcaataaaaagagtacttccaaataagtagaattaatattctcaggggaatgccagaagttactgcatccattaataaagaagaggaaagctaaaaatgagatcattgaagtaatgatggatatataatmtctcaataaataatgactaattgcatatatagtaaaaagaaggctgaaatatttttaagcatactcttgcatagtaaaataaatgaggtcaaatgaacaatacaaatacacttctttttggacactgacttctacttgcacctgcagttctggtcctctct

SEQ ID NO: 876409 - DNA, 580 bp, Homo sapiens
gggcctaatcggcagaaattagtcatgctaacctaaagctttggagctgggtcttccttaaccaagggagagaaaaggctatcttgggaattggggtcctggcctaataagaaaaaaaaaaaaaaaaaaaaaaacctctcataaaagttaactccttacaaagtggagaaaagaaaaaaaaataaaataaaccagcttaagtgcaggggggggaagatgcctggaggagaaaccttttatttttatgcaaatgagttcctccaatagggagagaacattttaattgctgtctcctcctttctggctcagccaggggaggaaagacactgtgggtgcatggggagagggaagagtgagcaggaaawgctggccacctaggcaagtggggcccttgggttatgtgccccagccgggaggggagggaggttgggagatgccgctctcccatttgtctcacatgtgtacctgtggccattggaggttggggtaagggacatgtctctaaaaacggagggagagcacattgttctgaattgtatagaatttattaagttaaaggaaagctctcagcaaagagagg

SEQ ID NO: 876410 - DNA, 542 bp, Homo sapiens
acagagagagggaggaattcaggagcaagaccctagactgtggtgtttgcaggaagaaaccaagcagggtaaacaagcttaggactggctcgtttgaataatttcagtgggctctggggcataagagttgtccctggttstctggtttttggccctagcgtgattaggacagaagcacagtggcctggagtgtgagagccctatagagtatgtgtttgggaattggttagtttgtatttgtaaagcccattttcatgaggagttcaggggagacttcgtagccagaagttgaggcaaggtgactccagcatactatccatcttcaagaacaagatgtgtctgaattgttgtatgttataaagtttcgatgtctaatagggcaaatctttcatcctgttggtcctctttgatttaatttgctgtttttctctctctctctaagtactgttctcggaataatccaatctgatatgtgtgtcactattccaaggaatgagtagatcacactttatttttctgcttcttatgaacattaatttgtt

SEQ ID NO: 876411 - DNA, 542 bp, Homo sapiens
acagagagagggaggaattcaggagcaagaccctagactgtggtgtttgcaggaagaaaccaagcagggtaaacaagcttaggactggctcgtttgaataatttcagtgggctctggggcataagagttgtccctggttgtctggtttttggccctagcgtgattaggacagaagcacagtggcctggagtgtgagagccctatagagtatgtgtttgggaattggttagtttgtatttgtaaagcccatyttcatgaggagttcaggggagacttcgtagccagaagttgaggcaaggtgactccagcatactatccatcttcaagaacaagatgtgtctgaattgttgtatgttataaagtttcgatgtctaatagggcaaatctttcatcctgttggtcctctttgatttaatttgctgtttttctctctctctctaagtactgttctcggaataatccaatctgatatgtgtgtcactattccaaggaatgagtagatcacactttatttttctgcttcttatgaacattaatttgtt

SEQ ID NO: 876412 - DNA, 542 bp, Homo sapiens
acagagagagggaggaattcaggagcaagaccctagactgtggtgtttgcaggaagaaaccaagcagggtaaacaagcttaggactggctcgtttgaataatttcagtgggctctggggcataagagttgtccctggttgtctggtttttggccctagcgtgattaggacagaagcacagtggcctggagtgtgagagccctatagagtatgtgtttgggaattggttagtttgtatttgtaaagcccattttcatgaggagttcaggggagacttcgtagccagaagttgaggcaaggtgactccagcatactatccatcttcaagaacaagatgtgtctgaattgytgtatgttataaagtttcgatgtctaatagggcaaatctttcatcctgttggtcctctttgatttaatttgctgtttttctctctctctctaagtactgttctcggaataatccaatctgatatgtgtgtcactattccaaggaatgagtagatcacactttatttttctgcttcttatgaacattaatttgtt

SEQ ID NO: 876413 - DNA, 458 bp, Homo sapiens
ggaggagtcccctccagattcagatttgcgtaaggcatagaatcacaatctctctctacttggaacgtcagaattcctgcaaataaaaagggcctgctaatctgaatagctagaactgtatttaggggtgtgacctgctttcctgggggcctggcaagggagctgaagtggctccctcccttccccgtgaaaagacctcagtgcatttcactaagagctcccacagatgcctcrgtcaaggcttggacttcttcccaccattgggtattgcatttaccaatctgctggttttcattcagggacacctaccctactggcctgaaatctgaattattcaaccaggtaaagaaaacactgggagaaataaaaaggcaaaaaagtgtacaccacttgggaactagataagcttcataagacctctgccattgctaccccacaggaaacagtgaacctccaca

SEQ ID NO: 876414 - DNA, 582 bp, Homo sapiens
acatcatacattgatttaaagatacacctcatatatgaaatagcaattttctacaactattatggtatgaagcgttattttagtgaaaaatatttaaaagagaaaccatcacacatgaaagctgattactgctgaaaagagtagagttgggaattgtttccaaataagaacaagtaaggcataastgagtaagaaaatgaacatttttagatatttttttctagacatttttccctgaaaaggagagataaggggcaagtggaaaatatattaccacagacacataaaattaggaataaagaaaaataagctgcaccaaattcctcgtcaaatgttcccctgaatgttagaagcgcagaatgataacatagtagttttggttatgcctggagttatttatctgaaattgttaatgtgctttagaaaagaagaaatagtgcttcatgacagaaattagtgagctctttcagcatgctagacactcttttaagcccagcagagagaactgggaatgtattttggtccctgccctcaaaaacttcacagtttgagctagacagagaactcagacagtggcaacag

SEQ ID NO: 876415 - DNA, 638 bp, Homo sapiens; identical to SEQ ID NO: 875571

SEQ ID NO: 876416 - DNA, 611 bp, Homo sapiens
tcctccctctttttcattttcttgcagtcacccaacacctctttactcatcccgcataatccaactcaagctttactttcttctttaccttcatacccctattctcttggtctgtgtaaggtgttgatttgtgtgttactctaatgccttagcatttccatatcaatacactcasttttacttatcagtgtctccaacaagtctccaagtttcatgatgtcaggcaatgggttttaattgtctttctatctggagtgtgtctcccagtgctttggagcgtagtataatcaataaacttttgatgggcgaatgcaagaaaaaatgtgatactgaatttccacatatgttttcagagaacccagccaactatgaagttccttgtctttgccttcatcttggctctcatggtttccatgattgtaagtatatcaggacatttgaagaatatgttctcagtacctatcccaagagtctctctattccttgtgttctggcatatattggtgtttacttgaatacagctttatatgtttaaatgtttccatatgaacttttttttgtactaacctacataagctatataaggatttagaataaatagtcattattca

SEQ ID NO: 876417 - DNA, 635 bp, Homo sapiens
ttggcaaatacgacttctacatccatattctcatctttcataccatatcacactactaccactttttgaagaatcatcaaagagcaatgcaaatgaaaaacactataatttactgtatactctttgtttcaggatacttgccttttcaattgtcacttgatgatataattgcaatttaaactgttaagctgtgttmagtactgtttctgaataatagaaatcacttctctaaaagcaataaatttcaagcacatttttacatgtatgctccttatttttctcttttctatttataggaataatgatttctttcatcatcttctttcccagtttgactagcacagattgaagcccataatgtcagaggtccttatttataatttagtctgtcatattttatatgttacaaacatggtactcaaactcacttattattagagctatttatgccaagatttgatttgcccatggtttcctttgccacaccacagttgctaagcctccaaagcactcacattttttatctcagtccctgtaggtcagaagataaccaccatgtcactctacagcagtatgtaggcactctgcatgtaaaccatctaatgccctccattagtttttcagcaatgactttt

SEQ ID NO: 876418 - DNA, 687 bp, Homo sapiens
taataaccctgatctgatcactatatattgtatgtatccacacatcagtatgtacatcataaatatgtacaattattacatgtcaaatcaaatatgtaagaaaacagaaaataagtgttgatgaggatgtggagaaattgaaaaccttgcgcactgtgggtgggagtgtaaaatgacattgactctatggaaaacagtatcgtgttttctcaaaaattaaaattagaatgatctcattttccagtaatgccaattctggatatataccccaccaaaaaaaatggtggtataaaagaggtatttattcacccatccttttatcagcattattcatattctctagagggaaaagcaacccaataaatagataaacaaaatgtggtacatacttataatataatataattcatccttaaaaaagaaatgaaattctgacacatgctacaatatggatgatccttaatgacattttgtcaagtaaagtaaaccagtcacaaaggaacaaattatgtatgattccacttaaatgaggtayctggagtagtcaaatgcatggaggaagaaagtagaatgatggtttctaagggctgggagaaggggaaatggggattattgtttaatgaaaatgaagttccatttttgcaagataaaaaatgttttggagattaatggtagtgaagattgcac

SEQ ID NO: 876419 - DNA, 579 bp, Homo sapiens
aatgaaagaaaatatgtacaaattcaaattatttggtaactttcaatgaagtgatacgaaaacagagcaaaggagatgctatctttgtcccttaacacctttgtcatagcatcactctgactcactctcctgccttctccttccatagcattcccactctcgggtctagggacttaatccaatcacaggaattctatgttgacatagtgataggttcagctaatcaaagcytaggtcaatcatcacatggcattaacctatctacaggaattggttcagaaatgactcaattagtaaaaagtccagttattttgcatgatgactgcaggaaagaacataccttctcttcattctttatctctctatctctctctctgtctgtcactctttctctctttctctttgtcctctctctttctggacatgtatggaaacaaggaaacaattagaagtagtagttgctgttgatagcctgccactgctatgagaaatgtgtgttgaaaccaacatccataaaaaaataaagattagaaaacccttgaaaaattgaacgataaccctgatcaaaccctgcctgag

SEQ ID NO: 876420 - DNA, 683 bp, Homo sapiens
caaaggcagtctagcccccaggcagaaaaggggtttgtttgaggaaagggctgttatcatctttgtttcaaagctaaactataaactaagttcctcccaaagttagttcatcctatgcctaggaatgaacaaggacaacttggagrttagaagcaaggtggagttgggttaggttagaactctttcactatctcaattataattttgcaatggcagtttcaccaacagctgcagcagtgtggcgggttgcctgcacataggtggggcagcgatgggggtgccagcatcagtgcacacactcatcccagtggtggtggtggcacagcaggcccactcatctgtcattgaacatttaggctgttttcatttgttggttattgtgaataatactgaaataaacaaggaactgcagacatctcttcaagatcctaatttcagttcttttcgatatatgcccagaattgtcattgctggatcatatggtcattttacttttaatttttagaggaacatcttcatactgtttgccataaaggctgcaccattttgcatttccagcagtgtacaaggattctaatttccccacatcttcaccaacatcttattttcttttttatttaatagtggccatcctaacaagtttgagatgatatcccattgttccttcaatttgcattcccctg

SEQ ID NO: 876421 - DNA, 630 bp, Homo sapiens
ctgtttcctctgtctatgaggcccttctgttgaaaattagatgtgttcttttcaaccttcaaaattctacccaaatattttcatttttgtgaaggcttatctatttccctctataaaaaaaaaatgatagtcttccctcttcctccatacactcaggtttttttttttktttttttttttttttgagatggagtctcactctgtcgcccaggctggagtgcagtggcgcgatctcggctcactgcaagctccgcctcttgggttcacgccattctcctgcctcagcctcctgagtagctgggactacaggcgccggctaccacatccggctaatttttttgtatttttagtagagacagggtttcaccgtgttagccaggatgctctcaatctcctgacctcgtgatccacccgcctcggcctcccaaagtgctggtattacaggcgtgagccaccatgcctggcccaaattcattttttataccactgtgtttgttctgcctcactgatgatgagatccttagtaatgggtaaaatattctccgtatccccagggtacagcactcagtgggtgctcagcatatgcaagtgagtaatacaaatgccattgcactatcattgataatatat

SEQ ID NO: 876422 - DNA, 630 bp, Homo sapiens
ctgtttcctctgtctatgaggcccttctgttgaaaattagatgtgttcttttcaaccttcaaaattctacccaaatattttcatttttgtgaaggcttatctatttccctctataaaaaaaaaatgatagtcttccctcttcctccatacactcaggtttttttttttgtttttttttttttttgagatggagtctcactctgtcgcccaggctggagtgcagtggcgcgatctcggctcactgcaagctccgcctcttgggttcacgccattctcctgcctcagcctcctgagtagctgggactacaggcgccggctaccacatccggctaatttttttgtwtttttagtagagacagggtttcaccgtgttagccaggatgctctcaatctcctgacctcgtgatccacccgcctcggcctcccaaagtgctggtattacaggcgtgagccaccatgcctggcccaaattcattttttataccactgtgtttgttctgcctcactgatgatgagatccttagtaatgggtaaaatattctccgtatccccagggtacagcactcagtgggtgctcagcatatgcaagtgagtaatacaaatgccattgcactatcattgataatatat

SEQ ID NO: 876423 - DNA, 535 bp, Homo sapiens
gtaaatatatatttaagataggtcttcttgctgaattgaactcattggcattatgtaatgcccttctttgtcttttttgatctttgttggtttgaagtttgttttgtctgaaattaaaattgcaactgttgctattttccatttgccttgtagactttcctctatctttttattttaagcctatgggtgtcattatgtgtgagatgagtctcttgaagatagcatatcattgcgtcttggatttttytttttttttaaatccagcttgccactctgtgccttttaagtgggggcatttaacttgtttatattcaaggttagtaatgatatgtgtggattttattttgtcattgtcttgttagctccttattatgttggcttctttgctttatagtgacactggtctgtgtgtttaattgtgtttttgtattagccggtagcaggcttttcctttctatatttagtgatcctttcaagatctcttgtatggcaagtccggtagtaaagaacaccctcaacatttgctgatataaaa

SEQ ID NO: 876424 - DNA, 670 bp, Homo sapiens
agacaagtaaatcccattttctgaagagaaattcaagccagctgcagaaatttgtataagtaacgaggagctgaatgttaatctccaagacacccagggtccccatgctgtatgcagcctagagactttgtgccctgtgtcacaccgactccagccatggctgacagggactaatgtagagcttagaccgtggcttcaaagggtgcaagcctcaagccttggcagcttccacatgatgttcagcctgccactgcatagaaatcaataattggggtttggaaacatctgcctagatttcagaggatgtatggaaatgcctggatgtccagatagaagtttgctgcaggggcagggccctcatgcggaacctctgctagggcagtgtggaaaggaaatgtggggccagatcccccacacagagttcctactgggacactgcctagtggagctgtgagaagagagccaccatcctccagaccctagaatggtagatccaccaacagcttgcaccatgcacctgggaaagccacagacactcaatgycagcctgtgaaagcagccgggagggaggctctactttgcaatgccacagaggcagagctgccaaagaccatgggaacccccctcttgaatcagcatgacctggatgtgagacatggagtcaaaggag

SEQ ID NO: 876425 - DNA, 647 bp, Homo sapiens
atttgggttggttccatgtctttgctatggtaaaatagtgctgcaataaacatatgtgtgcatgtgtttttatagtagaatgatttgtattcctttgggtatatacccagtaatgggattgctaggtcaaatagtatttctggttctagatccttgaggaatcaccacactgtcttccacaatgattgaactaatttacattcccaccaacagtgtaaaagtgttcctatttctccacagcctcgccagcatctatcgtttcttgattttttaataataatcacccttcttactggtgtgaaatggtatctcattgtgatttcgatttgcatttctctaatgatcagtgatattgagctttttttcatatgtttgttggctgcataaatgtcttttttgaraagtgtctgttcatatccttcactcactttttgatggtctttttttttcttgtaaatttctttaagttacttgtagattctggatattacacctttgtcagatgggtagattgcaaaaattttctcccattctgtaggttgcctgttcactctgatgatagtttcttttgctgtgcagaagctctttagtttaattagatcccatttgtcaattttggcttttgttgcaattgcttttggcatttt

SEQ ID NO: 876426 - DNA, 639 bp, Homo sapiens
ctggcatcaaggttcatgttctttctacaaaaccaacacactaacctgactctgtgatgactgtgtttattaaactgaaataataacatttattttactatgtactttacatgtattagctagttaaatactcatgacaatcttaggagttaggtacctgatctactgataagaaatccaagctacagagtgctaactaactagacaaaagcatcatggacagtaactgccaggctgacattcatattcatgcaatttggatgcaatgcccatgcgctttttttttttttttttttttttttttttttttttttggaaaaaaagttttactttgtcacccaagctggagtgcaggggggggatctcgggtcactgcaacctctgcctcctggggtaaaacgatttttytgcctcagcctcccaagtagctgggactacagggcgtgcaccacccacacccgggttttttttttgtatttttagtagagatggggtgtcaccatattgagcaggctggtctcaaactcccgaccttgtgatccaaccacctcggcctcccaaattgctgggattacaggcgtgacccaccacagctggcctgcccatgctcttaaccactacatcatcatatatggttta

SEQ ID NO: 876427 - DNA, 643 bp, Homo sapiens
tgcccgttctcagatctcaagctgcatgctgggagaacgactactctcttcaaagctgtcagacagggacatttaagtctgcagaggttattgctttcttttgtttgtctgtgccctgcccccagaggtggagtctacagaggcaggcaggcctccttgagctgtgatgggctccacccagttccagcttctgggctgctttgtttacctactcaagtctcggcaatggtgggggcccctcccccagcctygctgccgccttgcagtttgatctcaggctgctgtgctagcaatgagcaaggctccgtgggcacaggaccctccaagccaggtgtgggatataatctcctggtgtgcagttgttatgcccattagaaaagcgcagtattagggtgggagtgacctgattttccaggtgccatctgtcacccctttctttgactaggaaagggaattccctgaccccttgtgcttcccaggtgaggcgatgcctcgccctgcttcagctcacgcacggtgcactgcacccactgtcctgcacccactgtctggcactccccagtgagttgaacctggtacctcagttggaaatgtagaaatcacccatcttctgcatcacttatgctgggagctgtagactgga

SEQ ID NO: 876428 - DNA, 643 bp, Homo sapiens
tgcccgttctcagatctcaagctgcatgctgggagaacgactactctcttcaaagctgtcagacagggacatttaagtctgcagaggttattgctttcttttgtttgtctgtgccctgcccccagaggtggagtctacagaggcaggcaggcctccttgagctgtgatgggctccacccagttccagcttctgggctgctttgtttacctactcaagtctcggcaatggtgggggcccctcccccagccttgctgccgccttgcagtttgatctcaggctgctgtgctagcaatgagcaaggctccgtgggcacaggaccctccaagccaggtgtgggatataatctcctggtgtgcagttgttaygcccattagaaaagcgcagtattagggtgggagtgacctgattttccaggtgccatctgtcacccctttctttgactaggaaagggaattccctgaccccttgtgcttcccaggtgaggcgatgcctcgccctgcttcagctcacgcacggtgcactgcacccactgtcctgcacccactgtctggcactccccagtgagttgaacctggtacctcagttggaaatgtagaaatcacccatcttctgcatcacttatgctgggagctgtagactgga

SEQ ID NO: 876429 - DNA, 529 bp, Homo sapiens
aagggtgttgaattttatcgaaggccttttctgcacatattgaaataatcatgtggtttttgtcattggttctgtttatgtgatggattacgtttattgatttgcgtaagtggaaccagccttgcggatcagggatgaagccgacttgatattggwggataagctttttgatgtgctgctggattcggtttgccagtattttattgaggatttttgcatcgatgttaatcagggatattggtctcaaattctctttttttgttgtgtctctgcgaggctttggtgtcaggatgatgctggcctcataaaatgagttagggaggattccctctttttctattaagtggaatagtttcagaaggaatggtaccagctcctccttgtacctctgatagaattcgactgtgaatccatctggtcctggactttttttggttggtaagctattaattatttcctcaatttcagagcctgttattggtctattcagagactcaccttcttcctggtttattctggggagggtgta

SEQ ID NO: 876430 - DNA, 552 bp, Homo sapiens
tctgttattgatgcttattctcctaatatgaatcttaactatatttggtggtttttgtttgtttctttgtttgttttatgagacggagtctcgctctgtgggcaggctggagtgcactggcacaacctcggctcactgcaagctccgcctcccggttcacgctgttctcctgcttcagcctcccgagtagctgggactacaggcgcycgccaccacacctggctaatttttttgtatttttagtagagacggggtttcaccgtgttagccaggatgatctcgatctcctgacctggtgatctgcccaccttggcctcccaactgtatttgttttaagggcattttagtagtgtcacaaaagagccaataaaatgtagactcttaatttttcacaggcagattatttgctttgcaagttttattacttttatattagtaatgaagtactgtgttgataaaaatatattttttatctacctgattgaagttggaagagaaaatctatcaagtagaagtaattacttaccattggaccttagtaagttttcagag

SEQ ID NO: 876431 - DNA, 552 bp, Homo sapiens
tctgttattgatgcttattctcctaatatgaatcttaactatatttggtggtttttgtttgtttctttgtttgttttatgagacggagtctcgctctgtgggcaggctggagtgcactggcacaacctcggctcactgcaagctccgcctcccggttcacgctgttctcctgcttcagcctcccgagtagctgggactacaggcgcccgccaccacaccyggctaatttttttgtatttttagtagagacggggtttcaccgtgttagccaggatgatctcgatctcctgacctggtgatctgcccaccttggcctcccaactgtatttgttttaagggcattttagtagtgtcacaaaagagccaataaaatgtagactcttaatttttcacaggcagattatttgctttgcaagttttattacttttatattagtaatgaagtactgtgttgataaaaatatattttttatctacctgattgaagttggaagagaaaatctatcaagtagaagtaattacttaccattggaccttagtaagttttcagag

SEQ ID NO: 876432 - DNA, 676 bp, Homo sapiens
taaacactcagaaaaaggattcttgaaaaacgaatgaaattctggcaaaaacaaacaaacaacaaaaaaacaaaaccacctaaatactaagtagtttagattatttgaatgaaatattttcccatgctgtcaaatttacatccaattttctatgttttattcaargagagttctgtcatacaaagattagaggttcaccaaaaacggctactacatcttattgttttctaaacctgacttcttcatatataggtaaacaattttagataaatttaactttccatgtatttgtttcaccatttgtaaactgaaagaattggacttagatgatctttagattctgaacttcagagactttgtgtataatagctaaagtagagataaattcaatatttgcaggatggtttgatttgtaatatctagatagatacacataaatagattgaaacagataaaatacttggtacacctggaaacactatatatatgaaaattaatagatgataaaatgaatatgcagattggtaaaaacaataaatatgtacttgaacacttaaagagaaaaactctaaataaagtcatagaggggatggtagagatggccacagaaaatgaccacggagagtattatgaagattgcaagattagacattgatgatgtaaattactccctttc

SEQ ID NO: 876433 - DNA, 676 bp, Homo sapiens
taaacactcagaaaaaggattcttgaaaaacgaatgaaattctggcaaaaacaaacaaacaacaaaaaaacaaaaccacctaaatactaagtagtttagattatttgaatgaaatattttcccatgctgtcaaatttacatccaattttctatgttttattcaaagagagttctgtcatacaaagattagaggttcaccaaaaacggctactacatcttattgttttctaaacctgacttcttcatatataggtaaacaattttagataaatttaactttccatgtatttgtttcaccatttgtaaactgaaagaattggacttagatgatctttagattctgaacttcagagactttgtgtataatagctaaagtagagataaattcaatatttgcaggatggtttgatttgtaatatctagayagatacacataaatagattgaaacagataaaatacttggtacacctggaaacactatatatatgaaaattaatagatgataaaatgaatatgcagattggtaaaaacaataaatatgtacttgaacacttaaagagaaaaactctaaataaagtcatagaggggatggtagagatggccacagaaaatgaccacggagagtattatgaagattgcaagattagacattgatgatgtaaattactccctttc

SEQ ID NO: 876434 - DNA, 617 bp, Homo sapiens
tctcctcaggttgtgtccaccatctcctcaggctgtcagcttttgaataaacctgtattttcttccaccaactcttgtacatgtctctcactttaaatcgaaagccacacataactaagcttagtgaggaaggcatgtcaaaagctgagagaggccaaaagctaggcattttctgccaaacagttagctaagttgtgaatgtaaagaaaaagtttttgaaggaaattaaaagtgctagtccagtgaacacacaaataataagaaagcgaaactatggttggtatggagaaggttatagtagctttgataaatgatgaaaacagttataacatgtacttaagctaaagtctaatccagagcaaggcaggccttaactctcttcaattccatgaargctgagagggttgaggaagctgcagaagaaaagttggaagctagcagaggttagttcatggggtttaaggaaaaaagtcatccccataacataagagaatgaagtggagccacaagtactgatatggaagctgcatcaaattatccagaagatttagctaagacaattgataaagatggctacaataaacaacaaattttcaatgtagatcaaacatccttat

SEQ ID NO: 876435 - DNA, 631 bp, Homo sapiens
tttcaatttgcccttgaaagcttttgacagcaaaatacttacattaaatttcagcaacttgtgatatctttaaagtatctagatgagaactctagaagtttctcataggttagaaaacaatataccaaaatttctacatggaaaaatattaatttacagatatttttraaatttcattgaaagggaagatataatatatccacctactttcctaaaacgactaaataaacagtatgttaccaatttttattttatttacaaagtttaaacaaaattagtttatatttctaatttagggagttgaaaaatttcagacagaggcattattagaaacttagtaatatatttttatttctggatttaacaccacacacagagtacatcaccataccataataaaggtcaacaaaaaactcaaagaccctgactttatctttgcagcaattattttgccttaagtacatcatagcttagctttgaattcatagtacccaaccaaagtacatacatgtctctacatatacatatataacacatatataaatatatataatatacatatatatgtatacatattttaactggaagatggttaaactcttcccacccattaatgattagtccgtgtgaa

SEQ ID NO: 876436 - DNA, 598 bp, Homo sapiens
agtgggaccatagtgcagactcctgttctttaatatattgtattgtttttacttagagaaataaattaattgtactagggacatgaaagaacatagaataagaattgtccgaagagtactaaagatgttaagattaattaatcaggaagtatattttaacaaatctaagaggataaaattagctgtggtactgcaattaaaaaaaaaaaaaaacctcttgaaacagattgagtattattaacaagattaacccaactcattctttggggagggaacattatatattaagagctctcttaaaacatgaataatgctacatattttgagtggaagtgtaayttagtgctcaactagcacagctgaattagtacagctgctgctagactttcaaatcaaacagccctctttggtcttttttataccttggtattgtatataatatttctgtgagtaaagagttctgatactaacacattgtctgacatagtcatccatattttaatgtaaattacactgataataatttagaataccactaatagacatgatagtgatagcatcttatgcttttacagaatattattattttccaaaagag

SEQ ID NO: 876437 - DNA, 642 bp, Homo sapiens
tatttttttatagcatctcacagattttctctggatttttggatacctggatgtcaacatctctaatatgattaggacatttttcttgaatcattcctcaaatatgttttctacattgtttagttttctttcttctttcttaggagtgccaataactcataggtttggttgctttacataatatcatatttctcaaagactgtttattttttcaaattccttttttgtctgactgggtttgttcacaagactggcctacaagttctgaaaacttctccttcgataaatctatagatggtgctttcaattatattttgaaatattttaagtgaatcttttattttcagaagctctgattgattccttattaggatatttctctcrtcctttatttcttggattgctttagaagtttctttatgttgattgtaaacctcatcttgaattttgttgatcttccttgcaatccatgctttgaattctttatctgccatttctgaatttctattttgtttaggagcattactggatggctagtgtgatcctttgttgttgtcattgcattcagattttttatgctgccagaattattgttcctttttatctggagatgctggcacttctaatttctttttatttttt

SEQ ID NO: 876438 - DNA, 643 bp, Homo sapiens
cagcagtaaccacaggccttaggctagctcctttgctacactggtctgggaggtcatgggtttaggatgtagtccagcatgctgccagctgtgataaccatgaaattacctgtttcacacttcctccaacttagggaagtgcagtgaggagagacttctctttattagaacaaaggaaacactttgatcttttctaaattcattagggctgagaacacagtagtctttaagagttgcagtgcaactggatataaggtgccctcttgtgccaatatttttttctgtgacatcaggcttagggaattcaatagtcatcctactttaaattcctagaagaccctctgaagaaggacaggtataatcaaggcttgaatgtaaagactggaataaatacccaaatcttcaatcctctgacactggtgaacatccaggagygtcaagaatattcagggcaataagacctcatcaaatagatgaaattaggtaccagttaccaaccctggaaagatggatatatgtgatatctcagagagtgaattcaaaatttatgtttgagaaaagccaacaaactctaggaatatcacaaagaatcaattcagaaatttatcagaaaaatttaataaagagattgaaataatttaaa

SEQ ID NO: 876439 - DNA, 643 bp, Homo sapiens
cagcagtaaccacaggccttaggctagctcctttgctacactggtctgggaggtcatgggtttaggatgtagtccagcatgctgccagctgtgataaccatgaaattacctgtttcacacttcctccaacttagggaagtgcagtgaggagagacttctctttattagaacaaaggaaacactttgatcttttctaaattcattagggctgagaacacagtagtctttaagagttgcagtgcaactggatataaggtgccctcttgtgccaatatttttttctgtgacatcaggcttagggaattcaatagtcatcctactttaaattcctagaagaccctctgaagaaggacaggtataatcaaggcttgaatgtaaagactggaataaatacccaaatcttcaatcctctgacactggtgaacatccaggagtrtcaagaatattcagggcaataagacctcatcaaatagatgaaattaggtaccagttaccaaccctggaaagatggatatatgtgatatctcagagagtgaattcaaaatttatgtttgagaaaagccaacaaactctaggaatatcacaaagaatcaattcagaaatttatcagaaaaatttaataaagagattgaaataatttaaa

SEQ ID NO: 876440 - DNA, 606 bp, Homo sapiens
ctcttactactttgagatatgtttcttcaatacctagtttattgagggttttagcaaaaagggatgttgaatttatcagaagacttttctgcatctattgagataataatgtgttttttgtctttaattctgttaattctgtttatgtgatgaatcacatttattgatttgcatacgttgaaccaaccttgcatcccagggatgaagctcacttgattgtggtggataagctttttgatatgctgctagatttggtttatcattgaaaaacattccatgctcatggataggaagaatcgatattaaaatggccagactacccaaagcaatttatagattygatgctattcctattaaactaccattgtcactcttcaaagaactagagaaaactattttaaaattcatatggaaccaaaagtagcctgaatagccaaggcaatcttaagaaaaaaagaacaaatctggaggcatcatgctacctgacttcaaactatactacaggctgcagtaacaaaacagcatggtactggtacaaaaacagacacatggaccaatggaacagaatagagaacccagaaataagaccacacacctacaattatg

SEQ ID NO: 876441 - DNA, 606 bp, Homo sapiens
ctcttactactttgagatatgtttcttcaatacctagtttattgagggttttagcaaaaagggatgttgaatttatcagaagacttttctgcatctattgagataataatgtgttttttgtctttaattctgttaattctgtttatgtgatgaatcacatttattgatttgcatacgttgaaccaaccttgcatcccagggatgaagctcacttgattgtggtggataagctttttgatatgctgctagatttggtttatcattgaaaaacattccatgctcatggataggaagaatcgatattaaaatggccagactacccaaagcaatttatagatttgatgctattcctattaaactaccawtgtcactcttcaaagaactagagaaaactattttaaaattcatatggaaccaaaagtagcctgaatagccaaggcaatcttaagaaaaaaagaacaaatctggaggcatcatgctacctgacttcaaactatactacaggctgcagtaacaaaacagcatggtactggtacaaaaacagacacatggaccaatggaacagaatagagaacccagaaataagaccacacacctacaattatg

SEQ ID NO: 876442 - DNA, 606 bp, Homo sapiens
ctcttactactttgagatatgtttcttcaatacctagtttattgagggttttagcaaaaagggatgttgaatttatcagaagacttttctgcatctattgagataataatgtgttttttgtctttaattctgttaattctgtttatgtgatgaatcacatttattgatttgcatacgttgaaccaaccttgcatcccagggatgaagctcacttgattgtggtggataagctttttgatatgctgctagatttggtttatcattgaaaaacattccatgctcatggataggaagaatcgatattaaaatggccagactacccaaagcaatttatagatttgatgctattcctattaaactaccattgtcactcttcaaagaactagagaaaactattttaaaattcatatggaaccaaaagtagcctgaatagccaaggcaatcttaagmaaaaaagaacaaatctggaggcatcatgctacctgacttcaaactatactacaggctgcagtaacaaaacagcatggtactggtacaaaaacagacacatggaccaatggaacagaatagagaacccagaaataagaccacacacctacaattatg

SEQ ID NO: 876443 - DNA, 613 bp, Homo sapiens
tacagggatgtgccaccatgcccggctaatttttatatttttagtagagatagggtttcaccatgttggtcaggctggtcttgaacttctgactttgtgatccacccaaagtgctgggattacaggtgtaagccaccatgcccagccaactctgcctttttaataagcaattctgatttcagttttgtccattctgtgctcactcttttttattgagttttcctcctttcatttttcatggtagccttttcttgttttgtgcatatgaaatcktctcaaattttcctattaggtattaatgaaaactttaaaaagttcccctctatactttgattatctctgtttcctttggatcattctaaagtttcctctttgacatttcctgtcgcactcctggttttcctaaaatttctgtggtttctgattgtcagtgtatcagaatgaaggactagacccatcactgtaggtagctggggtaggtttttgtctgtttacctcacagtcttccctccctactggaaggactgagtataggggtgggtgtggtgatcagttttatgctagggtcagtggccaagggggactcagggaggctggaaagaagggttttacc

SEQ ID NO: 876444 - DNA, 628 bp, Homo sapiens
atatgtagagaggaatgtggtacacagagaagatgtgtgtatttggtccgccatcttgattcaatttctgtaatatttattatatgtgttttatcgatttacttcctggaagtgagattaattaattttttatcgtgctgctataatgattaaattttgaagtagcatttagcgtgcagggagtacagtcacaatgtaatagcccctgggatttttgttctcttgagtataggttattagactctgtatggctttgttgtgattctgctaaacagagacttccagatgcggwttgtcagacatgaacattatttctactattcaaacagatagggacgaagtggtccagcattgcttgttaaacttccttctagaagaataaatcaggataaatgcaatcaatgtaaatattaaacacattgaatgcagggcttatggaaggggtagtttaatattttaaaaattgaaataaaatgtacatataggaaagtgacagaccacaagtgtacagtatgatgtattttaacaaagtgacacattcatgtgatcagttcaagatatagaacattagtggcacccaagaggaccccttataaccttaatttacaagtaactaccacaccagctt

SEQ ID NO: 876445 - DNA, 594 bp, Homo sapiens
actgccacagtccaggtgagagatgatgggggcagttggggtgatgagaagttattgcattttacatatttttcccaacatttcattatagaaaattttaaatataccaaaaaggtgaaagagctgaaaaattgaaagagtgaacacccatatacccaccactagattctattattaatattttactgtctctgcattatcacattatccatttttgtatccatatatgaattcctcttattatatttgtgtacttcaaagtaaattgcaaacatggttgccctttccccctaaacacgttggcagtttgcatatattttggaggtaatgttgacaaacttgacaaattgggtgtgggatataatggaaagagagggatcaagattgtttctaggtttttggcctgagcaactcattaaagagaaatgargttgaggaggaaaatcacgtgctttgttttgaacatgtttacattgagaagccaattaaacaaccagaaagagtaggcaagtaggtttaaaaatacgtagttcatcaaagacatggggcctggagtgtcaatgtggaattaccagtttgtacacagtgtttaca

SEQ ID NO: 876446 - DNA, 675 bp, Homo sapiens
gatctaaaaagtgcttagcatgactctcatcttttcaaatacattgaatatattaacttaaggcaaaaaattaacatatttagaaaaggttaaaaaaggagaaaatatgagagcatgctcaagtaacttactactatgcagacatctggaattttaaaatagtgatcctcccgccttggtmtcccaaagtcctgggattacaggagtgagccaccacaccaggcctaaatttttaatgtggttgtttggttttatgcttgttaatttgctttactttcttatagatgctaaatgttaggcctttgtcagttgcatagtttacaaaaattttctctcattctgtaggttgtctgtttactctgttgattattttgctatgcagaagctctttaattaggtcccatttgtcattttttgttgttgttgcaattgcttttcatgtccttgttatgaaatctttgctgggtcctatgtccaaaatgatatttcctaagttatcttccagggttttttaatttttaggttttacatttaaatatgtaatccatcttcagttgatttttctatatggtgtaaggaaggaggtcctgtttcagttttccacacattgctagctagtttatcccagcacgatttattgaatagaagtcctttttccattgcttaattttggaa

SEQ ID NO: 876447 - DNA, 675 bp, Homo sapiens
gatctaaaaagtgcttagcatgactctcatcttttcaaatacattgaatatattaacttaaggcaaaaaattaacatatttagaaaaggttaaaaaaggagaaaatatgagagcatgctcaagtaacttactactatgcagacatctggaattttaaaatagtgatcctcccgccttggtctcccaaagtcctgggattacaggagtgagccaccacaccaggcctaaatttttaatgtggttgtttggttttatgcttgttaatttgctttactttcttatagatgctaaatgttaggcctttgtcagttgcatagtttacaaaaattttctctcattctgtaggttgtctgtttactctgttgattattttgctatgcagaagctctttaattaggtcccatttgtcattttttgttgttgttgcaattgcttttcatgtccttgttatgaaatctttgctgggtcctatgtccaaaatgatatttcctaagttatcttccagggtttttwaatttttaggttttacatttaaatatgtaatccatcttcagttgatttttctatatggtgtaaggaaggaggtcctgtttcagttttccacacattgctagctagtttatcccagcacgatttattgaatagaagtcctttttccattgcttaattttggaa

SEQ ID NO: 876448 - DNA, 617 bp, Homo sapiens
agcttggatgttggtggtatatagaaatgcaactgattttcatacattgcccttgtatcatttaactttgcttacattgtttatcacatcaagaaacttttgggcagaggctatggggttttctaggtatagaataatataatctaaaaaaaaggatagttggacttcctttctttctattttgatgcctattatttctttctcttatctaattgctctggctaggacttccagtaaaawgtttgagtggtgagagagagcattaatgtcttggcctgcttctcaagggaatgtttccagcttttgtcccttcaatgtgatgttggccatggatttatcatagataaattttattattttgaagtatgttcttttaattattttgaagtaaagtttctagttttttgaagatttttaacaaggaaggagttgaattttatctaaaaccttttctgaatctattgagatgatcatgtagtctttgtttttagttctgcttatgggatgaattaaatttatttatttacatatgttaaaccaaccttgcatctcaggggtaaaaaccaacttgattatggtggataaactttttgatgtgctgtttagtttggtttgct

SEQ ID NO: 876449 - DNA, 622 bp, Homo sapiens
gttttcaatgtccttttcctatctttccatttcagcagttagattttaatgtgtcttagggtctacgattttgtcctacttggaattcattgagcttcttgtaattgtatatttatatcttttttcaaatttgggaagttttccatatttatttattcaaataatttttctgttttttttttttctttctcttcacctcctgcaagttcctgatgtagtttgcatgctcatcacctctraatcccatgttgaaatgtgatccctaatgtaggagatagggcatagtggggaaggtttgggtcatggaggtaagtttctcatgaatggtttggtgccctactcacagtaatgagtgaattctcactctattatgtcatgtgaaagctggttgctgaaatagcctggtacttcctcccttcctctctcaccatgtgacatgctagctctccttacacctcctgccatgagagtaagcttcctgaagccctcaccagaagcaaatgccagcactatgcttcttgtatagtctgcagaatagtcagccaaaataaaccttttttctttataaataacccagcattagatattaatttacagcaatgtaaaatagactgacatacta

SEQ ID NO: 876450 - DNA, 568 bp, Homo sapiens
cattccacaacccaaatatagttcgatgagctgcagtatgattggttgacacatcaaacataaaagctttttatgcattgatttctctacattccttgcaataatttatctaatttgtttgattgattgactctttgtattgcagtatgcatttattcaataaagtacctacatcataaaatcaatatatagttgcattcctgcactaagtaccattttagaaagtgtgattgaatttccacagaaattaatcaatgtgatagatrtatttatcatttggattagacagaaaataagaaaaaagtcatgtgtgtcttttttattataaaaatatattttttattttcaagctcttgttagcccttaaattttataaattttatataaggtagttttcaaaagcacagtatctaggtaataaaaattaattattagtattttgaaccaaataggtcaaaaattatacacagtttttcaactgaatagggagttggtgcccttaacctttatgttcttcaaaggcacatatacatacatatatgtacacacacacacacacacacacaca

SEQ ID NO: 876451 - DNA, 568 bp, Homo sapiens
cattccacaacccaaatatagttcgatgagctgcagtatgattggttgacacatcaaacataaaagctttttatgcattgatttctctacattccttgcaataatttatctaatttgtttgattgattgactctttgtattgcagtatgcatttattcaataaagtacctacatcataaaatcaatatatagttgcattcctgcactaagtaccattttagaaagtgtgattgaatttccacagaaattaatcaatgtgatagatgtatttatcatttggattagacagaaaataagaaaaaagtcrtgtgtgtcttttttattataaaaatatattttttattttcaagctcttgttagcccttaaattttataaattttatataaggtagttttcaaaagcacagtatctaggtaataaaaattaattattagtattttgaaccaaataggtcaaaaattatacacagtttttcaactgaatagggagttggtgcccttaacctttatgttcttcaaaggcacatatacatacatatatgtacacacacacacacacacacacaca

SEQ ID NO: 876452 - DNA, 568 bp, Homo sapiens
cattccacaacccaaatatagttcgatgagctgcagtatgattggttgacacatcaaacataaaagctttttatgcattgatttctctacattccttgcaataatttatctaatttgtttgattgattgactctttgtattgcagtatgcatttattcaataaagtacctacatcataaaatcaatatatagttgcattcctgcactaagtaccattttagaaagtgtgattgaatttccacagaaattaatcaatgtgatagatgtatttatcatttggattagacagaaaataagaaaaaagtcatgtgtgtcttttttattataaaaatatattttttattttcaagmtcttgttagcccttaaattttataaattttatataaggtagttttcaaaagcacagtatctaggtaataaaaattaattattagtattttgaaccaaataggtcaaaaattatacacagtttttcaactgaatagggagttggtgcccttaacctttatgttcttcaaaggcacatatacatacatatatgtacacacacacacacacacacacaca

SEQ ID NO: 876453 - DNA, 568 bp, Homo sapiens
cattccacaacccaaatatagttcgatgagctgcagtatgattggttgacacatcaaacataaaagctttttatgcattgatttctctacattccttgcaataatttatctaatttgtttgattgattgactctttgtattgcagtatgcatttattcaataaagtacctacatcataaaatcaatatatagttgcattcctgcactaagtaccattttagaaagtgtgattgaatttccacagaaattaatcaatgtgatagatgtatttatcatttggattagacagaaaataagaaaaaagtcatgtgtgtcttttttattataaaaatatattttttattttcaagctcttgttagcccttaaattttataaattttatataaggtarttttcaaaagcacagtatctaggtaataaaaattaattattagtattttgaaccaaataggtcaaaaattatacacagtttttcaactgaatagggagttggtgcccttaacctttatgttcttcaaaggcacatatacatacatatatgtacacacacacacacacacacacaca

SEQ ID NO: 876454 - DNA, 585 bp, Homo sapiens
ggtctacgattttgtcctacttggaattcattgagcttcttgtaattgtatatttatatcttttttcaaatttgggaagttttccatatttatttattcaaataatttttctgttttttttttttctttctcttcacctcctgcaagttcctgatgtagtttgcatgctcatcacctctaaatcccatgttgaaatgtgatccctaatgtaggagatagggcatagtggggaaggtttgggtcatggaggtaagtttctcatgaatggtttggtgccctactcacagtaatgagtgaattctcactctattatgtcatgtgaaagctggttgctgaaatagcctggtacttcctcccttcctctctcaccatgtgacatgctagctctccttacacctcctgccatgakagtaagcttcctgaagccctcaccagaagcaaatgccagcactatgcttcttgtatagtctgcagaatagtcagccaaaataaaccttttttctttataaataacccagcattagatattaatttacagcaatgtaaaatagactgacatactaacacaagatatattttgatctg

SEQ ID NO: 876455 - DNA, 571 bp, Homo sapiens
aatgtcgaactttttattcgtttacttgttttacaaacaaaattacaactactcaatctcttcaattttgacaatgtcttaccaacaaaattataactactcaatctcttacttattgaaacaagacaaacaaaagaaaacagcataattgaagatttagctgaagagaaagtaattagaaacatgccaaataatttcatacctaaatcaaagaaatgccaacgtgagcatgcacmttgtttgtacagttaaagcttctcttcataatttgaatgcagaaaatacttatgagggtttaaaagggatgaaagagccacattcctttgactaataagcttgtttataaatgaaagtcaaatttaaaacaggcatttttgttagaaaagatgctgttttatgcaaggttacaaaaccgtaagtagttatggtcagggctcttctggagaaagaaaaattgggagtcaatttggaaatataatcatccttcctaataagaaaatgctgtcatcagaagggtataagtcattcgttcctcatcatcaaaatctacttgccttaatttatctgaacc

SEQ ID NO: 876456 - DNA, 599 bp, Homo sapiens
tggcaaaaggcaggttctccttttttaaggctgagtaatattcctgtgtgtgtgtgtgtgtgtgtgtgtgtgtgtgtgtttatgtattacagttgctttatccattcatctgccaatggacacttggtttgtttccatatcttggctattatgaataatggagcaataaacatgggagtgcagatgtctttatgaggtggtgatttcattttctttgcgtttatacccagaagaggaattgctgagtcatatggtaattcttcctatttttaatttctttagaaaccttcatattggtttccataatggctccaccaatctgtattccctcaaacagtatacaagggttcccttttctccacaccctcaccaatagttgttatctcctgtctttttgataatagctttcctaacragttgttatctcacagtagggttgatttacatttccctgatgattagtgatgttgagcaccttttcatattgttggtcatttttatgttttctttgaaaaaatatctatttactttgcccatttttaatcaggctatgttttcttgctattgagttgtatgagttctttataaattttgaatat

SEQ ID NO: 876457 - DNA, 568 bp, Homo sapiens
acacggagagacagaagttgagaaacgtcctctctcaacaattctggctcttaagatattttgtggctgcagaatcctatcttggatgttggaatgtgaatttttttgagtcctgctttaacagtccgaactctccctggataatggatgtcatttgtttattttttaatttttgtgtttttttggagacagagtcttgctctgtcatccaggctggagtgcagtggtgctatcttggctcactgcatcctccacctccctggtttaagtgattctcgtacctcagcctcctgagtagctgggactataggtgcgygctagcacgcttggctaattttttgtatttttagtagagatggggttttgccacgttggtcaggctggtctcaaactcctgacctcaagtgatctgcccgccttggtccccctaagtgctgggattacaggcgtgagccaccacacccggccaataaatggatgtgagttaggggagagcaggaaggttacacctagtaaatgcagaacagtgcactaacattatttttaaaattacagtgatcccctttac

SEQ ID NO: 876458 - DNA, 657 bp, Homo sapiens
ctctggccactttctccaggtaatcttgatgaagttcctttagccattttcacctcaccaggaccatctagaggccaattttatgttcagcttagtcctgtaatcataccttattctttattttggaagacagtgctcctgtctgtgattgtggctgaaaggctaatgttcaacatccaattcttgacattttcctgggtcatcatgctccttccttggggttccaaatgctgctcgcttgtagctctatttggaaatcttttgattctgcattgaattgtaatgcagaataaaacataaaagttggttatttctctacccttattagattttcaaaattttgcaaaaagargggatgggcacatctgtggcatatcagcacagtactggggactagcagtaggtacttaatagatatttggaattaaaacaaaacaatcttttccaccatggagccaagtttgtcctgtgattaaggactatttctacaattcaaagagctgttcttaaatagtaaagctgtcatcttgattcactgccaacccaaggccttgctcaaaatgaatgattttgctccgtatttcttaaagtatattctcctacattgttagaatgataatcactaaatactaaatgcttcaataaagtgtataatgt

SEQ ID NO: 876459 - DNA, 622 bp, Homo sapiens
cacatccggctaattttgttattttttgtagagatggggtttcaccatatcacccagactggtctcaaactcctggactcaagtgatccacccacctcagcctcccaaagtgcaaggattacagctgtgagccaccacacacggccaaacttcattaattttctawatcaacctcatgttccttgtataaattcaactttgtcataatacattagcccttttatgtaccgctgtattagatttactaatattttgtttaggatattttcatccatgtttataggagacatttacctatactttaattttcttatatccttcctgagattcgttattaaacaaatattttatgatagcctcataaaatgaattggggagactaatctttggattctctggacttttgtgcaagattagcattatttgtatcccaaaagcaagagaacacaataattaatccatccagacatgacattttctctatggaaagtttttaaattatcttttcaatttttttagtagttatatgacttcacattttctatttcttatgtccattttaataaactgtcattttctaggaacatgttcctttcattcaaattttcacatttttgtcaca

SEQ ID NO: 876460 - DNA, 655 bp, Homo sapiens
aggatgtggagaaataggaacacttttacattgttggtgggactgtaaactagttcaaccattgtggaagtcagtgtggcaattcctcagggatctagaactagaaataccatttgacccagccatcccattactgggtatatacccaaaggattacaaatcatgttgctataaagacacatgcacacgtaggtttattgcggcagtattcacaatagtaaagacttggaaccgacccaaatgtccaacaatgatagactggattaagaaaatgtggcacatatacaccayggaatactatgcagccataaaaaatgatgagttcatgtcctttgtaggggcatggatgaagctagaaaccatcattctcagcaaactaccgcaaggacaaaataccaaacaccgcacgttctcactcataggtgggaattgaacagtgagaactcatggacacaggaaggggaacatcacacaccagggcctgttgtggggtgggaggaggggggagggatagcattgggagacatacctaatgttaaatgacgaattaatgggtgcagcacaccaacatggcacatgtgtacatatgtaacaaacctgcacgttgcgcacacgtatcctaaaacttaaagtataatttaaaaaaaaatagaaa

SEQ ID NO: 876461 - DNA, 620 bp, Homo sapiens
aaatatctttccagcttttagtatcctcttcaatttctttcatcagtgtcttatagttttccttgtataaatctttaatttcttgggtcagattgattgctaagtattttatgttctttgtagatattgtaactggkattgctttcttgatttcattttcagattgttgtgtatatataaatgctactaatttttgtacgctgatttttaatcctggacatttactgaatttgtttgttggttctatttgatggaatctttaggttttcaaagtataaggtcatgttgtctgtcaacaagcttaatttgacttctttctttccaatttgcatttttctttttctttttttttttttttttttgagatgcagttttgctcttgttgcccaggctggagtgcaataatgtgatctcagctcaccgcaacctccgcctcaaaggttcaagtgattctcctacctcagcctcccaagtagctgggattataggcatacaccaccacacctggctaattttgtacttgtaatagaggcagggtttcaccatgttggttaggctggtctcaaacttctgacctcaagtgatccacccacgtcggcctcccaaagtgctgggattac

SEQ ID NO: 876462 - DNA, 633 bp, Homo sapiens
caaaacaggcagctgagaaaggcagacaaactacaaaggggagatgtgtgcctttaatgaaaaactgaaggtgtaaatttgggcttcccaaaacagagataaatatatgcatttctcagcggtactgagaaataactgtgaacataacagccatgtcacttcaaattacttactgcttgcgttaggggaggcaaatgttttattaataaacaagcggttaacacactatttgttctcaattatcagtgtctggaagggcaggggrggccaggctgaaacatctgacaagagaaatgatttaccaatttagtgtgactgacagacctggtgatgaaaagggactttactgtgtagcatcagggagtggtgtaagagatgtggttctgctgaatggaggtggtcagaggttctgggaggcccacctttgccaagataaagagcttcctcacaggactaagagcctgactggattgatgggattgactggaaaggagagagtaaggggaagaggaggagaaaggggaagagacgaggagaggggcagagggagagagggacagagggagagaaaaggaaggagagatgggaagtgaaagaggtagagagggaaagagagagttactgctttatttg

SEQ ID NO: 876463 - DNA, 574 bp, Homo sapiens
ggaattgccgatcccagtggtcacaacttgagttcccacagacctttccacaaagtggtaaactgctctgagtctctaagtgaacttgaaaggcaggctaagccacaaggactacaactcttaggaaagtcctagtgctgaactgtgcccagagacagtggactggggggagggtgatgtgacctgctgagataccgggttgaggcagtcaaaagagtgctggcatcatccctcccctaaccccagtctgctcagctcacagctmcaaaagagacccattacttctgcttgagaagataagaaaaaagagaggggaagactttttcttgcatcttggataccagtacagccacagcagaatagggcactgatcagagttatgaggtctctcttccaggccctagctccaagatgacatttctagacacaacctgggccagaagaaaacctgctgcattgaagggagggactcagttctggcatcatgcatcacctgctaactgaagagcccatgggcccagaataaacagcagtgataactaggtactatgtcgagggccttgggtgagcctct

SEQ ID NO: 876464 - DNA, 574 bp, Homo sapiens
ggaattgccgatcccagtggtcacaacttgagttcccacagacctttccacaaagtggtaaactgctctgagtctctaagtgaacttgaaaggcaggctaagccacaaggactacaactcttaggaaagtcctagtgctgaactgtgcccagagacagtggactggggggagggtgatgtgacctgctgagataccgggttgaggcagtcaaaagagtgctggcatcatccctcccctaaccccagtctgctcagctcacagctacaaaagagacccattmcttctgcttgagaagataagaaaaaagagaggggaagactttttcttgcatcttggataccagtacagccacagcagaatagggcactgatcagagttatgaggtctctcttccaggccctagctccaagatgacatttctagacacaacctgggccagaagaaaacctgctgcattgaagggagggactcagttctggcatcatgcatcacctgctaactgaagagcccatgggcccagaataaacagcagtgataactaggtactatgtcgagggccttgggtgagcctct

SEQ ID NO: 876465 - DNA, 641 bp, Homo sapiens
acaaacaaatggaaaaactttccatgctcatggataggaagaatcaatattgtgaaaatggccatactgcccaaagtaatttataaattcagtggtatcccgatcaagccaccattgactttcttcacagaattagaaaaaactactgtaaatttcatacgaaacaaaaaaaagagcccgtatagccaagacaatcataagtaaaaagaacaaagctggaggcatcatgctacctgacttcaaactatactacaaggctacagtaatcaaaacagcatgatactggtaccaaaacagatatatagaccaatggaacagaaaataggcctcagaaatagtgccacacatctacagccatctgatcttygaaaaacatgacaaaaacaagcaatggggaaaaaattttctatttaataaatggtattgggaaaactggtgagccatatgcaggaaactgaaaatagaccccttccttacaccttatacaaaaattaactcaagatggattaaagacttaaatataaaacctaaaaccataaaaaccctagaagaaaacctaggcaatacccctcaggacataggcatgggcaaagacttgatgactaaaacacccagagcaatggcaacaaaagacaaaattg

SEQ ID NO: 876466 - DNA, 553 bp, Homo sapiens
ttttttttttccacccctccttaagggaacagcaaaccatttccttttgattatggctttacccaattctatctggactgccattcacactgtccttcccctctggcttcaacaattagcctgagtggtagtcatatgatcgaagaagggtcaagcagggtccttctctagaatgaaatatacagaaagatgttaagaaatccctctcarggccctaaactgggatggtataagttgaggatgattggttcataactcaatctcctcctccgccccgactacttttatctccagtgcttatctacagtagaagaggatgagcccaacagtctgagggctgggccaagagatggagagagaaaaaggaggagaaatacacacagacaaatctggtgatattatctctgttggcttcaccttgggcttcccagttatgtgagccattatcccttagcctttcttttccatctcttaagctaacttgagttctgtttctgtcacttgggaagaagactccaatgctatttcactcatcattcttgcacctgtggca

SEQ ID NO: 876467 - DNA, 541 bp, Homo sapiens
gtctagagaaaggcaagagccgcaagaagtttaggtaggccgagcccagtggctcacgcctgtaatcccagcactttgggaggccaaggcgtgcgggtcatgaggtcaggagtttgagacccacctggccagtatggtgaaacctcatttctactaaaaatacaaaaattagctgggctagtcccagctactcgggaggctgaggcaggagaattgcttgaacccsgggggtggaggttgcagtgagccgagttcgcaccattgcactccagcctgggcaacacagcgagattctgtctcaaaaaaaaaaaaaaaagattaggtaaaatgactgttgaaaggaatgagtaaggcacacatttccaggaattagcaaactgcagctcgagggccagctccacccctccacttgtttttgcaaataaagttttattgacatagccacgcccactcatgtacatatcatttccagcagctttcccattacagtgacagagtttggtagttgcaacagagacctctggcctgcagagggaaaatg

SEQ ID NO: 876468 - DNA, 588 bp, Homo sapiens
  misc_feature 406: n = A,T,C or G
ctgcctctggccactcctcgtaaaagggagtgtgcaaacgagtgggggaacggaggtaatgaacgctgaaactggccagtcactcctgtctggcaggagcaggctctgtgcaggccccacagcagcatccaagtgtgttacaaccaatgctttttcagctctgccatccagggatgatcaagtgccaaccaactcagcrgagggcccaggtggcagcccctgccctctcagcacccaggttcttgtctggcctccaggaagaatcaggtcatacgaatggattgaagggtagtgtaggcgggggattttattgggtaatggaagtggctctcagcgggatggggaattcgaagaagatggtgcgggaagaaggtgttctttccctgcagcctggctaagggcattncctcttcgaagtcgcacatctgaagttaaccacatctatctgtagtttccaatgctcagttgcttctctgctcaccattcagctgcttgtattctcagcgctcagccacttgtgttgctctgccagctgaaatctttttatgggcacaggataggggtgtggcaggccaaaatgcaacattt

SEQ ID NO: 876469 - DNA, 625 bp, Homo sapiens
aaatcaacagaatatacattcttctcagtgccacatggcacttattctaaaattgaccacatagttggaagcaaaacactccttggcaaatgcaaaagaactgaaatcataacaaacagtctctcagaccacagtgcaatcaaattagaactcaggattaagaaactcactcaaaaccttacaactacatggcaattgaacaacctgttcctgaatgactcckggtaaaaaatgaaattaaggcagaaataaataagttccttgaaaccaataagaacaaagagacaacatatacaaatccccgggacacagataaagcagtgttaagagggaaatttatagcactaaatgcccacatcagaaagctagaaagatgtcaaatcaacaccctagcataacaattaaaagagctagagaagcaagagcaaacaaatccaaaatctcacagtagacaagaaataactaacatcagagcagaactgaaggagacagagacacaaaaagcccttcaaaaaatcagtgaatccaggagctggtttttgaaaaaaattgatgaaatagactgctagctagactaaatagaagaatcaaatagacccaataaaaaatgataaaggggatatca

SEQ ID NO: 876470 - DNA, 625 bp, Homo sapiens
aaatcaacagaatatacattcttctcagtgccacatggcacttattctaaaattgaccacatagttggaagcaaaacactccttggcaaatgcaaaagaactgaaatcataacaaacagtctctcagaccacagtgcaatcaaattagaactcaggattaagaaactcactcaaaaccttacaactacatggcaattgaacaacctgttcctgaatgactccgggtaaaaaatgaaattaaggcagaaataaataagttccttgaaaccaataagaacaaagagacaacatatacaaatccccrggacacagataaagcagtgttaagagggaaatttatagcactaaatgcccacatcagaaagctagaaagatgtcaaatcaacaccctagcataacaattaaaagagctagagaagcaagagcaaacaaatccaaaatctcacagtagacaagaaataactaacatcagagcagaactgaaggagacagagacacaaaaagcccttcaaaaaatcagtgaatccaggagctggtttttgaaaaaaattgatgaaatagactgctagctagactaaatagaagaatcaaatagacccaataaaaaatgataaaggggatatca

SEQ ID NO: 876471 - DNA, 634 bp, Homo sapiens
agaatattagctgctatgagcgaattccacaatatcacaaatcagataaataattcttattttgtgaaaaaggtggagtataaaatgaagagagagaatgtaattggaagtgttactgtaatgctatctcacctgataagtggagtggaagtcctatattcrttttctgaggctgctataaaaaattacaactaggccagggcagctggctcacacttgtaatctcagcactttgggaggccaacgtaagagtatcccttgagcccagaagtttgagatcagcctgggcaacatagtggaggctccaactctaaaaaaaaaaaaaactaccaacttggtggcttgatgacttaaacaatagaaatttattctctcatattcttaggggccagaactttaaaatcaagatgtttagggggttggtttcttcgggaggctctaagggcgaatccattccttacccctctcctggtttctgacggctgctggcaattgttggtgccctttggcttacagttgtataactctattctctgactctatcttaacatgtccctggcccctgtgtctccctgtatgctctatgtcaaatctccttctcctttctgttagaagaacactagtctttggattt

SEQ ID NO: 876472 - DNA, 632 bp, Homo sapiens
gtgttggtcattctgcagggtttgcatctttctctatttacttcctgcccagttaagggaaatcaaaagaagtgtcccaagatttggtttcaagatgaattgacaaagctcaaaaaaaaagaagacaaggaggaggtgaaaacgtagttcaaggtccaagatttataatcagaattttgaagcctatagaatttatctgttccttgctactcaaagtatggtccatggacagcagcacaggaatcatgtggaagcttattataaatacaaaaccccagaccccacccaagacctactgcatcaaaatctgcattttaacaagatactcaattaatttgtgtgtgccctgaaatttgagatatactgatccaagtcaagccttttatttacagataaggaaactgagtcccaggtgaaaggcttatgccaaaccacaaaactattcatcccagaggagctgggactagaactttaatatgaatactctggcyagtcttctttctctgtatttgaatggaagacatacagctcatgccctggggacaaaatttcttcaaatttgtcatcctcttcaactcacagattacacctcttcaactcacagatttctcactcatcagagcttcttcact

SEQ ID NO: 876473 - DNA, 610 bp, Homo sapiens
cagatagtgtcagtctttcgactttatttttctccttcaatgtcgtgttggctattctgactcttttgcctctccatataagcttcagaatcaatttgtcaatatctacaaaataattttctgggattttgactgggattacattgaaattatagatcaagctgggaacacctgacatcttgacaatattaagtcctcttttccatgaatatggaatttttctccatttatttagttctttaatttctttcaacagaattttaaagttttcctcatataaagatattttgtgagatttgtactaagtatttcattttgggggatgctaatgtaartggtattgtgtttttaatttcaaattacacctgtttgttgctggtatataggaaagtgattgacttttgcatattaaacttgtatcatgtaacctttctataatcccttattaattccaggtgtgtttttcagttaaatcttttggattttctacataatcatgccatttgagaacaaagagttttatttcttccttctcaatcagtatactttgcttttcttgtcttattccattagctaggacttccagtatgaacattgaaaaggagtggtg

SEQ ID NO: 876474 - DNA, 676 bp, Homo sapiens
cttaaaacctagatgacaggttgacaggtgcagcaaaccaccacgacacatgtatatttatgtaacaaaccttcacgttctgcacatgtattccagaacttaaagtaaaataaaaatgaaaaaaagaaataagaatcgtctgcagtttaccaatgaaaaaacagaggctcagagtagttttctttataataagagtggacccatgcttatttacattgcatcaatggggagaagaggaaaaattacaatcttttcttaacagaagagtagataagaaaaatagagtatttctgacttgcttggcctgttgtgcattttgttcagtgatttctagattattacggtagttcaattttatagttagaagcaaatcaaaaacagttaaatgtagaaaaaaggcgaagcaatgttctagaagattataccccaaaatatcttctcaaactgattcaaccacatgatcatagttaattaaaattatagattattccctggcactccycagctcattcagggattatgagtccagacaattaaaaaaaaaaaaaaaaaacaacgaaaacacccgaggaggtttaacaaagagaacagtcattctccaattgtctaggagtacttttgtggctcttatatgtagtttcatgaagataacttctaattctcataagattttcaa

SEQ ID NO: 876475 - DNA, 631 bp, Homo sapiens
gggcaaaatgctgcccttctctttgctaaagcatagctagggctgtttatcttgtttatttttcagagtaacttagctgtcttttggaaatgctctgtatgaagaggtcataataaaatctaatgggagagaccaaaggcattctctgagtgggargtgccatcctggacatgtggaactttgctccacttcccaagaagttcctcatccccatctgagaccacctcagcctggacttcattgcttatatcactatcagcatttttggtcaaaaccattcaacaaactctaggaagttccaaactttcccacatcttcctgtcttttgagccctccaaactgttccaacctctctgcctgttacccagttccaaagtcacatccacattttcaggtatctttctagcacttccccactacctaggtaccaatttactgtattagaccattgtcacactgctataagaaatatctgagactgggtaatttataaaggaaagagctttaattgattcacagttcagcatggctggggaggcttcaggaaacttacaatcatggtggaaggcaaaggggaagcaagggatcttcttcaaaaagtggcaggaaggagaatgaatactggaggaac

SEQ ID NO: 876476 - DNA, 657 bp, Homo sapiens
agaaagtcatataagcatagaaaaatgtctgaaaatacatacacttagttgttttcagtaattctgggagcagaatttgacttttagctttattgctataataagaataaacagccttgttgaatgttggttccctgaaaatactaccaaaacaatctgctgataatccatttaatgaatacataatacttttgtaagaatatcaagaaggcacatgaagcaacatgtaaagtacatttaaacattttgtgtaacatctgaaggcttctgtaatctgatattattctatcacctyttaaagaaaaattatctctccaatttccaagatcccaaatctaaactaaaacagatcatcttcctcataattccttgggaacttgaacaggtgtaattgggaatctccaagctcagggacacttacatctctaaaagggatataaaaatgccctgtcagtccacccttaggctgccttttgcacaacataacaagaatcagaatgcttggaaagaatatagttgacaagagccattttctccccctgtgtctagtctcagcagcactttaaccacttgtcagctaattggagttttctacttggctggcctagcagagaaacactacaccgactagtgtggggagctccatcttcacaatag

SEQ ID NO: 876477 - DNA, 657 bp, Homo sapiens
agaaagtcatataagcatagaaaaatgtctgaaaatacatacacttagttgttttcagtaattctgggagcagaatttgacttttagctttattgctataataagaataaacagccttgttgaatgttggttccctgaaaatactaccaaaacaatctgctgataatccatttaatgaatacataatacttttgtaagaatatcaagaaggcacatgaagcaacatgtaaagtacatttaaacattttgtgtaacatctgaaggcttctgtaatctgatattattctatcacctcttaaagaaaaattatctctccaatytccaagatcccaaatctaaactaaaacagatcatcttcctcataattccttgggaacttgaacaggtgtaattgggaatctccaagctcagggacacttacatctctaaaagggatataaaaatgccctgtcagtccacccttaggctgccttttgcacaacataacaagaatcagaatgcttggaaagaatatagttgacaagagccattttctccccctgtgtctagtctcagcagcactttaaccacttgtcagctaattggagttttctacttggctggcctagcagagaaacactacaccgactagtgtggggagctccatcttcacaatag

SEQ ID NO: 876478 - DNA, 609 bp, Homo sapiens
tacttattgaagttctctttaacagagaagaaagtctttattttgtgtctagttgatgattttcttaatatattttctttttctcttattcaatgttatatagtgataaatattaatattatatataatatttataagaatatatyaatatgtgtataaatatcttatgaccgaagaataactatggtaagtcaatctttagctaactttctcaaactatggacctgaaaattcctttaaacataatttatgatctttttcgtcctgaagctcctcctgtttcattaagatggggaagctgggctgagcatctctcaccacaggttatacatgtaaaaagaatgtttaagatttcaaatataaaagcacttgctaaatgcacttacaaataaagcactagtatcagtgaaaaggcgacttattcattgactagtagccatcacaaatcatgatattgcgtatgtgtagacacacaaatatgtgtactatatagtgatactttgtcaaaaagcaatcccatcaaaagaaaaatttgtcaatcatttttatcttatctaatgatgtatatttgacaacaatctgtggaacattaatagcaggagaatctgt

SEQ ID NO: 876479 - DNA, 605 bp, Homo sapiens
aatgccgaataggggctttgtcagaatgacatgatttaatacatgcacgaagcacgggcagagagtaatgccggcaatgcctggcacctggaaaactcagtgttggctatctctgcatttccttccagttcttttgaggtcctggagagctgggaagggtcgggattactggtgaaatttcaagggtgaattttattcagactggaggcctggaggggacactgggggacaaggttccaggttcccttcctctggggtctttgccctgacagtatcccccgtctcccaccctgaagtccagccctccaaaggccgctggcgtgagccttcaaaggagcgaatttggtcccgggctgggcagggggcaggagtgggcatttaggggtctcgggcagaaggctggggcaagggcmcctggaactgacaagcagtactctgccgccccctggcacgcccctggcgcgacgccagtccaagggagggccgggacactggactggtttgtgggtctcggctggattggcgatgaaagccgcggagccgtcgggcccggcgcccgcccagcagcgcagggccggctccgaggaggctgctgagtgcgggcg

SEQ ID NO: 876480 - DNA, 637 bp, Homo sapiens
gcattttgccctgccctgaagatttgtggaactttgaacttgagagagatgatttaggctatctagcagaataaatttctaagcagcaaaacattcaaaggtgacttgggtgctgtcaaaagcattctgttttaaaagggaaacagcataaaggttcagaaaatttgcagcctgacaatgcagtaggaatgaaaaacccattttttgaggagaaattcaagccggctgcagaaatttgcataagtagcaaggagcctaatgttaatcaccaataccatggggaaaacatctccagcccatgtcagagaccttcaycgcagcccctcacattacaggcctggaggcctaggaggaaaaagtggttttgtgggctgggcccggggtccccaagctgtatgcagcctagagacatggtgctctgtgttcaaggctccagccatggctgaaaggggccaacgtagagcttgggctgtggcttcagagggtggaagccccaagccttggcagcttccatgtagtgttgagcctgtgggtgcacagaagtaaaggattgaggtttaggaacctccggctagattttagaagatgtatggaaatgcctggatgcccaggcaaaagtttgctgcaggggcagagc

SEQ ID NO: 876481 - DNA, 577 bp, Homo sapiens
cccctccatgcagccccactaccaccttccactgatcattggcattcctggtgagtctcagctgttgatcatcagtcagcaacccacacacatagcccaacctctatggaggttccccaggggataattcatcagctcaagtaggcataaagacaggtcccagccctgggatgctggcaagggtgcacaggaccactggagtggtcaagagaggtagctcacccagaatgatgcagggagccagccatactcttcctgacagagggagrggaatcttgaatgagcataaggtgtccaacatgccgctgatgcattcagccaacaggcctgcccattcagatcacacagccacatcctgttgatgatgatagtgtccagatttctcaagcctatccctgtttgttgccgtgtcctccttcaccacttcccacttctctccctcaggtctctgcccccaccgggctgaaatctggattcagagctctcagtggcagcctgcctggggctctgtggacttgatttcacatgtggtctctctcgtggactctggtaattgctcttccctgcatcctcctaa

SEQ ID NO: 876482 - DNA, 642 bp, Homo sapiens
tctctaaggcccagcgatggtgagctttttttatatgtttgttggccacataaatgtcttctttggaaaagtgtctgttaatatccttcacccactttttgatgggatgggttttttataatcttctaaatttgtttaagttccttgtagattctggataatagctctttgtcagatggatagattgcaacaattttctcccattctgtagtctgcctgttcactcaaatgattgtttcttttgctgtgcagaagatctttagtttaattagatcataaatcattatactatgaaggcatatgcacatgtatgtttattgtagcactattcacaatagcaaagacttggaaccaacccaaatgcccatcaattawagactggataaagaaaacttggaacatatacaccatggaatactatgcagccataaaaaagaatgagctcatgtcctttgcagggacatggataaagctagaaattatcattctcagcaaactaacataggaacataaaaccaaacactacatgttctcactcataagtgggagtcgaaccatgagaacatatgggcacagggaggggaacgtcatatgctggggccagtcggtgggtgggggtcaaggagagggatagcattaggg

SEQ ID NO: 876483 - DNA, 533 bp, Homo sapiens
tgctagggcagtgtggaagggaaatgtggcgttggagcacccacacagagtccttactagggcactgcctagtggagctgtgagaagggggtcactctcctctataccccagaatggtggttccaccaacagcttgcattgtgcatctggaaaggcacagacactcaatgccagcctgtgaaagcagccagaaagaaggcttaccctgcaaaaccacaggggtggagctgcccaagaccatgggaactcacctcttgcatcagtgtgacctggatgtgagagatggagtcaaaggagatcattttggagctttaagatttgackgccccagtggatatcagacttgcatcggccctgtagccattttgttttggccaatttctcccatttggaatagttgtatttacctgatgtctgtacccctattttatctaggaaataaatagcttgcatttcactttacaggctcataggcagaagggacttgccttgtctcagatgagacattggactgtggacttttgggttaatga

SEQ ID NO: 876484 - DNA, 612 bp, Homo sapiens
aatggtggttccaccaacagcttgcattgtgcatctggaaaggcacagacactcaatgccagcctgtgaaagcagccagaaagaaggcttaccctgcaaaaccacaggggtggagctgcccaagaccatgggaactcacctcttgcatcagtgtgacctggatgtgagagatggagtcaaaggagatcattttggagctttaagatttgactgccccagtggatatcagacttgcatcggccctgtagccmttttgttttggccaatttctcccatttggaatagttgtatttacctgatgtctgtacccctattttatctaggaaataaatagcttgcatttcactttacaggctcataggcagaagggacttgccttgtctcagatgagacattggactgtggacttttgggttaatgatgaaacgagttaagactttgggggactgttgggaaggtatagatggttttgcaatgtgaggatatgagatttggcagtggctaggggtggaatgatatgatttgcctctgtccccactcagatatcatcttgaattgtattcccataattcccacatgttgtgggagggacctggtgggagatgactgaat

SEQ ID NO: 876485 - DNA, 612 bp, Homo sapiens
aatggtggttccaccaacagcttgcattgtgcatctggaaaggcacagacactcaatgccagcctgtgaaagcagccagaaagaaggcttaccctgcaaaaccacaggggtggagctgcccaagaccatgggaactcacctcttgcatcagtgtgacctggatgtgagagatggagtcaaaggagatcattttggagctttaagatttgactgccccagtggatatcagacttgcatcggccctgtagccattttgttttggccaatttctcccatttggaatagttgtatttacctgatgtctgtacccctattttatctaggaaataaatagcttgcatttcactttacaggctcataggcagaagkgacttgccttgtctcagatgagacattggactgtggacttttgggttaatgatgaaacgagttaagactttgggggactgttgggaaggtatagatggttttgcaatgtgaggatatgagatttggcagtggctaggggtggaatgatatgatttgcctctgtccccactcagatatcatcttgaattgtattcccataattcccacatgttgtgggagggacctggtgggagatgactgaat

SEQ ID NO: 876486 - DNA, 647 bp, Homo sapiens
ttttttattttttatttttttgagatgaagttttgctcttgttgcccaggctagagtgcagtggtgtgaccttggctcactgcaacctctgccccttgggttcaagagattctcttgcctcagcctcctaagtagctgggattacaggcatgaaccaccacacctggctaattttttttgtatttttagcagagacggggtttcaccatgttggccaggctggtctcgaacccctgaccataggtgacccacctgccttggcctcacaaagtgctgggattacaggtgtgagccaacatgcccagcctacagtatgtctttgaaaatgttggccttttaaaccyaggaacaccaaagaaagaaaaaatttcaaagtaaaatgttaaagtagccttgtgttaaattgggtgatgacataacttggggtagatcactaataggagacatggagcttcatttgtaggaagacaaaatgaatgtatgagtgtgggtactatcagattgtacacatcatgtgtatctgagaaaagggatggaaaacaaggcaaaaagacctacagaaggataccacaagaagttaaggccacaagagtaggcccttccctactagtcaggtaggctgaggagggagggttgcttgagttcag

SEQ ID NO: 876487 - DNA, 614 bp, Homo sapiens
gtgatctgatggttttataagtgtctggcatttccctcttgcactctcactctgttctgccacccagtgaggaagatgcctgcttctcctctgccttctgccaagatggcaagtttcctgaggcctccccagcaagatggatctgtgagtcaattacacctatttcctttataaattcccaatctcgggtatttcttcataccagtgtgagaacaaactaatgcagagggrgagcaaaagcagaagaggagggagggagttaaaaaaaagaaaagattgtggttggactgctccaggaatcagacaagtttattagaaaaaaactttcttctccggccttatagaatacatgaaagcttgatagaaaagccaagtatctgctaaatagtgagaggacggccatgcctcttataataaaagtatactcaataaagcttaattataaaataatacctgtaaatataaaaagtaaaatgaattttcattttatttcagatgcattattacattttattaaaagaaacctgtgaaataggattctcattatccctatttacagaaggagaaattgaggtttggggaaatttagacttgccttttgggtcactcagcta

SEQ ID NO: 876488 - DNA, 614 bp, Homo sapiens
gtgatctgatggttttataagtgtctggcatttccctcttgcactctcactctgttctgccacccagtgaggaagatgcctgcttctcctctgccttctgccaagatggcaagtttcctgaggcctccccagcaagatggatctgtgagtcaattacacctatttcctttataaattcccaatctcgggtatttcttcataccagtgtgagaacaaactaatgcagagggggagcaaaagcagaagaggagggagggagttaaaaaaaagaaaagattgtggttggactgctccaggaatcagacaagtttattagaaaaaaactttcttctccggccttatagaatacatgaaagcttgatagaaaagccragtatctgctaaatagtgagaggacggccatgcctcttataataaaagtatactcaataaagcttaattataaaataatacctgtaaatataaaaagtaaaatgaattttcattttatttcagatgcattattacattttattaaaagaaacctgtgaaataggattctcattatccctatttacagaaggagaaattgaggtttggggaaatttagacttgccttttgggtcactcagcta

SEQ ID NO: 876489 - DNA, 557 bp, Homo sapiens
catttttggggcaaagccattcaacaaatttctaggaatttccaaactttgccagatttttctgtctccttctgagtccttcaaactgttccaacctctgcttgttacccagttccaaagttgcttccacattttcaggtgtcttttcagcaacgtcccactctactggtaccaattttctgtattagtctgtttcaacactactgataaagacatacctgagactgggaagaaaaagaggtttaactggacttacagttccatatgcctggggaggcctcagaatcatggtgggaggtgaaaagcactccttacrtagtggtggcaagagaaaatgaggaagaagcaaaagcagaaatcccagataaacccatcaaatctcatgagacctattcaatatcatgagaatagcatgggaaagacagagccccatgattaaattaccttcccttgggtccctcccacaacatgtgggaattcttggagatacaattcaagttgagatttgggtgggacatagccaaactatatcagataacacaaatatttggattaat

SEQ ID NO: 876490 - DNA, 557 bp, Homo sapiens
catttttggggcaaagccattcaacaaatttctaggaatttccaaactttgccagatttttctgtctccttctgagtccttcaaactgttccaacctctgcttgttacccagttccaaagttgcttccacattttcaggtgtcttttcagcaacgtcccactctactggtaccaattttctgtattagtctgtttcaacactactgataaagacatacctgagactgggaagaaaaagaggtttaactggacttacagttccatatgcctggggaggcctcagaatcatggtgggaggtgaaaagcactccttacatrgtggtggcaagagaaaatgaggaagaagcaaaagcagaaatcccagataaacccatcaaatctcatgagacctattcaatatcatgagaatagcatgggaaagacagagccccatgattaaattaccttcccttgggtccctcccacaacatgtgggaattcttggagatacaattcaagttgagatttgggtgggacatagccaaactatatcagataacacaaatatttggattaat

SEQ ID NO: 876491 - DNA, 562 bp, Homo sapiens
accaatgcataatctgttcaattaccttgtagagaattatacccatgacttataccttcttcctcacatcgatagggagaacacactgaaggaagcagaatgaggggcactaagcactgcaggagaagatggggatggcagactcagcctgaccaaagaaatcaatcacatcttggtaaagtaagccactctcatttgtgtctggattagagtaggatgaacatcagaaaagggctctgtgatcagcctcctttactaggctttaatgtaactgattttccctttattatctcctaaactcctaatttagaacagcatataataaagcctttttgtgcagctttctatccaggcaccaagaggggaaaccagctcttatatgcagaastgacatacaatgccttcctccaaaatgctagcaacaaccatctctgtaccctcaaaagtgaacttgttgagggcaagacttaggtgtcctatcacactgaatcccagagaaagcaaacaagatagaattaaattggcctgtgtttgttcttcagcctccccatcagagctgaac

SEQ ID NO: 876492 - DNA, 594 bp, Homo sapiens
atgatcatgccactgcactccagcctaggattcagaatgagactccatctcagtaaacacacacacacacacacacacacacacacacacccacacacacacacacatttttttccccaaactaacctataaacagaagaaagaaattccattcccctgaggccaccacactcctgsatgtatcaactaactagcaagctcacatagggacaaagccagtgctttcaaaacatgagcgatggcccactgagcagagaccacagtagtgattagaattgtacagctaagctccagaggggagaaatgttagggctgcacaaattacctacaaagagaagacactaaaccttagttatgcttcgatatttacagctaattttactggttcaaatccactttaggagtatctaatttctatgcagtgttgttgggtgtttcctatgaaaaataaaagcagtttagaatcagtttctggaaggcatccaagatgactgtaatctgttaaaatccatacccaatcctgtcaggaagaccatgagttaatctaagacgactcaatacctcctttccagagagagcagaaaagctgctgct

SEQ ID NO: 876493 - DNA, 594 bp, Homo sapiens
atgatcatgccactgcactccagcctaggattcagaatgagactccatctcagtaaacacacacacacacacacacacacacacacacacccacacacacacacacatttttttccccaaactaacctataaacagaagaaagaaattccattcccctgaggccaccacactcctgcatgtatcaactaactagcaagctcacatagggacaaagccagtgctttcaaaacatgagcgatggcccactgagcagagaccacagtagtgattagaattgtacagctaagctccagaggggagaaatgttagggctgcacaaattrcctacaaagagaagacactaaaccttagttatgcttcgatatttacagctaattttactggttcaaatccactttaggagtatctaatttctatgcagtgttgttgggtgtttcctatgaaaaataaaagcagtttagaatcagtttctggaaggcatccaagatgactgtaatctgttaaaatccatacccaatcctgtcaggaagaccatgagttaatctaagacgactcaatacctcctttccagagagagcagaaaagctgctgct

SEQ ID NO: 876494 - DNA, 602 bp, Homo sapiens
tcttaacgattcctgcctggtaaacctgattacaaagtgaacttggcattttgggattcccttccttgttgatgtgaatcataaggcttcagtgttgttgagagctggtgttcagatggccctgttgtttgtccactgttgcataaacttcacaggcaagacccatgtgtttgtaggtgtaattctagaaggcagatagtgtatatttgtggactgtgcaaaatgaatctgagtattgatttgtatggcatctggaatacattctggaaagttcttacrgggacaatgtgtaatgatttggaattgccaccctggtgcacacagccaggatagtgggggaagatctttcagcttgaattattaactagtttctgatgataattttgacagcctaaacctaaactaggttcttggataatctctccaaatccatactttaacaaaataacctacatgcagcatcatccttgtcttaaccttgtaactcccctggccctgttttgtcatttcttagtgtgccgaactttacttcaaaaggttcatttcattccaaggggcaaccagagagggatcaaagactttacttcattttgcaaaggcca

SEQ ID NO: 876495 - DNA, 692 bp, Homo sapiens
gcttcaccagctttattaacccctaacaagagaatcagcccatcccttgaagctttgaaaccaagcattgacttctcctctctaactatgaaaataccagatggcatctttctccaataaaaggcaattttgtcaacattgaaaatctgttgtttaatgtagccactttcaccaatggtcttaggtagatcttctggataactttctacagcttctccatcagcacttgctgcttcactttgcacttttatgttatgaagatagcttctttccttaaacctcatgaaccaagctctgctaacctcaaacttttcttctacagcttcctcacctttttctcattctgtcctcttactatttataccattcatagacatgaagagagtyagggccttgtgctgaattaggctttggcttaagagaatgtttttctatccagactgctaaagctttctccatgtcagcattaaggctgttttactttcctatgattcatgtattcactggagtagcacttttaattaacttcaaggactttttctttgcattcacaacttggctaattgtttaattcgagagatgtctccacaatccacttctctgactcctctcttctatctgaggctctcatctccctgctgtctctcaacttttgagaaacagacccaaaataaaacataatttatcttatt

SEQ ID NO: 876496 - DNA, 693 bp, Homo sapiens
gttaaataacactgcatgacagagcagtcatcaagtgagcaaagggcaaaatgtgctgtcagtggagagtttagagtgaatctgtgggtacctcagtggctttaaaactaaatccctcttgtcaaaaataccttaatccatgggatccaaagacccttcaagaactttattaatgaggacttgagawtcgaccaaatgtttcagtagagtgggttttcacgtttctctgcccatctaaagagcttccaggcatgaagcttggaatcaggacaacaccaatcaatcgcctttacctcagaaaaataaaaacatcatgcctgaaaaatgcactagactaactactgagccacttgcaatttcagtatttattcaggttaggaaaaaattttccaccaaatttaaaagacttagctgacatacatttgctaaaataatcaagatttgaaaacctgatgttttaaagtagacgtgaaaagaagaatccgtttacatgagtgcttaagtatcatctttacataggtgtctactgtaacttcttccctcaacaatttaagatgatgttttcttgttttaagttctataagaggcgtaagcactccaccatcagtatttctatggtaatggttgtcttccacaaaaaacaaacaaacaaatataataccatgtattacaatggttggttgtacgtaaccc

SEQ ID NO: 876497 - DNA, 587 bp, Homo sapiens
caaagagaacagatgtttatccagaggtaaaggagtgatggcagagcatatgactacagatccaggcagctagggagatatcacagagggagtttttgaaagttcatgttgatcgcttctacttttatagtcagagttatctcctgagaatacagatgagagaaagctattaaaccttaagggaaagtatgaaagaatcatccagtgggttgagagaaggtataagtcagggwaacataatatgattattttgtagcattaagaactcactggaggctgatgctaatgaatttaaaataaaacaagccagtatggaagtctgaacaaacatattaagtatgttcacctgtaggggtgcaggcctgaagtaggagaattgcattatataactagagttgacattttgttcatcaattgataaagaggaaaaaacgtttagggtatatgcaaagaagtgattatagtggtgctatggtctgaatattagtgtccatgtcatattcatttgttgaaatcttaacccctgtggtgatggtatttggaggcaggatcttgggtcacaagggtagaaccctaatgaatggcaa

SEQ ID NO: 876498 - DNA, 619 bp, Homo sapiens
ttggaattcagtagtcaagtatttgctacctttcttttttgattctataatgaatgaatcgtgtttcaaatgctgaggtgtggaagggtctgttctccagggtacaataaagggatacagctggaggtaggagcaaactgggaatttacagyatcaccccaccacagctgttattaatgaatgaccaccttaatccaagagcatttggcccaaattgttgcataggatcttcctcctgaggctccaggatatgtaaggtggtttataggtagtaatgtttttccatctttattagtgtcttaaaggtagggatcactggctgttttgctagcagctgggttgagatgctctgggtcagctgtacctattttcctgctctacctgagaatccaggctggtaacaggtacctgggatgggagatacagtcacctgtgaccatggagcaatgaaaacctcattgggtgtacagggattgtgtccatgaacctggccttgtgagcattaagcttcggctccttcagatgacctccaaatggttaactccttggcctcattgtagaactgccaggccaggtaggccctcaggtaatatgagaaagtggaaagcctttggaattg

SEQ ID NO: 876499 - DNA, 664 bp, Homo sapiens
gatgctgcataaggcagatgtttcctgctgacggtgttcctgttgccaagtaattcatgagcaaattcacctgaatttcacttcctggtttggagaggggaagtaaaccaatgacaaaaagcactaatttaaatttcatctggagaggtgcttctgcattgctcgacattgtcaaaatacagattgccccttggtggcggcagcagctaaaacttyagatgaggctaattcttcaaaatcatttctccctcctctatcttttgatccaaatcctgccaagcctgtatggacatcattctggaggaaacccaggtctatactatggaagggactatatcgtgtgtttaaatagatttgagataatttaaaggaagttatgaggtcgttttcaattaacatattgtgttttctcttgacactacagatttgttgaagtcatggttttgatggcagtttaatgtcacacacatagtgtggcttaaatcacttatttgatcatttccctaatgacaggtttttgggctgcttccagtgtgttgctgttataaatcatgcttgcgataaacatacttgcacattaatctccttcctgatctcttgattatttccttagaacaaattcctaggtgaattccggggatgggcatttttaagtatcttaatg

SEQ ID NO: 876500 - DNA, 702 bp, Homo sapiens
ataattgggggtaaaagggctggggagtggtgtgaggtataaaggtttcaggcatagcaaacagtatatgcgaacacccacatcagtcggggttcaggcaggaacagctggcacacctcaaagagaacttaatgaaggggcttttgatgaagatggaggcrcagtcaaggaagccagccaggaacaagcaacagtggcaaacagtgatggccctggcccaaggaggcggagacagggaagtgaattatagtgatatggaacagtgcttcgtgcaggaacttcatgggacaaacccaggcactgtcacaggaggaagaagctggggataggaatatctcaacctctcttttctcactgtctaatctcctactgtctctcctattggttgaacccaactggaagccagagagaggacgaaggagcctctgagtaatgctgttcatagctttcagcctctaatggtacagggcagggcagaaaagtctagacaatggatctggaggggcaaacagagaacaacccatatagccaggtaggaactgagaaagaccagtaggaaagcctggagccacaagcctaaagagaattcaaacagcacccactaagtgcttaaaattcagttctcagaggacatcagtgaggtggctactatgattccattttactgatcagaaaactgaggctcagagaggttaagtaact

SEQ ID NO: 876501 - DNA, 689 bp, Homo sapiens
  misc_feature 687: n = A,T,C or G
aacttgacttatagagccaataaaagccccttggaaaaactagcctcataccttttcctacacagctgctgcacagggttcctgacctggggtaggtaaagaatgtcactttctatcaggcccaggagccctggtttatcatggaacttcaaaaggagagaatcatccatctcatgggtatttaatggcacaaatccatgggtgggctcaactttaaaaaagtcttatctgagattcctcctgaggaacgcagttcgctcaaagccaatttaaaagcatatgtaataaataattattttgctgcactgtatgcaaataattaggccargtataacaaagcaaaccagctctaccatgattcatctttagtaaaaatgggaaactggagagagaaatattatgtttcaaaactatagtacacctgttgttaaattctagtcttgcctaacatttttaaatttttattattttctacagtttggacagaattctaagttttcttagctattagtgtgcaaaataatgttttcaattttcctctcttttccatttttgcttatttgagattactaaaaactaagatgttctttcataaagccctgcaaactgaagctaaacaacttaaacttcagaagaagataacagcaatctgtttacatacataaggcactttcatacctgcctatnca

SEQ ID NO: 876502 - DNA, 689 bp, Homo sapiens
  misc_feature 687: n = A,T,C or G
aacttgacttatagagccaataaaagccccttggaaaaactagcctcataccttttcctacacagctgctgcacagggttcctgacctggggtaggtaaagaatgtcactttctatcaggcccaggagccctggtttatcatggaacttcaaaaggagagaatcatccatctcatgggtatttaatggcacaaatccatgggtgggctcaactttaaaaaagtcttatctgagattcctcctgaggaacgcagttcgctcaaagccaatttaaaagcatatgtaataaataattattttgctgcactgtatgcaaataattaggccaagtataacaaagcaaaccagctctaccatgattcatctttagtaaaaatgggaaactggagagagaaatattatgtttcaaaactatagtacacctgttgttaaattctagtcttgcctaacattttwaaatttttattattttctacagtttggacagaattctaagttttcttagctattagtgtgcaaaataatgttttcaattttcctctcttttccatttttgcttatttgagattactaaaaactaagatgttctttcataaagccctgcaaactgaagctaaacaacttaaacttcagaagaagataacagcaatctgtttacatacataaggcactttcatacctgcctatnca

SEQ ID NO: 876503 - DNA, 606 bp, Homo sapiens
acctgcttcccgttctattcaaagtcatccttctgcttactgagataaatgcatatctgattgtctcctttggaaaggctaatcagaaactcaaaataatgcaactgtttttctctgacctacttgtgacctggaagccccctcccctctttgagttggccygcatttgcttcaagttgtctcacctgtctagaccaaaccaatgttcattttacatatgttgattgacatctcatgtctttctaaaatgtataaaaccaagctatgcgttctgaccaccttgggcacatgttgtccagacctcctgggactctgtcatgggtgtgtcctcaaccttggcaaaataaactttctaaattaacagacctgtctcaaattttgggggttcacaatacatagaaacaattggaaggatatgttcctgctccctgatgtggaattctgggagattatttatttatttagaagacacaggtgtcatactctgtctcccaggctggtcttgtactcctggcctccagagatcctcctgccttggcctcccaaagtgctgggattacatgcatgggccactgcaaccagcccaggagattgttcattttcttc

SEQ ID NO: 876504 - DNA, 692 bp, Homo sapiens
tgcctgcctgggtacagttgtctttcttcaaagtgattttaatatattagttttaatctgatctgcttttgttgattttatccttcaatttttccccaagatcttatgggggtgaggagtttctctctatagttgccatgttctggctgctaattacaacatacccctgtggtggaggggactgtgtcaacattcttattggtttaatgttccttttgttgtgtacagttaaacaagtatgttttcaattgtttatagcaacttaaattgtgttttagcagggttattgcttttacttggagagaaacactaattttatggaaaaggtgacaatggtaatgtagagataataaaaagaggcaagaagtagattcagaaatactcttcttaaagatacttacaatgggaaaaaagtgacctcattaatataaaaaaaaacctgaagattaactttacctgtaaaacagtcatccattcccattcacagcccagtgagcatgctacatttggatttcagagctcaccactgtgcagaacygttctcagtaaggttgtcactgttacccaatctcaagggcacttttcagttcttcctgcttttgaccttactggtaaacacttctctgtttaagtagctgcttgtactccttttttctcctctcaccctctccctgtacctcctgagcctcctt

SEQ ID NO: 876505 - DNA, 641 bp, Homo sapiens
gatgtcccagaggggccctgatactagcactgttttacattggtgattaaagattagaaaaaagtagaaaccatgtcattatcaaagcctggcactgtaaataggtgttacacaactccatgtacttcctgactcccttctttgatgttttgtccagtatttacattcatatctatccaatccatatatgtatatgtctaatatatagtatatatatttttatatattatatgtagcatatatttatatatatagtatatacagatgaatgatatgtaatccatatattcatgtgtaatayatagtattttttactatatattacacatactatataagagtatatattagtatattatatatactatatatcaaaatatagtatatttttatatatattacacatatgaatatatggattacataccattcatctgtatatatcattcatccagagtttttgtgccatattcagctatcttttttcctttcttctttgttttttaatagagacagggtcttcctctgtcacccaggctggagtgcaatggtgctattgtagctcactgtagtctcatacgcctagactcaagtgatactctcacctcagcctcctgaagtgttagcattactgtcacttg

SEQ ID NO: 876506 - DNA, 641 bp, Homo sapiens
gatgtcccagaggggccctgatactagcactgttttacattggtgattaaagattagaaaaaagtagaaaccatgtcattatcaaagcctggcactgtaaataggtgttacacaactccatgtacttcctgactcccttctttgatgttttgtccagtatttacattcatatctatccaatccatatatgtatatgtctaatatatagtatatatatttttatatattatatgtagcatatatttatatatatagtatatacagatgaatgatatgtaatccatatattcatgtgtaatatatagtattttttactatatattacacayactatataagagtatatattagtatattatatatactatatatcaaaatatagtatatttttatatatattacacatatgaatatatggattacataccattcatctgtatatatcattcatccagagtttttgtgccatattcagctatcttttttcctttcttctttgttttttaatagagacagggtcttcctctgtcacccaggctggagtgcaatggtgctattgtagctcactgtagtctcatacgcctagactcaagtgatactctcacctcagcctcctgaagtgttagcattactgtcacttg

SEQ ID NO: 876507 - DNA, 641 bp, Homo sapiens
gatgtcccagaggggccctgatactagcactgttttacattggtgattaaagattagaaaaaagtagaaaccatgtcattatcaaagcctggcactgtaaataggtgttacacaactccatgtacttcctgactcccttctttgatgttttgtccagtatttacattcatatctatccaatccatatatgtatatgtctaatatatagtatatatatttttatatattatatgtagcatatatttatatatatagtatatacagatgaatgatatgtaatccatatattcatgtgtaatatatagtattttttactatatattacacatacyatataagagtatatattagtatattatatatactatatatcaaaatatagtatatttttatatatattacacatatgaatatatggattacataccattcatctgtatatatcattcatccagagtttttgtgccatattcagctatcttttttcctttcttctttgttttttaatagagacagggtcttcctctgtcacccaggctggagtgcaatggtgctattgtagctcactgtagtctcatacgcctagactcaagtgatactctcacctcagcctcctgaagtgttagcattactgtcacttg

SEQ ID NO: 876508 - DNA, 614 bp, Homo sapiens
accatactacaaggctacagtaaccaaaacagtatggtactggtacaaaaacagacacatagaccaatggaacagaataggcagcccagaaatagagccatacacctacaactatctgatctttgacaaagctgacaaaaataagcgatggggaaaagactccctattcaataaatggggcagggataactggctagcaatatacaaaagattggaactggtccccttccttataccatatacaaaartcaactcaagatggattaaagacctaaatgtaaaacctaaaactataaaaaccctggaataaaccaagaatatatcattttggatacagaatctggcaaagatttcataatgaaaatgccaaaagcaattgcaacaaaagcaaaaatttacaaatgggacctcattaaactaaagagtttctgcacagcaaaagaaactatcaatagagtaaataggaaacctacagaatgagagaaaatatttgcaaattatacatctgacaaaggtctaatatccagaatctacaaggaacttaaacaaatgtacaagcaaaaaacaacccgattaagaagtgggcaaaggatatgaacagatacttttcaaaa

SEQ ID NO: 876509 - DNA, 614 bp, Homo sapiens
accatactacaaggctacagtaaccaaaacagtatggtactggtacaaaaacagacacatagaccaatggaacagaataggcagcccagaaatagagccatacacctacaactatctgatctttgacaaagctgacaaaaataagcgatggggaaaagactccctattcaataaatggggcagggataactggctagcaatatacaaaagattggaactggtccccttccttataccatatacaaaaatcaactcaagatggattaaagacctaaatgtaaaacctaaaactataaaaaccctggaataaaccaagaatatatcattttggatayagaatctggcaaagatttcataatgaaaatgccaaaagcaattgcaacaaaagcaaaaatttacaaatgggacctcattaaactaaagagtttctgcacagcaaaagaaactatcaatagagtaaataggaaacctacagaatgagagaaaatatttgcaaattatacatctgacaaaggtctaatatccagaatctacaaggaacttaaacaaatgtacaagcaaaaaacaacccgattaagaagtgggcaaaggatatgaacagatacttttcaaaa

SEQ ID NO: 876510 - DNA, 660 bp, Homo sapiens
ttaaggtaaagtgagggggagggaagacattccatgcaaatggaaaccaaaagcaagcaatagtagctattcttatatcagtcaaaacagacttaaaaccaacaacagttaaaaaagacaaagagaaacattatgtaatgataaaagtattagtccaacaggaaaatatcacaatcctagatatatatgcacctaacactggagctcccaaatttataagacaattactactagacctgagaaatgagattgatggcaacacaatagtcgtaggggaagtcagtactcttctgacagtactaaacaggtcatcaagayagaaagtcaacaaagaaacattagacttaaactgtaccctagaacaaatggaccttacagatatttacagaacattctacccaaaaactgcagaatatacattcttttcatcagctcatggaacattctccaagatagactatatgataggccacaaaataagtttcaataaatttaagaaaatcaaaattgtatcaagtactccgtcagaccacagtggaataaaattggaaattaaaagttaaaaggaactgccaaaactacacaaatacatggaaattaaataatctgctcccaaatgatccttgggttaactataaaatcaagagggaaatttagcaa

SEQ ID NO: 876511 - DNA, 475 bp, Homo sapiens
cacctgtttctaggcaaccttgaatttccggctccctgagctccattttgcacatgcatctttctctcctctgttattacgtgtttgttgatctgactgatccttttggacaggtgtcataactaagccctttcctatagagttctcacttatgcaacactgcaagtatagcctttgttgacttgtatcggagttgccatctatacatgttaatrtatttgatacaaaatcatgcaccatgatataatgtgaaatacatagttattctgtgccctagatttctggctcagagcttctaacattctgtaacttcctgaatgataggagtgataggagcatcttttggtttatatacatacattttgttataatatttgattgtagtccttagatcctaacacagagcttctaagaatgtctttttgtatattaacaaagtgactggtggctgaaagcccctaggtaaccagagaaa

SEQ ID NO: 876512 - DNA, 475 bp, Homo sapiens
cacctgtttctaggcaaccttgaatttccggctccctgagctccattttgcacatgcatctttctctcctctgttattacgtgtttgttgatctgactgatccttttggacaggtgtcataactaagccctttcctatagagttctcacttatgcaacactgcaagtatagcctttgttgacttgtatcggagttgccatctatacatgttaatgtatttgatacaaaatcatgcaccatgatataatgtgaaatacrtagttattctgtgccctagatttctggctcagagcttctaacattctgtaacttcctgaatgataggagtgataggagcatcttttggtttatatacatacattttgttataatatttgattgtagtccttagatcctaacacagagcttctaagaatgtctttttgtatattaacaaagtgactggtggctgaaagcccctaggtaaccagagaaa

SEQ ID NO: 876513 - DNA, 661 bp, Homo sapiens
gtctggtagtgtgatgcctccagttttgctctttttgcttaggattgccgtggctattagggcttgttttttggttccataagaattttaaagtagtttcttgtaattctgtgaagaatttcaatggtaatttaataggaatagcaatggatctataaattactttgggcaatatggccattttcacaatattgattcttcctatccatgagcatgaaatttttctctgtttgtgtcctctctgatttcctygagcaatggtttgcagttctccttgaagaggttcttcacttcccttgtttgctgtattcctaggtattttattctctttgtggtaattgtgaatgacagtttatttattatttggctctgtgcttgtctattgttgatgtataggaatgcctgtgatttttgcactgattttctatcctgagactttgctgaagttgcttatcagcttaagaagcttttgggctgagactatggggttttctagatataagttcatatcatctgcaaatagggatagtttgacttcctatctttctatttgggtgcctttatttttttttcttgcctgattgcacgggccaggactttcaatgctatgttaaataggaaggttaagatagcgtatccttctcctgcaccagttttcaag

SEQ ID NO: 876514 - DNA, 606 bp, Homo sapiens
taaacatacatggtctctacttttgaagaaataaaggtcttatataaacaaataatcacagctactagtgccctcagctatctgggtttttcaagacctcccagggccaacttatggcatttagtcatagctccacagtatgtctttctgaagtttttagaaaatccttgtaggtaataactcccctacctccctcagcacagctgggacacactattgaatgaaactcatcaagtccctaattctttaccaccccactcctcaccacatggaattctagtgaaagaaacttttacttcatgctgttcaaaagggcacttttcacaaagtgtaatagagactgtacaatttaagctttatgctccacggcctaaggatttaccatattaatctatgcagatttactaaaggkaataagagtgaaactgatataactaagatagttacctctcactttccctcccagctttcctcctctggaaggattcatttccagattcaaaagtttatttctaaatggctgtttctcctgtcatagcctgcagtgtacatcagaataaagaaccgtgcccagggtgaatatctgacagtcactggaagtctagc

SEQ ID NO: 876515 - DNA, 558 bp, Homo sapiens
aatgtctgccacaggtgcaagaatgatgagtgaaatagcattggagtcttcttcccaagtgacagaaacagaactcaagttagcttaagagatggaaaagaaaggctaagggataatggctcacataactgggaagcccaaggtgaagccaacagagataatatcaccagatttgtctgtgtgtatttctcctcctttttctctctccatctcttggcccagccctcagactgttgggctcatcctcttctactgtagataagcactggagataaaagtagtcggggcggaggaggagattgagttatgaaccaatcatcctcaacttataccatcccagtttagggccytgagagggatttcttaacatctttctgtatatttcattctagagaaggaccctgcttgacccttcttcgatcatatgactaccactcaggctaattgttgaagccagaggggaaggacagtgtgaatggcagtccagatagaattgggtaaagccataatcaaaaggaaatggtttgctgttcccttaaggaggggtggaaaaaaaaa

SEQ ID NO: 876516 - DNA, 524 bp, Homo sapiens
ctggagctctcagatttataaaacaattactactagacctaagaaatgcagtagatggcaacacaataatagtggtgggcctcagtactccactaacagtactggacaggtcatcaagacagaaagtcaataaagaaacaacggattgaaactatatcctagaacaaatgaacttaacagatatttacagaatattctgcccaacaactgcagaatatgcattctatttattaatacatggaacattctmtaagataaaccatatgataggccacaaaacaagcctcaataaatttaagaaaatagaaattatatcaggtactttctcagaccacagtggaataaaattagaaattaactccaaaaggaaacctcaaaaactatacaaatacatgaaaatgaaataatctgctcctgattaatctttagatcaataataaaatgaagatggaaatttaaaattctttaaactgaatgataatcatgactcaacctatgaaaacctctgggatacagcaaaagaa

SEQ ID NO: 876517 - DNA, 576 bp, Homo sapiens
tttatgatgctttttcacatggctatcgatataatttaaaatagacaaattcaggttccttgggctgactctgcttgttctcacactttctgtctggtttgtattccgtaatctttctacatgaactcatgctgctagttgctcattaaattgttcttgcytaagtacttcctgatcagttctattattatttgttctttttctttcttagtattgatgttaactgcttggtaatttcctggatctcccctttggcacatcttataaattaggctacttattattacaattattttcttgactctgcagcccattcatcattctctatttctgcattgtctgtgacttgaatatctacaaaatgtaaacatattatttatacaaaacaaatatcttattgtgaggataatattctctaatattttttagcaaagagatttatttatagtttgctaaaatatactttgaacatactaaaataagaaacaaaattagtggataaaaattaagcattaacagctaatatgccttttttgggaaatcatttggctttttctgaatgaaataaatgtaaaa

SEQ ID NO: 876518 - DNA, 669 bp, Homo sapiens
catgctttatcatgtaatattgtaattaatttatatatataattacaaacagtatataaaaactgttcacacatagaagtctaatctactttaaagtttattcaagcaagcctagggaagggttgaatttaagtttaatatgatgctggagcagagggactgtgactacgagaacatattaaatgggyatgatgtccctcattcatagataagtatctacattatttaacagggacaacaggattgtcccttcttgagaaagacaacaaaggaaactcccatcactatgcagcttggagtgttggtgagagcctccccaaaatccatgagtgtgagcttattttgagaggcattctcattaccttgttatattggacattccctctagtgagatcatctacaggaggttttatagaaaagaaatacatttctaaatgacattattaggaacatgcacagctatccacagacacgtcttacttactagaactagtaagttctataccttacttacacttataccctactaactttgtaaaaagctattgtagttgttatcttaaaagaaatgagtatatatgttctttagaagtctttaattaaataagtttctcattaaagtaaaaagttaaaataagaaggatgcaatagaaatatcctggaagcaga

SEQ ID NO: 876519 - DNA, 612 bp, Homo sapiens
agggcagagggccatgatgttacagccttttctgctccaatattcagtgggtcccaagctcttgtctcacatccaagaagaatgaggatatgctgacaatcaaagagtgaggagggcggagaaaaattttattgagcgacgcaayagctctcagtggagaggggacatgggggtggtcccccattcccacagttgggtggtttctctctcagtgtggctgagtgcagggcttttatgggctcagaataggggaatgcatgctgattggtttgtgtgtatgcaaagaaaggctaaagcaaagacaccactcaaaggtgggcatggcagtgtagaaaaccaattaggaaagggtaggtatatgtaaaattagtgaaggatggggatcaatcagaggaaagtgtgccaaatgggaaggcaggttctcaatccggtctgtggctttgacttaaagcttggctttcaggctttaaactgtcttccacttggaggtggggtttcaccattgacccatctctatttgcctaggcatttgtctgcctcctcccactatcaacaggtataaatctggacttcccttgtcaaatagggaatggtattcatcctaccttattt

SEQ ID NO: 876520 - DNA, 635 bp, Homo sapiens
gtacacttgtaaaactatgtactatagataaaaattatgaagcattttagacatgaaatatttacacagaacttgcagaacaatgcaatgggtgtatcactgcagcctggatttatgttttaggttattgtaaaaccatctattgcaatgttctcaaagtgtggtccagggatgcctgggatacccgagatcattacaggtggtctgcaatgtcaaaattattttcataataatacttaagtgtcatttgccttgtaactgtcattctctcacaagtgtatgtgttttccagaggctacatgacatcatgtttctcacagctaatggaatgtgtgctatatgtycctgagttcttgtatgttttcagttttaattcctaatatgttaaatactggtagacagaacaacacaatgcaaagctttcagggggtcctcaactattgttaagaatataaagggaacctgagaccaaaaagttcagaaccagcaacttaacaaaataagaaaataacctttcagaaattgaggcagtaaaacatcagttgttcacagtaaagattcaaaaaacttaataaacatttattttccaaatagccatttagaagaataatgaacataaattgtaaaaaaaaaaa

SEQ ID NO: 876521 - DNA, 643 bp, Homo sapiens
ggaactaacttggaaaccatatttcaggatatcatccaggagaacttccccaacctaactagtgaggccaatattcaaactcagaaaatgcagagaaccacagtaaggtacttcacaagaagatcatccccaagacacataatcatcatatttttaaagattgaaatgaaagaaaaaatgctaaagacagctagagagaaaggtcagatcaactacaaaggaagccaatcagactaaaaatggacctttcagcagaagccctacaagccagaagagatttrgggccaatattcaacattcttacagaaaagaaattccaaaccagaattctatatctagccaaactaagcttcataagccaaggagaaataagatccttttcagataagcaaacactgaaggaatttattaccaccagacctgccttaccagagctcctgaaggaatcactagatatggaaaggaaagaccagcaccagacaccacaaaaacacactgaattacacagaccagtgacactataaagcaaccacataaacaagtctgcaaaataaccagctaacgtcataatgacagtgtaaaatccacacatatcaacagttaccttaaatgtaaatgactaaatgccccaattaaaacacac

SEQ ID NO: 876522 - DNA, 628 bp, Homo sapiens
aaattgacaccgtaatgtcacagttaaaagaactagagaagcaagagcaaacacattcaaaagctagcagaaggcaagaaataactaagattagagcagaactgaaggaaatagagacacaaaatcccttcaaaaaatcaatgaatccaggagctggttttttgaaaagatcaacaaaattgatagactgctagcaagactaataaagaaggaaagagagaagaatcaaatagacacaatcaaaaatgacaaaggagatatcacyaccaattccacagaaatacaaactaccatcagagaatactataaacacctctacgcaaataaactagaaaatctagaagaaatggataaattcctcgacacatacagaagacagagtggtgagaaacctaagatataaagcaagacaaaggcaaagcagactgttgcttatccacaccttgctcatgttttgactttctaagttgtaaagtgtgaagaccttgttacagagattaataagatatggccttcaaatagtttcctctgcctttctccttctttataactaaacaagctgtacattttctcccccctgtaagtttagtttaaaaatgagcaaagaataggttttttagttttttct

SEQ ID NO: 876523 - DNA, 628 bp, Homo sapiens
aaattgacaccgtaatgtcacagttaaaagaactagagaagcaagagcaaacacattcaaaagctagcagaaggcaagaaataactaagattagagcagaactgaaggaaatagagacacaaaatcccttcaaaaaatcaatgaatccaggagctggttttttgaaaagatcaacaaaattgatagactgctagcaagactaataaagaaggaaagagagaagaatcaaatagacacaatcaaaaatgacaaaggagatatcactaccaatyccacagaaatacaaactaccatcagagaatactataaacacctctacgcaaataaactagaaaatctagaagaaatggataaattcctcgacacatacagaagacagagtggtgagaaacctaagatataaagcaagacaaaggcaaagcagactgttgcttatccacaccttgctcatgttttgactttctaagttgtaaagtgtgaagaccttgttacagagattaataagatatggccttcaaatagtttcctctgcctttctccttctttataactaaacaagctgtacattttctcccccctgtaagtttagtttaaaaatgagcaaagaataggttttttagttttttct

SEQ ID NO: 876524 - DNA, 582 bp, Homo sapiens
aacatcgctttttacccagaaggaaagtgggaatggcgagagctctgttagagaaaaatgaccctgggctttcactatttacattctgtttcctgcatttagcaatcggaacacctgcacttgatcaaatatgtcttcacaaaagtacaatttaaattggtcatgaattttttaaggacataagagtaaaataagtacaatgaagcaacttcaaaatgtatgtggaagaaaaaaacaaacaaccccatcaaaaagtgggcaaaggatatgaacagacatttctcaaaagaagacagttacgtggccagcaaacatacgaaaaaaagcccaacatsactgatcatcagagaaatgcaaatcaaaagcacaatgagataccatctcatgccagttaggatggcaattattaaaaagtcaggaaacaacagatgctggagagactgtggagaaataggaacgcttttatactgctggtgggaatgtaaattagttcaaccattgtggaagacaatgtggcaattcctcaaggatttagaaccagaaataccatttgacccagcaatcccattaccgggtatatac

SEQ ID NO: 876525 - DNA, 761 bp, Homo sapiens
gtttggcttattagccaaagtgggcttcatggcattcaatggctgagacctgtatatacctcataaaatggaagaatgaggcaggtgtgattcagattgtctcctcacaccccccagcacccaacaccatttgatttttctggacattttatgatgaagtgttcttatctactttcacaaaacagaataatgaaaagtaactattatctaaaataataaaatgctcgaagaagagtgatttcttttttagaatgcttgcctcacttctccactttgtatgttacaaatctccatttcaccgtcttaccaccattttactcatctctaccccaagcctcagagcatcttctgtggatgtgcattcatttattgatacaggtacattgctaggcattaagaattccaaagataaaagactgaaatctgcagggagtccacagcctagttagacagaccaggaagggaaactaattactgtatggtgggttatggtgttataaagctatacaaagaatgctatggcccataatggccatccttgaagtttttgagagagaagggaaactatctggtcagtaaagattttttttttwaaattttattattattatactgtaagttttagggtacatgtgcacaacatgcaagtttgttacatatgtatacatgtgccatgttggtgtgctgcacccattaactcgtcatttagcattaggtatatctcctaatgctatccctcccccatccccccaccccacaac

SEQ ID NO: 876526 - DNA, 509 bp, Homo sapiens
agtggcaaaatgctaccagtctctttgcatatcaagggtgacatctactccaattcccaacaagttcctcatctccatctgagaccacttcagcctggacttcattgtccacatcactatcagcattttggtcaaagccactcaacaagtctctagggagtttccaactttcccacatcttcctgtcttgttctgagccctcctaactgttccaaagtctgcctgttacccaggtcaaaagtcgcttccacattttcatgtctctttagagcagcaccccactctctgcagtactaatttactgtattattctgttctcacactgctaataaagacatacccaagactgagtaatttataagggaaagagrtttaattgactcacagttcagcacagctggggagccctcaggaaacttacaataatggcataaggggaagaaaacacatccttcacgtggcagcagcaaggagaagtggtaagcaaaggggaaaagccccttataaaa

SEQ ID NO: 876527 - DNA, 692 bp, Homo sapiens
cttaggagaacatacatttactaatatggatccagagattatccttaaagatgtcttaaatctttaaatgtttaaagatccttaaagaggatagagtacaggtcaagggtcaaggccaccaaagaagaaggcagatttactgagagattagaagaaaacagcaacaagaggggcactggagccacctgtattggagtggcatatatctgaaagtagaagagcatcaaagtggagacaggagcaaagagaacataaaaggaagaacctaagtcagtgccagtcaaagcttatacattcattagatgtctgttcaataaacatttgctgaatagatgtttgctgaacaaatgaatgaaggaataaatgcactaacaccactcctgcttcctgggatatcagggtgcaaggaaacaaggctatagtaaaaacaaaacaaaacaaaacaaaaaactgtaaggtcctcaaagaagagtttgatgtttttttaagtcaggaaagcaaagcactttytaagaagacaggaatttgagaatggtagaggcattatagaataatgggaaaggaggcagatcatcagtgtctagaatgttgataagcttgtaattgtgaccagtaaatttttgttgaagaaattaatggaacccaagaggaaatgactattgaaatacgaggggttggttctgttttttttc

SEQ ID NO: 876528 - DNA, 544 bp, Homo sapiens; identical to SEQ ID NO: 875360

SEQ ID NO: 876529 - DNA, 609 bp, Homo sapiens
gtgggctgaagtttaagctactaactcaacttgatcatgtaatgtcatgtgacttttaccatccttcatactaaatgctatcaaaagtagattgttaggttcttggcagattatatatttagcaatctacaaaatttcattcattaaggtgttagaaggaattytctttttagtgaaacaagatacatgcctgttaatgctagatcttcataagaaaccttagctcatgcattataatttcttcaagcctctcagggtgatttgaatatgcaattttgtgtttccctcaatatgctattaagttgatgtaggcagaaaagtggatgcttttgttaatacaatgaattggatgatgtataaagaggagggataaaattagtttatactaatcatgactccttgataatacatttgacaccatgtagttagagaaggattcctttctacaaccaactcttccaggataatgaaaacaacattttaaaagcatatagaggagttcttgcaagaaggtaaaataatacattattaaaggtactgcagcttcttgataaaaattttatgataactgtacaagtgttcatctaaccttgccttttagcaatatgg

SEQ ID NO: 876530 - DNA, 634 bp, Homo sapiens
aagaaagaaagcattcggaaaagtgatcccagggctctttctggcttttctcaactatgtgttcaaacccttaatggtcagatttattgtagggattgagaacttcaagctgacatggtaaagtgtgaatacatttcagttcgtgcataatgacgttgcatatagtttacgagaagggtgaaggatctactccctcttggccagagcaaagaatagaaagatttgagggagacagatttttatttggactttgtattcgttycctaaggcttctatacaaattaccaccaactgggtgacttaaaacaacacaaatgtattttctcacaattgtggaggttagaagtctgaagtcaagatgctggtgggactcctctgtgtgcaccaggggagaattctcacttgccccttccagcttctggtcactgtagctgttccatggcctctggcagtacaattcatttctacctctgtctttacaagcttcttcctttgtctttcttctcctctgtcttttctgcttctgtcttttataaggacacatttcattggatttagggcccatccactaattctaggattatctcatctctagatttttaacataattacatctgcaaagacaccatgtact

SEQ ID NO: 876531 - DNA, 723 bp, Homo sapiens
gtactctggaattttatgctctcttttagtaactgctcttctctggtaccaattgactggtgcatttatcatgacctgtattccaactgacacaccacaacaattcctgggaatacagtgaatttaacattaagattgtaagatcagctgacattctaagattcttacagacagggcttaygtgtatttattttggtatgaccacagcagcaaacacaatgtctgcatcacaataggacaaggtgagagctaaaatttaatatgtatctgcatatgttagacttttatgtatatgccatcgtgcatctctacactcatcctctattagtattctcatttctgtcaatggggaaactgagtaagtcacctaagatcaagcagctggtaaataacagagccaagatttgaattcatgtctgtctgacttttttttttttaccatgtgatttaccaaccacactcagtacccaaaatattacttgtggaatgccattttcacagggttgtttatcacacctctaattaaacctacccttgagagggaaaaaactgtaactcagcaaaactgtaattcacaactagcctaatggccaagtggaatggtacatgccatggtcaatcacttagcacgtaagtagtgtgtgatgaagaggtaaaaattgaggcacacacagagccagcctctgttaataacaatgattctttggggactgagtctccact

SEQ ID NO: 876532 - DNA, 651 bp, Homo sapiens
aggatggtaagatttggggctctttcataacttttcaaatatgtcaactgagaatatcaaaatgaatcaccagccttttttgtttggggtgtgttcctgtgtgtttgtcacaaaattcacatacttttcaactgtgcctgccttacactaaaatagtcattatacccagctgtataggcccagctatatacatatatatgtatatatatgtgtgtgtatgtgtttgtgtgtgtctgggggctccacacacatttggtgtcaatactgaagtaatgcaaatatctctgtattggctacaaaactcaaacaagaaaaatgratagatttggatctgatatggccttccactttggctctgaactttagttgtaaggaagaaaataatacttagtaagagtaatatataaaatagtgattgtaaaaccaactatttgtgaaatagtctgccaagtattatgggatacataaagatgattaacacacagttcttgcaaaattggagcccacaacttagcagaagttgttaatcactttggtcaggtgaatgtttcactgaataagaaatactagtgtattaagtcatcagattctttaatgctttgaagtgcttcatactgagctctacataaaatagaaacttcgtgtgtgtgc

SEQ ID NO: 876533 - DNA, 651 bp, Homo sapiens
aaagcataactaccagcatggaaggcttcagctaacaccccacagccctcccaaaacacaggccacatagtcatgtatgtaaatgagtcatagccctgaacatatcctatgtcccaaaagtgaatgcacaaactctaatgacgacctaggtttcacttattttcagaggagaaattttccttgcctccagtcatattctttgttccatgaactgttaaatttcacataaaagcttctctgaaaygctttgcaacaggcatattatatttttgatttttatttctttttacagtactatttttaatagaagcaactggggaaggtaggtagtagaatacattagcacacaagcacgctattttatctaaatcaagagaggatttatttttattattattttatataacattttactgacttttttcagatagattaaatctaaggaatcacttaataataggatacccatgtaaaaatgtgaatttcagtaattgttaggctagcatgtgctaactaatctttatcaagagatcttgtttaatcaaacgattgtgttcttagcaccacagacgctaaaatgtatttagcaccatacattctaactagtgtttaaaagcaaaaataacatgcataatataaattttgatcttt

SEQ ID NO: 876534 - DNA, 603 bp, Homo sapiens
tggttatttatattcaggtgacaggtgctaaggattgtttttggccttccctacttgctctactgctcagagtatcccaagagtctatgtctctagcttttggtcactattttttttttaatctcatcttatagaatagtttggtaaacatctacacaaaatttctrtagtttttattaaagaaatgacaactagtgtatacctgaagacattttgaattgttcctttgattaaaaaaccttcagtaaaatacggaagattgagaattccaacttagaaggtatttaaattgagtacttcttgccataaacaagactaggcattgagatagattgaaaagaagcctgacatacaacagaaaggtgaaactacagtcccagacacaactaaaattactgtgtgaggcctgatacaacagtacccactgctcttggagtgtttgggaaataatataaacaaggacataagaagtttaccgtgtaattctagacatggaaaataattagtgagtttagcagcaactaaagtgcaaaatataggagatgccataaagcagaatgtgattaacttccaaattaataatatagagctgctgctctagga

SEQ ID NO: 876535 - DNA, 632 bp, Homo sapiens
atggactgtggaggtaggaaaaatgtgagctggggaatgaaagtagaagggaggaggagggggtagtctgatggggaaagaagagagagggctggtgaacaaagagtagatagatagtaaatagcagatatgttctcagagtagcaacttttcttttgccctttccttaaaaaaaaaaaaaaaaaatcattgtcctggccggacctagtggctcacccctgtaatcccagcactttgggaggcagaggcaggcagatcattaggttaggagttcaagaccagcctggccaacatggtgaaacactgtctctactaaaaatacaaaaaaatgtagctgggtgtggtggcaggcgcctactcaggaggctgagrcaggagaatcacttgaacccggaaggcggaggttgcagtgagctgagatcatgccgttgcaccatagcctgggcaacgagagtgaaactccatctcaaaaaaaaaaaaaaaaatcatcgtcctttggaggaactttgtctaaatttcaccattatcctcagcaatcattagacttgtggaaagtcacaattttgaagaaaagttttggatttgtttcctgagaaaatatgaatgccttaatgaatttattgcttagttcc

SEQ ID NO: 876536 - DNA, 721 bp, Homo sapiens
gtgcagtatggccatttccatgatattgattcttcctatccatgaggatggaatgtttttccatttgtttgtgtcctttcttactttcttgagcagtgatttgtatttctccttgaagaggtccttcacgtttcttgttagctgtattcctaggtattttattctctttgtagcaattgtgaatgggagttcattcatgatttggctctctgcttgtctgttgttggtatacaggaatacctgtgatttttgcacattgattttgtatcctgagactttgctgaagttgcttattagcttaaggagttttggggctgagacaatggggttttctaaagattaggatcatgtcctctgcaaacagagacaatytgacttcctatcttcctatttgaatatgctttatttctttctcttgcctgattttcctggccagaatttccaatactatgttgagtaggtgtggtgagagagggcatccttatcttgtgatggttttcaaaaagaatgcttccagcttttgtccattcagtatggtattcactgtgggtttgtcataaatagctcttagtattttgagacacgctccatcagtacatagtttattcagagtttttagcatgaagggatgttggattttatcaaaggccttttctgcatctattgagataatcatgtggtttttgtcattggttctgtttatgtgatggattacatttat

SEQ ID NO: 876537 - DNA, 667 bp, Homo sapiens
aaatgctgagggaatttgttaccaccagacctccctcaaaagagctcctgaaagaggcactaaatatggaaagaccattacaagctactataaaaacactcttaagtacacagaccagtgacactataaagcaaccacacaaagaagtcagcataataaacaggtaatgacatgaagacaggatcaaatccacacatatcaataytaactttgaatgtaaatcgactaaatgctccaagttaaagagacagagtggcaagctggataaagaagcaagacacaatagtatgctgtcgtcaagaaacccatattatatgcaatgacacccataggctcaaaattaagggatggagaaaaatttaccaagcaaacaagaacaaaaataaaaaaaaaataggaattgtaatcctaacttcatacaaaacatactttaaaccaacaaagatcaaaaaagacaaagaggacattccataatggtaaagggttcaattcaacaagaagacctagctctcctgaatatatatgcacccaacacaggagcacccagattcatagagcaagttcctagagaccttcaaagaaacttagacccccacacaataatagggggaggcttcaatgccccattaacagtattagacagatcattgaagcagaaaatgaacaa

SEQ ID NO: 876538 - DNA, 667 bp, Homo sapiens
aaatgctgagggaatttgttaccaccagacctccctcaaaagagctcctgaaagaggcactaaatatggaaagaccattacaagctactataaaaacactcttaagtacacagaccagtgacactataaagcaaccacacaaagaagtcagcataataaacaggtaatgacatgaagacaggatcaaatccacacatatcaatattaactttgaatgtaaatcgactaaatgctccaagttaaagagacagagtggcaagctggataaagaagcaagacacaatagtatgctgtcgtcaagaaacccatattatatgcaatgacacccataggctcaaaattaagggatggagaaaaatttaccaagcaaacaagracaaaaataaaaaaaaaataggaattgtaatcctaacttcatacaaaacatactttaaaccaacaaagatcaaaaaagacaaagaggacattccataatggtaaagggttcaattcaacaagaagacctagctctcctgaatatatatgcacccaacacaggagcacccagattcatagagcaagttcctagagaccttcaaagaaacttagacccccacacaataatagggggaggcttcaatgccccattaacagtattagacagatcattgaagcagaaaatgaacaa

SEQ ID NO: 876539 - DNA, 625 bp, Homo sapiens
gtttgaactctacgttggcccctttcagccatggctagtgcagctgggacacagggcaccaagtccctaggctgcacacagcttggggactctgggcatggcccatgaaaccactttttcctcctaggcctccaggcctgtgatgagagggttgccatgaagacctctgacatgcactggagacattgtccccattatcttggggattaacaatgggctcctccttacttatgcaaatttctgcagtcagcttgaatttctcctcagaaaatgggtttttcttttctatcacattgtcaggctgcaaattttccaaacttttttgctctgcttcccttataaaactgaatgccgttaccagcacccaagtcaccttttgaatgttttgctayctagaaatttcttctgccagataccctaaatcatctcaagttcaaagttccacaaatctctagggaaggggaaaaatgctgccagtctctttgctaaaagataacaagagtcacctttgctcccgttcccaacaagtttcacatctccatctgagaccaccttagcatggacctcagcatggtccatatcactatcagcatttttgtcaaagccatccaacaagtctctaagg

SEQ ID NO: 876540 - DNA, 616 bp, Homo sapiens
aattattctaagaaccagcaacaccacttctaggtgtacactcaaaagaactgaaagcagagcctcaaagagttatttgtatgttcatgttcatagcagtatcattcacaacagccataggaggaagcaacccaatatccatccatggatgaatggataaacaaaatgtagggtttttttgtgtgtttttttgtttgttttgttttttttgagacggagtctcaatctgttgccaggctggaatgctgtggcaccatctcggctcactgcaacctctgactccctggttcaagcaattctcctgcctcagcctcccgagtagatgggattacaggcatgtgccacaacccccagctaatttttgtatttttagtagagactgggtttcaccacattggccaggatggtctcratctcctgaccttgtgatctgcctgcatcggcctcccaaagtgctgggattacaggcatgagccactgtgcctggctatgtagggtctttttattgaaatattattcagcctttaaaaggaagctctgacacgtgctaccacatgggtgaaccttgaagactattcagtgaaataagccagtcacaaaaggatgaatactgtct

SEQ ID NO: 876541 - DNA, 623 bp, Homo sapiens
catagttttggaaattgggaagtctgagatcaaggtgcctgctgtcttggcccctggtgacgtttgctctctgtttccagtgtgacacctcactgttgcatcctcccatgacaagaagcagaaaggaaaaaggaccatggtgcttcctgtagtcccttttatgctggcactaatctcatttaagagggtggagtgctctgacttcactagttccccaaaggcaccacctcttaatgctatcacattggatgttaggttccaacagatggatattggagacacacaaacattcaaaccagagcagaggtccatcactcaagyggggttcagtgctggctgcatgggatgctggtctctgctgacccttgtccctctagctcccagcacagagtggcctttgtttctcatctcaacctgtctccatgctgagaagctctgcatttcacaagtcctcaggaagaagggagcacaaagacaccagcagcccgcttacctgtgtgaaagctgtggcatttcctgaggcacatctggagacaggggctttactggaggtcttggcctttgctcattctgaggaaagctactttggggttcttcaaacatctccccatctttcccatctt

SEQ ID NO: 876542 - DNA, 626 bp, Homo sapiens
gcaaagggagtagtctctggtccttttgttatttgggcatggaaagttggggttttccttttgatttaattctaggaagtcaggatgaattgaccctaggttccctgcctcatatgtggtaaaatatatcagctgtccyggctgatcttcagctaacttagtaacttttagatacaactctctaagacttggttcactgactacaaacatctttacctgtcaagtgtatgtccttcctatccccacagaaaatttaaagggataatatataaatcctaatttaaatgttcgcagatgctgagctgaacaaggattcagagatggataaagaaaggtctgtacctctcttcagggagacccaggcagtagtaaggtttatcaacagtgttcagaattcataatttatttaatttcaaagctcaaaacctatattgctttatcaaaaaaggaaacaaaagtatagctctcaagaaatgcacatctgggctatgttccaattgtaacctcctgtctgcttcttgttttagagttaaaaagagaattcatcaatttgacatggggcatgagttgaaagaatggggcagaaatctctttgaagggcctcctctcactctcacccagtcctg

SEQ ID NO: 876543 - DNA, 636 bp, Homo sapiens
ccaaaaggttctccctgtgttctagaaaatggttccctggggcctttatttctgacctccaagtaaacatggtaataattctctcatcaaaacactgcatcatcaaatgaaggaccagatcattgactctgatcaccatgccttctcacaaccttttgaatcatrctaagattggcagattttccaaataaaaatagggtacccaataaaatttgaatttcacatcaaaaaacagtgtctagtgtaagtacgtcccaaatactgcacaggacatacttatacaaaaatattattcatcgtttttctgaaattcaagtttaactaggcatcttatattttatctggcaaaacttcctgaaatgtttttttctaaactttatttcaagaattccaataatggtgttccatgattgccaactggtagcttattcacaattagaatccttctggattttttcacttgtttctgcgattttattcctactgtttttctacagttttatcaagactttgttgcctataatctactgattcttctctaacgtcctctaaatacaaaaaaaacaaaacaaaaacaaaaacacaaaaaccctcctctgtgtttccatccttctctcttgacctgcatgctaccac

SEQ ID NO: 876544 - DNA, 640 bp, Homo sapiens
tggataaaccacaatttgtttatctgtttattcattcataaacatttgaggtgcttccattttttgctaatgtaaattgtattgctgtaaacatttatgtataagcttttgtttgaacacctgttttcaggttttatacctaggagtggaattgtggggtcatgtagcaattctatgattaaatgtttgagaaacttttaaattgttttactttattttttgatggagaggagaggagtggcggggagaagagaggagagagtagggaaggacagggaggaaaggaaytcagcatgtttgacatgaaggtctgtgtactttgtataaccccaatatttgtcattgaaaactgtgaggagggttctcttgcacaaacacctaactaggaaaacggagaaatgttcatggacatttgcgaaatcactgattggtggagagggatgctacatagcaacagaaagactgcagtcttttgttactactttgtttcactttctgcccaagagatccaattaaattaatgcctaaaatcaatctccaaagagtaggtttgaatctggaattagaccgaagggatgcctgaggactaatcaaggaagtcatatgacaacagtcttttccaagggccctcagcactcac

SEQ ID NO: 876545 - DNA, 618 bp, Homo sapiens
tcccgacagtcatcaccctaagcaagtgataaaattcagtatcagccatactgagacaaccttgcctcctgacataacgcaacaggaagccacaacatcacctacaaagtatcattgattgtggcctcacatgtccatccctgttctgtgttacaaattctgcacttccacctcaaaagggaaaatggtaggataaaattacatttcttatttctccaggtcctataagaaaaatgcacttgccacatctgaacatggtctacccagctatgtggctgagatattaagaattcagtggttgagaggttactatatgtaagtaaatrttcaggtatgtaaaagaaattgacatgtgcctcattcttacttaaaagtaaccaaactcaggaaaagcaatatatcataatgattaatagcatggactctggaaccaaactttctgggtttcaatcctaactcttctattttctagctgtgtgagctttggcaagttacctgacctctctctgtctccatattttatctgcaaaggaataataacatcacttagctatcaggtctgttataaggattatattaatcaacatatattaataacttagaatagagcttggtata

SEQ ID NO: 876546 - DNA, 618 bp, Homo sapiens
tcccgacagtcatcaccctaagcaagtgataaaattcagtatcagccatactgagacaaccttgcctcctgacataacgcaacaggaagccacaacatcacctacaaagtatcattgattgtggcctcacatgtccatccctgttctgtgttacaaattctgcacttccacctcaaaagggaaaatggtaggataaaattacatttcttatttctccaggtcctataagaaaaatgcacttgccacatctgaacatggtctacccagctatgtggctgagatattaagaattcagtggttgagaggttactatatgtaagtaaatattcakgtatgtaaaagaaattgacatgtgcctcattcttacttaaaagtaaccaaactcaggaaaagcaatatatcataatgattaatagcatggactctggaaccaaactttctgggtttcaatcctaactcttctattttctagctgtgtgagctttggcaagttacctgacctctctctgtctccatattttatctgcaaaggaataataacatcacttagctatcaggtctgttataaggattatattaatcaacatatattaataacttagaatagagcttggtata

SEQ ID NO: 876547 - DNA, 607 bp, Homo sapiens
attgttccatttagtaatggaaacatccagaaaaacagctacaatttgagtcatcaccagactaagtttattgtgaaggatatggtgatgcactgctcagattcaccttcagaaaaacagggcttattccacagctgctgagagtgctgccagaagactgctttcagctgtcagcctcyttaggggtttgcctcagctaaagacagccacatcccccactgatatgtccaccttctggagaaaagaggggcgtgaagtgaaaggcagaggaaagtagaaaggctcagagctctctccccaacttggtctatgaattctttactcagaaagttgctgaggctttcattgaagatgcacaatgtcttgactcccaatcttgcttccttccttctcttccacaaatctggattccaagaacactttataacaaacctgctgcatgtaaatctccatcttagaatctgctcctaggcagcacaacctgtgccacttacaggaattaaacatcattctctagagcccatcaattatttgtagcattcaagtctgagaatttaatggggaaggatacagaaagcagcctacctatgtctttcaagtctttgat

SEQ ID NO: 876548 - DNA, 607 bp, Homo sapiens
attgttccatttagtaatggaaacatccagaaaaacagctacaatttgagtcatcaccagactaagtttattgtgaaggatatggtgatgcactgctcagattcaccttcagaaaaacagggcttattccacagctgctgagagtgctgccagaagactgctttcagctgtcagcctccttaggggtttgcctcagctaaagacagccacatcccccactgatatgtccaccttctggagaaaagaggggcgtgaagtgaaaggcagaggaaagtagaaaggctcagagctctctccccaacttggtctatgaattctttactcagaaagttgctgaggctttcattgaagatgcacaatgtcttgactcccaatcttgcttccttccttctcttccacaaatctggattccaagaacactttataacaaacctgctgcatgtaaatctccatcttagaatctgctcytaggcagcacaacctgtgccacttacaggaattaaacatcattctctagagcccatcaattatttgtagcattcaagtctgagaatttaatggggaaggatacagaaagcagcctacctatgtctttcaagtctttgat

SEQ ID NO: 876549 - DNA, 631 bp, Homo sapiens
ccctagagaatccctttgccaaattccacccagcatatgacataagaagcacacaagaatatcactgctttttgtcctagagtattctaaagcaaataattttactactaaataggcaaatgaatatatctaacarataaggattaaaaaagaaagcataatcacaatagcatcattataccaatgtaattaatatcagttccttcatatcacttaatacacaatctatgctcaatttttttctgtctcaaaaatgtcttattgtagttgatgtgttcaaatcaggacccagaccacatctacacaacacatttaattcctgattcctatgtcccttttaatatatatcatttcctcctcctttataattctgttactgaaaaatctgggtcattatttcctgctttgattctgtatcctcacaatatcattagaatgtttctataattggtcattaaatatagatgcatgattggattcaggtttaatacttatatcaagaatagtttatagttagtgctgtttctgagtattgcatcaccaaacataatttctggtttcttcatttcttgtaatattaatactacaaaagtgtaacaggaggtgtcagcctttacaaagtcattctcaa

SEQ ID NO: 876550 - DNA, 668 bp, Homo sapiens
attgaaacaggcaggcatgaaatgagcctccatccctctgtcagcaggctagaatgtaggggtgttcactggcaagtcgcctgcgaataaatgagccaaggaaatgaaatgagagaaggacactcctaatttagcatttgcaccatttataacattaagtcctgagaaaggcccttttagttgcttccatgatgaatttgctaaatttgctttttcttgttttaggtatcactggartaggctctgagacatctattgaaacaggaatttccaacacaggtaaagttgaaagaaaaccgtctctatggacacacagatgaaatgatgtttttttgtagagttgttctgatgaataacacaaaatctgtcttctcactagtgcaactccccagaatttacaattccatatcctgtctcaaaggctacaatttctgcagaacacgttggcaccactgaagcttcattcacaataggggagaaggagcaactcatgtctttgttgttttcagattttgacactcatagcgagactagagagaggaggattctggagagcagtttgtatttactttactaatactacatttttggccaacaaattctttatcagtttagacatttttccagaaaagctactaattacagattgcagaatcatacttctaatc

SEQ ID NO: 876551 - DNA, 648 bp, Homo sapiens
aagcagccatagacaacatataaaaataaattcgcatccctatgttaaaataaatctttatttacaaaaataagcagtggaataaacttagactgtaggtcatagtttgcagaccactgttctaaattataggctcgttrcatcatcgttggtctgattaaaaacctactgaccagcattggcagggcgtggtggtgtgtgcctgtaatcccagccacttgggaggctgaggcagaagaattgcttgaacccaggaggcagaggttgcagtgagccgaggtcacttgccactgcactccagcctgggtgacagagcgagactctgtttaaaaaacaaaaacaaaaacaaaaaacaaacctactgaccagcaaataggtatcaaggacaaacaatgacatctgcattgtgctaaagactaaaaaaaaataataataataataataataaaagccttattctagtcttcagaaacttactatgtaattgcaaaataagacattcttagaaaatgtcaaaaacactacaatgcaggtaagttaagggcaaagcactcagttactatatactcagtgcaaagtgcattaaattgatggtaaagacacaaggttcagctgtgccatgaaatattatgatgataaacgttttat

SEQ ID NO: 876552 - DNA, 565 bp, Homo sapiens
tactgcacagcctgggtcttagttccatgaactataagggctgctaactagataatctccaagatccattctcactctcctagcccatagttcaagtccaatgaactaaatagcagatgagagaagtacaaagttctgtaactctctgttagtactgtttaccccctaaatccaaatcttactacaaaacactgagtgtgattttccccagaagttgctggagtcagtatgcagttcaaactctggtgccatcattccctagctctgtgatcttagacaaattacctaacctctctgttcctcagttatctatcccatagggttattatgtggattaaagttgttactatttgtaaagcgtgtagtgtctgacatcaattaaacattaaatgtgtcacctattattgtttttgttattattataacaaygaagtcatacaaacaaaaccagtatagaagtgattatcctagattatcacagaagcagtacatgatgacaacatttgggtgtgcagttgttcattagaagactgatgatcagtaagctctttgactcaacagtgtg

SEQ ID NO: 876553 - DNA, 617 bp, Homo sapiens
cattgttcagttcccacctatgagtgagaacatgcggtgtttggttttttgtccttgtgatagtttgctgagaatgatggtttccggcttcatccatgtccctacaagtttcagtagctgattcgatcagctggaagaaagggtatcagtgattgaagatcaaatgaatgaaatgaagcgagaagagaagtttagagaaaaaagaataaaaagaaactaccaaagcctccaagaaatatgggactatgtgaaaagaccaaatctacatctgattggtgtaccagatgtacaccagatgtgtaccaactggggagaatggaaccaagttggaaaacactctgcaggatattatccaggagaacttccccaacctagaaaggaaggccaacattcaaattcaggaarcacagagaacgccacaaagatactcctcgagaagagcaactccaagacacataattgtcagattcaccgaagttgaaatgaaggagaaaatgttaagggcagccagagagaaaggtcgggttacccacaaagggaagcccatcagactaacagctaatctctcggcagaaactctccaagccagaagagagtgggggccaatattcaacatt

SEQ ID NO: 876554 - DNA, 701 bp, Homo sapiens
gctgtctgcaaaaggcccaggtgaagcaggaggcctcggggggggggacacaggagacagaggaagggaccctaacatgagtcaagagaaacatgagcagcagacataatattaaaaaaaaatcaagcttagggaaaactattaacacaaggacaaaatacacctcatttgccgggggtccagggtgactggccccaatctggcccaccagcctggttagtgtgcccagaaccccctcctgacatgrggccagcacatggcaggtgctcaggatgggctctgggggaggtgctgaccctgcacagtgtctatagtggactgggaagctgtcgactgaacctcctgaggaggacaggcccaggttaccctgagagatgtttgttagaggttctcttctccctcccagccccttcccaagacctgggggctccctattggtgggaggggtgggtggccctggctttggagctggcccctgggcttagaccccacctccctctgtccttactgtagcatctgaggcagacacttcaccacctctggggactcagtctcccccctgtgaaatgctggggagacccctcaggaggatgccagacattatgtggctggtaatgaatcactccaaggagcccataggtcatggtgttagaggccgctgtggcagaggcaggatagttgtgagtggatgtgccagcagg

SEQ ID NO: 876555 - DNA, 701 bp, Homo sapiens
gctgtctgcaaaaggcccaggtgaagcaggaggcctcggggggggggacacaggagacagaggaagggaccctaacatgagtcaagagaaacatgagcagcagacataatattaaaaaaaaatcaagcttagggaaaactattaacacaaggacaaaatacacctcatttgccgggggtccagggtgactggccccaatctggcccaccagcctggttagtgtgcccagaaccccctcctgacatgaggccagcacatggcaggtgctcaggatgggctctgggggaggtgctgaccctgcacagtgtctatagtggactgggaagctgtcgactgaacctcctgaggaggacaggcccaggttaccctgagagatgtttgttagaggttctcttctccctcccagccccttcccaagacctgggggctccctatyggtgggaggggtgggtggccctggctttggagctggcccctgggcttagaccccacctccctctgtccttactgtagcatctgaggcagacacttcaccacctctggggactcagtctcccccctgtgaaatgctggggagacccctcaggaggatgccagacattatgtggctggtaatgaatcactccaaggagcccataggtcatggtgttagaggccgctgtggcagaggcaggatagttgtgagtggatgtgccagcagg

SEQ ID NO: 876556 - DNA, 500 bp, Homo sapiens
aagaagagctggtaccattcctactgaaactattcttaaaaaataaaaaggagtgattgctccttaactcattctgtgaggccagcatcatcctgataccaaaaccttgttgctgagatacaacagaaaaagaaaactttaggccagtatccttgatgaatattgatgcaaaaatactcaacaaaataccctcaaatcaaacccagcagcacatcaaaaagcttatccaccatgatcaagtaggctttattcctgagatacaaagtcagttcaacatatacaaatcaattaatgtgattyaccacataaacagaactaaagacaaaaaccacatgattatctcaataaatggagataaggctttcaataaaattcagcatccctttgtgttaaaaagtctcaataaactaggtatattgaaggaacatacctcaaaataataagagccatctatgacaaacccacagtcaataccatactgaatgggcaaaagcctgaag

SEQ ID NO: 876557 - DNA, 618 bp, Homo sapiens
tcttcactagtaaagggagatagagaaagatagagagagagaaggatagaaagagagaaaattagaaaatttatgctatactttcccaaacaaaaggctgatttgaactgaaatcaaagtggtagtactttatgatgtgttcatatgacatctggaataggatscatctaaggcctgtgttatattattcagtaagcacagaaaatgtccctgagtctaaaaccagtggtatggctgggattccaaactctttttctctaattacaaatgagaaacaaggaatatattatcccatatgccactaaaatgccctgtggattaatttataccttgaggtatgtctcttaactctgagaagagagaatgagagaattaagcttttgaaactcatttccatagttttatgtttttaatacccaatgctaacgaacttttaatgcagattttatctgtttattccatttattgtgagtggtcattaacatttgctagataatgtgttttttattcgtgttaggaaatagaaatgcagaatatgtcttttggattctctgattatcagcagatagctcaatcatattcttatactaattttgtacactggctcttaaattggta

SEQ ID NO: 876558 - DNA, 618 bp, Homo sapiens
tcttcactagtaaagggagatagagaaagatagagagagagaaggatagaaagagagaaaattagaaaatttatgctatactttcccaaacaaaaggctgatttgaactgaaatcaaagtggtagtactttatgatgtgttcatatgacatctggaataggatgcatctaaggcctgtgttatattattcagtaagcacagaaaatgtccytgagtctaaaaccagtggtatggctgggattccaaactctttttctctaattacaaatgagaaacaaggaatatattatcccatatgccactaaaatgccctgtggattaatttataccttgaggtatgtctcttaactctgagaagagagaatgagagaattaagcttttgaaactcatttccatagttttatgtttttaatacccaatgctaacgaacttttaatgcagattttatctgtttattccatttattgtgagtggtcattaacatttgctagataatgtgttttttattcgtgttaggaaatagaaatgcagaatatgtcttttggattctctgattatcagcagatagctcaatcatattcttatactaattttgtacactggctcttaaattggta

SEQ ID NO: 876559 - DNA, 618 bp, Homo sapiens
tcttcactagtaaagggagatagagaaagatagagagagagaaggatagaaagagagaaaattagaaaatttatgctatactttcccaaacaaaaggctgatttgaactgaaatcaaagtggtagtactttatgatgtgttcatatgacatctggaataggatgcatctaaggcctgtgttatattattcagtaagcacagaaaatgtccctgagtctaaaaccagtggtatggctgggattccaaactctttttctctaattacaaatgagaaacaaggaatatattatcccatatgccactaaaatgccctgtggattaatttataycttgaggtatgtctcttaactctgagaagagagaatgagagaattaagcttttgaaactcatttccatagttttatgtttttaatacccaatgctaacgaacttttaatgcagattttatctgtttattccatttattgtgagtggtcattaacatttgctagataatgtgttttttattcgtgttaggaaatagaaatgcagaatatgtcttttggattctctgattatcagcagatagctcaatcatattcttatactaattttgtacactggctcttaaattggta

SEQ ID NO: 876560 - DNA, 657 bp, Homo sapiens
ccaaaatatgtaaagctatgatatatcaattaaaaaatacaaaaaagtttaaaaagaaggccattgtatgaaagacatggtttagaagataattttgcagggccgagattcagaaagtcaataccaaatgagaaatatctatgaataagaacgttggagaggactttacctgctgtgatacactcaaatggagaacagacgaaaagtatggaacaaatgctgtgttttacgggaggtattctaaggtgaacatttagaatcttgtgccagacgatatccctcaattggactttcttcctggagttttctttaraatgagggattgagaaaaaaggaaaagggtgtccaaaggcccagcacctcaccacttagcacatagtacaataccttgccctcagctagacacgagaaaaatgaaagaaagaaagaaagaatgaatgaatgaaccaatgcatcatgagagaatgggagaagaggactgcatacaacatctttctaactttgtccacccccaaacccaccaccatctagtaacaaccctaaattggcagaatatttcattctgaaatcacattaacctatattgtagtatctccatctacaaaggataagaggcaagaagagagaaacctgcaaaaagaagacagagccccccct

SEQ ID NO: 876561 - DNA, 548 bp, Homo sapiens
tgcggtagaaatgtgtgtacttaaaatacacacgttacatgtgtaagtacgatgatcaagcattttaaacaagtacattagaaaaatatatctttaatgtgtgaaatctttatctaccctttgttagaagaccagagttttacttccaagtctactactacccgattgtagcaacccagacacatgcatataatgacttaaatttttcattagtaaaatgaagatattacccttgtggtcagataagctacatttcaactttaacttccagtgatgcttttgtagtagttttataaattaatgcaataacgcttccaaatatttaatttgctatcctgaaaaaaatttytgaatcatcctcaatttttaaatatatatttctttgttgcaagtcttcatccttcaaagacttgattcatggaactagctaaaaaccatctgaaatcaaaattcacaaatcactaggttgttgcagcagaatcctaagaccaatcatccaagaatttaacttttcttcagcaatgaaaacattctcctccaacaaaatt

SEQ ID NO: 876562 - DNA, 610 bp, Homo sapiens
aaatgtacctaagtgtgtcattgacttccatttgcacaaagttttccaagatgtatgtctttattcaagtataaatatttaccttgaactaccaatatctggaattctttaagatgaaatttaatgtttcatctaacaataacatatttaaacactgaagtcaaactatgctactggcaataataaccaaaggttgactcagtgagattgcaaatgtaaaacattagctgcatttttttttctgatttttctacacttttagcttttgcatcttagtcctgaaataaggtaaaattagattcccatcataagcccaaatttagcatataggggacactacttaaatgcagaataacayttccactgaaactaatcaaattgccaactttgaagacacttatgaaagatattcaaatgtggtggccccttattaagtctttgatccacaaagaaatgaccgtattttggagttacaatgaattcatgtaaaatgtaaaggattattcagtaacacaacactggatgtcttgttaagacattaactcatttcattacagacacactgcaaatatatacagcaccgtttgcagaaaagtgatgaacttcataa

SEQ ID NO: 876563 - DNA, 578 bp, Homo sapiens
ttttaaaaagacttatcttctataatctatgcataatgcaatgtttggcacagggtgggcacttagaaagtattaactaaaaaataaaagaatgaattattggattctactgcctctaaaaagttgttctgggagtttaaatgtttgattttcatctccattcatttcttctcttccgaaattcctgaggaaaggtgccaacaaataaataaaataatgaaaatcaaaagttttaagacaaaaaaatcagaagcaaagcaaaaacctaaatctacaataaagaatttggtttttaatcttccaaccatccaaaaatattataatattcaakaaaacaagtcttgattttaaaaatctcagcctcataagccaaattatggtctcattcatttaggcccatggaaactatccaagatttgtcctcaaattgattttcttaagacaatctatttttccattatcaaagctatgtaacaatgttaagaaaacttcaggatattcttctgtctgtcgattatctatctatctgtctgtctgtctgtctgtctatctatctatctatcatctatttatctcta

SEQ ID NO: 876564 - DNA, 596 bp, Homo sapiens
tgacaaattggagagtaggatagaattccttttgcctatcatacactaatctgttttaaagttagctttatcttcttctaaattaatgtttcttaagccatctctcaagaaaacatctgctgtccaccgtcatctgaattatgtgagaattcattacaaccctaggttcagaggaagcaccactccagatttacaaaatcacagggatggggtggggatgaaaggacagagaatttgtaatyatcgcagattcttgagggccatctaaaatttgacctgcaaagaatttgaagcaatctgtaattcttgtccactgtccagctgtggcatatttaatacactacatgactgtatgtacagccttaggacttttcctctctatgtcaacaaaactcatttcttccaggacatagaatttatccttgtagcccacatactttatctgataagaatggaatttataattggatgtcaaagcatagcaaacaatgaagggagaaaagtgcagagggggaaaacacatctattatttattttgttaggaaatcatttcttgacactgatgaggatgctacccattatctagttaacacaga

SEQ ID NO: 876565 - DNA, 596 bp, Homo sapiens
tgacaaattggagagtaggatagaattccttttgcctatcatacactaatctgttttaaagttagctttatcttcttctaaattaatgtttcttaagccatctctcaagaaaacatctgctgtccaccgtcatctgaattatgtgagaattcattacaaccctaggttcagaggaagcaccactccagatttacaaaatcacagggatggggtggggatgaaaggacagagaatttgtaattatcgyagattcttgagggccatctaaaatttgacctgcaaagaatttgaagcaatctgtaattcttgtccactgtccagctgtggcatatttaatacactacatgactgtatgtacagccttaggacttttcctctctatgtcaacaaaactcatttcttccaggacatagaatttatccttgtagcccacatactttatctgataagaatggaatttataattggatgtcaaagcatagcaaacaatgaagggagaaaagtgcagagggggaaaacacatctattatttattttgttaggaaatcatttcttgacactgatgaggatgctacccattatctagttaacacaga

SEQ ID NO: 876566 - DNA, 608 bp, Homo sapiens
tttaaagtaattttcttgttgaaagttgatgaaaacatgctggaagttgaaatcagggcttgtcatgtcactaacttttctcattattatttttcgaatagtattaagcgtttatagagagttcaaaacatggcaagccctattttcagatttttctatgtattaactcatttaattatcaaaataatcctatggggtagttactaatcttgaacccccttttaaagaaattgaggcatggaggactaatgaggtgtccaagcccacaccgcagataagcagaatatccaggattctgaaccaggtgttttgcctcaaagctggctgtaccaaccaccccctactctttctctactttggagaataatttagtgacttccttcagagaatccttattgagcatttkctatgataccttggctcttccaaatgagattattttataacttggaggcagtgttgtatacgtacattacccaggcttcaaggttagataaatcttgattgaatttgactccaccactcactgaccatgtgaccttgtggcacttagcatttcaaagcttcaatgtccacaaacaaaagttgaagaaaattatacctacctt

SEQ ID NO: 876567 - DNA, 644 bp, Homo sapiens
agtgatttgctttcagtttcttggataaatgatggtagaactcaatacaggtctcctgaaaattgcttatttctaaagttgtttctgcgttttttttcaatctgggatgcagtgcctgacagaatcaagctcatacattccttaagctagagaggctgggtcccccacacaatatttccaacttcatctaatatcctattaaaacagccctattcatgtacctttaccatctacttttcttacttccttttctattttaattagtttaattgaggagactacactctaatataaacatggacagctttattatctcaagaattgctagtaattgtattctaagccctttctcttgtttccagtgagacttgactggaagttcctaaagcctggactataactaagggcataatcttctattytacaattagctcacctttctctatatttgatcagggtttgaaagggaaaaagaagtccccttacatgctcaattatgtagtaggtgtggtaatgtgtctgcctcattcatgatgatctttggcatcttcagcttatcttctacttattcaatgtatgtgaatgggaatcctaatggtggaatactcaagcacaatcctttcttctaggcataagtgtccctt

SEQ ID NO: 876568 - DNA, 683 bp, Homo sapiens; identical to SEQ ID NO: 876083

SEQ ID NO: 876569 - DNA, 671 bp, Homo sapiens
catctaaaatatagttttttaattcccccaaatttctagtccagtgctaaatgtaacactagttgttcatccttgagcacattacttaacacctctgccacagtttccactgttattaagtggaaatacaatagcatgttgtattkgaagtgaagattaaattaattacataggaaagtgtagccatggaacaaatactatgtaactgtttgttgttgttgcattattagctgactaataaatccatgccaagttgcttgataaacacagtttattcctggagagcaaagattttaagaatagtaaattaggatttttttttctaatttctacagttccatagactcatttcttcttctatgattaaaaaaattcaaaagacaaacataaagctgtataaaacatggtgatatattaaaacaaaattatgagtaataaacaaatgagtcaatccaccaagttacctatcttttaaaaatatgcagtaagttatgaatatactggaatgttttattctgaaacataaccatttttcaacttctaacatggaaaaaaatggccaatgcaggttgactgctgcatgcttgtttcaatgctgcttagcacaagttcagaactcatcatcacaagtggttttaaatacttttaaattgtttttctaagataagcaa

SEQ ID NO: 876570 - DNA, 634 bp, Homo sapiens
tggcttaatcaggtgaaagtccttaaagaggtacttagaccttcctgtgaagagtctttacacattggcggctttgaaagagtaaggttttttgaggtagacatcatatcaagagggcgacatggcaaggaactatagccactctctaggagctgaaagaggcccctggtgtcacgtcaacagccatcaggaagctcaggcccacagtcattttagccacaagcaattaattttaccaacaaaccaaatgagcttggaactggctgtgaaaactcagccccagacaacatcttactcgagcaagaccagtgagatactgaagcagagggcccagctagacatcccagaaattctgacacaggaaaatttagagacaataaggagttgtgctgctttaagaatttatttatgtgctaatttgttatgtagcgatgggaaaataatacaaaygacagtactttcatagtcacagggaaaaataggaaagagtgcaagagatgggttacattttatgtttggtggttcctagtgcagggagcttcttagcacttcaaggagtgaactggtcttgttttgaagggacactgttgaaagttccaggaaagcctggcataggtggaaggtgagcaaaggg

SEQ ID NO: 876571 - DNA, 634 bp, Homo sapiens
tggcttaatcaggtgaaagtccttaaagaggtacttagaccttcctgtgaagagtctttacacattggcggctttgaaagagtaaggttttttgaggtagacatcatatcaagagggcgacatggcaaggaactatagccactctctaggagctgaaagaggcccctggtgtcacgtcaacagccatcaggaagctcaggcccacagtcattttagccacaagcaattaattttaccaacaaaccaaatgagcttggaactggctgtgaaaactcagccccagacaacatcttactcgagcaagaccagtgagatactgaagcagagggcccagctagacatcccagaaattctgacacaggaaaatttagagacaataaggagttgtgctgctttaagaatttatttatgtgctaatttgttatgtagcgatgggaaaataatacaaacgacagtactttcatagtcacagggaaaaataggaaagagtgcaagaratgggttacattttatgtttggtggttcctagtgcagggagcttcttagcacttcaaggagtgaactggtcttgttttgaagggacactgttgaaagttccaggaaagcctggcataggtggaaggtgagcaaaggg

SEQ ID NO: 876572 - DNA, 582 bp, Homo sapiens
ctcccacaacacataggaattatgggagtacaattcaagatgagatttgggtggaaacacacagccaaatcatgtcattccacccctggcctctccagatctcatgtcctcatatttcaaaatcaaacatgccttaccaacagtccccccaagtgttaaactcatttcagcattaacccaaaagtccagtccaaagtctcatctgaaacaaggcaagctccttccacctatgaccctgtaaaatcaaaagcaaggtagttactttctagatacaatgtgagtacaggtatttggtaaatacagccattccaaatgggagaaattggccaaaacaaagtgattacagggcccatataagtctgaaatgcagtgggcattcaaatcttaaagctccaaaatgatcttttttgattctaggtctcatatccaggtcayactgatgcaagaggtgggttcccatgcacttgggcagctctgaccctgtggctttgcagggtacagcctccctcccagctgctttcacaggctggtgttgagtgtctgcagcttttccaagcaaacagtgcaagctgtcagtggatc

SEQ ID NO: 876573 - DNA, 658 bp, Homo sapiens
acgaggagatgaaactaaaatgcatgaaacagaagacatttattaagcacaagtcccagagaggttagggatgctgaaggacgcagcatccctagcagctgaaagggaaagagagagagagtgagagcgtgagaaaagagagagaaagaagaaccatgtgggataacacctttaggttccatggttaccccttaggctttcccaagggagaytgtggatgggctattttaaagaaaacacatgagaagatggaacttatttgcaagattctatcatagttagcagctctgagatgtgttaggtttggggttagtaggataaacaggtgggctatatcacaaccaaccaaactgggagggcaagttttaactcagccaaaggtgatggggtgctactgcgtttcagaccacttatatcaggactaaaaagagatcccaaggcagtagcaactgtattcaacaaattttgaacaccttaatcctcacataagctctgtaatttggctgttgttacggtattgctatgaggctactgagactcaaagagttaagtagtttcccaaaatcatacagcaagtaaaaggcaaagttcaaatttaaataagtgtttgtccgaatccaaatcccatgcaccttttacgatgtaggaatttactctt

SEQ ID NO: 876574 - DNA, 619 bp, Homo sapiens
tgagaaaataatgtaagatgcaatgttgaaaatatgccaattctaacattttattatacattcctaagaagaaaaaggttaaaatttctagggaaaacaataccagtgaagtaaaatgaatttgttgtaaagcaaatttaattctatatataataataaaagtaaacttacaaatttctttccagctttattgaggtacaattggcaaatataaattgtatatatttaaggtacatgacatgatgttttgacatatgtctatattgtcaaatgtaccacaatcaagttaattattatagacatcactttacagagttaccatattttgtgtgtagggtgagaatatgtaagatctttttcagcawattacaagtatacaatacaatgttctaaactatagtcaccatgctttacattaaatctccagaacttatttattctgcataagggaaacttcataaaaagtatatttttcaatgtatttctgagctaaaaagaatgtaaagaaaactactatatgccaaatatatgaatgaaggcagaaatccatagaggtaaaaaactcaaaagcctgtgagtccctgaaggcccatgccaatctttgctgacttcgagcttg

SEQ ID NO: 876575 - DNA, 624 bp, Homo sapiens
tctggagcaaactttgctcttaatcttaaagccatggtataagagggaaataattgatggtataaaacaggtaagtttgaagaacttgtagagcacaggagaaagaaaaataccaagccctctggagtcgtgatgggggccctaaatgtataggttctgtgaaagcacacttggcaggtattaaaattataagatacatacttttggtgtttctgattatgrcttctgaattccaataccctaattttgacatactttaattaagtcaagataaactgaagctgttttggaaataaactttaaggtgagaaggacttcagtacatccaagttgtaaccactggaaatgagtgataaagttatatctaatgaaactgaataatggattaattatgaatcataatattacttcttgcttgtatcttttcataaataacaaatctaaaatttaacatttattttctaagattttagcttttgatattttggaatgagggttttttagtatggcagtgatttacatctgcaattatacatctgtattaaaattttgacattaatgttaactagcataatttttgccatgtttctacaaattcagttttgattctaatacatgtcttac

SEQ ID NO: 876576 - DNA, 577 bp, Homo sapiens
ctcatctccatctgagaccacctcaacctggatttcgttgtccatatcactatcagcattttgagcaaagccattaaacaagtctctaggaagttccaaactttcccacattttcctttctttttctgagccctccaaactgttccaacccctgcctgttacccagtttcaaagttgcttccacattttcagatatctcttcagcagctccctactctactggtactcatttactgtattagtctsttttcatgctgctgataaagacatacccaagactgggcaatttacaaaagaaagaggtctaatggacttacagatccatgtggctggggaggcctcataatcatggcagtaggcaaggagaagcatttcacttcttacatggatagcagcaggtaaagagagtgggcttgtgcaggaaactctcatttttaaaaccatcagatttcatgagacttattcaccatcacaagaacagcataagaaagacccatctccatgattcaattacctcccaccaggtccctcccacagcacatgggagttcaggatgagatttgggtggggacacagc

SEQ ID NO: 876577 - DNA, 577 bp, Homo sapiens
ctcatctccatctgagaccacctcaacctggatttcgttgtccatatcactatcagcattttgagcaaagccattaaacaagtctctaggaagttccaaactttcccacattttcctttctttttctgagccctccaaactgttccaacccctgcctgttacccagtttcaaagttgcttccacattttcagatatctcttcagcagctccctactctactggtactcatttactgtattagtctgttttcatgctgctrataaagacatacccaagactgggcaatttacaaaagaaagaggtctaatggacttacagatccatgtggctggggaggcctcataatcatggcagtaggcaaggagaagcatttcacttcttacatggatagcagcaggtaaagagagtgggcttgtgcaggaaactctcatttttaaaaccatcagatttcatgagacttattcaccatcacaagaacagcataagaaagacccatctccatgattcaattacctcccaccaggtccctcccacagcacatgggagttcaggatgagatttgggtggggacacagc

SEQ ID NO: 876578 - DNA, 497 bp, Homo sapiens
tataactttttttccctctagatattacaaactgtatcacagaggggtgtaaaccccctgcgatgtggaaagtaatatcatcctctcccccactggatattacaaataatatcacagacggtgtacatgtgaggtgtttaygatattgggagtaatctcatatcccccagtggatattatgaacaatatcacagaggggtgtatacacactctgccttatagggagtaatatactcctctcccaccctggatattacaaacaatatcacagagggtgtacacacagggtgtttatggtattggaagtagtattatctcccccatggatattactaataatatcacaggggtgtgtacatcccctgtgatacagggagtaatatcatcctttcccagcctggatattacaaacaatatggcagggggcagtacaccctggcgatatgggtagtaacatcatgtcctccccacgtggatattatgaacaatattctagg

SEQ ID NO: 876579 - DNA, 556 bp, Homo sapiens
aaggctccttgtggacatatttgatatcaggatcgggcagggaaaatacaagattagtttgaaatattttgtcatgttaggaagtaaggaaatgctcacaaaatggggaaaatgtgaaagggaaacagatccactttgaataaacttccatagccaaatttgagaaaattggggcaataaaatagataacaatagtaatatattacaatctacagaagaaaattttcaattaatccakgccgggtgcggttgctcatgcctgtattcccagcactttgggaggcagaggcgggcagatcacttgaggtcaggagttcgagaccagcctgaccaatgtggtgaatccctgcctctactaaaaatacaaaaattagccgggcatggtggcacatgcctgtagtcctagctactccggaggctgaggcaggataatggcttgaatcccggaaggtggaagtgcagtgagcggaaatcgcaccattgcacaccagcctggatgacaaaacaagactccaactcaaaaaaaaatccatattgacataaataataaaccaaa

SEQ ID NO: 876580 - DNA, 556 bp, Homo sapiens
aaggctccttgtggacatatttgatatcaggatcgggcagggaaaatacaagattagtttgaaatattttgtcatgttaggaagtaaggaaatgctcacaaaatggggaaaatgtgaaagggaaacagatccactttgaataaacttccatagccaaatttgagaaaattggggcaataaaatagataacaatagtaatatattacaatctacagaagaaaattttcaattaatccatgccgggtgcggttgctcatgcctgtattcccagcactttgggaggcagaggcgggcagrtcacttgaggtcaggagttcgagaccagcctgaccaatgtggtgaatccctgcctctactaaaaatacaaaaattagccgggcatggtggcacatgcctgtagtcctagctactccggaggctgaggcaggataatggcttgaatcccggaaggtggaagtgcagtgagcggaaatcgcaccattgcacaccagcctggatgacaaaacaagactccaactcaaaaaaaaatccatattgacataaataataaaccaaa

SEQ ID NO: 876581 - DNA, 651 bp, Homo sapiens; identical to SEQ ID NO: 870529

SEQ ID NO: 876582 - DNA, 505 bp, Homo sapiens
ggagaaaaatatgcataatcaaaagtgaccttagaaaagagaattctgatttagatatgagggatggttgggtacacagagacaggtggcataagattaagtttaaagaactagaaaaaagaatgttgccatggcaaaratttaggcatcatttaaatctaaagtgttatttttgcacaatgtaaatgaaatacagcaggtgtactagaactatcattaattagggaacattcagtgtttgcaaaggggcaaaagatatagatgctaatatgctgggaactgtataatttactattacatttcatgagttgatatttagggaactctttgatgtacagaggtatataagatattaatattgttccctccccaactttattacattaaagaccttggcagtctttcaaaatcagtgtttggcagattgatatacagcaatcattagtctcttccagggcaaaaattgggaaaaggttattttaagaagacatataagttgggcagt

SEQ ID NO: 876583 - DNA, 658 bp, Homo sapiens
taaaatctcacacctttcttccaactgggatgtgaatcatccctttgtccaacatattcacgatatataaatgatctgcccgttaaccacttagtggctacctcctttatcaaatcaaaaaaacatagtgtttatagaatytgtatcatgtgcacgtttcaggcattcactgggggtcttggaatgtatcccctgtggataaggtgggactattgttcttgtttgggccagacagtaatgttttctggctatgaagacagactccgtaaaggtaatcatgaggaagagtggaccatgggaagattagaggccactattattctaaaactggatccttcaacatccaccttcaagtataacttctttttttcagaaaatactttccatcctgaccctataacattactgcacaagatctggtattcagtttgaaagcacaagtgttgtatctcttattatgccttaaagcataatagatgttgctcatcttcttcttttcatttgtcctcatctctaaaaatcttaaaatatttagggaggggccaagatggccaagtagaaacagctgtggtctgcagctcccagcgagaccaacgcagaaggtgggtgatttctgcatttccagctgaggtgcccatttcgtctaattgggtaccca

SEQ ID NO: 876584 - DNA, 685 bp, Homo sapiens
tttctgcatctattgagaaaatcatgtgttttttgtctttagttctgtttatgtaatgaattacatttattgatttgcatatcttgaaccagccttgcatcccggcaatcaagccaacttgattatagtggataagctttttgatgtgctgctagatttggtctttcagtattttgttgaggatttttacattgatgttcatattggtctgaagttttctttttttgtcaggttttggtatcaggatgatgctgccaggttttggtatcaggatgatgctgccagsttttggtatcaggatgatgctggcctcataaaatgatttagggaggattccctctttttctattgtttggaatagtttcagaaggaatggtaccagctcctttttgtacctctggtaaaattcagctgtaaatccgtctggtcctcggcattttttgattggtaggcgatttattactgcctcaatttcagaactcgttattgatctactcagggattcaatttctttctggttcagtcttgggaaagcttatgtgtccaggaatttatccatttcttctagaatttgtagtttatttccatagaggtgtttatagtattctctgatggtatttctgtggagtaagtagtgacatcctctttatcattttttattgtatctacttgattcttctttctt

SEQ ID NO: 876585 - DNA, 608 bp, Homo sapiens
tgatatggatgaatgttaaattttgagaacctctcctatagggtaactgagaattttaaaattagaacattctaacaagataacacaatgtacagtccatccatcactcaagcaatcactgagcccgtgctctgtctcaggtatacggcagtgaccacctcaccggacccagagagtgggaaccagtaactggtcattgctgccactctggtgtggcactccctcttttataagggaaaaaggagattttagaaaacagaatggacagactttagcttctgtcctttagttttgtcctttgtcrtctctgttgaagatttaaaccacagagtcaccttcaaagtgaaatacaaaaaatattttgcattgtgatactaagaaacttgaagtcaaaaccttaggtctctgttggatgcaaagttaacttctgtgaattgcctgctcctttccaaagtctgcactggggggtcataatccccttcaagcctttgtaagatatgctgagtggaaaaggtattgactatgtaattttccagagggatgaaatatggctgcccggcctgtgtacagtatgtgaatcaacctagaatctatacatggggagatac

SEQ ID NO: 876586 - DNA, 639 bp, Homo sapiens
ggaggatattttagtaacatcttaccctcaaatgaaataattgcacctaataacacgtacatttttaaaaatcgtgagaaataatgatgtattgtacagtgtacaattaaaacataaaaatcagaacaccttttatgcatatagtgatcaaaagttttcaaaggtctttcattttattcattttgctacctcctattgttcatttgatagatttgattcttattttaagatggaaaacactgagacacagagagtttgagggcattatgtgaatccattcagggtcaaaatgaatatcagaactcagtttcctcgactatcaatccagcactttcttcacttcagtaaaatggtatgtgtcacgctgcctggtattcatgccactaagaaagtgtaccaaattactgcgtgcctgtagtattgctggcactgagctaaataaattagacacatattttctatgaatcttctcaatgacccactatktttttaaaaaaaaaactgagtactgggatacagatagtataagagccagttacattactcactatgtaagtaatgaagtagcataatgcgtttcataagtaaagaggaataacttaaaactaggtttctaactccagcatctgagctgtttcc

SEQ ID NO: 876587 - DNA, 653 bp, Homo sapiens
tggtacagaggagctctcctacagttttgacgatggtagtctacagcagggatgagggcagccaaaacaatcccacttgcccttcatatgtaatacccagtccctctgggctcctagctgatctgggtcagtcaagttggcctctcgcctccttcttgttctgtgtctcaggtttttcccatgagttctctgttgggttctagtattatctccttgttattctgttagaggaaatatttttatttcataatttttattctttctagggagmattgcatctgatctctctagtcagccatcttgaaccccttcccatagtctctggtatcttaaagtacctcgtttggtatccaataatgccttcttgataagaacattaatgctaattgcgtcttctcaaggttgtataaaccatattaccttctgatatcgtagctattcaaaaaatctgatcgtacttttcattattttctagaaaccagtgggatttctattggtttcttttttccccattacctttttattgtttactttttgtgtaaatctattttttttttttttttttttgagatggagtcttgctctgtcacccaggctggagtgcagtggcgtaatctcggctcactgccacctccaccacctgggttcaagcg

SEQ ID NO: 876588 - DNA, 685 bp, Homo sapiens
tacgttctagactcccagccctagtagcacacaattgagtataaaaaggaaggtttggagataaggaataaaaaaatcttaaaaattaacacagtatataaaagtgaagtgaaagtgaacattttaaagatgcggtttaattgtcttctgaattccaatattttcattaagagatcaactgtcagttttgttgtactcctctgaaaataatgtatccttttactctggctgtgttttagattttattcagttttcagcagtttatgtgygaggtatttaggtttgatggtttgattttcttagggcttattcttgttggggtttgcagaacttcctgaatctgagcattgattaacaacaacaacaaaaaatagtactgtaaaatacttggccattacttatttaccatcagagaagattttccttttcctttgctaggcagttagggtggggatctgctcaccttaatcagactatgaactggcctgggttaaggctaaactgcaggtgggtaagattcagtcaaccacggttcatctgattttctagagtataggtgtcaagaaatttccagcttacttctttaatgtcttgccatgcacagctttacaatttggcaagtgacttgaggggtaaaccagcttggcatttaaagtcactacagtgtacaattctgtcattccag

SEQ ID NO: 876589 - DNA, 628 bp, Homo sapiens
caccccccaaaatcacactagctcacttcgattcaaaccaagggagaaatccctgatttacctgaaaaagaattcagaagattagttattaagctaatcagggaggcaccagagaaaggcaaggcccaatttaaggaagtcaaagaaatgacacaagaaatgagggcagaaatgttcaaggaaatagatagcataaataaaaaagaatcgaaacttcaggaaacaatggacacacttatagaaatgcaaaacgctctggaaaatctcagcaatagactcgaacaagcagaagaaagaacttcagagcttgaagacaaggctttcaaattagcccaatcctgcaaaggcaaagaaaaaagaagaaaatatgaacaaagcctccaagaagtctargattatgttaaatgaccaaacctaagaataattggccttcctgaggaagaagagaaatctaaaagtttggaaaacatatttgggggaataatcaaggaaaacttcctcatccttgctagacacctagacatccaaacacaagaagcacaaagaacacctgggaaattaaacacaaaaagatcatcacctatgcacgttgtcatcagattatctaaattaagatgaaggaaagaat

SEQ ID NO: 876590 - DNA, 688 bp, Homo sapiens
agacagtctttaatcaactacaccaatgctccttcgtctcctggcagtgccacatagtatggagagagaatctgtgtgcttgggggaggaaaagcaaagtgattatgggactttgcaatggaattcagtgcaaactgtcatagcagaaagcaacaaagggcaaaattcagctggtgcccatggagtgagcatttagaccagccctaaccagaggggaatcatttaccccagcggtcaaaaccctgagttcatctagccccaccaccatggctaaaatactctgggtcctaaataaacttggaaagccatctaggccataaggactataattcctgcacaagtcctggtgctgtgctgggcttagagccagtgcacttgggatgtgcatgacccagtgagaccagctggggtaaccaagggagtgcctgcatcaaccctttcttttttttttttttttttttttgagacagagtcccgctctrtcacccaggctggagtgcagtggcaccatctcagctcactgcaacctctgcctcctgggttcaagtgattctcctgcctcagcctcctgagtagctaggattacaggcatgcaccaccacacctggctaatttttgtattttttatagagacggggtttcaccatattgatcaggctggtctcaaactcctgacctcgtgatccgc

SEQ ID NO: 876591 - DNA, 688 bp, Homo sapiens
agacagtctttaatcaactacaccaatgctccttcgtctcctggcagtgccacatagtatggagagagaatctgtgtgcttgggggaggaaaagcaaagtgattatgggactttgcaatggaattcagtgcaaactgtcatagcagaaagcaacaaagggcaaaattcagctggtgcccatggagtgagcatttagaccagccctaaccagaggggaatcatttaccccagcggtcaaaaccctgagttcatctagccccaccaccatggctaaaatactctgggtcctaaataaacttggaaagccatctaggccataaggactataattcctgcacaagtcctggtgctgtgctgggcttagagccagtgcacttgggatgtgcatgacccagtgagaccagctggggtaaccaagggagtgcctgcatcaaccctttcttttttttttttttttttttttgagacagagtcccgctctgtcacccargctggagtgcagtggcaccatctcagctcactgcaacctctgcctcctgggttcaagtgattctcctgcctcagcctcctgagtagctaggattacaggcatgcaccaccacacctggctaatttttgtattttttatagagacggggtttcaccatattgatcaggctggtctcaaactcctgacctcgtgatccgc

SEQ ID NO: 876592 - DNA, 678 bp, Homo sapiens
actatccttctgactactagagttgcttccagagagacctgctgcccttactccaccaaatttgaagacttttatatcaaaacaggtttacaggtttaaaccaaagctgaattcactacaacctcttacgtattttaattttaactctccatcaccttctacataggatttgaatctcttcccttaaccatgccccagtctaagtctcagttttttttttctgacactgtcatgccattaggatactcagagaattattcccctctgagaaaaaaatgacaaamaaattgaaatattaatttacataaattcaattttcatttttaattcaataactccaatcctgatcattgaattatggtaatcatgtccatatttgtttcattatcctcgtttcaagttaattaattgctaaatcagtgaacctctatataatgtaacagctagttattttgatggctcaaaaattaaaagtgacttccaaaagtttctggtttgcttaggcagttttaaaaagaaatcattcgtgtacttgttaaacaatagaagaatagtgtattggtccattctcatgctactgtgcagaaatatccaagactgggtaatttataaaggaaagaggttttattgattcacagtcctgaatagcttgagaaacctcaggaaacttacaatcat

SEQ ID NO: 876593 - DNA, 678 bp, Homo sapiens
actatccttctgactactagagttgcttccagagagacctgctgcccttactccaccaaatttgaagacttttatatcaaaacaggtttacaggtttaaaccaaagctgaattcactacaacctcttacgtattttaattttaactctccatcaccttctacataggatttgaatctcttcccttaaccatgccccagtctaagtctcagttttttttttctgacactgtcatgccattaggatactcagagaattattcccctctgagaaaaaaatgacaaacaaattgaaatattaatttacataaattcaattttcatttttaattcaataactccaatcctgatcattgaattatggtaatcatgtccatatttgtttcattatcctcgtttsaagttaattaattgctaaatcagtgaacctctatataatgtaacagctagttattttgatggctcaaaaattaaaagtgacttccaaaagtttctggtttgcttaggcagttttaaaaagaaatcattcgtgtacttgttaaacaatagaagaatagtgtattggtccattctcatgctactgtgcagaaatatccaagactgggtaatttataaaggaaagaggttttattgattcacagtcctgaatagcttgagaaacctcaggaaacttacaatcat

SEQ ID NO: 876594 - DNA, 630 bp, Homo sapiens
ctggcatctggcagatcataggagctcaataataacttatttaataaacaactaaattaaatgtgttaggtattgtaggaaatgcaaatacaatacaaaatacataagctatacgcggaacgtgaaccaatacataaaacaattcaacacaatgaaacactaaatgctaaatattatggtgccaatttctaggctggcaagcttgccagaaatgaagatgtgggataggaaatgaacatggcaaatacaaagcacccaggaaagttcagctgtatatagcagacatcttgtgtgagagactgatgagaattagggtaatgatcttgctttatctaagatgataaattcaatctgtaggccataaaaaaacactgtaaattgaaaatagggaaatggcagcaacaaaatgatattcaaaatgaggtttatttatctataaatcggggagacaatgtgtcttaattttataytggaacttggttcaaattctggctgtgtgagtagggcaaataattcaaccactatgaaatttagtgtcccttttggtaacatgagtatatttacacatattttgatgtggcattttagtgattaatgaaagaggcatgtaaaggacttttcagagtcctt

SEQ ID NO: 876595 - DNA, 605 bp, Homo sapiens
ggtaagttccagtctgaggtggtctcagacagagatgaggaacttgttgggaactgaagcaaaggtgactcttgttatgttttagcaaagagactggcagcattttgcccctgccctagagatttgtggaactttgaacttgagagagatgatttaggttatctggaggaagacatttctaaggggcaaagcattcaagacatgaattgggtgctgttaaaagcattcagttttataagggaagcagagtataaaagtttgaaaaatgtgcagtctgacaatgtgatagaaaagaaaatcccattttctgaggagaaattcaagccagctgcataaatttgcataagcaatgaggagtcgaatgttaatccccaagacaatggggaaaatgtytccagggcatgtcagaggtcttcatggcagcccctcccatcacaggcctagaggcctaggaggaaaaagtggtttcatgggccaggcccagggtccccatgctgtgtgcagcctagggacttgatgaccttcatcccagcctcaagccttggcagcttccacgtggtgttgagcctgagagtacacagaagtcaagaattgaggtttgggaa

SEQ ID NO: 876596 - DNA, 624 bp, Homo sapiens
aatacatgctgaaaataacagattataccccattgagtaaaagaggaaagcacaagtccatagtgatagaaataaataagtaaataaattaaaaattgaggacatttccatagttccaaagtagattcccccaaaatacttattaattacaaaataaaaaagagtaccttgatagtgaaggaggctggcagacaccagcttaatcaagagatcaaagtgaacattgtaaggaatggggcaaatcaagatcaggtgctacctgctagtgtattatgaggacatgacataatttctgtgggattcttgcccaaaatgcagaacctgaatcagattacaaaaaaaaaaaaaaaaaattcaggcaaatccaaactgaaggacattctgtaaaataacttgtgtgtaatcttcagaagtgtcaaggtcatgaaaatcaaagaaatacaaggaaaagggagttgttccagattaaccaagactacgagtcacrtgacacatgccctggcctggatccttttgctataagagacattatttgcacaactgatgaaatgtgaatgggtctgtggattacaagcttgtaggaaatcaatattaatttcctgcttctgatggatgtattgtgat

SEQ ID NO: 876597 - DNA, 649 bp, Homo sapiens
atattatggctaaggaaacagagaactcaagaaatgaatctacctccaagaaactaattcagtatagtaaaatagaattaagtgccctgtctcaggaaaaagtttattaagaataaggaacaagtgggacatcatacatcgtttctttggagattaaagtgcaggctatgaaatggcatataaaataatgcataaaatagtgcaatcttaaggtgccattatttttattacacatagcctagttttatgtccattttctctcaaaaatccagctgtagtgacaccttttagcttattaatttaggcattacttatactgttttacccacctttggggctacatagaatattttaacatttttaacacgtagaataattgcgcatayatcttgaaactactaaatagagattaaggcaagcccctgtaaagttcagtactccaaaaaaagtgttttgcaaaaaaattgcttcccaaatcagtggcttttgacctgatggtaccccaatagtctttaaaactattttaaagtataatgactctcaatacatttgcgtttgctccattatttccaggctctgtacaggagtttgaaaaacaacaggttctataacctcagaatctgtgaaaaccagttaagccaagtgcatg

SEQ ID NO: 876598 - DNA, 674 bp, Homo sapiens
gcatctctaaatatatagattattttggccacatttgttaatttagcattgttttttgaaaacatttttagttccatgatccctctcttcttctaggactttgatgacatgctaaatcttttgttatattcatacatgtaaatgaggctctgctaattttttcagtctgtttcctygttgttgttcagattgagtaattgctattgctctatctttaagtttattgatttattttcttttgtcatctacattctgccattgtgcccattcactgaatttttatttcagttgttgcattgtttagttctaaaatttcccaggggtgaagcccacttgatcatggtggataagctttctgatgtgctgctggattcggtttgccagtattttattgaggagttttgcatcgatgttcatcaggggtattggtctaaaattctctttttttgttgtatctctgccaggctttggtatcgcgatgatgctggcctcataaaatgagttagggaggattccctctttttctattgattggaatagtttcagaaggaatggtaccagctcctccttgtacctctggtagaatttggctgtgaatccatctggtcctggactttttttggttggtaggctattaattattgcctcaatttcagaacctgttattggtctat

SEQ ID NO: 876599 - DNA, 603 bp, Homo sapiens
tcacccaggtatcaagactggtacccattaattatttttcccaatcctctcctttctgccaccatctactctctgaaagaccccaatgtgtgttgtttccctctatgtgtccatgtgttcccatcatttaactcccacttataartaagaataatatgtggtatttagttttctgctcctgtattagtttgctaaggataatggcctccagctttatccattgttttttattgctctgtttatactgacagataaaattgcatatatttatcaagtacaatgtgatgctttgaaatgtaacttttggaacaactaaatgtagcaaataacctatgcattgcctaacatacgtgtcattttgttgtgagaatacatagctatcttaacatttttaaagaatactatatgtttttaactatagttaccatgttgtaaaatagatctcttgaacttattcttcctatctaactgaaatattgtatcatttgaccaacatcttgccacttcactcccaaccaccctagtccttggcaaacaccatactactgtccacttctatgagttcaagttttttagatctaacatataactgagatcatgcag

SEQ ID NO: 876600 - DNA, 623 bp, Homo sapiens
attacaggcgtgagcctctgcgcatgggcgatattcttcaattagaaactgaggtcgctgatgtgagaccattattcttttctaatacagtaatatcataaatttcccttcaggtactgcttcagtgacaaccgacaaattctttgttgtttttctatttccaataacttcaaataactttctaatattcctttagatttcttctttgwcctatgagttatttagaagtgagttaatttccaaatatttggggatatttaaaggatctttctgttactggtttttaattttattccattgtggcctgagaacatactttgtagttgaatacttttttatttattgaggtttttaatgggctataatgtggtctatctccataaatcttccgtgcacagttgagaaaatgtgtattttgcttttatagggtggagtattctataaatataaatcaggtcaagttggttgatggtgttgttcaagtccaatacattcttgctgatttattgcctatttattctatgaagtgttgagagtgggattaaaatctctgatggttatctctatctctacttattgttttattacttttcttcatacattttgaagctttttttgttagg

SEQ ID NO: 876601 - DNA, 623 bp, Homo sapiens
attacaggcgtgagcctctgcgcatgggcgatattcttcaattagaaactgaggtcgctgatgtgagaccattattcttttctaatacagtaatatcataaatttcccttcaggtactgcttcagtgacaaccgacaaattctttgttgtttttctatttccaataacttcaaataactttctaatattcctttagatttcttctttgtcctatgagttatttagaagtgagttaatttccaaatatttggggatwtttaaaggatctttctgttactggtttttaattttattccattgtggcctgagaacatactttgtagttgaatacttttttatttattgaggtttttaatgggctataatgtggtctatctccataaatcttccgtgcacagttgagaaaatgtgtattttgcttttatagggtggagtattctataaatataaatcaggtcaagttggttgatggtgttgttcaagtccaatacattcttgctgatttattgcctatttattctatgaagtgttgagagtgggattaaaatctctgatggttatctctatctctacttattgttttattacttttcttcatacattttgaagctttttttgttagg

SEQ ID NO: 876602 - DNA, 623 bp, Homo sapiens
attacaggcgtgagcctctgcgcatgggcgatattcttcaattagaaactgaggtcgctgatgtgagaccattattcttttctaatacagtaatatcataaatttcccttcaggtactgcttcagtgacaaccgacaaattctttgttgtttttctatttccaataacttcaaataactttctaatattcctttagatttcttctttgtcctatgagttatttagaagtgagttaatttccaaatatttggggatatttaaaggatctttctgttactggtttttaattttattccattgtggcctgagaacatactttgtagttgaatacttttttatttattgaggtttttaatgggctataatgtggtctatctccataaatsttccgtgcacagttgagaaaatgtgtattttgcttttatagggtggagtattctataaatataaatcaggtcaagttggttgatggtgttgttcaagtccaatacattcttgctgatttattgcctatttattctatgaagtgttgagagtgggattaaaatctctgatggttatctctatctctacttattgttttattacttttcttcatacattttgaagctttttttgttagg

SEQ ID NO: 876603 - DNA, 580 bp, Homo sapiens
ggtgtctttatcatgaaatctttgcctctttctatgtccaggatggtattgtctaggttgtcttccagagcttttatagttttgggttttacatttaagtatttaatccaccttgagttgatttttgtatatggtataaggaagaagtccaacttcaatcttctgcatatggctagccagttatcccagcaccatttattgaatagggaatcttttccycattgattgtttttgccagctttgtgaaagattacctagttgtaggtatgtggtcttacttctaacctctctattctgttccactggtgtatgtgtctgtttttgtactagtaccatgctgttttggttactatggtgctgtaggttagtttgaagtcgggtaatgtgatgcctcaagctttgttctttttgcttaggattgccttggctacttaggttctttcttggttctatatgaatttttaaatagcttttttctacttctgtgaagcatgtcattggtagtttaataggaatagctttggacagtacaaccatttaaatgatattaattctttctctccattaagatggaatgatt

SEQ ID NO: 876604 - DNA, 603 bp, Homo sapiens
tattatgttttctgagcaacttcgtggcttctgatttggaggggtaggatttcatagttaataatttttttttttttttttttttttttttggtgagatagagtctagctcttgttgtccaggctggagtgcaatggtgaaatctcggctcactgcaacctccgcctcccaggttcaaatgattctcctgactcagcctcccgagtaactgggattacagacacccaccatcatgcctggctaatttttgtatttttagtagagatggggtttcaccatatttgccaggctggtcttgaactcctgacctcaggtgatccgcccgcgttggcctcccaacgtgctgggattacaggcgtgagmcactgcgcccagcccatatttaacacttctataaatatttgtgcatattgaaaggaacatcactccccacactgcaactgaacaaaaaagtgataatgttaatttctttattcttgagcttttcttgaataaaagagggtcgtaggacatggaacaaaatagactagaaaatagggttgataaggtactgattctgccaacactgcttaatgctctccccaagcaattgtcttttagata

SEQ ID NO: 876605 - DNA, 558 bp, Homo sapiens
gaatagtagaagataaagattaaagataccaatttaaagtaaattggtagaaattctttaggaaaatctatggcagtacattagaggagatttagatatccttacacttgactgtgtcagatttgcttggagaaacttaccraaagaacataacgaaaatattttaaaatgaagagttacttataaagttcaatatatggaagacaaaaaatccactaataatgtctcatcatataaatgacagtacatatttcagaaaagattaaatatgcataaccatttattgtgaacaccttttaacaacacgggcaccacacacacattcacatgcgcatatgctccccccgaccccccctggacacacacacaaacattaccatgagattacagagacattatgagcattattactgtgattatttctatctaaaatattcatgtgtcacccgtagaacaataagaaagaataaaaatagtcatatgaacaagtgttatccaagctgtgttttttttcaataatctatacaattattaagatctttaacattaacttcttat

SEQ ID NO: 876606 - DNA, 663 bp, Homo sapiens
tttccaggtattcgaagggtcttcattgttgtaatctaagattttgtttctgcagccatatatgcattagggggcacccaagcccagtaattctgtggttattgcagactcacaatggtactgcttcggtggtcttgaataagatctggaagaattctctcgattacctgacagagactcttgttctccttccttactttctcctaaacaaacagagtctatctctcggtgctgagttgcctggagctgggggaagggtgacacaagcacccctcttgccactaccacagagactgcattgggtgacacctgaagccagcgtgttagtgggtcttacctaaggcctaagataatcacttttargctactgcctatgttaactcaaggccctagtgctttataatcagcaggtggaaaagccagccaagcttgtgtccttcccttctgggtggcaagatcccctctgtcccagacagatccagatattctgggtcctggagtcaaaaaccttaggaatctacctggtgatcttttcttctgcagcttagctggcacccaagcaataagacaaagtccttcctactcattcctacccttaccacaaacagaggagtctatacccttggcaaccaccaccccaggtctgtaatgagtactgcctag

SEQ ID NO: 876607 - DNA, 665 bp, Homo sapiens
agaaaaactttaaaaagtatttttcatgctgaatgagctacatctcagaagtataaaggaaaaaaattaaaatatatatttttcaaaaattaaaacattttcaagaaattaaatttaaaattttagtgaaaaatatttacttatacatacagaagctcaagcagtttaaatacaaaaaaaggactgacatattagattcaaacttctgaaaaagaaaaatattgagagtatcctgaaagcaatcagagaaaaaagacattacatatggaaaaactaatctacaactgcttgccaagttttcactagaaataatagatgactaaatgcagtgaaatgtctattttaagagctaaaaacatttaggtattcatatatctaatattgggaagaatataatatttatattaaatacaagaaataaaacatgttgataatcttgagatgaaaatattcctcaaaaaataaggcaaaataaagacattctcaatgaaatcgtgagaacatttatttcaaacagttccacacrgtaaaaattgctaggataaattattgagtttggaaagaatttctttcaaggaattgatagtttgaagcaaagttatgacaatataataagggtttatagtatacataaaagtaaatgtaagacaatattgatggtttta

SEQ ID NO: 876608 - DNA, 640 bp, Homo sapiens
aaacacatatctagtataagactggtatccaaaatatacaaatatattttaaaattcaattataacataacccagttagttcaaacgtaacaactcaactaagaaaaggaaaaaattcttagcaaacactttatcaaatactctatatagatggaaaatagggacattaaaagacactttacatttttgtagatattgaattacaaatgtaaacaataacaaaataaagtcaacatcgtttagaatggctaaaattcaaaagatcaacaatatcgttactggagacaataagcaagaggaactcttattcrttgctagtgggagtacaaaatgctacagccactttcaaaggtagtttggacatttcttactaagtaaacattgtcttagagtataatccatcacctatatttccaaggatatttccaagtgatttgaaaatttatttccatagaaaatctaacagatgagtgtttatagcagtgttattgataataaccaaaaagttagagcaagttgttgaccttcaataggtgaatgaataaacaaaaggtggtgtatctgtacaataaaatactattcagtgataaaaaaagggataagcaatcaagccatatgcagagatgcatgcatcttagct

SEQ ID NO: 876609 - DNA, 617 bp, Homo sapiens
ttagtgtgatttccatgtaatttctcatgtcttctgtggttttcctgggaatctaacatcattaatcttctttatattaaaggctataaattattttccatctgaaaaaagagttttattcagtgatctttataatcttgtcatgtaaaacatatccaaaatttatacaaccacctattattgttggagaattaaaagaaatttccaccactgcttttcttaattacttcatactatmgctaaaaagagtctctcaatatttcttgtggtttgatccatgcttcgcttagtatcttctgcctgatctcacttgcaccattcatcctctttgaccagtgaaaataaaaatattatgctctgtttccttttgggatttcatattttaaaccaggcatttgaaaactttttccataaagggtcagttaataaatatttcattttgcaaaccatataacagccactctatcacaactactcaacccttctgtgtagcatgcaagttgccactgcaaaaattagtaaataaataaaagtttaaaaggtggatttacttattttattaaatggtttaatacttcgaaacattagtccttactgtaataacaagaagaaaattc

SEQ ID NO: 876610 - DNA, 617 bp, Homo sapiens
ttagtgtgatttccatgtaatttctcatgtcttctgtggttttcctgggaatctaacatcattaatcttctttatattaaaggctataaattattttccatctgaaaaaagagttttattcagtgatctttataatcttgtcatgtaaaacatatccaaaatttatacaaccacctattattgttggagaattaaaagaaatttccaccactgcttttcttaattacttcatactatagctaaaaagagtctctcaatatttcttgtggtttgatccatgcttcgcttagtatcttctgcctgatctcacttgcaccattcatcctctttgaccagtgaaaataaaaatattatgctctgtttccttttgggatttcatattttaaaccargcatttgaaaactttttccataaagggtcagttaataaatatttcattttgcaaaccatataacagccactctatcacaactactcaacccttctgtgtagcatgcaagttgccactgcaaaaattagtaaataaataaaagtttaaaaggtggatttacttattttattaaatggtttaatacttcgaaacattagtccttactgtaataacaagaagaaaattc

SEQ ID NO: 876611 - DNA, 658 bp, Homo sapiens
atggatggaggtgaacaacattattcctggactttctattttgtttcattctgctttgtatccgtttttgaactagcaccatgctgtattggttactatagctttgcagtagagtttgaagtcaggtaatgtgatgtctccagcattgttctttttctttagaattgctttggctatttgggctcatttttggttccatataaattttaaaatacttttttctaattctgtgaagaatgtattggtaggttgataggaatagcattgaatctatatgttgctttgaacagtatgaccattttagtgatattgattcttcctattttcctattcatgaatatgaaatattttgccatctatytgtgtaatctatgatttctttgaaaatcattttgtaattctcactgtagaaatatttcacctccctgcttagctgtatttttaggtatcttattcattttgtggctattgtgaaatacatttcattaattatttggcttttggcttggatgttccttgtgtataagtaagctactgatttttatatgttgattttgtatcctgaaactttgctgaagttgtttatgagctgaagtagcttttggccagagactatggggttttctagatataaaatcatgttgtcaacagggatagt

SEQ ID NO: 876612 - DNA, 524 bp, Homo sapiens
aaaatgcagtattttagaaatacattcctgttggtaacattaattttgtttatctagtttattcaaaatcaacataaaatattttaattacgtgcttaaattatatgcaatttatattcgtataaacccaatttactataaatttaatttaaaacattcytgtttttttttagatggatcctcgctctgttgcccaggctggagggcagtggcatgatctcagctcactgcaacctccacttcccaggttcaagcaattgtcctggctcagcctcctgagtagctgggactacaggtgcgtgccaccacgccaggctaatttttgtgtttttagtagagacagggtttcactgtgttagccaggatggtcttgatctcccgacttcatgatctgccctccttggcctcccaaagttctgggatcataggcgtgagccactgtgcccagcctaaaacatttttaacaaagcaactataatcatggttaagaataaaaggaataattcaaaaattaagttaatttt

SEQ ID NO: 876613 - DNA, 587 bp, Homo sapiens
attgctttcatcagtgttttgtagtttttcatgtagaaatgtttcacctccttggttaaatatattcctaggtattatttttttgtagctaatataactgtcattgcctgatttccctctcgtgagatcattgttggtgtatagaaacactactgatttttgtacattggttttgtattctgaaaccttactgaattcacttctcaaatctaagagttttttttttttttttcctggagtctgttcaagtttggtaaccatgttgctcaaagcttctgtatctttacttttttttttttgtctaattgttctattagttactaaraaagcatgttaaacgttctcattgtttgtggatttgtttgtttctatgtttagctctgtcaaattttgttctgatacattaaggccatataattgggaacagaaatttagaactgttacaactcctaggtaattaaaacttttatcattataattttgtttcctgccttttgtttttttgtcttaaaatctactttatctgatattaatatggccacactgttttttttaaaattttttttatttccgtgggtttttgggga

SEQ ID NO: 876614 - DNA, 587 bp, Homo sapiens
attgctttcatcagtgttttgtagtttttcatgtagaaatgtttcacctccttggttaaatatattcctaggtattatttttttgtagctaatataactgtcattgcctgatttccctctcgtgagatcattgttggtgtatagaaacactactgatttttgtacattggttttgtattctgaaaccttactgaattcacttctcaaatctaagagttttttttttttttttcctggagtctgttcaagtttggtaaccatgttgctcaaagcttctgtatctttacttttttttttttgtctaattgttctattagttactaaaaaagcatgttaaacgttctcattgtttgtggatttgtttrtttctatgtttagctctgtcaaattttgttctgatacattaaggccatataattgggaacagaaatttagaactgttacaactcctaggtaattaaaacttttatcattataattttgtttcctgccttttgtttttttgtcttaaaatctactttatctgatattaatatggccacactgttttttttaaaattttttttatttccgtgggtttttgggga

SEQ ID NO: 876615 - DNA, 624 bp, Homo sapiens
ggtgtgctgtattcaagagacccaactcatgtgtgtgtctttacacacataggctcaaaataaagggatggaggaatacttaccaagcaaatggaaagcaaaaaaaaaaaaagcaggggttgcaatcctagtctctgataaaagagaccttaaaccaacaaagatcaaaagagacaaagaaggccattacataatggtagagggatcaatgcagcaagaagaggtaactatcctaaatatatatgcacccaatataggagcacccagattcataaagcaagttcttagagacctacaaagagacttagactcccrcacaatagtagtgggagactttaacatccctctgtcaatattagacagattaatgagacagaaaatcaacaaggttattcaggacttgaaatcagctccagaccaagcagacctaatagacatctacagaactctccaccacaaatcaacagagtgtacgttcttctcagcactacattgcacttattctaaagttgaccacataattggaagtaaaacactcctcagcaaatgcaaaaagaacagaaatcataacaaacagtctctcagacccctgtgcaatcaaattagaactcaggactaagaaac

SEQ ID NO: 876616 - DNA, 683 bp, Homo sapiens
tagtgattaggagaaagttcaaggagactgtaaggtgcaggtaatggtctataccttggcccaggtgtcggctacatggataggttaaccttgtaataatttatcaagttgcacacacaattttctgtatatgtttttttctttaataaaaaaataaaaatataaaaccacaactaaagtaacarcacaatcaaaccagtgccctctgtctgtggttcttatctctgactgaatattaaattcatctggggaatatataacaaacatccttgctccaatgttaataaacattaagtccacaactctcagaaattccgatttgatcaatctggtttggggcccagccatcagtatatttttaaaactcctcacgtgattctatcctttgcagccagagttgagagccaatgtgttatatcagcgttctcaaaccttaccatacatcagacttatctaaaggacctattaaaataccaatgattggccccccacttccggagtttctgagtaaatgggtctaggatagagcctgagagtttgcatttctaacacctcaggtaatgctgatgctactgatccacagaacacaggccacactttaagaaccatcgacttttacttactttcctaataaggttaaacctgtaacacctaatcctctcttcctcattctcccaatattc

SEQ ID NO: 876617 - DNA, 683 bp, Homo sapiens
tagtgattaggagaaagttcaaggagactgtaaggtgcaggtaatggtctataccttggcccaggtgtcggctacatggataggttaaccttgtaataatttatcaagttgcacacacaattttctgtatatgtttttttctttaataaaaaaataaaaatataaaaccacaactaaagtaacaacacaatcaaaccagtgccctctgtctgtggttcttatctctgactgaatattaaattcatctggggaayatataacaaacatccttgctccaatgttaataaacattaagtccacaactctcagaaattccgatttgatcaatctggtttggggcccagccatcagtatatttttaaaactcctcacgtgattctatcctttgcagccagagttgagagccaatgtgttatatcagcgttctcaaaccttaccatacatcagacttatctaaaggacctattaaaataccaatgattggccccccacttccggagtttctgagtaaatgggtctaggatagagcctgagagtttgcatttctaacacctcaggtaatgctgatgctactgatccacagaacacaggccacactttaagaaccatcgacttttacttactttcctaataaggttaaacctgtaacacctaatcctctcttcctcattctcccaatattc

SEQ ID NO: 876618 - DNA, 706 bp, Homo sapiens
aaactatttgacagtttcttagaaaggtcaacatacatttaccatgtgactcaggaattcctctcccaagtatcctttaaaagaaaacatatgtacattctcacttattaaaaaatagaatgaataagacctactctttgatagcacaatagggtgactatagtcaataataacgtaattgcatattttaaaataacttaaagaatgtaactgggttgtttgaaactcaaaggaaaaatgcttgaggggatggatactccattctctgtgatatgcttatttcacactgcaggactgtatcaaaacatctcacataccccataaatatatacacctactatgtacccacaaaaattccaaaaaataatttttaaaaatttatgaaaacactgaaaacaaaacttatttttaaagtacacatgggtttatagcagtattattaataataataataaygaaatgctgaaaacagcccaaattcagttacaaaaaaaacaaaaaaacaaaaaaaacaactactgttccatgccacaacatagaggaatctctaaaacattacactgaggggtgagcggcggcgggtggtggggggacctaacacaaaagagtgcctacttcataatcccattcatatgaaactgtaggaaagacaaatatggtctataatgatagaaagcagatcagtggttgcctaggactgggattg

SEQ ID NO: 876619 - DNA, 706 bp, Homo sapiens
aaactatttgacagtttcttagaaaggtcaacatacatttaccatgtgactcaggaattcctctcccaagtatcctttaaaagaaaacatatgtacattctcacttattaaaaaatagaatgaataagacctactctttgatagcacaatagggtgactatagtcaataataacgtaattgcatattttaaaataacttaaagaatgtaactgggttgtttgaaactcaaaggaaaaatgcttgaggggatggatactccattctctgtgatatgcttatttcacactgcaggactgtatcaaaacatctcacataccccataaatatatacacctactatgtacccacaaaaattccaaaaaataatttttaaaaatttatgaaaacactgaaaacaaaacttatttttaaagtacacatgggtttatagcagtattattaataataataataacgaaakgctgaaaacagcccaaattcagttacaaaaaaaacaaaaaaacaaaaaaaacaactactgttccatgccacaacatagaggaatctctaaaacattacactgaggggtgagcggcggcgggtggtggggggacctaacacaaaagagtgcctacttcataatcccattcatatgaaactgtaggaaagacaaatatggtctataatgatagaaagcagatcagtggttgcctaggactgggattg

SEQ ID NO: 876620 - DNA, 629 bp, Homo sapiens
ccgtgggcgtaggaccctccgagccaggtgtgggatatagtctcgtggtgcgccgttttttaagccggtctgaaaagcgcagtattcgggtgggagtgacccgattttctaggtgcgtccgtcacccctttctttgactcggaaagggaactccctgaccccttgcacttcccaggtgaggcaatgcctcgccctgcttcggctcgcacacggtgcgcacacccactggcccrcgcccactgtctggcactccctagtgagatgaacccggtacctcagatggaaatgcagaaatcacccgtcttctgcgtcgctcacgctgggagctgtagaccggagctgttcctattcggccatcttccattccacagatttcttttagaaaaacagtcaccagtggcagcacatttcagtgacacagaatgggtcacaaaatttgctcagtcgtatgacatatttaacctgctcaatgaactcagtctgtcacttcaagggagaatgacaactgtgttcaagttggcagataaagtggctgcattcaaaatcaaactggaattatgggggtgatgagttaacactgggatttttaacatgtttcgaatattagcagagattttgaaagagactaa

SEQ ID NO: 876621 - DNA, 593 bp, Homo sapiens
acttcatttcatgttaaaaactctcaaaaactaggaactgaagaagcatacctcaaaataataagagacatttatgacaaacccacagtcaatatcattctgaatgagcaaaagctggaagcattccccttgaaatctggcacaagacaaggatgccctctctcaccactcctgttcaacatagttttcaaagttccagytagggcaatcaggcaagataaagaaataaagcatattcaagtaggaaaagacaaattcaaattatcattttttgcagatgacatgatcctatatctagaaaactccatcatctcagcttaaaagattcttaagctaataagcaacttcagcgaagtgtcaggatacaaaatcaatgtgcaaaaatcagaagcattgctatacacaaacaatagagaagcagagagtcaaatcatgaatcaactcccattcacaattgctacaaagagaataaattagctatgaatacatctaacaaggaaagtgaaggaccacttcaaggagaactacaaaccactgtcaaggaaatcagagagaacacaaagaaatgaaaataatattccatagtcatggat

SEQ ID NO: 876622 - DNA, 593 bp, Homo sapiens
acttcatttcatgttaaaaactctcaaaaactaggaactgaagaagcatacctcaaaataataagagacatttatgacaaacccacagtcaatatcattctgaatgagcaaaagctggaagcattccccttgaaatctggcacaagacaaggatgccctctctcaccactcctgttcaacatagttttcaaagttccagctagggcaatcaggcaagataaagaaataaagcrtattcaagtaggaaaagacaaattcaaattatcattttttgcagatgacatgatcctatatctagaaaactccatcatctcagcttaaaagattcttaagctaataagcaacttcagcgaagtgtcaggatacaaaatcaatgtgcaaaaatcagaagcattgctatacacaaacaatagagaagcagagagtcaaatcatgaatcaactcccattcacaattgctacaaagagaataaattagctatgaatacatctaacaaggaaagtgaaggaccacttcaaggagaactacaaaccactgtcaaggaaatcagagagaacacaaagaaatgaaaataatattccatagtcatggat

SEQ ID NO: 876623 - DNA, 586 bp, Homo sapiens
acttcagcgaagtgtcaggatacaaaatcaatgtgcaaaaatcagaagcattgctatacacaaacaatagagaagcagagagtcaaatcatgaatcaactcccattcacaattgctacaaagagaataaattagctatgaatacatctaacaaggaaagtgaaggaccacttcaaggagaactacaaaccactgtcaaggaaatcagagagaacacaaagaaatgaaaataatattccatagtcatggataggaagaatagatatcatgaaatgacyataccacccgaagtaatttatagattcagtgctattcccattaaattacaattgacattcttcacagaattagaaaaaaaaactattttacaattcatatggaactacaaaggagttcatataatcaagacaatcctaaccaaaaagaacaaagctggaagcatcacactaccttacttcaaaatatactagaagactacagtaaccaaacagcatagtactggtacaaaaacagacacataaaccaatggaacagaatagaaaactcagaaataatactgcttatctgcaaccatctgatcttcaaca

SEQ ID NO: 876624 - DNA, 586 bp, Homo sapiens
acttcagcgaagtgtcaggatacaaaatcaatgtgcaaaaatcagaagcattgctatacacaaacaatagagaagcagagagtcaaatcatgaatcaactcccattcacaattgctacaaagagaataaattagctatgaatacatctaacaaggaaagtgaaggaccacttcaaggagaactacaaaccactgtcaaggaaatcagagagaacacaaagaaatgaaaataatattccatagtcatggataggaagaatagatatcatgaaatgaccataccacccraagtaatttatagattcagtgctattcccattaaattacaattgacattcttcacagaattagaaaaaaaaactattttacaattcatatggaactacaaaggagttcatataatcaagacaatcctaaccaaaaagaacaaagctggaagcatcacactaccttacttcaaaatatactagaagactacagtaaccaaacagcatagtactggtacaaaaacagacacataaaccaatggaacagaatagaaaactcagaaataatactgcttatctgcaaccatctgatcttcaaca

SEQ ID NO: 876625 - DNA, 602 bp, Homo sapiens
tcaattactagagctaaaccaggaggcatagaagcaagtaggaaattcagaatgctcagatgtttagaggttgacaagctaagagccaacagaggaaatgagagagaaagtggctggcaaagaataagaaagccagaagggcaagtggtgtcacagaaagccagacaagaaagtgcctcttaaaatagggaatggacatcagcctcagtgctgtgaaagggcaataaatgagatsgtatgagaaaaacacctattacacttccagacatgtagcaggtattcagtaaatgttacttcccttaactttctgttttctttctaacagtgtttagtggttaagagtgtaggcataggagctgatctgcctgagttcaaattcttcctctgccattccataactgtgtgaccttaggcaagtcatttaacttctcagtaccttagtttctatattttatttttattttttggggatggagtctccctctgtcacccaggttggagtgcaatggcaccatctcggctcactgcagcttcggctcactgaaccctcaactgggttcaagcaattctcatgccttagcctcctgagtaactgggattac

SEQ ID NO: 876626 - DNA, 589 bp, Homo sapiens
atatacatgtgtggaggtagtgagtatatggaaaatctcttctgcacaattttgctaaaaaactatattaaaacatgaagtttattttaaaaagtaaattctgctcataagtaaaatttctcaacctattaaaaaggaggatgtaaagcagaatttacagctgacttaaaaaaaattaaaagtatttggatgccctttatttgtttctcctgcctgattgccctgtccaggacttccaatactgtgtttaagaagagtggtgagacarggagtccttgtcttgtaccagttttcaagggaaatacttccagcttttgccttttcaatataatgtttgctgtggttttgtcatagatggcacttcttatttcgaggtatgttcattcaatacctaattaattgagaatttttaacatgaagggtgttgaattctattgaaagccttttctgcatctgttgagataaccatgtggtttttgtcttttgttctgtttacgtgatgaatcacatttattgatttatgtatgttgaatcaaccttgcatcccagggataaagcctacttggtcatgatggataagcttttagaa

SEQ ID NO: 876627 - DNA, 663 bp, Homo sapiens
acactacatcacaatgaaaagccttatttcagagccaaactgctgattgtagccttacctgtctgtgctgaattaggaaaggaaacaatagtggatggtaacaggaattttagcttggagatgtaggaacataaaagtcattaacatagatgtcttaaatactagggggttataagtgcttaaggtcaaggaaaaagagaataaagactaaaattaagtggtccaaagacgtggtagttacgtatactgttctargaatcttactatttaaaatacatgatccatgcaccatctctaagatattcactatattttgtgtagatgcagagaatgagttgtgttcctcattttgatacagactaacttgtactattcaacacagatggtaacaacaaaggaaaataaccaaaatattaaacttttaagacaataaaagtttaatcaatcatttaaatactatatcctttattctttctcatcaagatagccttgcagaagcatagaaaaaataagtagcgaaaaactattatgaaaagaaagtttattcacaacattgctttaataattgtatgttattagaatgtttgtatgttactaaaatgactcttcaatgataagaattgatgcctgaattctaaataattacaagtactatgaacctca

SEQ ID NO: 876628 - DNA, 681 bp, Homo sapiens
caatttaaaataataatatgtgttcacttttgtacttgcttttgttgtagtgggttatattttgtcctcttttttgttttaaataataaagttaatatttaatattaactttaataggtttaaatattaatgtatatcctaaaaaaattgtatattttacaaacattaaatccattatatatatttttaatcattatgctttaagttctggggtgcatgtgcagaatgtgcatgtttgttacattgctatacacctgccatggtggtttgctgcacccatcaacccatcatataaattagatatttctcctaatgttatccctcccctagccmcccaccccccgaaaagccccagtgtgtgctgttcccttccctatgtccatgggttctcattgttcaacacctacttatgagtgagaacatgctgtgttttgttttctgttcttgtgataatttgctgagaatgatggtttgcagcttgatccgtgtccccgcaaaggacatgaactcatcctttttattgctgcatagtaatccatggcatatatgtgccacgttttctttatccagtctattattgatggatatttgggttggttccaagtctttgttactgtgaatagtgctgcaataaatatatgtgtgcatgtgtctttatagtagaatgatttataatataca

SEQ ID NO: 876629 - DNA, 594 bp, Homo sapiens
acaatagaagttcctttcctaccatagaaacctggaagattataaagtaaatattgtctcttttcactgagtgcttatctgttttgtgattagctgttcccaactggagtattagctcatgagaggaagaatcatttctgtttcattgcaaagatgtccttggtgtgtggcactgttcctggcttataaggcgaatgcatttaatgcctgaccatttaatgcctgaatcaaatatgtggcagctcctaatttctggattggggagctgaatggacaacgtgacartccttcatacagagcctctctgagggagatcagggaaaccctggcatatgagtttatgaaactgaatgaagttgcccaagaaaaatgtataaaatgagaaaaaatgtaattttttagcatttactttatgtcaggcattgttctaggcattgagggaagagctgggaaatggaagaagacaaaagcccttgatctcctagagtttacatgggtgaggggggacattttgacattagacatgataaaagagtaaatcacatagacgatttagggtaaagtaaatgctgtggcagaagctgaaatttgaaa

SEQ ID NO: 876630 - DNA, 614 bp, Homo sapiens
actataaagaagccaggaaatgtcacaaaaatatgtcatttttgtatgctacttactttgaactgagggtactttgggggcagtagtagccagaagaagccttgtctgtccagagacaaatcctccaataaatactcaattgtcacccattctctccccaggggttttgttaaacaggagttttactctcatcacaggagagtaaaactagaagttggcatcacactcagataaactgatgcaaactatcatattgaagcagcctcgtcatctgrggtaacacccaggcttcaatatctcacagccatggagatcaaggatgtggacacacaaagggtgaagtttagagcagaaatttaatagatgaaagaaagagaatagctccctggtacagagaggggtcccagaaaaatgggttgctgattcacactttggatatagaggcttttataagaaaccaacagaggggctgggcatctcatttgtataaggtgtgcattactggtagttctgccccatcctcctagtgtgcatgcaggcccttaacttgagttattccatcttcctttgttctccttactgcaaatgtgtcaggggttggaattttccattgt

SEQ ID NO: 876631 - DNA, 671 bp, Homo sapiens
aatggtgatatcccctttttctttttttattgtgtctatttgattcttctctcttttattctttgttagtctaggtagcagtctatctattttgttaattttttcaaaaaaccagctcttgggtttactgatttttttggagggtttttttgtgtctccatctccttcaattctgctcttatcttagttatttcttgtcttctgatagcttttggattagtttgckcttgcatctctagctcttttaattgtgatgttagggtgttgatttgagatctttctagctttctagtgtgggcaattggtgctctaaatttccgtcctgacactgttttagctgtgtcctagggattctgatacattgtctctttgttattgttggtttcaaaaaagtcttgatttgtgccttaatttcattatttatccaggagtcattcaggagcgggttgttcgatttccatgtaattgtgtggttttgagtgagcttcttaaatagttctaatttgattgcactgtggtctgagagactgtgttatgattttacttcttttgcatttgctaaggagtgttttacgtccaactatgtggttgattttagaaaaagcgccatgtggcactgagaagaatgtgtattctgttgatttggagtggagggttctgtagatgtctat

SEQ ID NO: 876632 - DNA, 690 bp, Homo sapiens
aaggcaatcctaagcaaaaagaacaaagctggagtaatcacattgcctgacttcaaactgtactacaaggctacagtaaccaaaacatcctggtactggtgcaaaagcagacacgtagacaaatagaacagaatagagagcccggaaatagagccacacacctacaaccatctgatctttgacaaagctgacaaaagcaagaatggagaaaggattctctattcaataaatggtgctggggtaactggctagcyatacgcagaagattgaaactggaccccttccttataccatatacaaaatttaactcaagatggattaaagacttaaatgtaaaacctaaaactataacagccttccaaggcaacctaggaaatattaataccattttggacataggaactggcaacaatttcatgatgaaaatgccaaaagcaattgcaacaaaggcaaaaaattggactaatggaatctaattaaattaaacagcttctgcacagaaacaaacaaacaaacaaacaaattaacaacaacaaaaagacctatcaacaaagaggaaacctacagaatgagagaaaatatttggaaaatatacatcagacaaatatctaatatccagaatctacaaggaacttaaacaagtttataagaaaaaaaaaaccaaataatcccattaaaaagtgagcaaag

SEQ ID NO: 876633 - DNA, 581 bp, Homo sapiens
acttaacattcagaatcaatgaacaaacaggagaaacgttttactagagacagggctttagtgatgtggggtttagctttgattcctagcaatagttttagtctattctttccacttcctgtgaccagctgcatttctccaactcattatcgcataagatgtctcagaggtacctgagcctrggtgttctctcctggaaatgttacagtccaggatctttctggatgtcattattatttccttttaattttggcctctggccttgcttgataatgtgggaaccctaattttccttttccttttctcaggtctcttgctggacttgccacatgacacaaaaaccttgtctaaagagatctcagggctagcaggccttttccctgcctcattatctgtggattcatttagttgatgagacaggattttgattaatgtgtttttctactccagaactcactgctgcctgcaaaatcccttcccttttacctcatgggagtgttcatcagggatgtgggtgtttggagactttctcaccccactgccttccatcctgtggtccttctactgaggcactggtagac

SEQ ID NO: 876634 - DNA, 582 bp, Homo sapiens
gcataagaacaagcaaaatcccaaccttcatcaagcttctagcccaaggggcaatgttcacaattgttaagaataaaaagattcagaaatagtatgtgaagtatgatcctattttaacatatgtatggatatataaatgtacatatcataaawatgaggctgtgaatgcatagttatgtgtaaagagaaagtgagagctaaagcaataaatttggagagatagatacaaaagtattagcagagattctattttagtggtggaattatattttctcttttttatctatatgttccaaatttgggggcaataaacttgtgctttatgcataatgttaaaaagttgtgtataatgtatgcaattaagcaactaagtgctaaaagttagaatttaacagaaattgcaaagagcttttctactttccttattcccatctcctaaaacagccatcatatttctaaccccgaaggcctcttgatgttcaactctttctcctacatctgctaccaaccccattgtttgtggaccataaatcctttaatttgacaaaataaaatcttcagcttgagagaagtgctttcccc

SEQ ID NO: 876635 - DNA, 582 bp, Homo sapiens
gcataagaacaagcaaaatcccaaccttcatcaagcttctagcccaaggggcaatgttcacaattgttaagaataaaaagattcagaaatagtatgtgaagtatgatcctattttaacatatgtatggatatataaatgtacatatcataaaawtgaggctgtgaatgcatagttatgtgtaaagagaaagtgagagctaaagcaataaatttggagagatagatacaaaagtattagcagagattctattttagtggtggaattatattttctcttttttatctatatgttccaaatttgggggcaataaacttgtgctttatgcataatgttaaaaagttgtgtataatgtatgcaattaagcaactaagtgctaaaagttagaatttaacagaaattgcaaagagcttttctactttccttattcccatctcctaaaacagccatcatatttctaaccccgaaggcctcttgatgttcaactctttctcctacatctgctaccaaccccattgtttgtggaccataaatcctttaatttgacaaaataaaatcttcagcttgagagaagtgctttcccc

SEQ ID NO: 876636 - DNA, 591 bp, Homo sapiens
cctattttggatcttttctgtaagtagaatcttacaatatgtggtcttttgtgactggtttctttcactttccatagtgttttcaaggttcatccatgttgtaacatctatcagcacttcattcctttttggatgaataatattccattgtwtagatataccacgatttatccattcattagttgatggacatttgggttggttccacctatgaacattcatgtatgagtttttgcatgcatctctcttggacattgtgatggttaatattgagtgtcaacttgattgaattgaaggatgcaaattattgttcctgggtgtgtctgtgagggtgttgccaaaggagattaacatttgagtcggtgggctgggagagccatactcaccctcaatctgggtgggcaccatctaatcagctatcagcacagccaggataaaaggcagaagaacgtggaaagactagactgactttgtcttctggtctacatctttctcccatgctggatgtttcctgtcctcaaacatcggactccaagtccttcagctttgggattcttggacctttgaccacagactgaaggctgcactgtt

SEQ ID NO: 876637 - DNA, 646 bp, Homo sapiens
catttactcacaacttcttcacgtttatatgccttaaattattcctcctgctaaaggagtatctgtatacagactttggaaaactatgagtatttattaaatagcaaatatgaggactaggtatcataaaattatggaattaaaacaaagtgaattgtgcaggtatcaaatctaaatgctcatttatttcattttattaaaaacatagctgaacaggtgtatcatattgttcaagaaaccacagttagagtcaggcttggctgtattctttctagcatgccatccaatgccttccatttcaattttctttctctttctttctytttctttctttctttctttctttctttctttctttctttctttctttctttctttctttctttctctctctctcttccttccttccttctttctttctttcattctttctttctttttcttcttttttttttcttctgacggagtctaactctgtccctcaggctgcagtgcagtggcatgatctcagctcagtgcaacctctgcctcccaggttcaagcgattatcctgcctcagcctcccgaatagctggtattacaggtgcgtgccaccacacctggctaatttttgtattttctttaagtgcagatggggtttcgctat

SEQ ID NO: 876638 - DNA, 698 bp, Homo sapiens
acaaaagagatggtactagaaattatacagcataagtgctgaagtctaggcttatatccattgctcctatcaaggagtctctttaaacctagttgagaagagtgtgtgatggctggattccttcccttatgcaaatctactgggggatgaggggtttccaatgcagatttctgccaatttccattctgataggaagtagtattaaggagtaattaaaatccagcccttccagtttctagctttgtggctgctatggtctgaatgtttgtgaacctcccmcctttccaattcaaatgttgaaatcctaatccccaaggtgatactattaggaggtggggtctttggaggtgattacgtcctaagggtggaggcttcatgattgggatttgtgcctttataaaagggatcccagctagctcatcccttctaccaaatgaagacacagtgagaagacagccagctatgaaccaagaagcaggccctcaccacacactgaatctgccaggcacctcaataatagaatcctagattctagaactgggagaaataactatctgttgcttatgagccactcagcttgtggtattttgttacagcagctcaaacaaactaagacagtagtctggcaatttaattaacttctttatgctctcacttttttcaactgtaaaatagggatgatgacaatatgacctaag

SEQ ID NO: 876639 - DNA, 554 bp, Homo sapiens
tcagactgtatagccgctatgctccatctggttggctaaaagagaagagaccaaacaatccattgatacatatatatatatcatatatatatataataactctcacctcatatatatatatatatatatatatatatacgtcaccatatttttttagaaaaacaacaaaagacaaatttttaaaaggaagttttagccaatttatattatatatataaatatatatatacacacatatattktgtatatatatgtgtatatatatatatacacacatatatatatatggtgtgtgtgtgtgtgtgtgtgtgtttggattgttcatatgtgtcttagtctgttttccattcctataacagaatagcagtgggtaatttataaggaatttctttttgtacagttttggaggctagaaagtccaagagcacgcgtatcactatcatcttgtgaggactttcttgcttcataataacatggcagagggtatcacaggatgagaaggcaaggcaagttggccagggagagcttgctttcataataaagccactcacagg

SEQ ID NO: 876640 - DNA, 654 bp, Homo sapiens
gtaagcactagagagttaagtaattttcctactgccacataactagatcttctattctttactgtagcatattttattcttgtaaagaatgttatcccacaaaagcatacgtatagtctgtataaattcaaccccctttacrgagacataattttgtaagtgtttgatataaaatttatggataagagactagctgtctggatgcaacaagagttgatgtataaatcaacctcattaggaactgaaaagatgcaaattaaaatcaaagttcaatactattacagacatgaaaaattaaaatttgaaaattttgattattccatgagttggttaagatgtagactctctgcagctcttttacactacctgtatgcttataagagtataaattggattacccaattggcagactccactaaggctgaccatactaatctccatgtttataatagctttatttgtaaatgccccaagctggaaacaactcaaaaggagaataaataaataagttatgctgtatttaaacaatgacataatatagagaaatggcaatagactagcactaccttcaaaagcaaggatgactcacactaaagaaagaaccagacaccacaagagtagataaaatgggattcattcacaaaaaaaatttaa

SEQ ID NO: 876641 - DNA, 595 bp, Homo sapiens
gatttcctaataggcaattggttgaaagagttattatctaaagacctggaatcaatagaaaggagtgtctaagttaaggtaagaggatgtggagaccaaggttttcattatgcagatgaaacctccagaagttattatgcagatgagaactttagagttcttggccgggcccggtggctcacgcctgtaatcccagcactttgggaggccgaggtgggcggatcacaaggtcaggagatccagmccgtcccggctaacatggtgaaaccctgtctctactaaaaatacaaaaaaattagccgggcgtggtggcaggcacctgtggtcccagctactggggaggctgaggcaggagaatggcgtgaacccgggaggtggagcttgcagtgagcaggggaggctgaggcaggagaatggcgtgaacccgggaggtggagcttgcagtgagcagagatcgcgccactgcactccagcctgggcgacagagcgagactcccgtctcaaaaaaaaaaaaaaaaaaaaaaaaaaaaaaacacacacacaacaacaacaacaacaaaaaactttagagctcttatcagacctaaaaagtgcc

SEQ ID NO: 876642 - DNA, 674 bp, Homo sapiens
gtgtcccacataaaatcaacacctaatgtgttcaattataatagtggtaatgatagtaataataactgctgaggccaggagttcaagacaagcctggccaacatggcaaaaccccgtctctactaaaagtacaaaaattagccagatgcgggcgtggtggcgggcacctgtaatcccagctactcaggaggctgaggcaggagaatcgcttgaacccgggaggcagaggttgcagtgagccaagatcacaccactgcactccagcctgggtgacaagagcgagactctgtcaaaaaaaaaaaaaaaaaaaaaaaaactgattygatatggtcaaccagcctaattataaagatacatggtgagatgagagctgataggcttaatgagaccttaaaatgggtcatgaacttatttatttatgtaccaaacacttacagagcatgttcccaatgttagctgctaagaatacaggggcaaacaagacagacctgcccactgtttttaccattgcattagcagaagctgctatcatctcacctgaatcattgcaccctcctaacttgcttccctgcctccactttgccagtccccagaccccatctgtcttcaatacagtggtctttcaaaaacatagatcacgtccatctttatttaaaatatgatgatggctcctg

SEQ ID NO: 876643 - DNA, 627 bp, Homo sapiens
ggtaatcttatttccttattttgggtcagagaatcagagatttgttcttatgtgtggatgtctttatacatgctcctgatccaagggagaggaggtgttgagccctgtggctgtagttgagaagggcaattctgagagacaggactagctggatttcctaggccaactaagaatccctaagcctagctgggaaggtgaccacttccacctttaaacacggggcttgcaacttagctcacatccaaccaatcagatggtaaggagagctcactaaaatgctaattaggcaaraacagaaggtaaagaaatagacaatcatccattgcctgagagcacagcagggagaacaaggatcgggatataaacccatgcattcgagccagcaatggctaccctctttgagtcccctccctttgtatggaagctctgttttcactctatttcactatattaaatcttgcaactgcactcttctggtccgtgtttgctatggctcgagctgagctttcgctcaccgtccaccactgctgtttgccgcagtggcagacctgccgctgacttccatgcctccagatcaggcagggtgtctgctgtgctcctgatccagtgaggcacccattgctgctc

SEQ ID NO: 876644 - DNA, 604 bp, Homo sapiens
aaaattaacaccaattctacacaatttttccagaaaatagaaaaggagagaacacttcctaattaattttataaaatcaatatcctagttttgaaaaaagaaaattatatacacaatatctctcatgaatatagaagcaaaaatccttaacaaaatattagcaaatagaattcagtaatatgtattttttaatctatacaccatgaccaagtaggctttattctaggaatgcaaagatatttcagtaattgaaaatcaatcaatattaacataaccatagtatctggcaaaaaagaaaataccagaatgtatcataaataatttgtctggtctttgtccttggttcctgggagggatcttctacacccttcttatcaccagaaatttccctgatgataagaatgcctttgttattcattgmgggaccatacctgagtttatccaaatgaggtaactcagggtgagcattaaaaaaaatgctcactagaaagtttcaggttgggggctggccatgccagaaagacaaacatgtgtttagaggtttggaactttgagccatgtgacatcatcccaacctcccaatgttcaaggaggacagagaagc

SEQ ID NO: 876645 - DNA, 630 bp, Homo sapiens
tttgtagtaatcttaagcaagaagaaatcttgttagaaggatatggagatctccaggaatcaatgaaagactgcaggaaaattttgacgaaagggcaagaaccagggcagctacagagcaaaaggatgcctggctagtcaatggtgattttgccacgacactatcaccattactgtggctgtgaatggattctgactattttgttttctttgtgttacttatttataactcaaagrcttgagcaagaacatccagttggcctacctgaatctcttgcttgtgttgtgactgccagggtaggagcaaagacgatggctgggagggattggcttccttcatgttccctagcaggtaggatgttcatccatcaagactgccctggcaagggctcttctggctttccaatatccacacgcatacttcttcccacacttacagtgatgagacaaatattctcatttaatgtaatgcctgaaaagaaactcatcctctcccactgggacaagaattcctgactttcttcacttggagactaacccagtggctcactttttcacttcatttcctcaaaaaaggaaatgctacaattttctttccaacacaggtaactgcattttaaaatgatagcct

SEQ ID NO: 876646 - DNA, 618 bp, Homo sapiens
ctaaaattggcaccataacatcaaaattaaaggaactagagaaacaagagcaaacaaattcaaaagctaacagaaaacaagaaataactgagatatgatcagaactgaaggagatagagacatgaaaaactattcaaaaaatcaatgaattcaggagctggttttttgaacagattaacaaaatagatagatcactggccagactaataaagaagaaaagagagaagaatcaaacagacaaaataaaaaatgataaaggggatatcaccactgatcctacagaaatacaaactaccatcagataatactataaacaccttcatgcaaataaactagaaaatctagaagaaatggataaattactggacacatacaccctcccaagactaaacaaggaagaagtcaaatctctgaatagaccagtaatgagttctaaaattaaggcagtaattaatagcctamaaaccaaaaaaagcctggaccagacggattcacaaccaaattctaccagaggtacaaacaggagctggtaccatttcttctgaaactgttccaaacaatagaaaaaagggaggactcctccctaattcattttgtgaggctagcatcatcctgata

SEQ ID NO: 876647 - DNA, 652 bp, Homo sapiens
agtgcttttatagctttgggttttatatttaaatatttaacccatcttaagttaatttttgtataaggtgtaaggaaggggtacagtttcaattttattcatacggctagccagttctcccagcaccatttattaaatagggaatcctttccccattgcttgtttttgttggggttgttgaagatcaggtggttgtatatgtgtggtcttacttctgagttctctattatttcacattggtttatatatctgtttttgtaccaatatcatgccgttttggttactgtagccttgtagtatagtttgaagtctggtagcatgatgcctccagctttgttccttttgcttaggattttcttggctatatgaactcttttctggttccatatgaattttaaaatagctttttctaagaatttytaagaattctctgaagaatatcaatggtagtttaatgggaatagcattgaatctataaattattttgggtactatggccatttccatgatattgattcttctatccatgagcatggaatgcttttccatctgcttgtgtcctttctgatttccttgagcagtcatttgtagttcttcttgaggagggccttcaattcccttgttagctttattcctaggtattttattctct

SEQ ID NO: 876648 - DNA, 601 bp, Homo sapiens
ttggggttgttgaagatcaggtggttgtatatgtgtggtcttacttctgagttctctattatttcacattggtttatatatctgtttttgtaccaatatcatgccgttttggttactgtagccttgtagtatagtttgaagtctggtagcatgatgcctccagctttgttccttttgcttaggattttcttggctatatgaactcttttctggttccatatgaattttaaaatagctttttctaagaatttctaagaattctctgaagaatatcaatggtagtttaatgggaatagcattgaatctataaattattttgggtactatggccatttccatgatattgattcttctatccatgagcatggaatgcttttccatctgcttrtgtcctttctgatttccttgagcagtcatttgtagttcttcttgaggagggccttcaattcccttgttagctttattcctaggtattttattctctttgtagcaattgtgaatggaagttcattcatgatttggctctctgcttgcctgttgttggtgtatagaaatgcttgtgcttttgcacattgattttgtatcctgagactttgctggc

SEQ ID NO: 876649 - DNA, 553 bp, Homo sapiens
ggcattgcttatcagcttaagaagcttttggcctgagatgatggggttttctagatataggattatgtcatctgcaaacagagacagtttgacttcctctcttcctatttgaatacttttatttctttctgttgcccgattgccctggtgagaacttccaatattgtgttgaaaaggagtagtgagagagggcatacttgtcttgtgctgatttccaaggggaatgyttccaggttttgcccattcagtatgatattggctgtgggtttgtaataaatgactcattattttgaggtatgttcctttaatacctagtttattgagagtttttaacatgaagggatgttgaattttaccaaaggctttttgtgcatctattgagataatcatgtggtttttgtctttagatctgtttatgtgatgaattttttttattgatttgcatatgctgaaccagtcttgcatcccaatgatgaagccaacttgatgatgttggataagctttttgatgtactgctttatttgctttaccagtgttttattgagaattttt

SEQ ID NO: 876650 - DNA, 567 bp, Homo sapiens
cggacccacaataaagccacactttcggagaggttttggcagattgagtgcttgaagaaacacttgactctgactctcctcctgtcctcacctggccgaagcagttctgcaggggccaacctcccctaggggatggaacagagcagaaagtgaatscctcgggacaggggctgcaacagacaataaccagtaggggcttttgtatttgctgttgttccctcatggctgaatgtgcattttattcctttaacccaaataacaagcctcagaacattgcatggcaggctcttattcctttagtgttaatatccccacgtgaggggatccttttctgaccataagatctacagagcttccccgcccccccatccccatacaccaatatacctctctctctctctctctctttttgagatagagtctcactctgtcacccaaactggagtgcaatggtgcgatcttggctcactgcaacctccgcctcccaggttcaagccattcttgtgtctcagtctcctgagtaactggaattacaggcatgcaccaccacgcctagccaattttgta

SEQ ID NO: 876651 - DNA, 578 bp, Homo sapiens
ttctataagaatgctatttaataaggggtgggagacaggggcataaacaagatggtagaatagaaggctatactgtttatattccctgctggaatatcaaattttaacaagtatctgcacacagaaaagcaccatcactagaatacaaaatcacatgagcaataacagtacctgattttaactgcatatcactgaaagagtcattgaggagggcaggagagagagtcttgaatccttgaagtgacccttcccccatctctcccacagtagtcatgcagggcagagagataatcagtgtacttttgggatggagagcacagcaaatgggggtctttacattgaactcagtgctgccctatcatactagagaataaagctgttctgggctcargcagtgcccttacaaggagggagcattgggatcagccctagccagacaggaatcatccatcccagtggttggaacttgagtttccagcaagcctcaccgccacaggctgaattgctctggtctcttaggtaaactggaaaggcagtctaggacacaaggactacaatttctaggcaattccttgtgc

SEQ ID NO: 876652 - DNA, 578 bp, Homo sapiens
ttctataagaatgctatttaataaggggtgggagacaggggcataaacaagatggtagaatagaaggctatactgtttatattccctgctggaatatcaaattttaacaagtatctgcacacagaaaagcaccatcactagaatacaaaatcacatgagcaataacagtacctgattttaactgcatatcactgaaagagtcattgaggagggcaggagagagagtcttgaatccttgaagtgacccttcccccatctctcccacagtagtcatgcagggcagagagataatcagtgtacttttgggatggagagcacagcaaatgggggtctttacattgaactcagtgctgccctatcatactagagaataaagctgttctgggctcaggcagtgcccttacaaggagggagcattkggatcagccctagccagacaggaatcatccatcccagtggttggaacttgagtttccagcaagcctcaccgccacaggctgaattgctctggtctcttaggtaaactggaaaggcagtctaggacacaaggactacaatttctaggcaattccttgtgc

SEQ ID NO: 876653 - DNA, 563 bp, Homo sapiens
aattagaaagtagaattagaaaaactactttaaatttcacatggaaccaaaaaagtgcccgtatagccaagacaatcctaagcagaaagaacaaagctggaggcatcatgctacctgacttcaaactatactaaaaggctacagtaaccaaaatagcacagtactggtaccaaaacagatatgtagrccaatggaacagaacagaggcctcagaaataacaccacacacctacaaccatctgatctttgacaaacctgacaaaaaagagcaatggggaaaagattccctatttaataaatggtgttgggaatactggctagccatatgcagaaaactgaaactggatcccttccttacaccttatacaaaaattaactcaagatggattaaagacttaaacataagacctaaaattgtaaaaaccctagaagaaaacctaggcaataccattcaggatataggcatgggcaaagacttcttgactaaaacagcaaaagcaatggcaacaaaagccaaaattgacagatcggatctaattaaactaaagagcttctgcacagca

SEQ ID NO: 876654 - DNA, 678 bp, Homo sapiens
agccataacttttagggaagggtaggtctggagagaaggtgaagaccagcagaaatatactgtgaaattgccaaatatgtttggttgcagaaaacacagcctggctctttgtggctagatgtgacttccaacttctgaagacaggattgccaagagatgtgatctttccacatacagctcctgtccccatctctttatgtgtagagacctggatttggggtagtggggtagtaaaccatatatttccaaaagayggtgtgaagagtcgtttctcttcgtctgggatgtgattggcttttgttttttgttttttgtttttgagacggagtctcgctctgtcgctttgtcaccaggctggagtgcaatggcacaatctcagctcactgcaacctccgcctcctggcttcaagtgattctcctgcctcagcctcctgagtagctgggactataggcgcgcaccaccatgcccagctaatttttgtatttttagtagagatgggatttcaccatgttggccaggatggtcttgatctcttgacctcatgatccacccgccttggcctcccaaagtgctgggattacaggcttgagctactgcgcccggccagtgattggcttttaaattaatcacaaatgtttgataaaattctggtatgtgctaagtcccaggcttggttg

SEQ ID NO: 876655 - DNA, 678 bp, Homo sapiens
agccataacttttagggaagggtaggtctggagagaaggtgaagaccagcagaaatatactgtgaaattgccaaatatgtttggttgcagaaaacacagcctggctctttgtggctagatgtgacttccaacttctgaagacaggattgccaagagatgtgatctttccacatacagctcctgtccccatctctttatgtgtagagacctggatttggggtagtggggtagtaaaccatatatttccaaaagatggtgtgaagagtcrtttctcttcgtctgggatgtgattggcttttgttttttgttttttgtttttgagacggagtctcgctctgtcgctttgtcaccaggctggagtgcaatggcacaatctcagctcactgcaacctccgcctcctggcttcaagtgattctcctgcctcagcctcctgagtagctgggactataggcgcgcaccaccatgcccagctaatttttgtatttttagtagagatgggatttcaccatgttggccaggatggtcttgatctcttgacctcatgatccacccgccttggcctcccaaagtgctgggattacaggcttgagctactgcgcccggccagtgattggcttttaaattaatcacaaatgtttgataaaattctggtatgtgctaagtcccaggcttggttg

SEQ ID NO: 876656 - DNA, 581 bp, Homo sapiens
atctgtattccttttcacatatcattagcacaaacgtgaaatatcagaacaaaatttttcacacaacttcaaaatttttgagcaatactcaagggaaaaggtgtttatttagaacaatgaaaacaatgagacatttaacttccagcttaaataaagttgattgtgtgcataaaaatggtgaaaatattggactttcttggcaaaagaagaaaggggaagactttatattttctgacataatattcatcatttgtctttggtttgtgtattatgtgtatgattttgaaaaaatgcatcaaagatataactttctggtgtttgctttgatattatccttgcaaacagaaaagttggcacatgtttctgtataaaactggtcaaagttggcctaggaatgatcttacattgtactttcactttacatcataytgtaagagtttaataatagctaaggcatcagcattgatgtggacttactatacctattcaagaggtggtgtgaggtttaggagagttatgtgccctttatcataaaacaaatctatgaagcatttatataaaaacccagtatttctggtttc

SEQ ID NO: 876657 - DNA, 674 bp, Homo sapiens
ctgtattcctgcctgaatagaactaagagcagtcgctcaaggcgctgctcgaacagtcaccagggcaactacttttcacccagtgtcctccagaaaagaaagatctggagggtcgttttcttcaaaatagtaatgagggtgtgcagaaggatagggatgaacctctccctccttttctgctttagctttaggtgacaaataaacctggtctgtaacctctactgttactttgttatactctccttcctcctcatcatcagtgtgaaaaagttccaaggtagaacgaaccacagcccacacttgtcctattgctaccctgatgcttccgagctccccttcttactcaccactgggattgctttaagagtactcgggtgtcctccagctagttccacattctccaatcgttgctccagcgatcctttgacctgtatttgagcccccatkaatgggcaccacttgctgagaccaggtcggttggagagaccctaacccagcagcactagaggaattaaagacacacacacagaaatatagaggtgtgaagtgggaaatcgggggggggggcgggtcttacagccttcagagcagagccctgaacagagatttacccacgtatttattaacagcaagccagtcattagcattgtttctatagatattagattaactaa

SEQ ID NO: 876658 - DNA, 504 bp, Homo sapiens
aaacgatctgcctcttgtttttcctttttttttttttttttggtagtttatttaaaaggcaaacaaatttttcattattttttaatattacctgaacatcttctttaaagagagaaagccaaatgtcacccacattttcataaaaccttatagacaaacctattattctttcttttttttttttcagatggattttccctcttgttgcccaggctggagtgcaatggtgtgatctcggttcactgcaaccccctgcctcccgggttcaagcrattctcctgccccagcctcctgagtagctgggattagaggcatgtgccaccatgcccagctaattttgtgtttttagtagagacggggtttttccttgtaggtcaggctggccctgaactcctgacctcaggtgatccacctgcctcagcctccccaagtgttgggattacaggcatgagccactgcacctggcctttttttttaaagattgcgtcttgctctgtcaccctc

SEQ ID NO: 876659 - DNA, 676 bp, Homo sapiens
tgagagatgcctgtggacaaccatggaatagcgtcagttactatgtgtttatgagcattgtcaggctcccatgtttctagggaaaatagtggcacaaaaattatgctcctgctcttggagaatgaaaatcacataaactgtctcctataaatcatattttgctcgtctaagtgcatcagacgagagagaaggagagggggctttccactgccagaagctttgatcattttgatcaaacacagaccacctatcagccttccaaatgccaccatgcgtcttacacattttcaatattgtgtcataatagctaccagtcattgtagttgagataaaaaagggatygtaattaaacatatgattggatccagacattttaatcacgccatctatctatttttcagagcaggcctgctgttttttcagcagtcccctggaatcgccctaggatgacaatttgcatgctaactgaattcgtgtaacatgcagattcatgaggacatctgttgctgattgttttggtcctctgcttttcagactcaaatatgaaaatgcagaaagtaaaaggcaaattatggagcctggggcaagaaagaagactgattgtttgatttttctttctctcccactctctttctagtggagactattacagaaactaaaaagggcccccactttg

SEQ ID NO: 876660 - DNA, 696 bp, Homo sapiens
aaggatattagcctgaagttttctttatttgttgtgtttctgccaggttttggcacagaatgatgctggccttgtagaatgaattagggaggattccctcctcctctatgttttttagaatagtttcagtaggaatggtactagctcttctttatatatctggtagaatttggatatgaatccgtctggtcctgagctgcttctggttgataggctttttattactgattcaattttggaacttgttattggtctgttcagggattcagtttcttcctggttcaatcttgggaggttgtacgtttctaggaatttatccatttcttctaggctttctagtttttgtgaatagaattgttcatagtagtctctgaaggtttttgtatttttgtagggtcagtggtaatgtcacctttgtcatttctgattgtgtttatttgattctattctcttttytctttattagtctagttagtggctttcgatcttacttattctttcaaaatacaaactcctggattcattgctcttttgtatgacttttcacatctccatttccttcagttcagctctgattgtggttatttctggtcttctgctagctttggggttggtttgctcttgtctctctatttcttctaggtgtgatgttaggttgttaatttgagatctttctaactttttggtgtgggcgtt

SEQ ID NO: 876661 - DNA, 605 bp, Homo sapiens
atggcaggcaagagagcgtgtacaggggaactcccctttatagaaccatcaaatctcatgagacttattcactatcacaagaacagcatggaaaagacccacccccatgattcaattacctcccactggatccctcccatgacatgtagaaataatgggagctacgattcaagatgacatttgtgtggggacacagccaaaccataccattccacccctggcccctcccaaatctcatgtcctcatatttcaaaaccagtcatgtcttcctaacagttgtccaaagtcttaactcatkctagcattaactcaaaagtccaagtccagtgtctcatctgagacaaagcaagtcccttctgcctatgagctggtaaaatcaaacacaagttagttccttctaagatacaaatgggggtacaggcattgggtaaatatactcattctaagtgggagaaattggccaaagcaaagaggctacaggccccatgcaagtccgaaatccaatagcacagtcattaaaccttaaagttccaaaatgatctcctttgaccccatgtctcacatccaggtcatgctgatgcaagaggtgggctcccacagccttg

SEQ ID NO: 876662 - DNA, 584 bp, Homo sapiens
tacaaaatatgtcactcaagtgacatattaggtaacaaatagttggccttccacttttaaaaaataagaaaatgcagctccgatgcttacaagatacgaataaatcaaacatcaagaacctgtattacaggatggtcatggtggctcacgcctgtaatcctagcactttgggaggccaaggtgggcggatcacctgaggtcaaaagtttgagaccagcctggccaacatggtgaaaccccatctctactaaaaatacaaaaattagctgggcatggtggtgcatgtctgtaatcccagctacctgggaggctaaggcggtagaatcgctggaaccygggaggtggaggctgcagtgagccaagatcacaccagtgaactccagcctaggcaacagagcaagactccatctcaaaaaaaaaaaaaaaaaaaaagtccgtataatctgtatcatataaaccccaactatatgttcaaatagtgtgacaaggatatgtatcttattatttatttattatttattattgatactttatattccacactaattcgtcttttgctttatctgatcatctctaggcctgca

SEQ ID NO: 876663 - DNA, 628 bp, Homo sapiens
gctgaggcaggagaattgcttgaccctgggaggcagaggctgcagtgagctgagatcatgccactgtactccagcctgggcaaaagagtgagactgtctcaaaaaaaaaaaaaaaaaaaaaaaaaaaaaaaagggcaatgttgtcaaatacggcccarattttgaaataaactactgactttcatttcatggtttgggggggtaaaggctgaagcagggccaacatgtgggttggaaactctactgatattagcagtgataaaatagccagaaaaaaaaaaaacaacatattgccaaattacaccctgaaaacatatctcgtatctagcttactaccttggcggaatgaggcctggaaatgacctatctggaaccgcaaaacaaatcttgctaaagggaagagctgtgctaatacacattgccaaatgttcaaaacgtcactgcatgggtgtgtctcttctgacgtatacctgctcctgctgacacatccaagaacagccctatgcctgaaatatttgtgccatctgattctccccagttagatgccccttctacccaaagtcatctgcatggagtctggacctgccattttcctctccccaacaagtatggatattgaatttcttat

SEQ ID NO: 876664 - DNA, 626 bp, Homo sapiens
aggtgacctcagccgaggaagattttaataatcaagtgaataggataacctgttctgtggacaccactcaccaccagccacctgtcattgcctaatgggcccatgaacaaggtggccatggtggcagggatgaaagttatgcatgggctcagcaacatgaatttcccctcaccaaggctgacctagctatggccactgctgagttcccaatttrccagcagcagagaccaacactgagcccttgatatggcacaattcctcggggtgaacagccagctacttggtggcaggttgattatattggacctcttccatcatgaaaatggcagaggtttgtctttactggaatagacccttactctggatacaggtttgcctatcatgcatgcaatacttctgcaaggacttccatctgtggactcatggaatgctttatccaccgtcatggtattccacacagcattgcctctgaccaaggcagtctatggttaaagaagtgtggcagtgggctcatgctcatggaattcactggtcttaccatgttccccatcatcctgaagcagctggattgatagaatggtggaatggccttttgaagtcacaattacaatgccatctaggtgaca

SEQ ID NO: 876665 - DNA, 622 bp, Homo sapiens
aagcagaaagtagaatggtggttaccagaggctgagggtggggtggggtaagagcatgaggggacattgaccaaagggtataaagttctcattaggcagaaggaataaatttgtaagttattgcacagcaaggtgaacacagtcaataataacatatgattcaaaattgctaagagaatagattttaaatgttctcaccataaaaatataagtatgtgagatgatgratatagtaattagctttatttaattattctacagtgtatacatataccaaagcatcacattgtaccccataaatatatacaattattgtttgtcatatcaaaaataaaaattttaaaaagcaaatggagatttatactcctggcagcatggagtagatataattttcctattccttctgccaagtaccaataaaatccccaagcattacatataaacaaaatcagaagaaaactctaaaagttggaaagaagacaaacccgtgggatttgggggccagaggaattagttccttgttttattttgcctgatgtatcccagagatggagctgagacagccagcaacctggaaatgccaatgggtacagaccaaaagaagccccaacaaaagtctgat

SEQ ID NO: 876666 - DNA, 636 bp, Homo sapiens
ttatattctacatggggagataaaagtataagtaaattactttttaatgcagttaaatatattttataatagaaatgtacatggagaatgcttggggaaccctgaggagaaaagaaaagtgggcggatgggaggaactaacaattaatgagtgccattccatacctggtccttcccmtatgttacatatggcagaaatactgaaagtggagaatatacagttagtactttataataaataacttttaaaaatatgctcatattaggtattttagttgcacttttatagatgaggtgcaactaaagattgaagctcagagcagataaataactaaataatagtcataagaatgcgtgtcaggcacttcacatacattattacatttaattcttataatcctgtaagaaaagaattactctgctcattttgaagattagaaagaaagcttatggaggttaagtaacttgctaaatatttcacatagctggtagctggaagaagtgagatttgaacacaggattctcttatgctaatccccaaccctttccatgaattgttacagcaggaggggaaagaggaggctgggggtccttcacacacaaatgctctgtaagctggcctttgatatttcagtaa

SEQ ID NO: 876667 - DNA, 642 bp, Homo sapiens
ttttttagatggagtcttgctcttgtcacccaggctggagtgcaatggcgtggtcttggctcactgcaacctccacctcccaggttcaagttattctcctgcctcagcctccccaagtagctgggattacaggcgcctgccatcacacccagctaatttttgtatttttagtagagacgggctttcaccattgttggccaagctggtcctgacctcaggtgatctgcccgcctcgcccttccaaagtgctgggattacagatgtgagccactatgcccggctcacagggatgcatctttaggccatggcctgaggtttcttcaccacttctgcttttcttcttcccattagcaaarccactcaaacttgcaggaagtcattgggtaagctgcctgtatatttagatcaccaggtatatggaattcagctgagcaaaccatgcagtgacatgcacaggcacctatgtgggagagtagaactagaatttactggggggaaaatatccacgccttttagattttgaatacatgagggactcaaaatacattaccatgttgaacaccaaagtgaaaaaagatctatttgcttgttatcttctgtagtgctttttcactgctcttaaaagctcatacctaggtccac

SEQ ID NO: 876668 - DNA, 579 bp, Homo sapiens
aattcaagtagtgatacttttgtgcataataaaaggatctttatatgccatctttggtggccctattgtccaaaccaaaaattaatttttcgatacaagatctcatatcagagcagaatatttagattgtaggacatggctatggcagagtcaggggtggcgttgaatgaataataattacacaaataacttycctaagtctcaaatgagaccacggttaatctgagaaagttaggagagggctgtgtccagtcgctttcccatatttgtgtgtgtgtgtgtgtttatgtgtgtgtgtgcgtgtgtgtgtgtgatcataagagtggctgcagcaaactgcttctttctaggataaggtttgcctagaatgatcctgtcacatttcttcttccttgagaacagagtacaaaggtggtccttgtaggtgcctactagaagttaaagcaaaatttgtatgcagcaatattcttagtgtattataaaatgttgactcagaaagattgtctctctaatgttaaacatgcttttttcccagtgagtgcatgatataaaatattccaaataaaacagcaaagttgg

SEQ ID NO: 876669 - DNA, 573 bp, Homo sapiens
atcactgggctagtatcctaggtaatgttactcttctgttgccttggccctgcatacattatgtattgtgacacatcactggggccagcacctacgtgaagtgaccctcccgcatgggcttagcccacaagggtatgatgacatatcttttcatttttcactcaggtgatgtgactctccatttatgcctgggccttgacaaaatagggattgtgacatatctctggacccagcacctaggtaatgtgacttacctctattgccagggcatggcatattgtgagtattgtgatatatctctgggcccaacacctaggggatgagaggcttctgcctgtgccttgcccacaggaggyttgatggcatgtctctgtcttcattacctagaaaggtgtgactctcctcttttatctgcattcttcccacagagaagattgtgacatatcactgggcccagcaattagaaggtgtttctctcccacctgagcctttctctcaggaaaattctgacatatccttggactcagcacccaggtgatgggtctttgccacctatggcctgcctacatagac

SEQ ID NO: 876670 - DNA, 594 bp, Homo sapiens
aagttaaaagatgtttaatgacatattgagtggactttccgggaagggcgtgtgcactaattagacctgttgaaggaggggacatgcctgtaagctggcaatctgggcattgcaggataatttgtttagccagcctctgggtaagttgaaattgtttagataagtttttctaattttggtggaagaattgatgtgatttgctggcttggttaagcagtgatgttataacaggaaggtctgcttgataattgccataagttaatgggcaaggcagtgagctgtgrgatcgaatgtgtgcccataaaaataggatgtgtacattgatctagcaattgctgaagtcagagaaaaagagcacacagggcagactttagagtggacttaattaaggttgtctcaagattctgcaataagtaaacagagtaagcagagtcactcacaatattgatgagctgagtggaaaaagtttccaaggccaatatcagggccccaatatcagctctctgagtgaaagtaaacccagattgagtgagtgaattttatggtctccaccacactgccacttttccatgtttacctgaaccgtcagtaaac

SEQ ID NO: 876671 - DNA, 594 bp, Homo sapiens
aagttaaaagatgtttaatgacatattgagtggactttccgggaagggcgtgtgcactaattagacctgttgaaggaggggacatgcctgtaagctggcaatctgggcattgcaggataatttgtttagccagcctctgggtaagttgaaattgtttagataagtttttctaattttggtggaagaattgatgtgatttgctggcttggttaagcagtgatgttataacaggaaggtctgcttgataattgccataagttaatgggcaaggcagtgagctgtgggatcgaatgtgtgcccataaaaataggatgtgtacattgatctagcaattgctgaagtcagagaaaaagagcacacagggcagactttagagtggacttaattamggttgtctcaagattctgcaataagtaaacagagtaagcagagtcactcacaatattgatgagctgagtggaaaaagtttccaaggccaatatcagggccccaatatcagctctctgagtgaaagtaaacccagattgagtgagtgaattttatggtctccaccacactgccacttttccatgtttacctgaaccgtcagtaaac

SEQ ID NO: 876672 - DNA, 596 bp, Homo sapiens
atcttatgcattgctaagggagattaaaatagagtaatccaggaaaaatgctctgcatttcatgtgtccagtacatgctagcaatttctattaatgttggtctggttaaatctggaatgatcactatcattatcctgtttgaacacctctgagtgaatcactgaaatcaaattttggatctgaaaagttgaccaagcacctgaatcttgagtgaccccattaaagttcagccgtccctgccttaagcagacayttcttttttataactgttaacagcaataccaacattaagattgattatgtatgtctaggaataaatgataactttttaaacacatttgtgtataaaataaaatattgaatgttatagaactatgttagcctgttaggaatgctataacaaaataccttagattgggtaatttataaacaacagaaatatattgctcacagttatggaggctaggaaattcaaaatcaaggtaccatcagatttggtgtctgctgagggctttttctctgcctcatgggtggcaccttctagctatattctcacatagtggacgggacaaggcagcgtccttcaacccctttta

SEQ ID NO: 876673 - DNA, 619 bp, Homo sapiens
agcccaaattctccacttcatacatgacccccatcagtactggcttgatgacactgacaccatagacttgcctactttcactgaatcttcaactcgcctctaattccactcagagagtagtcctgaaaccaccagctcaattgtccccagtgacctctaactgccaaaggatactcctcaagggcttgccttgatttccttgtaggactttacactatggtcttcccttctttttaaaaattattttcttctttggctttccctacgccttccagcaacccaaatctctcttgactctcgctttttttttttttttttttttttttagagtcaragtcttgctctgtcatccagcttgtagtgcagtggcatgatcatagctcactgcaacctcaacccctaggctgcagtgattttcctgccctggcttcccaagtagctgaaactacaggtgtataccaccatgcccagctaattttgtgtttttgtttttgttttgtttttttgtttgttagtttgttttttatgcccagctaatttttaaaaaaattttgtagagatggaattgtgctatgttgcccaggctggtcttgagctcctggcctcaaactatcctcct

SEQ ID NO: 876674 - DNA, 468 bp, Homo sapiens
gggaaggtttccttaatttttccctcaaatatgttttccaaacttttagatttctcttcttcctggggaacaccaattattcttagttttggatgtttaacatagtctcaaacttcttggaggctttgttcattaaaaaaatttttgtctttgatggactgggtttattggaaagccttgtcttcaagctctggcrttctttcttctgcttgttcgattctattgctgagacttttcagtgcattttgcatttctctaagtgtgtccttgatttccagaagttgtgactgtttttcaattatgctatctatttcactgaagaattttcttttcatatcctgtatcatgtttttgatttctttaagttggacttcacctttctctggtgttcttgattaacttagtaatcaaccttctgaattctttttctggcaatttggagattttgtctcgatttggatctgctat

SEQ ID NO: 876675 - DNA, 621 bp, Homo sapiens
accccaggagagtctgagttcagacccacctaaccctgccccgacctgatggtttttctctacatgctcttctagctgaagacaaaagacataaactcaggagctctatggcccagcccatcacctaaggaacctgaatacttatcctggccaacataaggcaagcttacatcccccttctactaccacaactggtgctctcttgaaagtgccacctcctgggccaaccaactcaagcaactgataacagaacaatcctgctgcaaggagggagaaaacaaccgcctgcattccattgcattgtatttttagaggagatagtgtttcaccatgttggcaaggctggtctagaactcctgccctcaagtgatccacctgcctcggccacccaaagtgatgggattasaggcgtgagccaccgtgccaggctatcattctaatcataagtgagggataagattttaagaggtaaaagggtagggtgattggcaatactacaggctgaggtaccagtgggaatgcagaaatgggacttcataattttataatttatagttgatttgtaatcagagaaaatcagataactggagcagggaagagggcaccattagtcagcaccaa

SEQ ID NO: 876676 - DNA, 621 bp, Homo sapiens
accccaggagagtctgagttcagacccacctaaccctgccccgacctgatggtttttctctacatgctcttctagctgaagacaaaagacataaactcaggagctctatggcccagcccatcacctaaggaacctgaatacttatcctggccaacataaggcaagcttacatcccccttctactaccacaactggtgctctcttgaaagtgccacctcctgggccaaccaactcaagcaactgataacagaacaatcctgctgcaaggagggagaaaacaaccgcctgcattccattgcattgtatttttagaggagatagtgtttcaccatgttggcaaggctggtctagaactcctgccctcaagtgatccacctgcctcggccacccaaagtgatgggattagaggygtgagccaccgtgccaggctatcattctaatcataagtgagggataagattttaagaggtaaaagggtagggtgattggcaatactacaggctgaggtaccagtgggaatgcagaaatgggacttcataattttataatttatagttgatttgtaatcagagaaaatcagataactggagcagggaagagggcaccattagtcagcaccaa

SEQ ID NO: 876677 - DNA, 651 bp, Homo sapiens
tgaagtgtaaattcttgggctctgctctagatctatggaatcagaaactctgggagtggggtcagcactgtgggttgtaactaaccctccaggggcatctgcggtgcttaaagttgatatccatcacgttctactataataccatgtgttagggcagggcttctcaaactttaatatgcatgcaaatcacccgaaggacttgttgaaatacagctctgattcagtatgtctggggcagggcctgaaaatctgcatttctaaccagctctcagttctgctggtagtgctggtttgtggactacacctggagaagtaaggccctagactgactgtaagcacctggaagccaggttggcttttttccctgctgtactcctgtttagaagactagctgacccatattttatgttggatgaatacaccacgagtcaggatgtctgcatatctgaygtatggactgcagaattggtgtgaatatattaatattgctaacttgaaatgcatctgcccaatctgactgtcaaaattactaatcacaatatgatcaatcattgatactcatgaactaccattgcccattgatgtgacagacttttcatcgttctaatcttttgagtgaatatggcactttggatttgccaaagagaagtg

SEQ ID NO: 876678 - DNA, 547 bp, Homo sapiens
ggctggcttcttcaggtctctctgagggtgcatgggaggaaggaagcatgtggcttttctctcattgatgctggctgcatgtggcttttcctttccctattaaagtctgccagtggtgttggaatttatcttgaatttttgtggctaacaaatggacacctgtattgggccctccttgcacagtactgctgaccacaaaggaatgaactctgcttagtaccacttacggctttttcaagacatcagaggggttaatggctacytgaaaaaagttgctaggagagccagtggtagattgaccggggcatctgaatatcccaaaaccagagagcagatagcctgaagtgagaagttttaagtagctgggcagagttgaccatccactgtgggcaagagcagaattgtcttcagtagccctgagtgcttcctcagcatggccaagtcaacaagctaaaaagcatgggatggtggagcccctatccttgatgaaggaactgtaccccagctcagctccccagggaccatgggcttcctctccatgataggt

SEQ ID NO: 876679 - DNA, 547 bp, Homo sapiens
ggctggcttcttcaggtctctctgagggtgcatgggaggaaggaagcatgtggcttttctctcattgatgctggctgcatgtggcttttcctttccctattaaagtctgccagtggtgttggaatttatcttgaatttttgtggctaacaaatggacacctgtattgggccctccttgcacagtactgctgaccacaaaggaatgaactctgcttagtaccacttacggctttttcaagacatcagaggggttaatggctacctgaaaaaagttgctaggagagccagtggtagattgaccggggcatctgaatatcccaaaaccagagagcagatagcytgaagtgagaagttttaagtagctgggcagagttgaccatccactgtgggcaagagcagaattgtcttcagtagccctgagtgcttcctcagcatggccaagtcaacaagctaaaaagcatgggatggtggagcccctatccttgatgaaggaactgtaccccagctcagctccccagggaccatgggcttcctctccatgataggt

SEQ ID NO: 876680 - DNA, 602 bp, Homo sapiens
aaaaagatggattttgtaataacatcataaaatcctgtgtacccatcacccacctccagcagtaaacactttgccaatctcctttctttcttttttttttttttttttcttgagacgagtctgctctgtcacccaggctggagtgcagtggcgcgatctcggctcactgcaagctccgcctcccaggttcaagcaattctcctgcctcagcctcccgagtagctgggactacaggcgcccgccaccaygcccagctaatttttcgtatttttctttttttttagtagagacagggtttcagtgtgttagccaggatggtctgagtctcctgacctcatgatctgcccaccttggcctcccaaagtgctggaattaaaggtgtgagtcaccgcgcccggctgccaatctcctttaaaatgtcaccccatcatcacttgtttttaatcaaaactacaattgagattaatcagtgggtttaagtgtgtcagctcttgtaggcagaattatatagatgcccactcaagattcccaacccctgattattcaaacaataatctaggtagtgctaaaaagggactttgtggatgcagttacaataggga

SEQ ID NO: 876681 - DNA, 674 bp, Homo sapiens
ttattccacatgtataaaaaacataagtctacacaaaaatgtgcacgtgggatgtttatagaagctttattcataattgccacacttagaggctaccaagatgttagccagtaggttaatgaataagtaaataatgatacattcagataatggaatattattcagtgytaaaaaagaaacaagttatcaagtcatgaaaagacatggaggaatcttaagtgcatattactaggtgaaagaagtgaatctgaaagtgctacatgctgcaaaatttcaactaaatgacattttagaaaagataaaactgtggaaacagtaaaggatccatggctgcctgccaagagttagtagggagagaggatgaagaggcacacaggtactttagggaagtgatattataatattctttatgatactataattgtggatacatgttatagacttgcaaaaacccatagaatgcacaacaggaagaatgaaccctaatgtaaacaatggactttgggtgacaattatgtgtcactgcaagttcatcaattttaacaaaagtaccaccctggcctatctgaatctaaggatgtctcctgctgcttttgaaactgttaatgtcaggtactcattactatagttagtaaagaaagacagtttcaaaatgcagtgtagctctcatatga

SEQ ID NO: 876682 - DNA, 574 bp, Homo sapiens
aattttgctgatattattgtttacctggaaagaaaagtatattttactgagcaactatgaaaaatagtaagaaaatttagtcagttagctcagtataaaattaaaagacagaaatcattttcctttatgtatacaaataacctctattatatagaagatcatggtggaaaaacacataatattcaggaataatactgatagttaattttcaggatctatatttagagactatcaaaatacttctgaggtaatcaaaacaataccaggtacttaaacaggcagattcaacttcataaagatgttamccttaaatatatctataaataaaataccaaaagaaaatctgagagaactgaaaaacctaatgctaacattaatatagaaaacaaaatcagaaagaataactaggatgatcatgaaaacgaagagcaatttggtgtgggatgtggagattaaaagaagaggtagacttgctgttattaaaaaataaagtaaagctacaataattaaatcagtgtgttattggcacatgaataaacagtcataaaattggaacagcctgggtagtacagaa

SEQ ID NO: 876683 - DNA, 533 bp, Homo sapiens; identical to SEQ ID NO: 874079

SEQ ID NO: 876684 - DNA, 649 bp, Homo sapiens
atatttggacctctttgaggccttcgttggaaaggggaaattctttacaaataaactagacagaagaattctcagaaattactttgtgatgtgttcattcaactcacagatttgagccttccttttgatagagcagttttgaaaccctctttttatagaatttccaagtgaatatttggagcgcctggaggcctgcggcataaaaagaaatatcatcatagaaaaactagaaagaatcattctcagaaactactttgtgatgtgtgagtttaactcacagagtttaacatttgttttgatagaccagttttgaaacgctctttttgtagaatttgctggtgtgtttttagaggactttgaggcctaaggtagaaaaggaaatttcttcacagaaaaactagacggaatcattctcagaaactactttgtaatgtgtgctttcagctcacaragtttaacttttcttttgataaaacagctttgaaacactgtgtttgtattctctgcaagtggatatttggagagctttgaggccttctttggaaacgggaatatcttcacataaaaattagacagaagtattctcagaaacttctttgggatgtctgcattcaactcacagagttgaaccttcctttttatagagctg

SEQ ID NO: 876685 - DNA, 612 bp, Homo sapiens
atggtagaaaaggaaatatcttcatagaaaaactacacagaatcattctcggaaactactttgtgatgtttgcattcaactcacagagttgagcattccttttgatagagcagttttataacactccttttgtagcatctgtatgtggatatgtggacctytttgaggacttctttggaaacgggaatttcttctataaaaacgagacagaggacttctcagaaacttctttgtgatgtgtgcattgaactcagggtgatgaaccttcctttcgatacacgagttttgaaacactctttttgtacaatttccaagtggaaatttagagcgatttgtggcctatggtagaaaatgaaatatcttcatataaaaactagagagaataattctcagtaactacttcgtgatgtgtgcattcaactcacagagtttaacatttcttttgatagagcagttttgaaacactctttttgtagaatttgcaagtggatatttagagcactttgaggcctatggcataaaaggaaatatcttcacataaaagctagacagaagcattctcagaaactactttttgatgtttgattaaactcacagagttgaacattgctc

SEQ ID NO: 876686 - DNA, 612 bp, Homo sapiens
atggtagaaaaggaaatatcttcatagaaaaactacacagaatcattctcggaaactactttgtgatgtttgcattcaactcacagagttgagcattccttttgatagagcagttttataacactccttttgtagcatctgtatgtggatatgtggacctttttgaggacttctttggaaacgggaatttcttctataaaaacgagacagaggacttctcagaaacttctttgtgatgtgtgcattgaactcagggtgatgaaccttcctttcgatacacgagttttgaaacactctttttgtacaatttccaagtggaaatttagagcgatttgtggcytatggtagaaaatgaaatatcttcatataaaaactagagagaataattctcagtaactacttcgtgatgtgtgcattcaactcacagagtttaacatttcttttgatagagcagttttgaaacactctttttgtagaatttgcaagtggatatttagagcactttgaggcctatggcataaaaggaaatatcttcacataaaagctagacagaagcattctcagaaactactttttgatgtttgattaaactcacagagttgaacattgctc

SEQ ID NO: 876687 - DNA, 612 bp, Homo sapiens
atggtagaaaaggaaatatcttcatagaaaaactacacagaatcattctcggaaactactttgtgatgtttgcattcaactcacagagttgagcattccttttgatagagcagttttataacactccttttgtagcatctgtatgtggatatgtggacctttttgaggacttctttggaaacgggaatttcttctataaaaacgagacagaggacttctcagaaacttctttgtgatgtgtgcattgaactcagggtgatgaaccttcctttcgatacacgagttttgaaacactctttttgtacaatttccaagtggaaatttagagcgatttgtggcctatggtagaaaatgaaatatcttcatataaaaactagagagaataattctcagtaactacttcgtgatgtgtgcrttcaactcacagagtttaacatttcttttgatagagcagttttgaaacactctttttgtagaatttgcaagtggatatttagagcactttgaggcctatggcataaaaggaaatatcttcacataaaagctagacagaagcattctcagaaactactttttgatgtttgattaaactcacagagttgaacattgctc

SEQ ID NO: 876688 - DNA, 582 bp, Homo sapiens
agaaactactttgtgatgtgtgcattaaactcaccgagtttaactgttgttctgatagagcagttttgaaacactctttttgtagaatttgcaagtgtgtatttagagggttttgaggcctctggtataaaaggaaatatattcacataaaaactagacagaaatgttctcagaaactactttgtgatgtttgcattcaactgagagagttcaacattccttttgatagagcacgtatgaaacactctttttgttgaatctgcaagtggatatttggacctctttggggccttctttggaaacggtaattttttcacatgaaaagtagaccgaagaattctccraaactttttggggtgtgtgcgttcatcttacagagtttaatctttcttttgatagagcagttttgaaacactctgtttgtaaattctgcaagtggatatttggagggctttgaggccttatatggaaacgggaatatcttcacataaaaagtagacagaagtattctcagaaacttccttatgatgtctgcactcaactcacacaattgaaccttccttttgatagagcagttttgaa

SEQ ID NO: 876689 - DNA, 551 bp, Homo sapiens
tttgcaagtggatattttgagcgctttgaggcctatggtagaaaaggatatcacttcatgtaaaacctagacagaatcattctcagaaactactttctgatgtgtgcgttcaagtcacagtgtttaaactttcttttgatagagcagttctgaaagactctgtttgaaaagtctgcaagtggacatttgtagcgctgtgaggccttatttggaaacggmattatcttcacataaaaaatagacagaagtattctcagaaacttctttgtgatgtctgcactcacctcacagatttgaaccttcgttttgatagagaagttttgaaacactctttatgtagaatttgcaagtggatatttagacagctttggggcctatggtagaaaaaggaatatcttcatagaaaaactagacagaagcattctcagaaactactttgtaatgtttgcattcaactcacagagttgaacattcgttttgatagagcagttttgtaacactctttttgtagaatctgcaagtggatatttggacttctttgaggccttcga

SEQ ID NO: 876690 - DNA, 606 bp, Homo sapiens
tttcaattctgtgagttgaatgcacatatcacaaagaattttctgagaaagtttctgtatactttttatgtgaaggtatttccttttccaccatagtgctcatagcgctcaaaatattcacttgcagattatacaaaaagattgtttcaaaactgctccatcaaaagaaaggttcaacactgagatttgaattcacacatcacaaagaagttactgagaatgcttttgtctggtttttatgtgaagatatttccttttccaccacaggcctcaaaacgttccaaatatccacttgcattctttacaaaaagagagtttcaaaactcctctawcaaaagtatggttcaactctgtgagttgaatgcacacatcacaaagaagtttctgacaatgattctgtctagattttatgtgaagatatttccttttccacagtaggcctcaaatcgctgtaaatatccatttgcagattctaaaaaaaaagagtgtttctaaactgctctatcaaaagaaagattcaaaactgtgagtgggatgcacacatcccaaagaagtttctgagaatgcttttatctagtttttatgtgaagatatttccttttccac

SEQ ID NO: 876691 - DNA, 613 bp, Homo sapiens
ttgctatagtgaatagtgccacagtaaacatatgtgtgcatgtgtttttatagcagcatggcttataatcctttgggtatatacccagtaatgggatggctgggtcaaatggtatttctagttctagatccccgaggaatcaccacactgacttccacaatggttgaactagtttacagtccaaccaacagtgtaaaagtacccctatttctccacatcctctccagcacctgttgttttctgactttttaatgaacgccattctaactggtgtgagatggtatctcattgtggttttgatttgcatgtggccattacataatggtaaagggatcaattcaacaagaagagctaactatactaaatatatatacgcccaatataggagtgccmaaattcataaagcaagtccttagagacctacaaagagacttagactcccaaacaataatcatgggagacgttaacaccccactgtcaacattcggcaatccatgagacagaaagttaaaaaggatatccaggatttgaactcagctctgcaccaagcagtcctaatagacatctacagaaccctccaccccaaatcagcataatatacattcttctcagc

SEQ ID NO: 876692 - DNA, 519 bp, Homo sapiens
acttagactcctgcacagtaataatgggagacgttaacacaccactgtcaatattagacagatcaatgagacagaaaattaacaaggatatccaggacttcaactcaactctgaaccaagtggacctaatagaaatctacagaactctccaccccaaataaacagaatatacattcttctcagcaccatatcacactaattctaaaatcaaccacataattggaagtaaaacactcctcagcaaatgtataagaataraaatcacaacaaactgcctctcagaccacagtgcaataaattagaagtcaggattaagagactcactcaaaaccacacaactacatggaaactgaacaacctgctcctgaatgactactcagtaaataacaaaatgaagggagaaataaagatgttcttcgaaaccagtgagaacaaagacacaacgtaccagaatctctgggacacatttaaagcagtgtgtagagggaaatttataccactaaatgcccacaggagaaa

SEQ ID NO: 876693 - DNA, 519 bp, Homo sapiens
acttagactcctgcacagtaataatgggagacgttaacacaccactgtcaatattagacagatcaatgagacagaaaattaacaaggatatccaggacttcaactcaactctgaaccaagtggacctaatagaaatctacagaactctccaccccaaataaacagaatatacattcttctcagcaccatatcacactaattctaaaatcaaccacataattggaagtaaaacactcctcagcaaatgtataagaatagaaatcacaacaaactgcctctcagaccacagtgcaataaattagaagtcaggattaagagactcactcaaaaccacacractacatggaaactgaacaacctgctcctgaatgactactcagtaaataacaaaatgaagggagaaataaagatgttcttcgaaaccagtgagaacaaagacacaacgtaccagaatctctgggacacatttaaagcagtgtgtagagggaaatttataccactaaatgcccacaggagaaa

SEQ ID NO: 876694 - DNA, 519 bp, Homo sapiens
acttagactcctgcacagtaataatgggagacgttaacacaccactgtcaatattagacagatcaatgagacagaaaattaacaaggatatccaggacttcaactcaactctgaaccaagtggacctaatagaaatctacagaactctccaccccaaataaacagaatatacattcttctcagcaccatatcacactaattctaaaatcaaccacataattggaagtaaaacactcctcagcaaatgtataagaatagaaatcacaacaaactgcctctcagaccacagtgcaataaattagaagtcaggattaagagactcactcaaaaccacacaactacatggaaactgaacaacctgctcctgaatgactactmagtaaataacaaaatgaagggagaaataaagatgttcttcgaaaccagtgagaacaaagacacaacgtaccagaatctctgggacacatttaaagcagtgtgtagagggaaatttataccactaaatgcccacaggagaaa

SEQ ID NO: 876695 - DNA, 670 bp, Homo sapiens
aaaaatgcttatcatccctggtcattagagaaatgcaaatcaaaaccacaactagataccatcacatgccagttagaatggcgatcattaaaaagtcaggaaacaacagatgctggagaggatgtggagaaataggatcccttttacactgttggtgggagtgtaaattagttcaaccattgtggaagacagtgtgatgattcctcaaggatctagaactggaaataccatttgacccagcaatcccattactgggcatatacccaaaagattataaatcattctacgataaagacacatgtacatgtatgtttattgcagcactattcacaatagcaaagacttggaaccaactcacatgtccatcagtgatagactggattaagaaawtgtggcacatatacaccatggaatactgtgcagccataaaaaaggatgagttcatgtgctttgcagggacatggatgaagctggaaaccattattctcagcaaactatcacaagattagaaaaccaaacaccgcatgttctcactcataagtgggagttgaacaacgagaacacacggacacagggaggggaacaccacacaccggggcctgtcgggggtggagggctaggggagcgataacattaggaaaaatacctaatgtaggtgatgggttgatag

SEQ ID NO: 876696 - DNA, 532 bp, Homo sapiens
tgaatatcatacagtatacttacaaaaacctcaatggtttagcctactatacacctaagctatatggtatagcttattgctccaaggctacaaacctgtacagcatgctaaatagcgtgggcaattataacacaatggtaaatgtttttgtatctaaacatagaaaagacacagtaaaaacagtataaaagggcgaggtgcggtggctcatgcctgtaatcccagcactttgggaggctgaggcgggtggatcacgaggccagaagatcgagaccatcctgactaacatggtgaaaccccctctctactaaaactacaaaaaattagccrggtgtgttggtgggcgcctgtagtcccagctactggggaggctgaggcaggagaatgacgtgaaccctggaggcggagcttgcagtgagccaacattgctccactgcactccagcctgggcgacagagcgagactccatctcaaaaaaaaaaaaaacaaaaaaagtataaaagatttttttaaatggtatacctgttaaggc

SEQ ID NO: 876697 - DNA, 693 bp, Homo sapiens
aggagttcgagaccaacctggccaacatggtgaaaccccgtcgttactaaaaatacaaaaaaattagccaggcatggtggtaagtgcctatagtcccagctacttggaaggctgaggaaggagaattgctcgaatccaggaggcggagactgcagtgagccaacattgtaccactgcactccaacctggcgacagaggaaagaaagaaaagaaagagagagagagaaggaaggaaggaaggaaggaaggmaggcaagcaagcaagcaagctgcaagtatcaaggaaggattaagttttgcttcaggattccgtttatgtcagcaatgagaccaagatgtttggaatttgattcaatgttcccagcatgaaagaattatgggacatggtcagatatttcagagtcagatggtatcccctgtcattatttcatgttgtaagagtcatgaaatatgtaatttcatgcaaatttcatatttaatttcatgtaaatttagattttataattaagtggggataacaccaatcttaaatgatatctgcattaaattttccacagtttgcacatggctttgatgttcactgttgggccaaacaaaagcattgaagagaaagcacttgttaaactgcaaatgtcactaagtaaaagttttaccttaataaaatgaactatcttaagctataagaaagttatg

SEQ ID NO: 876698 - DNA, 676 bp, Homo sapiens
aatcaaccccatgacacctaatcattagattctccaaggtaaaaatgaaggaaataaggctaagggcagccagagagaaatgccaggtcaactacaaagggaagctcattagattaacagtggatctctcagcagaaatcctagcagcccagagagactgggggycaatattcaacattcttaaagaaaagaatttccaattcagaatttcatatccagccaaactaagcttcatatgcaaaggagaaataaaatccttttcagacaagcaaatgcagagagaatttgtcatcaccaggccttccttgcaagaactcctgaaggaatcactaaatatggaaaggaaaaaccattaccaggcactacaaagacacactgaagtacacagactaacaatgctattaatcaactacatcaacaagtctgcaaaataaccagctagcatcatgatgacaggatcaaattcatacataacaatgttaaccttaaatgctaatgagctaaatgccccaattaaaatacacagaatggcaaactagataaagactcaagacccatcagtgtgctgtattccagagacccatctcatgtgcaaacacagacaggctcaaaataaagagatataggaaactttaccaagcaaatgtaaaatagaaaaaaagcagtggttgcaatc

SEQ ID NO: 876699 - DNA, 655 bp, Homo sapiens
atggtgaaaccccgtctctataaaaaatacaaaaattagccaggtgtggtggtgcatgcctgtaatcctagctactcaggaggctgaggcaggagaatcacttgaacccaggaggcagaggttgcagtgagctgagatggtgccactgcactccagcctgggtgacagagcgggactctgtctcaaaaaaaaaaaaaaaaagaaagggttgatgcaggcactcccttggttaccccagctggtctcactgggtcatgcacatcccaagtgcactggctctaagcccagcacagcaccaggacttgtgcaggaattatagtccttatggcctagatggcttttcaagtttatttaggacccagagtatttcagccatagtggtggggctagatgaactcagggttttgaccgctggggtaaatgattcycctctggttagggctggtctaaatgctcactccatgggcaccagctgaattttgccctttgttgctttctgctatgacagtttgcactgaattccattgcaaagtcccataatcactttgcttttcctcccccaagcacacagattctctctccataccatgtggcactgccaggagacgaaggaggattggtgtagttgattaaagactgtctttcctaccttctt

SEQ ID NO: 876700 - DNA, 576 bp, Homo sapiens
ccaagttcactttattgttaaagaaattagccagacatgggggcaggtgcctgtaatcccagctacttgggaagctgaggcaggagaatcgcttgaacctgggaggtggaggttgcagtgagccaagatcttgccattgcactctagcctgggtgacaagagtgaractccatttcaaaaacaaaatgaaataaaaatagacttctaaataaatttagtgtagcctaaccgtggagtgtttataaactctatagtagtgcatagtaatgtcctaggccttcacattcattcatcattcactcactgactcaccagagcaacgtccagttctgcaagctccattcatggtaagtgccttatacaggtgtactagttttcatcttttatattatattttaactgtacctttactatgtttagatatatttagatacacaaatacttaccattgtgttacacttgcctcagtattcagtacagtaacatgctgcacaggtttgtagtctaggagctataatctgtatcatccaatatagcctaggtgtgtagtaggctacaccatttagatttgtgtaa

SEQ ID NO: 876701 - DNA, 576 bp, Homo sapiens
ccaagttcactttattgttaaagaaattagccagacatgggggcaggtgcctgtaatcccagctacttgggaagctgaggcaggagaatcgcttgaacctgggaggtggaggttgcagtgagccaagatcttgccattgcactctagcctgggtgacaagagtgaaactccatttcaaaaacaaaatgaaataaaaatagacttctaaataaatttagtgtagcctaaccgtggagtgtttataaactctatagtagtgcatagtaatgtcytaggccttcacattcattcatcattcactcactgactcaccagagcaacgtccagttctgcaagctccattcatggtaagtgccttatacaggtgtactagttttcatcttttatattatattttaactgtacctttactatgtttagatatatttagatacacaaatacttaccattgtgttacacttgcctcagtattcagtacagtaacatgctgcacaggtttgtagtctaggagctataatctgtatcatccaatatagcctaggtgtgtagtaggctacaccatttagatttgtgtaa

SEQ ID NO: 876702 - DNA, 564 bp, Homo sapiens
tcactctgacttttttgagctctctgcatatcttactcaattctttcttttttcctacaacagcatttctatttgctttataatttaatatgtgtatggctttaagttataattgatgtataataaactgcacatatttaaagtgtataatttgatgagttttgatatctgtatatgtctgtaaaaccatcaccacaatcaagccaatgaatatatccatcacttctaaaagttctctacggttctttgaaatctatctgtctcccaccccccaactccttccaggttccctagcaatcactgatctccttactgtcattatagattaatttgyattttaaaggattttatatggacaggatcatatagtatgtgctttcctcagaaatcagtcctgcaataaatattatgcacttgtgctctgggaatacagccaagagctaggctgtcacaattcctgctattatggagcttcagtctaccaagaaaggcaaataatgaataaataattgccataaggcctgttgtgtgatttgatgagaggagaagcatctgtggaagtct

SEQ ID NO: 876703 - DNA, 619 bp, Homo sapiens
tcaaagaacagagtgccaaggctatgacacagcatgaaagcaggggttcagggaggaggatgggctatgaaagcatagtgattggctgtaatcttcatgagacaagaatgtactacagcaaaagggctatgaataatgcaaagactactcctgggagaaggagccttctgaaggtgatttacagttctgatggttgagacagttcatttcagatattgcaagagacatctggctctatttacasagctatctgttctcttccattaatcgaaatcccatccaaactggagcctttaaagactactgggaaatgtggtcatatgagcagaaaaatggagagtggtcacatgaaagatgcagtttctatcaaaggttcaaatgaaataaaataaaaagtcctttaggaatcataggcctgctcattaagaaacaaacaaacaaaaaaaactgtaaaaagatccgattttattccaatgaataatatcattctacaacattcaaataaatgtatgtctttctagtgagactagaagccacacgaagacaaataaaatcaacacatacattaactatgcatgaccgagcaaggccgatttggtgtagggaatgctacagaaaa

SEQ ID NO: 876704 - DNA, 629 bp, Homo sapiens
gaggatggagcccagtaacaaggataatggagagccaacaggaggagaaaggagcatgtgtacgtgtgtgtgtttgtgtgtgtaaaaggtagacctctgtggataggaaatctaagaggagggggcaaggaaggaacggagaaaaggcaggctaggaagttccaggatcgggggagtggagaccaccagcgcagcatggcagacagcaaagagaaggcagctggaggagtccagaacaggagagggagcctacccgccttggagtgggggccttctggcattatttcagtggctgcaatatacccagcacccctcactccttcttctygagggtctcttttctgtcccccagcagagaaagcactgcctccttcaattacatatatatgtgcatatgtaatatataatcacacacgtgaaaacacacacaccatacatacttacattaaaaatggaatcaagcaccatctaccaagcaatagagttaactccttaaacacccaccaccctttccagcctgatttttttttttcctccaaagcgatggttcctccatttcacatgctcttgcctggagtgcgagtagggtatgtgtgcgtgtgtgaacacttcccctctgcccctcatcc

SEQ ID NO: 876705 - DNA, 573 bp, Homo sapiens
ctttcttgtgctattctagtgatactgaatacatctcatgagatctgatgggtttatcaggggtttctgcttttgcttcttcctcatttttctcatgccattgccatgtaagaagtgcctttcgcctcccactgtgattctgaggcctccccagccatgtggaactgtaagtccaattmaacttcttttggttcccagttttgggtatgtctttatcagcagtgtgaaaacaaactaatacagtaagttggtaccagtagtgggatgttgctgaaaagataactgaaaatgtggaagcaactttggaactgggtaataggcagaggttggaacagtttggaggggtcagaagaagacaggacaatgtgggaaagtttggaacttcctagagacttgttgaatggctttgacaaaaatagtgatatgaacaattctaggctgagatggtctcagatgtagatgaggaacttgttgggaactggagcagaggtgactcttgttaagtgactcttgttatgttttagcaaagagactggcagcatttagcccctgccctagagatttgtggaactt

SEQ ID NO: 876706 - DNA, 674 bp, Homo sapiens
tgtacccccattgtatctaggaaataactagcttgcttttgatattcaggctcataggcagaagggacttgccttgtctcagatgaaactttggactgtggacttttgggttaatgttgaaatgagttaaacctttgggggactgttgagaaggcatgattgattttcaaatgtraggacatgagatttggaggggttgggatggaatgatatggtttggctgtgtccccacccaagtctcaacttgaattttttctctcagaattcccacgtgttgcaagagggacccagggggaggtaattgaatcatgggggccagtttttcccatgctattctcatgacagtaaataagtctcaggagatcgtatcagttaatcaggtgtttccacgttttcttcttcctcacttttctcttgccgcggccatgtaagaattgccttttgcctcctgccatgattctgaggcctccccagccatgtggaactataagtccaattaaacctctttttgttctcagttttggttatgtcttttttagcagcatgaaaaaaaactaatacaacctgtttctagattaaagtatattttgatggtaacttaacatttagcccagagttgatactgatgtcaatataaaatctgaagtagacatagaattatggtatactttggg

SEQ ID NO: 876707 - DNA, 577 bp, Homo sapiens
gagagacttccagtggcccacaggcccaccatagaatcatacagtcctagtcacaggggagcccattgacactcccaaaccctgaaactaacacagagagctgccaggagaccatgggatggaacagctatagggagggagcttgtgctgggtcccacaccctttctgagacctaagcagctacagggctagagcaaggtgccattctcaaacctagcctttggaagacttcacactgtcctggggtctggtggcactggatctragttattagggaaactcaggctgtcactgctgtgactggggtgtgtactgagagttctacatccaggactgagaagcatgcaaggagtgagctgcagctgctggggctgggaagtgaatactgccaggactgagaagggatgtgaacagagcacaggttgccattgggactgagttgcaagctgcatgggggctcctgcagccagggctgggacacaagctaggtgtaggctatggccatcaaagctggggaacaagcctatggggactgggacatgagagggacctgcagtccctagcgaacaggcaaggc

SEQ ID NO: 876708 - DNA, 577 bp, Homo sapiens
gagagacttccagtggcccacaggcccaccatagaatcatacagtcctagtcacaggggagcccattgacactcccaaaccctgaaactaacacagagagctgccaggagaccatgggatggaacagctatagggagggagcttgtgctgggtcccacaccctttctgagacctaagcagctacagggctagagcaaggtgccattctcaaacctagcctttggaagacttcacactgtcctggggtctggtggcactggatctaagttattagggaaactcaggctgtcactgctgtgactgggktgtgtactgagagttctacatccaggactgagaagcatgcaaggagtgagctgcagctgctggggctgggaagtgaatactgccaggactgagaagggatgtgaacagagcacaggttgccattgggactgagttgcaagctgcatgggggctcctgcagccagggctgggacacaagctaggtgtaggctatggccatcaaagctggggaacaagcctatggggactgggacatgagagggacctgcagtccctagcgaacaggcaaggc

SEQ ID NO: 876709 - DNA, 670 bp, Homo sapiens
aaattctacatcccttcatgataaaaatgctcaaaaaactaggtatagaagtaatatacatcaacatactcaaagccatatacaagagacacacagctagtatgacactgaatggggtaaaactgaaaaacttccttttgtgatctggcacgtgacaaagatgcccactttcaccactgttattcaacatagtacttgaagtcttggctggagcaatcagaccagggaaagacataaagggcatccaaattgtaaatgaagaagtcaaattatccttgtttgcaaatgatattatttcatgtttggaaaaagctaaagattccgcacacacaactattagagctaataaattcagtaaagttgcaggatacaaaattaacatgtaaaaattagtagcatttttatatgccaasagcaagcaatctgaagaagaaatcagtaaaataataatcccatttacaatagctgcaaataaaattaaatacttaggcaaagaagtgaaagatctctataatgaaaactataaaacactgatgaaagaaattgaagaggacacaaaaaataaaaagatatttcatggtcatggattagaagaataagtattgttaaaatgtctatactacccaaagcaatctagagattcaatgcaatccttatcaaaataccaatt

SEQ ID NO: 876710 - DNA, 639 bp, Homo sapiens
atactgatgattctttaattttaactacaactgctatgcaacccaagcttatgcaggtggttaacaaaggggttgagagaaatggcaatacgaaggcagcttgtgtccttttggaatcactgagaagtttaccttacagaatatcttacagaatgccaacagcattcagttgcagtggagtcaaaatggcagcatgatgtatttaggcagagggagggtctgggtcagaagccccaaattttcagcagctcctgtttgacattgaagagatgcagaggtttactagcatccgctaygagggtgagaggaaagaatgttacttggggtagaaaagaagtatcaagtgactttttttgcacgtaagagatgcagcgtgtaaattgttaactccaatctacagagaatatttggtaataataattttgaaaatagtaacaaaatagacaaacttctaggtagtctgatcaaaatcaaaatggaaaaaacagcaatataaggaattgtaaatacaatagttttataaaaataatttaaaattatagttaattttatgccaataaatttgaaaatttcagtgaaatggtcagttttctagaaaaaaaagttaccaaataactcttcaaaagtatcagaaatatt

SEQ ID NO: 876711 - DNA, 623 bp, Homo sapiens
tcccttttataactccactgaattcaccagggatcagcaggaaaggagagggtctcctgtattggcaagagtgtctactgattagtgacacctaccaggaggtgacatagggctgcatttatgcaggggcaggaaggcgtggacgtggagctcgtgtgacctgcatggatgcctcctgatgctcccccaccccactgttacagtgagtgggcaaaggcagcaaccccagcctaaaggttctgctcagactgcagtgagacaccaaggcctgcccaagagatagctgagagtgacaggattcagaatggattgtgcaggagggagaggatgcagttgcagctctgagatcaactacagttattggggctataattcctgccacaaatgtccctcttctaagcttcctctcrtgaaggaaggccctgtggggactgcagagaagatgctcccaagatgtatgggaagcaaagggctgcaaggtggagagggtgggttgtggtgtctgcgagaggagactcggatgtccgagtgcgacaatggaccagtgacccaggctgctgccctctgggacctcaccactaggtttgtgctgagaccacacctcccaggggtgaccccagcca

SEQ ID NO: 876712 - DNA, 623 bp, Homo sapiens
gtttttgccattacttttaatggaaaaaccacaatgactaatgcaataggaagcaattagaactcagcataatggaatttagtaaaactgtatgtgattatatattaaatctctcacatcctataggaaacttcacttgtactttgaactggatgaatgaataaagtatacctgacttaaaaaaaaataggccgggtgcagtggctcacgcctgtaatcccagcactttgggaggcggagactggcagatcacgaggtcaggagatggagaccatcctagctaacacggtgaaaccccgtctctaccgaaaatacaaaaaaaaaattagccggcgtggtggtgggcgcctgtagtcccagctactcgggaggctgaggcaggagaatggcgtgaatcsgggaggcggagattgcagtgagccgagatcgcgccactgcactccagcatgggcgacagagccagactccgtctcaaaaaaaaaaaaaaaaaaaaaaaaaaaaaaaaaaattaaaaaataaataaataaagatggaaaccttacagaaccctccacatgctttaatcttaagtggtggcagaaattttgaacctgacatttgcagaggatgacatgtgtgatatt

SEQ ID NO: 876713 - DNA, 593 bp, Homo sapiens
catgacttcccaacagtcccccagagtcttaactcatttcagcattaactcaaaagtccacagtccaaagtctcatctgagacaaggcaagtctcttccacctatgagcctgtaaaatcaaaagcaagttagttacttcctagatataatgggatacagacattgggtaaatacagccattccatatgggagaaattggccaaaacaaaggggctacagaccccatgcaagtcctaaatccagggtggggggcagtcaaatcttaaagctccaaaatgatctcctttggctccatgtctcacatccaggtcacgctgatgcaagaggtggactcccacggtcttgggcagctccacccctgtggctttgcagggtaaagccccactcctggctgctttcataggctagcattgagtgtggcttttccaggctcacagtgcaagctaycagtggatctaccattctggggtctgcaggatggtgaccattttctcatagctccactaggcagtgtaccagtggggactctgtgtggtggcttcaaccccacatttccctctgtactgccctagcagaggttctccataagggct

SEQ ID NO: 876714 - DNA, 626 bp, Homo sapiens
taatcacaaaaagataatctcctaggcacatagtcatcaggttatctaatgtcaagatgaaggaaaggatcttaagaaatgtgtggaaaaacaaacaaacaaaaacaccaggtaatctataaaggaaaacgtatcagattaacagatttctcaggagaaatcctacaagctagaagaaattgaggtcctatcattaacctgcttgaacaaaacacttctcagtcaagaattttttatccagcaaaactaagtttcataaatgaagggaaaatacagtctttttcagacaaacaaatgctgagagaatttaccactaccaagccagsactacaagaactgctaaaaggagatctaaatattgaaacaaattctcaaaatacaacaaaatagaatctccttaaagcataaatttcaaatgacctataaaacaacaacacaatgaaataaaccaaggtattcaggcaaaagatagtataatgaatataatagtaccttacatctcaatactaacattgaatgtaaatggccgaaatgctgcacttaaaagatacagaatggcagagtgcataaaaactcaccaaccaagtatctgctgtcttcaagagactcacctgacacaggactaa

SEQ ID NO: 876715 - DNA, 626 bp, Homo sapiens
taatcacaaaaagataatctcctaggcacatagtcatcaggttatctaatgtcaagatgaaggaaaggatcttaagaaatgtgtggaaaaacaaacaaacaaaaacaccaggtaatctataaaggaaaacgtatcagattaacagatttctcaggagaaatcctacaagctagaagaaattgaggtcctatcattaacctgcttgaacaaaacacttctcagtcaagaattttttatccagcaaaactaagtttcataaatgaagggaaaatacagtctttttcagacaaacaaatgctgagagaatttaccactaccaagccagcactacaagaactgctaaaaggagatctaaatattgaaacaaattctcaaaatacaacaaaatagaatctccttaaagcataaatttcaaatgacctataaaacaayaacacaatgaaataaaccaaggtattcaggcaaaagatagtataatgaatataatagtaccttacatctcaatactaacattgaatgtaaatggccgaaatgctgcacttaaaagatacagaatggcagagtgcataaaaactcaccaaccaagtatctgctgtcttcaagagactcacctgacacaggactaa

SEQ ID NO: 876716 - DNA, 612 bp, Homo sapiens
tgtatgtgccaagacccaccttctcagggtgggatgagatcctcacatggctgtcttgcatgcctctgccttgtctctgtgacctgaggcgtcttcactgttactttgtctacagatattaggatatttcagcttcttttcaatcttgctgccaccaccttggtccaatctaccattgtctccattcagatgtctgcagacttcttacctgtttcacagaatcctctgtgactcaatccaacacattctttttttttttttttttttttwatactttaagttctgggatacatgttcacaacgtgcaggtttgttacatatgtatacatgtgcaatgttgctgtgctgcacctgttaacttgtcatttgcattagctatatctcctaatgctatccctcctccttccccccaccccacgacaggccctggtgtgtgatgttcccctcctgtgtccaagtgttctcattgtaattcccacctatgagtgagaacatgcagtgtttggttttctgtccttgtgatagttggctcagaatgatggtttcagcttatccatgtccctacaaaggacatgaactcatcctttttatggctgcatagtattccatggt

SEQ ID NO: 876717 - DNA, 612 bp, Homo sapiens
tgtatgtgccaagacccaccttctcagggtgggatgagatcctcacatggctgtcttgcatgcctctgccttgtctctgtgacctgaggcgtcttcactgttactttgtctacagatattaggatatttcagcttcttttcaatcttgctgccaccaccttggtccaatctaccattgtctccattcagatgtctgcagacttcttacctgtttcacagaatcctctgtgactcaatccaacacattcttttttttttttttttttttttatactttaagttctgggatacatgttcacaacgtgcaggtttgttacatatgtatmcatgtgcaatgttgctgtgctgcacctgttaacttgtcatttgcattagctatatctcctaatgctatccctcctccttccccccaccccacgacaggccctggtgtgtgatgttcccctcctgtgtccaagtgttctcattgtaattcccacctatgagtgagaacatgcagtgtttggttttctgtccttgtgatagttggctcagaatgatggtttcagcttatccatgtccctacaaaggacatgaactcatcctttttatggctgcatagtattccatggt

SEQ ID NO: 876718 - DNA, 612 bp, Homo sapiens
tgtatgtgccaagacccaccttctcagggtgggatgagatcctcacatggctgtcttgcatgcctctgccttgtctctgtgacctgaggcgtcttcactgttactttgtctacagatattaggatatttcagcttcttttcaatcttgctgccaccaccttggtccaatctaccattgtctccattcagatgtctgcagacttcttacctgtttcacagaatcctctgtgactcaatccaacacattcttttttttttttttttttttttatactttaagttctgggatacatgttcacaacgtgcaggtttgttacatatgtatacatgtgcaatgttgctgtgctgcacctgttaacttgtcatttgcattagctatatctcctaatgctatccctcctccttccccccaccccwcgacaggccctggtgtgtgatgttcccctcctgtgtccaagtgttctcattgtaattcccacctatgagtgagaacatgcagtgtttggttttctgtccttgtgatagttggctcagaatgatggtttcagcttatccatgtccctacaaaggacatgaactcatcctttttatggctgcatagtattccatggt

SEQ ID NO: 876719 - DNA, 643 bp, Homo sapiens
ttacactgaaagtaattattgatagttaaggattaatattgccattttgttgactgttttctgactgtttgtagtccctttgttccttatgctgtcttgcattgtgatttgacaattttgtttggtagtgataatggtttgatttctttcactttatgtatctgctacaggtttctttttctttgtgatcaccatgaggcttacataaaacatcatataacagcctgttttaagctgacaacaacttaactttgttcacaaaaattctacactttcacttctcccccatttatgtttttgatatcacagtttacatatttttatattgtgtatccattaacaaattattgtagctcaaattattattacttttgtcttttaacttttatactagagttaaaagtgattagataccaccattacagtattacaatattcttaatttgactatatactcagtgttaccagtgagttttatagttttatatattgtctttttttwaaaaaaaactatttttcttatgaggaccatctctagaatccaggaagtctctggatctgagggatggaaagttcttcctgctatgaatgagagtggactcttcccatcacccccaactgaaaccacaaacacccagaattt

SEQ ID NO: 876720 - DNA, 643 bp, Homo sapiens
ttacactgaaagtaattattgatagttaaggattaatattgccattttgttgactgttttctgactgtttgtagtccctttgttccttatgctgtcttgcattgtgatttgacaattttgtttggtagtgataatggtttgatttctttcactttatgtatctgctacaggtttctttttctttgtgatcaccatgaggcttacataaaacatcatataacagcctgttttaagctgacaacaacttaactttgttcacaaaaattctacactttcacttctcccccatttatgtttttgatatcacagtttacatatttttatattgtgtatccattaacaaattattgtagctcaaattattattacttttgtcttttaacttttatactagagttaaaagtgattagataccaccattacagtattacaatattcttaatttgactatatactcagtgttaccagtgagttttatagttttatatattgtctttttttawaaaaaaactatttttcttatgaggaccatctctagaatccaggaagtctctggatctgagggatggaaagttcttcctgctatgaatgagagtggactcttcccatcacccccaactgaaaccacaaacacccagaattt

SEQ ID NO: 876721 - DNA, 637 bp, Homo sapiens
attcctggacacatacatcctcccaagactaaaccaggaagaagttgaatccctgaatagaccaataacaggctctgaaactgaggcaataattaatagcctagcaaccaaaacaagtccaggaccagaaggactcacagccaaattctaccagaggtacaaagaggagctggtaccattccttctgaaactattccaatcaatagaaatagagggaatcctccctaactcattttatgaggccagcaacatcctgataccaaagcctggcagagacacaacaaaaaaagagaatttcagaccaatatccctgatgaacatcgatgcaaaaatcctcaataaaatactggcaaaccaaatccagcagcacatcaaaaagcttatccaccatgaycaagtttgcttcatccctgggatgcaaagctggttcaacatatgcaaataaataaaggtaatccatcacataaacagaaccaaagacaaaaccacatgatatctcaatagatgcaaaaaatgcctgcgacaaaattcaacagtccttcatgctaaaaactctcaataaactaggtattgatgggacgtatttcaaaataataagagctatttatgacaaacccacaaccaatatcatattgaa

SEQ ID NO: 876722 - DNA, 552 bp, Homo sapiens
gcaaatctatacagacagaaaataggtttgtggtttcctagaactggggaaatggagggtgacaactaatgagtataaagtttcattttggggtgaggaagatgttctaaaattaattgtggtgatggttgcgcaagtctatgaataaactaaaaaaccgttggattatattcaactaaaaaccgttgaataaactaaaaactgtgaattatacaattcactcaggctaaatgggtgaattgtatggtgtgtaaattgtatggtgtataaagctgttatagaaaaaagaaatataactggaactacccttgattttattcatctacgacatgaggagggaaaagtacattacaataagacagtaaagctagaagacaatgacaaactaarttcataacagataaatacacaaattacttctctaagtcttcccttattgtttactagtaaaatttttaagatagtaaaataacatcaacttgggtccaataataataaaaaaactaattgctacttattgactatttacaaggtattaagcatttcaaagca

SEQ ID NO: 876723 - DNA, 592 bp, Homo sapiens
gtgtgcaaagaaacacatctttagcaatggtcataaagcaactcttttcaagtgttaaaatctaaatccgaatttgctttttaattattctgctgcatttacttacattacacagcccagggcccaaatgtctgattcacagccatgtccttgtttgttgaggacttcaggagagagataatttggggtaccacatatcgttctggaaagacaaaatattgagatcgtrttaggaactattccactacttaaacttggttctcttgacatgacttgatgggagacaaaatcttaaacaaaatcttaaaatctatactgaatttctatttggaaacatttgacttttggcatctgaaaattcaattgagatctgaccaaatgagttttggtaatttttaaaaatgcacacacgttgttttagcccacatgcaaagtgttgttaaccaactaaagccagggacgtcgtggcattttatacattttaagccaagaaaagacttcattgactgctttcataatcaatttagaggcacagggtgctctgtctagtccatagtgggcatttaataagtatttctttaaattaacattg

SEQ ID NO: 876724 - DNA, 592 bp, Homo sapiens
gtgtgcaaagaaacacatctttagcaatggtcataaagcaactcttttcaagtgttaaaatctaaatccgaatttgctttttaattattctgctgcatttacttacattacacagcccagggcccaaatgtctgattcacagccatgtccttgtttgttgaggacttcaggagagagataatttggggtaccacatatcgttctggaaagacaaaatattgagatcgtgttaggaactattccactayttaaacttggttctcttgacatgacttgatgggagacaaaatcttaaacaaaatcttaaaatctatactgaatttctatttggaaacatttgacttttggcatctgaaaattcaattgagatctgaccaaatgagttttggtaatttttaaaaatgcacacacgttgttttagcccacatgcaaagtgttgttaaccaactaaagccagggacgtcgtggcattttatacattttaagccaagaaaagacttcattgactgctttcataatcaatttagaggcacagggtgctctgtctagtccatagtgggcatttaataagtatttctttaaattaacattg

SEQ ID NO: 876725 - DNA, 649 bp, Homo sapiens
gagagctggcatttggggaagaaaaacttattgttttcatgtgtatttgttccgttaccgccttttcttcatctaccaccaactagatgatggcataatagaagacatgagccctgaataaaaattttccaacctaaaagtgcatatttttgagggtttatcccctctaagccctcagttgtttaataattattttataaacacatagttccctggcataatttgccataatttcgtgattaaaatgatgtagaggtgccacacttttaaagaattaactcattgcctttgctcgatctattatagccccctctcaaatttaaaaaatatatacaaatttgaaaaatcacttacctatgacccttaattttctttttttaaaaataagcattttaggttagataattgcaaagatcccttctatcccccatacttarttttgttattctataggatgggaaacaattgcagcacttataactttttatgatgccccaaattgcaaagcataatgaaatatggctcaccatccaccacgatgtgaaatttttcttatggtcaacaacttcattttttatttccaaatgatatagtgtgttttcaagaggctttttatatcaaatctatataagcagacgtcctgatgcat

SEQ ID NO: 876726 - DNA, 592 bp, Homo sapiens
gtttgaatttatttcttcttttcataagtttattggcccatgatatttcttttatgagttgcctgttacatgtacattttttacccgattgggctatttgcctttaataaacccagtaactacaaaacaaggtttgccttgtagaattgttttattgtattgcctttaaacaatacttatttatacatataatgctaatatggtatatattaatatcttaggtatattgatataatagtgataaagtgtaggccttactaagttatttgatcttagttttactgaaaatatcataaattatcttgatataaacaactttctgttatctggaggaaaaagaatagggaaagagaaaaaagaaatwgctccatgaaaatctaaaaaataaaatttggaaagtgttgctgtttctgtgcattgtctatactttctccttattgtctctatttattttgcttatgttgtattttgccttgcagaactttctaattatctgaacatatgttttcataatttcttctagttcttatgtcatgcttataaatatctcctccattctaagcttataatatttaccatagtttcatttagt

SEQ ID NO: 876727 - DNA, 576 bp, Homo sapiens
tttttcatttgtctgtgtcatctctgatttctttgagcagtggtatgtagttttttttttttttttttgtagagatctttcacctccctagttagctgtattcctaggtattttattcattttgtggcaattgtgaatgaaagttcattcctgatttggctcttggcttaactattgttggtctataggaatgctagtgacttttacacattgattttttatcctgagagtttgctgaagttgtttatcagcttaagaaatgtttgggctgggatgatggggytttctagatataggatcatgtcatctgcaaacagggatagtttgacttcctctcttcctattcgaatgccgtttatttctttctcttgcctgactgccctggccagaacttccaatactaagctaaacaggagtggtgagagagggcacttttgtcttatgccagtttttgtggggaatgcttctagctttagcccattcagtataatgttgattgtgacttaacccattttataagacaaactttattctgataccaaaactggacaaaggcattaaaagaaaattacaaac

SEQ ID NO: 876728 - DNA, 618 bp, Homo sapiens
tcatcccctttttgtcgtctcagactccttgctcctcaccactcttcaggctccacagtttggttttaacagagctcagtttggttcatgagtatcccgtgccattgcatttcacttccaggcatacattcttaccagaggtgggcgatgtcaccctcactcatggtattgttaacgtcaagtgaaagacgaagtctacataccaagttgttgaaattygtagaaccataatgaaggagacatgaggaatgtgtcaagaatcctctttgaactttattttatgcctcttaacataagtcagaatatcacaaagaacaaaactcatagtcaaggagccctgtcgtacctcctggctggagcagaaattacccgcatttgatttactctctctgtatttagatactgctctattttcaaataggcagtagttcatgcatcatgggctgccaaggcctcagcggggcaaattcaagaacatagcttggaagagccagactcagaaatgccgtagtcatattccagcctctctcttcactgctttggtttcagcatggccagatgcagacttttctttagaggtaccaagaaaatgcctggccccatcctctgacctcacag

SEQ ID NO: 876729 - DNA, 587 bp, Homo sapiens
attacaggtgtgagccaccgtgtctggccaataaataaaattcttatcaaaattcaagcaatgtttctttcttatgaacaagtttattcgaaattttatataagaaggtctagatcggtataattttaatgacattgaaagtcagaaaaaaagtgggagggatcactctacccgatattaagaccaactctagtaaataaaagaatatagtagtgaaaaagggatagacacctaaatcaatagcacaaaataaaaatgccagaaatagttttgcactatgtcaaacagtgtttttaacaaaggtgcaaaagcaattcaatygaggatgatggcttttcaacaaatttgcccaaagcagtgagacacccacaagcgaaaaaagaaaaagaaaaaaaaaaaccaaaaaaacagaatctaaaggcagacaacctatataaaaattaactcatactgaatgggcaaaagctggaatcattccctttgaaaaccagcacaagaaaaggatgtcctctctcactactcctattcaacatagtattgaaagttctggccagggcaattacacaagagaaagaaataaagcgttt

SEQ ID NO: 876730 - DNA, 587 bp, Homo sapiens
attacaggtgtgagccaccgtgtctggccaataaataaaattcttatcaaaattcaagcaatgtttctttcttatgaacaagtttattcgaaattttatataagaaggtctagatcggtataattttaatgacattgaaagtcagaaaaaaagtgggagggatcactctacccgatattaagaccaactctagtaaataaaagaatatagtagtgaaaaagggatagacacctaaatcaatagcacaaaataaaaatgccagaaatagttttgcactatgtcaaacagtgtttttaacaaaggtgcaaaagcaattcaattgaggatgatggcttttcaacaaatttgcccaaagcagtgagacacccacaagygaaaaaagaaaaagaaaaaaaaaaaccaaaaaaacagaatctaaaggcagacaacctatataaaaattaactcatactgaatgggcaaaagctggaatcattccctttgaaaaccagcacaagaaaaggatgtcctctctcactactcctattcaacatagtattgaaagttctggccagggcaattacacaagagaaagaaataaagcgttt

SEQ ID NO: 876731 - DNA, 564 bp, Homo sapiens
tctagattgagaagaaaacctaggtaataccattcaggacataggagtgggcaaagacttcatgactaaaacaccaaaagcaattgcatcaaaagttaaaattgacaaatgggatctaattaaactaaagagcttctgcacagcaaaagaaactatcatcagagcgaacaggcaacctayggaatgggagaaaatttttgcaatctatccatctgacaaagggctaatatccagaatctacaaggaacttaaaaaaacttacaagaaaaaaaaaacaaacaatcccatcaaaaagtgggtgaaagatatgaacagacacttttcaaaataagacatttatgcagcccacaaacatgtgaaaacaagctcatcatcactggtcattagagaaatgaaaatcaaaaccacagtgagataccatctcacaccagttagaatggtgatcattaaaaagtcaggaaacaacagatgctggagaggatgtggataaacaggaacacttttacactgttggtggaagtgtaaattagttcaactattgtggaagacagtgtggtgattcct

SEQ ID NO: 876732 - DNA, 702 bp, Homo sapiens
tcttgagaagaggaggtttagagaggttatttataggatttggaattgggctgtgtggttacagggaaggtttaaggaaaccaagcatattctagattgagaagaaaacctaggtaataccattcaggacataggagtgggcaaagacttcatgactaaaacaccaaaagcaattgcatcaaaagttaaaattgacaaatgggatctaattaaactaaagagcttctgcacagcaaaagaaactatcatcagagcgaacaggcaacctacrgaatgggagaaaatttttgcaatctatccatctgacaaagggctaatatccagaatctacaaggaacttaaaaaaacttacaagaaaaaaaaaacaaacaatcccatcaaaaagtgggtgaaagatatgaacagacacttttcaaaataagacatttatgcagcccacaaacatgtgaaaacaagctcatcatcactggtcattagagaaatgaaaatcaaaaccacagtgagataccatctcacaccagttagaatggtgatcattaaaaagtcaggaaacaacagatgctggagaggatgtggataaacaggaacacttttacactgttggtggaagtgtaaattagttcaactattgtggaagacagtgtggtgattcctcaaagatctagaaacagaaataccatttgacccagcaatcgcattact

SEQ ID NO: 876733 - DNA, 654 bp, Homo sapiens
ttgcaggacctagaccaaacccctggtgtttcagtaacaaaaaatgcatttttaagagagtgagtcctacagaaatcattaaaaaacctatataaaatcataaagagaatgatatcttgtttggtccatgtgacttaatcatggcaaacatctgtgccttttctagctgttccataagttaaaattaagaagaaaaatgtgtaacctagggagttgacatcaaacctttattcaaattttttttaagtcagamtttttcttacagagggttgatctgatttaacaatctcagtagacaatgagtttggctttctcaatttgattgtgtgttggatatttctgtctattgaatgaacaaattatgctactacacagttttgataaaaatgtatttataacatataagatcaaatcattttattttaaaaagttactaaaatatatttgaaattaatgatatctaaatatttcaatccttttagatgcctctctataaaaagtaaaagataaagtgatatattatgagaagactctctataaaaagttaaaggcaggccaggcaggggctcatgactgtaaaccaaaattgggaggccaaggcaggcagattgctggaacccaggaattggagaccagcctgggcaacatggcgaa

SEQ ID NO: 876734 - DNA, 655 bp, Homo sapiens
gcatttgattaaaatgaatgattactttcaccatcatctgcaactgagactaaaacaaataaacaaatagaaatttaaagcatgttaagaaaaaaaacaagcagagaatgtaaaattgaagtatgcagagacattttgactcaataaacttgcagtatctgcttcagtaaaaaatatcttattcacacaattgaaaacaataacaacaatgtatgttatgatgataaagacattctaggyattgttttattcctcttcaaatacagtttctcatcattatgtgaatatgattactgaatgttttttcatttttattattttaataattattattatttaaaatgaactttgggtttttttctaattcaagtttactttatattgatatatttataaagcaaatttaaggacagtctccagaaataactaaaactaggaaagttagcatcattaaaattttcatctcatctcattagaataatttgacttcaataggttttcaatgaagagttcaattatataaaggcctgtgacttttttgtttttaatcttttttaaaatctatctatcagcaaatataacattgtaattaattccaagaacattttaatttacagactcagattctatatcttgcatcccaatttaaaaatct

SEQ ID NO: 876735 - DNA, 583 bp, Homo sapiens
aattgctcatgttcattattctatttgtgattttgtccaacaaccttttgcctgtttcattcaccaaatgccatactgctgcacagtcttatgaagacaaatgagttaaaatacagaaaagtagttttcaacgattaaaaagttctaaaaccataaaaagaatattttagtagtatgtctattctcaataaagaattggtgttattcttctgagacatagaagcaacatttgtgttttctcagttttttgagaaatttacacaagcaagccaagcttccatggygtgaatgtgaattatttttatttatattatttgcttgccgaaagtgtgaataggcatttataaaaacaaaaagctttcttattcttatttacttttctttttgcaaattcaccatgttctgtgcactatgaaaaattatatttttgctgtcttacatttgataaaatcttgcaagaatttagaaaattaagaaatggttctatatgtaaatggaacaaatggcttgcttccaaacacatcttcccatagggctgaatagcaatttaattttgaaaatatttgaaaaagtcctttcattt

SEQ ID NO: 876736 - DNA, 608 bp, Homo sapiens
aatagaaggtgcactaggatgctgttgggcaagagacttctttcagccaaggtatctaagaactgcacaaaataccccagaattttcaatctgaaagatgagagattggaacacttatctaccctcgcccatctcattgtttgaaggctcaacttacagaagtttgaaatgcccttgtgcagtggccatgtaatcttcctctaagtagagaaggtcttagtacagaatgaggaaagacatacaatacaaacttggggccgratactgatccctagagcaggtgagctggaacttccactagcactgctgctggtgtcagagttaagccaaaatattgtgacaagcactagagacatctgtatcatattgatccttgttaaatgaaagtaagaagtaaattggcttatactaagctccatattaattccatgtaatgggtacaattataattaaaaatcatattgtctttcaaaattgggggaatggttttagtgtggtgtaagagtggcagtgtatagaaaatagaaagaatggatgtggatttcagttacctattactgcttaaaggcttgaagcaatatttaatttttatttctcatgattctgtg

SEQ ID NO: 876737 - DNA, 672 bp, Homo sapiens
gctcaagggagaattgagcttggcactagaaagttattgatagtaattataatgaattatgtatagactgagatgagtgctgtcaagaaacagaatttttaaaagcaaaggctggtatatttcaatgcatatgcattgggtgggggtaagaaagcgcagaagtataaattaacaatagatggttaaaaacttgccagaaaatgagccttttgtttgaaatatctctttatctttttacttacatgatgaaatgagatattctatgctgggaagatgtaagaaagtgaccataagcagcactaataatctgttcataatggagtaatgtaaatattgcacctcttcaatatgcattctcatttttatgagtctatatttatttcttaacataaaaactattttttgtctactttataagttttagctgagatccctaaagagcataaagtataaacacaacacagacacatacacctatatatacttcccattamcctcatttctctgatagcaaatctacggcagagtgataataaggagtactttgaaatgcaagcactacataagtacaaagtagaattttttttcaagagtgggagaagtcatattaaaaatcaggaagccggtaagataagcaagaaagataattctaaggcatattcagagaacaaa

SEQ ID NO: 876738 - DNA, 642 bp, Homo sapiens
taataggtgagtggcagcaaatctctactgtctcagtttgagggcaccaatgaggtgaagggactgaggccttcatgacttgctgacagcagggctctgctgacaggcttgtgatgtggatccacccaaatgtgattgggtcagtcagagcagcagggagagagagtcacagaaaaggtaggcacatttctgctgtgttccctcactgcttcttccaggactctaacccctcaacttatgacttaacactatcaaagcaagtcaggctgaggatagactccacaagagcactatgttttccaattgttccatttattttggtccccatgacaaaatccttaagaacacttaatttaggctgtatggtaktattgttcatggttaatggtttattttcccaaaataaccacaaggcactctacaccacaaacagcttatgttccaaatggatgctatttgtagagtagtgtttatttactcatccctgctggatgctgactatagcctcatgagtaccccatactaacctatcattgcacttactacataatattgaatgtgtcttctcctttatagcagaaattctgtctcagtcatcttctatccccgttcctagcacaaagtctggcacagacatgtact

SEQ ID NO: 876739 - DNA, 642 bp, Homo sapiens
taataggtgagtggcagcaaatctctactgtctcagtttgagggcaccaatgaggtgaagggactgaggccttcatgacttgctgacagcagggctctgctgacaggcttgtgatgtggatccacccaaatgtgattgggtcagtcagagcagcagggagagagagtcacagaaaaggtaggcacatttctgctgtgttccctcactgcttcttccaggactctaacccctcaacttatgacttaacactatcaaagcaagtcaggctgaggatagactccacaagagcactatgttttccaattgttccatttattttggtccccatgacaaaatccttaagaacacttaatttaggctgtatggtattattgttcatggttaatggyttattttcccaaaataaccacaaggcactctacaccacaaacagcttatgttccaaatggatgctatttgtagagtagtgtttatttactcatccctgctggatgctgactatagcctcatgagtaccccatactaacctatcattgcacttactacataatattgaatgtgtcttctcctttatagcagaaattctgtctcagtcatcttctatccccgttcctagcacaaagtctggcacagacatgtact

SEQ ID NO: 876740 - DNA, 642 bp, Homo sapiens
taataggtgagtggcagcaaatctctactgtctcagtttgagggcaccaatgaggtgaagggactgaggccttcatgacttgctgacagcagggctctgctgacaggcttgtgatgtggatccacccaaatgtgattgggtcagtcagagcagcagggagagagagtcacagaaaaggtaggcacatttctgctgtgttccctcactgcttcttccaggactctaacccctcaacttatgacttaacactatcaaagcaagtcaggctgaggatagactccacaagagcactatgttttccaattgttccatttattttggtccccatgacaaaatccttaagaacacttaatttaggctgtatggtattattgttcatggttaatggtttattttcccaaaataaccacaaggcactctacaccacaaacagcttatgttccaaatggatgctatttgtaragtagtgtttatttactcatccctgctggatgctgactatagcctcatgagtaccccatactaacctatcattgcacttactacataatattgaatgtgtcttctcctttatagcagaaattctgtctcagtcatcttctatccccgttcctagcacaaagtctggcacagacatgtact

SEQ ID NO: 876741 - DNA, 568 bp, Homo sapiens
taataaggtgtgttttgtatttatttagaaccactttagtttctattactgatattttgctattttagtgaagaagacttatgcattactgatggatttattccttggtatttcatattaaattgatactattgttttttctttttctttctgttttttgagatagggtctcactgtcacccagctggagtgcagtggtgagattacagcttgctgctacctcagtctccaaggactgaatgatcctctcacctcagccttcctagtagctggagctacagacacgtgccaacacatggcgctaawttttttttttttttttttttttttttttttgcagtggagcgaggtagagacaggatctcactatgttttctaggctggtcttgagttctttagcttaggtggttctcctacctcagcctcccaaaatgctgggattacaggcatgagccaccatgttcagcctaaattgataccattttaagtcacgttttttttcttaaatttatgttctaattgttattaatatatagaaatatattaatttacctatatttacatgata

SEQ ID NO: 876742 - DNA, 602 bp, Homo sapiens
cacgtagcataatgtccttgagttcatccatgttgtcatgaatggcattattcttattcctttttgaggctgaatattattccattgtgtgtgtgtgtgtttgtgtgtgtgtacgtgggtgtatgtgccacattttctttttccatttatttgttgacagacacttaggttgtttccatatcttggctattgtgaatagcgctgcagtgaacttgggaaggcagttatctctttgagatactgatttcatttcctktggatgtatatccagatgtgggatttctggattgtatggaagttctacttttaattttttgaggaacctcatactgttttccataatggctgtaccaatttacattcctcacaacagtgcacaaaggtccaggaagggagattattaagacaatgagctgagagcctaaaagtccaagttggaacggttgaagttacaatggtgagaccaaatgattcccaaacttgtctgaacattggcatcccctgggaactttcagaaatactgatgcctgtaatcaacccccagagattgtggcaaaatttgcctggaatgcagcccaagttttggaagcattaaaagatcc

SEQ ID NO: 876743 - DNA, 590 bp, Homo sapiens
tgcttttgttcattgtaaatgctaccaatacaagaacaagagaattctatctatattgatataaaaccatttccaaataagaggaaaaaagggcaaggtacagaatggtgtgtgtaccgtaccaccatttgtgtaaagaagttgaaacgagatttcytttttttttttttttttttttttgagacagggttttgctctgtcacccaggctggagtgcagtggcacaatcttggctcactgcaacctccaccttcccaggttcaagcaattctcctgcctcagcctcccgagtagctgggattacaggcacctgccaacatggctaatttttatagttttagtagagatggggtttcaccattttggccaggctggtcttaaactcctgacctcaggtgatccacccgcctcagcctcccaaagtgctgggattacaagcacctggcaagaagttaaaccggaagatatccgtatctatcactggataactatattataggtagatatatctctatttatatagatagatatatagatatctcctatgacttttttttttacaaaaatggtgatatgctacacataccatc

SEQ ID NO: 876744 - DNA, 602 bp, Homo sapiens
ttccctttgttaatggtcctaagttcttttattcaacccaccagaggtccaataaattgccatcaaatcatagagggtcacataggtaatgggccccaaggggcatggcatatcagattccctatgtgtataaggttaggaaactataccccatcttctcaggatcaaacacccacatttacaaggttactactttcacctgatakaataataacttcagaaccctgctcatctgggaatcagcactagctggccgagtttaggacatacccacagttagattttcaggttctcacctacagaacagatcctcggaactgggtttcctgaacttgtgcagtatgaaaaattagcttttgagtttgaaataacagaatttgtaatagaaagagataatactctaaagatcagactatacttccatttaatctttttattaattttagcatgcaatttggcttttaccctcaatgcttttacaaaaggtgctttcaaaggtcaccaaatcaaagggactgctctagggctaggtctcctttaatgcggaggcatttgaccttgttgtcttctttctgggagagtacttcccctaagtctcctcc

SEQ ID NO: 876745 - DNA, 587 bp, Homo sapiens
tacacgatcaacaaaatgtgcagttaggaagtactttgggagacatgtcagtaggtacagcaggttgataagccagaccttcctacctaactcaaactgtcctgcttcacaaaatcgatgtgtgagtaaaatgtctattaactgaattacatattaatgtgtgagaggagtttgccatgtgaagtatttcttttggtaaactatatttctttttcttttttttttttttttttttttgaggggggatctcactccattacccaggctggagtgcaatggcgtaatcttggctcactacaacctccacctcctgggctcaagcaatcctctcacatcaacctcccaagtagctggaaacaaargcatgggccaccatgcctggataattttttctatttttagtagagatgaggtttcaccatgttgcccaggctggtcttgaacttctgagctcaagtggtccacctgcctcagcttcccaaagtgctgggattacaggtctgagccaccacacctagcctaggtaaactatgtttctttaatgaagaatcatttagtaatgtgtattttgtcccaataggtcttta

SEQ ID NO: 876746 - DNA, 640 bp, Homo sapiens
cggggcttgtaagaagataaatagctttaaaaatgccgttagagaagaaatgtctcaaatcaatgatctaaagttacagttttaaaaagtcagcaaaagaagtgaaataagtccaagatagaatgaaggaaataataaagacaaaagcaaaaatcgacaaaatagaaaacagacaatagagaaaattaaagctaaaagttggttttttgaaaagaggaacaaaattgataaactccttataccagtacagagtggtcttggttcatgtagctgtacagtaagtcttgaaatcaggtagtttaaatccttcagctttattctttttcaagattgctttgactgttaggtcttttgtctatataaactgtagactcagtttctcggtgccttttytccttattatggggttgtattttcctgcttctttgcatgcctggtgattctttctaattggatgccagatactgtgaatgggtaccaaatatatttgtattcctataaatattcttgatctttattctgggtcccagtgaagttacctgtaaacagattgatcctttcaggctttgctttttaaatttgctaggcaggacaaatagtgtgtagtctaggcctgtttttcctctgctacaaaggcgag

SEQ ID NO: 876747 - DNA, 509 bp, Homo sapiens
aaagtttaatcaaaatatttcttgaaatgtgtttattccgtgtagggtatcttaggcttcttgaatctatacatttgtgtcttctgcaaatttgaggtttttttgaagcactatttcttcaagtattctttcagcctcattttactttttttctggtacacgtaataaaaatgttggatcttttgttgttgcctcacacatacctacatctctgttcattttatgtatcagtctattttatttatgttgttcaaattggttaaattctactattctgccctcacattcactgattttaccttctcgcatctcaatggcrctattgactccatccaacacatttttcatttctgttaccgtgtttgtttgcttttataatttacattttgttcttttttgttgttttttttttacaaatcaagtttggttaatattttgcgattttgttatatattttaagataatttctatttgatgttgaaacatttttgctagatattttaaaatca

SEQ ID NO: 876748 - DNA, 699 bp, Homo sapiens
ctagaggcatgagtgttgggagatgggatgacggtacccgtgggacagtggagcagagttcctcccggaaccaccctggcctctgaggggctgtctgctgcctccagttggggcctcagctgaggacctggagggcggcgccatgttaacccaagcctgggtcacaggcatcctgtggggcggctyagtgggaggagcagtcagggggattgttcaccaggcagagggactggggagtcttgggttggccttgccccggtaaaccagggggtgttgtgagtcttgcctgagtcccatggggaagcggttcctttcaggaagccgttttcaggaacacagagtggggccatgtccgagcctgtgctgggtccaggagcccagggccccggtgaagttcagtatcggtgcagaaaacatttagaacttgttttcacatcagctgtcacatgtaattttcaccacagctcttcagggtccaggttcgagatcccattctaggaacagtgcagcttaggagcagagagagaaagcgactcatccaaggccacccgaacaggaacgggggctgggcaggaatcccggacccttccagcctcgtctcaggacccctgcttggttgctgagggtgagtggtctgtggagggcacggccctgagcagcctgaggggagctggcggcagacatgatcctcatggtgga

SEQ ID NO: 876749 - DNA, 347 bp, Homo sapiens
ttatcgtttctgaggaaatcctcaaagctatcaaaatatccacttgcagattctataaaaagagtgtttcaagagtggtctatcaaaaaaaaggttcacctctgttagttgagtaaacacatcacaaagtagtttctgagaatacttctgtgtagtttttgtgggaagatatttcctttttcacctttygcctcaaagcgatcaaaatgtccacttccagatatacaaaaagagtgtttcaaacctgctctatgaaagagaatgttcaactctgcgactggaatgctaacatcccaaagaggtttctgagaatgcttgtgtgtccatttcatatgcagattttcccg

SEQ ID NO: 876750 - DNA, 621 bp, Homo sapiens
atgtcagaaactttttcatgatgtatctactcagctaacagagttgaacctttcttttgagagagcagttttgaaacactctttttgtggaatctgcaactggatatttgtctagctttgaggatttcgttggaaacgkgattacatacaaaaagcagacagcagcattcccagaaacttctttctgatgtttgcattcaagtcacagagttgaacattccctttcatagagcaggtttgaaacactctttttgtagtatctggatgtggacatttggagcgctttcagacctatggtgaaaaaggaaatatcttcccctgaaaactacacagaagcattctcagaatcttatttgtgatgtgcgccctcaactaacagtgttgaagctttcttttgatagagcagttttgaaatcctctttttgtaaaatctgcaagaggatatttggatagctttgaggatttcgttttaaacgggattgccttcatataaactctagacagaagcattctcagaagcttcattgggatgtttcaattgaagtcacagtgttgaacagtccctttcatagagcaggtttgaaacactctttttgtagtatatggaagtggacatttcga

SEQ ID NO: 876751 - DNA, 544 bp, Homo sapiens
ttttgaaacactctttttgtggaatctgcaactggatatttgtctagctttgaggatttcgttggaaacgtgattacatacaaaaagcagacagcagcattcccagaaacttctttctgatgtttgcattcaagtcacagagttgaacattccctttcatagagcaggtttgaaacactctttttgtagtatctggatgtggacatttggagcgctttcagacctatggtgaaaaaggaaatatcttcccctgaaaactacacagaagcattctcagaatcttatttgtgatgtgcgccctcaactaacagtgttgaagctttcttttgatagagcagttttgaaatcctctttttgtaaaatctgcaagaggatatttggatagctttgaggatttcgtttkaaacgggattgccttcatataaactctagacagaagcattctcagaagcttcattgggatgtttcaattgaagtcacagtgttgaacagtccctttcatagagcaggtttgaaacactctttttgtagtatatggaagtgg

SEQ ID NO: 876752 - DNA, 564 bp, Homo sapiens
gaacattccctttcatagagcaggtttgaaacactctttttgtagtatctggatgtggacatttggagcgctttcagacctatggtgaaaaaggaaatatcttcccctgaaaactacacagaagcattctcagaatcttatttgtgatgtgcgccctcaactaacagtgttgaagctttcttttgatagagcagttttgaaatcctctttttgtaaaatctgcaagaggatatttggatagctttgaggatttcgttttaaacgggattgccttcatataaactctagacagaagcattctcagaagcttcattgggakgtttcaattgaagtcacagtgttgaacagtccctttcatagagcaggtttgaaacactctttttgtagtatatggaagtggacatttcgagcgctctcaggactgcggtgaaaaaggaaatatcttccaataaaagctagatagaagcaatgtcagaaactttttcatgatgtatctactcagctaacagagttgaacctttcttttgagagagcagttttgaaaccctctttttttggaatctg

SEQ ID NO: 876753 - DNA, 544 bp, Homo sapiens
aaagctagatagaagcaatgtcagaaactttttcatgatgtatctactcagctaacagagttgaacctttcttttgagagagcagttttgaaaccctctttttttggaatctgcaagtggatatttgtctagctttgaggatttcgytggaaacgggattacatataaaaagcagacagcagcattcccacaaacttctttgtgatgtttgcattcaagtcacagagttgaacattccctttcatagagcaggtttgaaacactctttttgtagtatctggatgtggacatttggagcgctttcaggcctatggtgaaaaaggaaatatcttcccctgaaaactaaacagaagcattctcagaaacttatttgtgatgtgcgccctcaactaacagtgttgaacctttcttttgatagagcagttttgaaaccctctttttgtaaaatctgcaagaggatatttggatagctttgaggatttcgttggaaacgggattgtcttcatataaactctagacagaagcattctcagaagcttcattg

SEQ ID NO: 876754 - DNA, 638 bp, Homo sapiens
attgggatgtttcaattgaagtcacagtgttgaacagtccctttcatagagcaggtttgaaacactctttttgtagtatatggaagtggacatttcgagcgctctcaggactgcggtgaaaaaggaaatatcttccaataaaagctagatagaagcaatgtcagaaactttttcatgatgtatctactcagctaacagagttgaacctttcttttgagagagcagttttgaaaccctctttttttggaatctgcaagtggatatttgtctagctttgaggatttcgttggaaacgggattacatataaaaagcagacagcagcattcccacaaacttctttgtgatgtttgcattcaagtcacagagttgaacattccctttcatagagcaggtttgaaacactctttttgtagtatctggatgtggacatttgsagcgctttcaggcctatggtgaaaaaggaaatatcttcccctgaaaactaaacagaagcattctcagaaacttatttgtgatgtgcgccctcaactaacagtgttgaacctttcttttgatagagcagttttgaaaccctctttttgtaaaatctgcaagaggatatttggatagctttgaggatttcgttggaaacgggatt

SEQ ID NO: 876755 - DNA, 560 bp, Homo sapiens
atctactcagctaacagagttgaacctttcttttgagagagcagttttgaaaccctctttttttggaatctgcaagtggatatttgtctagctttgaggatttcgttggaaacgggattacatataaaaagcagacagcagcattcccacaaacttctttgtgatgtttgcattcaagtcacagagttgaacattccctttcatagagcaggtttgaaacactctttttgtagtatctggatgtggacatttggagcgctttcaggcctatggtgaaaaaggaaatatcttcccctgaaaactaracagaagcattctcagaaacttatttgtgatgtgcgccctcaactaacagtgttgaacctttcttttgatagagcagttttgaaaccctctttttgtaaaatctgcaagaggatatttggatagctttgaggatttcgttggaaacgggattgtcttcatataaactctagacagaagcattctcagaagcttcattgggatgtttcaattgaagtcacagagttgaacattccctttcatagagcaggtttgaa

SEQ ID NO: 876756 - DNA, 413 bp, Homo sapiens
tttttgtaaaatctgcaagaggatatttggatagctttgaggatttcattggaaacgggattgtcttcatataaactctagacagaagcattctcagaagcttcattgggatgtttcaattgaagtcacagtgttgaacagtccctttcatagagcaggtttgaaacactctttttgtagtatctggaagtggacatttggagmgatctctggactacggtgaaaaaggaaatatcttccaataaaagctagatagaagcaatgtcagaaactttttcatgatgtatctactcagctaacagagttgaacatttcttttgagagagcagttttgaaacactctttttgtggaatctgcaagtggatatttgtctagctttgaggatttcgttggaaacgggattacatataaa

SEQ ID NO: 876757 - DNA, 413 bp, Homo sapiens
tttttgtaaaatctgcaagaggatatttggatagctttgaggatttcattggaaacgggattgtcttcatataaactctagacagaagcattctcagaagcttcattgggatgtttcaattgaagtcacagtgttgaacagtccctttcatagagcaggtttgaaacactctttttgtagtatctggaagtggacatttggagagatctctggactrcggtgaaaaaggaaatatcttccaataaaagctagatagaagcaatgtcagaaactttttcatgatgtatctactcagctaacagagttgaacatttcttttgagagagcagttttgaaacactctttttgtggaatctgcaagtggatatttgtctagctttgaggatttcgttggaaacgggattacatataaa

SEQ ID NO: 876758 - DNA, 554 bp, Homo sapiens
cagaaacaaattaaaaggttgtatacatactgcttgaaaaacacaacttaccaaaaccaaatataagagtatgtatacccgtatatttatgaaataaatagaatccataatttaaaacttcctcacaaaaacaatccccagttcctgatggcatcactggtgaattcctcaatgaaagggaaaaaataacaccaacattacagatttttttttaaatcttagggacagagtctcactatgttgcccaggctggagtcagtggctattcacagtcaygttccagttatcctcccacctcagcctcttgagtagatgggcctagaggatacagaaacttttaagagaacaaaaataaagggaactcctgagctcaagcacttctcccacctcggcctcccaaagtgctgggattacaggcatgaaccactgtgtcccgcttagtgtgctgtttttaaaaatgacttttgggctcgtgttcatgtgactgattagcctgtagttttactttttgtaattttttagactacttttggtatcaagtttattgtaatctc

SEQ ID NO: 876759 - DNA, 588 bp, Homo sapiens
gcccacctcccagacaacttcctatggacattcgattttttaaacataggatatgttaagtgatggtcttcattcctcgatgtcacattttaaatttgtattactttttcttcattttccaaagctccagctcagcatctttgtatgcctctcatatatatatatatatatatttttttttaaagtctcagtagmctttttaatgtgtcgatttctacaccccagcctcaggtagtataagcttcatgaggacaggaaccagccctgcctgctcacactgtcaccagcatgttcacagggccgacacatgccaggcactcaggtattagttgaataggtaaatggaagactggaaaatgtaggctgaactgagaacttgtggatagacacacctcagtgatttgtgaaaaggaagattggtccaaagcaatgtttgttaaccaaattttcattatcaaagaggaaaaactaaacattccctaacagaaatgaaaaaggaataaaatttttgttagatgatgttgagctttgaaatgccaccaaggacactttcaatatcaaatcttctcatccacccaactccagaaa

SEQ ID NO: 876760 - DNA, 638 bp, Homo sapiens
actccagtctggtgacagagcaagcctccatctcaaaaaaaaaaatatatatatatatatatatatatatatatactttactatgataaagacattttataaacaccatttaccatttgatcacctattaagctaaaggctgyacatacatttcactaatccttagaacaactttgttcagtaaaaattattcctggtttacagaggagaaaactgaggctcagaaaggctactcatttatttgaagtctcacagccttcataatgttattcatgcactctttatgccctagatagttggagaaattacaggggagaatctcagaaataactaaaataattgaagatgtaatcaagaaacaaaagtacagtgtttgaatagagaccaactaaagacagctgggactggttcagtctgcctataattgaaaggtaaatcactaggaaagggaaggagtctctgggtttcaagatgaaatagaagtcatgagaattctataaatttcaattcaagttcactgaagagagctaggagtcagctactgtttgctgcagataatattcagtaaggagctaactgctaatgcactggcctggggaagtgtttagtgtcaaatagaaaccaacactagtaaaata

SEQ ID NO: 876761 - DNA, 548 bp, Homo sapiens
ttaaccttgtaaaatgaactggggagtcttctttctgtattctctgtttgtgttagtggaagagtttttttttgtttgtttggttggtttgtttctcttgtatgtttcatggaactttttggtgaaggcacttgggcctacaaatttctttatgggaagwttttcatgactgattcaatatatttaatctatgtaagttttttttctacttttggagtgaattttgatttttttccctagaaattcatatctcaccaagtatggtggcttatgcttgtaatcccagcactttgggaggctcaggtgggaggaccacttgactacagtagttcaagaccagcctgggcaatatagtgagactccatctctacaaaaaaaataaaaattagcttggtgtggtggcgggtgcctgtagtgtgagctacttgggatgctgaggtgggaggatcatttgagcctggaaggtcgagactgcagtgagctgtgattgtgccactgcactccagcctgggtgacagaatgagacgttgtctaaaaaaaaaaaaaag

SEQ ID NO: 876762 - DNA, 548 bp, Homo sapiens
ttaaccttgtaaaatgaactggggagtcttctttctgtattctctgtttgtgttagtggaagagtttttttttgtttgtttggttggtttgtttctcttgtatgtttcatggaactttttggtgaaggcacttgggcctacaaatttctttatgggaagattttcatgactgattcaatatatttaatctatgtaagttttttttctacttttkgagtgaattttgatttttttccctagaaattcatatctcaccaagtatggtggcttatgcttgtaatcccagcactttgggaggctcaggtgggaggaccacttgactacagtagttcaagaccagcctgggcaatatagtgagactccatctctacaaaaaaaataaaaattagcttggtgtggtggcgggtgcctgtagtgtgagctacttgggatgctgaggtgggaggatcatttgagcctggaaggtcgagactgcagtgagctgtgattgtgccactgcactccagcctgggtgacagaatgagacgttgtctaaaaaaaaaaaaaag

SEQ ID NO: 876763 - DNA, 666 bp, Homo sapiens
ctttccctgcaaatatttgcttcaacattataggcaaaccagtctcttcactctgtcgtgggcaagcccagagcttttatctgacatgacaggctttaaagtgtcctttcaacagcaggacaaagtgaaatacacagatattttcaataaataaataaataaataataaataaatttttgttttcctggagtaagaaaaacaaaaacaaaaacgagaaagagcatattttcttttcggtggaaactcagggaggaaattttaatgtacaaagtaagatttctcctgccaaattcctaaatgaatagggatatttttaatttgccaaaacgtccactttattcaatacttttctatgatgtaaagttactgaatgttcaggataaaaataatattttgatatttatggaagagattgttamaaaatcagaaaattctttgagggcccacttgtgaaaccagcaaagacagaaggagaagggccagttgatgttctgcatttataaaagcatgtgccagccttccacaccgtgataatgtgcataggtttaaggaaaatgacatagttttgttgcatgcagacttctaaatatcatcattttgaggcaaattaaaaatcagaggtcatataagaattatctattacgtgttcatcattttcctgagct

SEQ ID NO: 876764 - DNA, 688 bp, Homo sapiens
caatgccagcctgtgaaagtagccaggagggaggctgtacccagcaaagccacagggatggagcttcccaagaccacgggaaaccacctcttgcagcagcatgacctgcatgtgagacatggagtcaaaggagatcatttggcatcttgactgcctggctggattttggactttcatagggcctgtggaccctttgttttggccaatttctcccatttggaatggctgtatttacccaatgcctgtacccccattttatctaggaagtaactaacttgctttttgattttacagactsataggcagaagagacttgccttctctcagatgagactttgggctgtggacttttgagttaatgctgagttaagattttgagggactgttgggaagtcgtgattggttttgaaatgtgaggacacgagatttgggaggggccagtgatggaacaataacctttgtctgtgtccccatccaaatctcaacttgcagtgtagctcccacaattcccacatgttgtgggagggacccggtaggaggtaattgaatcatgggggccagtctttcccatgctattctcatgatagtgaataagtctcatgagatctgatggttttataaaggggaatttccctgcacaagttctcttcttctcttgtctgctaccacgtgagacatgccttttgcc

SEQ ID NO: 876765 - DNA, 688 bp, Homo sapiens
caatgccagcctgtgaaagtagccaggagggaggctgtacccagcaaagccacagggatggagcttcccaagaccacgggaaaccacctcttgcagcagcatgacctgcatgtgagacatggagtcaaaggagatcatttggcatcttgactgcctggctggattttggactttcatagggcctgtggaccctttgttttggccaatttctcccatttggaatggctgtatttacccaatgcctgtacccccattttatctaggaagtaactaacttgctttttgattttacagactcataggcagaagagacttgccttctctcagatgagactttgggctgtggacttttgagttaatgctgagttaagattttgagggactgttgggaagtcgtgattggttttgaaatgtgaggacacgagatttgggaggggccagtgatggaacrataacctttgtctgtgtccccatccaaatctcaacttgcagtgtagctcccacaattcccacatgttgtgggagggacccggtaggaggtaattgaatcatgggggccagtctttcccatgctattctcatgatagtgaataagtctcatgagatctgatggttttataaaggggaatttccctgcacaagttctcttcttctcttgtctgctaccacgtgagacatgccttttgcc

SEQ ID NO: 876766 - DNA, 688 bp, Homo sapiens
caatgccagcctgtgaaagtagccaggagggaggctgtacccagcaaagccacagggatggagcttcccaagaccacgggaaaccacctcttgcagcagcatgacctgcatgtgagacatggagtcaaaggagatcatttggcatcttgactgcctggctggattttggactttcatagggcctgtggaccctttgttttggccaatttctcccatttggaatggctgtatttacccaatgcctgtacccccattttatctaggaagtaactaacttgctttttgattttacagactcataggcagaagagacttgccttctctcagatgagactttgggctgtggacttttgagttaatgctgagttaagattttgagggactgttgggaagtcgtgattggttttgaaatgtgaggacacgagatttgggaggggccagtgatggaacaataacstttgtctgtgtccccatccaaatctcaacttgcagtgtagctcccacaattcccacatgttgtgggagggacccggtaggaggtaattgaatcatgggggccagtctttcccatgctattctcatgatagtgaataagtctcatgagatctgatggttttataaaggggaatttccctgcacaagttctcttcttctcttgtctgctaccacgtgagacatgccttttgcc

SEQ ID NO: 876767 - DNA, 660 bp, Homo sapiens
ggtagtatgaacctgaagccattcttttatcataaatcttcttacccctttattgaatttgggaaataataagtgctcacaccttttgctctgcctggcacctacatctgcttcccagcagccatcacacatggtgcattatgaaaatcctggtgagatgtgacacaattatgatggagattgaagcgtccagtgtaatatatttcactcaragatgccaacacttacaattcaaatcccaccctcaccccatcaggatttgttaggtgaaattagtttttaaaaaaagatgaatagagatgtaattctttctaaagaacaaatcacctctaccattcctatttaattatttaaaaaatattcaaatgctacttgaaaaattaccacataatttttaaaattctatacatgggattacatttatacaagtttgctaagatgcaagtggcatttggaatagtcaacaattaggcattttccaaagcatttatttttgaaagatgtctggcctaaatatgtcattatcattagagtttagtgatttttacaatcagaacatagctgtcaaaagggctggtttttgacatcatggttactgttgaggaaaaccacagccctgaatttgaaagctcttctcctaggagaggcccttgcctttca

SEQ ID NO: 876768 - DNA, 628 bp, Homo sapiens
atatgacccagcaattccattcctaggtatatacacaagagaaatgaaaacatacagtcatgcaaaatgtatacacaaatgttcatagcagtattgttcataatagccaaaatatagaaaaaaaatccatgaactggtgaataaacaaatatggtatattatacaatgtatttggcaataaaaaggaagaagtactgatacatggcatagcatggatgaaccttgaaaacattatgctaagtgaaagtaggcagtcacaaaagaccacatagtttattatccaatttataataaatggacatatcaacaaatcyatagagaaagtagattcgtggttgcatggggcttgcagaagggcaggaatgaaaaatggtaataggaaggttttctttaggggtgatgaaaatgtaaaattggatagtggtgatggttgcccacctccataaatattctaaaaaccattgaattgtgcactttacatgggtgaattataaggcatatgaattatatctcaataaagctgttaaagagaaataattatctacaataaaaataagaacaatgtgttacatggcttgtaacatatgtagaagtaaaatgtacaatgtggtggttaatactgagtgtc

SEQ ID NO: 876769 - DNA, 701 bp, Homo sapiens
aattttataatcacaaagtcaatggttataatttttatttcatcattaacagtttgttttacacatttttgtgtttatactcctcattctatttcacaggttgaatcatttgaattgatcactgatctcatacaatttaatttttaatgactaaccatataactcgtttgtgactaaggtcatgctaccrctatatgctaagtgaagtgtacaatttgctatcatgaaatatctttttaagacctggactcttgacttgaccaaatcctgcctctgcattaaccatggctgaaacagggacaaaactcaagcttcaggcatccactgacaggtaattaattaacttaaaattatatgctcaatttatagcatactttatagtcttattaggttcagacagaattatgtatagaaagaaagtgtactatctatgtttaaggggaaagaaaccaaagctaatactggtcagatagacagacatgttttatgtatatggcataaaggtatggatttggtcttgaaaacaatgagaagccataaaactatttaaacaaaggagttgtatgaatgtacttgtgtaagaatgaacaccatagtagcagtgaagaataacattttggggaaagggagaaggaagcaggtgtgagtagaggcttcatatctattacagtaattcagtcaacatgtaataagccaccacc

SEQ ID NO: 876770 - DNA, 623 bp, Homo sapiens
aaaaacaaaagactgtattggagagaaatatcaatcttagaactatcatagaaacctattatatttacagataatgaagcataagatacttacaggttcctgagaatatgtggactctaggaaagccctatttcaacagaatatgaaagaataaacatataaataagaaaagaaataccaaagtctagactcacaaagagaatttcagatcagacaattctccatctacactacacattaaaaaattatactgagaaatctagaactagaaataccatttgacccagccatcccattactgggtatatacccaaaggattataaatcatgctgctataaagacacatgcacacgtatgtttattgtggcactattcacaacagcaaagacttggaacyaacccaaatggccaacaacgatagactggattaagaaaatgtggcacatatacaccatggaatactatgcagccatagaaatgaacagttcatgccctttgtagggacatggatgaaactggaaaccatcattctcagcaaactatcgcagggacaaaaaagcaaacactgcatgttctcactgataggtgggaattgaacaataacacatggacacaggagggg

SEQ ID NO: 876771 - DNA, 549 bp, Homo sapiens
aactcagctctgcaccaagcagacctaatagatatctacagaactctccaccccaaatcaacagcatatacattcttctcagcatcacaccacacttattccaaaattgaccacatagttggaagtaaagcgctcctcagcaaatgtaaaagaacacaaattataacaaactgtctctcagaccacagtgcaatcaaactagaactcaggattaagaaactcactcaaaaccgctcaactacatggaaactgaacaacgtgctgctgaatgactactgggtacataaygaaatgaaggcagaaataaagatgttctttgaaaccaacgagagtaaagacacaacataccagaatctctgggatgcattcaaagcagtgtgtagagggaaatttatagtactaaatgcccacaagagaaagcaggaaagatctaaaattgacaccttaagatcacaattaaaagaactagagaagcaagagcaaacacattcaaaagctagcagaaggcaagaaataactgagatcagagcagaaatgaaggaaatagag

SEQ ID NO: 876772 - DNA, 594 bp, Homo sapiens
ggttatttgagacaaaacatgtcagaatgctttgtaaacttgcaaagaatactgaaaagcaaggtattttgttattttttaaaattgaaagaaagttcaaacaacacaaccttgttgacatccttgattgaaataaatgcaaaaatgttataacggttggaaaaatgaacatgaagattgaaggtacacaccaaaaaataacaggtgtcaactgaaattctccaatttagataatataaatcattttctcccatgtaaatagatcatcatccaggtcaattcatatatagcttaatttgatgttgtggggaaaacaaaaacatataggtcctgacatattctaatttcttcatatacttttttaaaaataaaactttcctcttacagcagttttaagttcacaataaaattaaaaggaaggtccagagattttytatatatccccttcctgtccccacatgcacattctcccccactatcaacttcccctgccagattgggccatttgttacaattgatgaacctccattgacacatcattatttcccagagtccatagtttacttcagggtttatttactcttggtgttttac

SEQ ID NO: 876773 - DNA, 632 bp, Homo sapiens
gcaacagcctattttgacatcctctagcctcataatctgaatttggacttggattacaatgaggtgaaatttggcaataataagttgatacactttggctttttttttttgccacgtgaaagcaattatctgttttacttagaagcaagacttttaaggatttttaatgccactttgtacctactctgctttcagcaagatacacgtgtgttcagtcatttatagctgtatagcctaatgaaaatatagcaacatctaaatatattttattttccagagttatgcagggataatgaattttctgtaacatttcttttgcttgcagcattcggcatcaacagcattttatatcagcgtggcatatatccatctgaaacctttactcgagtgcagaaatacggactcaccttgcttgtaactactgatcttgagctcataaaatacytaaataatgtggtggaacaactgaaaggtattttaatcattggaaacaatttgagtcttgcagattttctagcatcttaagcagtcatttttccgctctgcacatagaagtgtactgacatctcaaatatattttcaattgagaggaagaaaataatatataaaatggaagaaatacactcttcccc

SEQ ID NO: 876774 - DNA, 632 bp, Homo sapiens
gcaacagcctattttgacatcctctagcctcataatctgaatttggacttggattacaatgaggtgaaatttggcaataataagttgatacactttggctttttttttttgccacgtgaaagcaattatctgttttacttagaagcaagacttttaaggatttttaatgccactttgtacctactctgctttcagcaagatacacgtgtgttcagtcatttatagctgtatagcctaatgaaaatatagcaacatctaaatatattttattttccagagttatgcagggataatgaattttctgtaacatttcttttgcttgcagcattcggcatcaacagcattttatatcagcgtggcatatatccatctgaaacctttactcgagtgcagaaatacggactcaccttgcttgtaactactgatcttgagctcataaaatacctaaataatgtggtggaacaamtgaaaggtattttaatcattggaaacaatttgagtcttgcagattttctagcatcttaagcagtcatttttccgctctgcacatagaagtgtactgacatctcaaatatattttcaattgagaggaagaaaataatatataaaatggaagaaatacactcttcccc

SEQ ID NO: 876775 - DNA, 617 bp, Homo sapiens
gtaaattgtaccttcctcataactgggccttgatgggccctgctctttcacaggcagtattacagtgaggggaaatagatctcagagtgcaagacaggttggtttggaagttaaacacttaattataactatgtgatgcaagctatgtcatcacaggcaagtcacttaactgctctgagctccggtttccacaactgaaacgcgtgttaattaaacctccaattgttcttatagcttgaagtgctattcaaatataaagaatattatttttcaggttaaatcagacaagaaatttggcatttggatggaacactcttggccaagaaacaatacattttttagagaaaaaaagccaatattttatttctttacaagataaataaattgcaataggttaattggttcctagaaaacttactcctcattgctacaattctctgattgagatcaattcacctgtttcttactaatgaktaatattttctccactatttcactgcagtgttccatatccaaattgagaatatgttaaggctcatttgtaaggacttataaacctctagctttttttttaaaaaagtagcaaattgcatatagcatgcaattgtccattagtg

SEQ ID NO: 876776 - DNA, 604 bp, Homo sapiens
gtaattttccaaagaaggctgaaccagggtatggtgtgtgtgtgtgtgtgtgcgtgtgtgtgcgtgccatgcatgtcatgtgtttgtttgcctgcagtttgggtaagcaggtggcaaaatggcagtgggaagaaatcaaggctttttacttactgttgtgcccaggttggtctctagaggatgggatcctctccagacgactaaatattctggtctmtggatgatatgttttattttactgcctcttgcccctctctcccaaacaaaaattctactttggtaaatccataacttcgataaagagaacaacttcctggtattgattgaagttaggtttctcaccttgtttacacattccaatgaacatttatgcccattaatatagcaatttcctttagggattgactgtaagtgagtcattaataataaatattcaaatctctttcctgaatttacaggggttggggaagtggttaaggactaacctagggaaaaaaaccccaactctcttacatttggtatacgtaaataaatttatatacgctgtcttcaatctgagaaaatcaagatgctatgataccagcaaaccccagactagatggct

SEQ ID NO: 876777 - DNA, 625 bp, Homo sapiens
taaatgtatcatttcaaacttttttgagggcaggcatgcttaaaaccatttggtgttgggtatgatgatggatgaggatgcactgagtctgtgttgtggccatctctgtggcctgggctcatgtcttcttcagtctgggatctaggctgagaggcaacctcaacttggtcttgtggtggaggaagaagagcaatgatggactcaggcagtgaacktcaagcttctgcttagaggtggacatgtcactttttttcagcatctgtcacttgaacccagacataatgccacatatgttaagtgtttgtttgtcattattgcagcagcatatttctgtatcttccagttttctctaggttatactgcagtgaggacacccccaaatctcagtagattacgagaacacagctctaattcttgttacatgctctactttgccaatgtgccagctctgggtcaaagagagctcttagcttgtgaccctgctcaaatgtctttattttggtgtccagggtaaaggaatagcccttgggctcttggaagaaggaaaagcacctcaaacttacttttattttacttctttttttttttaacagaactcgttgtccaaactgtgctagggcacaca

SEQ ID NO: 876778 - DNA, 631 bp, Homo sapiens
aagcctacaagccagaagagagtgagggccggtattcaacaatcttaaagaaaagatttttcaacccagaatttcatatccagccaaattgaacttcctaagttaaggagaaataaagtcctttacagacaagccaatgctgagggattttgtctccaccaggtctgccttacaagagctcctgaaggaagcagtaaatatggaaaggaaaaactggtaccagccagtgcaaaagcataccaaattgtaaagatcattgacactatgaagaaactgcatcaactaacaggcaaaataacaagctatcatcatmattacaggatcaaattcacacgtaataatattaaccttaaatgtaaatgagctaaatgccccagttgaaagacacagactggcaaattggataaagggtcaagacccattggtatgctgtattcaggagatccatctcatgcgcaaagacacacattggctcaaaataaagggatggaggaagaataaccaagcaaaaggaaaggaaaaaaaaaagcaggggttgcaattctagtctctgataaaacagagtttaaatcaacagagatcaaaaaagacaaagaagggcattgcataatggtaaagggatcaatgcaac

SEQ ID NO: 876779 - DNA, 671 bp, Homo sapiens
gtaatggttgtgaaacccctgcttccttcctgggctactcgtgaaaggcctgactaccagatgggaacactataatacatcatacaacctggaataatttggtaggtttttaagaagcatacgtatatgtggaaggaggtcttcttaatgggctgaatgaaaataatagcagcatgtcattctttcacgatgaactatttccccactccttttatatgaaggatgctcattagaaagtagcaaagataaagggtaggttttggtctataattgaagtgcacaaggggtcctaatgataccagaggaggcatagaacataaagttgctactgtgtcatgcccacccttcccaacttcttctactcctccckgctgaataatggctttgtgaacataagttattaggaatcaaaaaactttcaaacacatcatcactctctactttaaaaaattagtgtgttcccatgtaattgttagcaattcttacatagatccaagagacactgatttgcttccactaaaaatatctcctttataggtttgttagttcacctcaaatatttctaccattgggatcctatctttaaaataaaatattgaaaacctatgctaaaattttatgtactttatataaatgtaacttaccattagttgttaataccttgttaagaa

SEQ ID NO: 876780 - DNA, 702 bp, Homo sapiens
agcatgaaaaactaattatggaaagggaagaccattaccagccagtacaaaaacacaatgaagtacacagacaagttacacaataaagcaaccacataaacaagtctgccaaataaccagctaacatcatgatgacaggatcaaatccaaacatatcaatactaactttaaatgtaaatgggctaaatgccccaattaaaaaacacagagtggcaagctggaaaaagaaccaagacaaatttatatgctgtcttcaagaggcttatctcacatgcaatgacacacataggctcaatataaaaggatggagaaaaatttaccaagtaaatggacaacagaaaaaagcaaggaatgcaatcctagtttctgacaaaacagactttaaaccaataaatatcataaaagacaaagaagggcattatataatgctaaagagttcaacccaacaagaagaacttactatcataaatatatatgcacccaacacacgagcactcagattcataaaagcaagttcttagagaccttckaagatacttagactcccacacactaataatgggagacttttacaccccactggcaatattagacaggtcatcaagacaaaaaattaacaaagctattcaggacttgaacttggcagtagatcaaatggacattatagaaatatatagaactttccaccccaaaacaagagaa

SEQ ID NO: 876781 - DNA, 697 bp, Homo sapiens
aattgaccacataattggaagtaaaacactcctcagcaaatacaaaagaacagaaatcataaaaaacagtcctcagatcatagtgtaatcaaattacaaagcaggattaagaaactcactcaaaactgcacaactacatggaaactgaccaatctgctcctgaatgactactgagtaaataacgaaattaagggagaaataaataagttctttgaaaccaatgagaacaaagacacaatgtaccagagtctctgggacacagctaaagcaatgtttacagggaaatatacagcactaaatgcccacaggagaaagcaggaaagwtctaaaattgaaaaccctaacatcacaattgtaagaactagagaagcaagagcaaacaaattcaaaagctagcagaagataagaaataactaagatcagagcagaactgaaggaaaaacccttcaaaaaatcaatgaatccaggagctggttttttgaaaaggttaacaaaatagatagactgctagctagactaataaaggagaaaagagagaagaatcaaatagacacaataaaaaaatgataaagggggtatcaccactgatcccacagaaggacaaactaccatcagataatactataaacacatctactcaaataagttagaaaatctaaaataaatggataaatttctggacacacacaccctccag

SEQ ID NO: 876782 - DNA, 635 bp, Homo sapiens
atttagaaaaatttttaaactccaccaaaaaactcttagagctgatcaacaaattcaataaagttgcagggtacaaaatcaacatccaaaaaccatttgtatatctataaaccaaaaatgaaattgccaaaaaatacatcaagaaggtaatccaatttagaatagctaccaaaaaataaaataactatgaataaatttaaggaggcaaaggawctgtacaaggaaaactaaaacactggtgacagaaatttaagaagatacaaaaatgaaaagacttctcaggctcatggattggaagattttatatccttgaaatggcaatgctgcacaaagaaatctacagattaaatgcaattcctatcaaaataccaatgtcattttttactgaaatagaagaaacaatcttaaaatgtgtatggaaccaaaaaagaggctgaatagtcaaaatgaccgtgaacaaaaagaacaaggctaaaggcatgacactatctgacttcaaaacatgttaaaaggccatggtaacaaaaacagcacaatattggtataaaaacagacacatagaccaatggaacagaatacagaacccagaaataaatccacgtatttacagtcatctgatcattgacaaagttgcc

SEQ ID NO: 876783 - DNA, 609 bp, Homo sapiens
gtaattctgacatttgttgccatgatgtttgccagactgtttggacttaggtaacaggctaagcagatgtctactttctctctcactatttcatgactctagcctgaaagtttgcttacaaggatgagtgaccccagataaaggggtgcaattagctgtatacaatgaactctaaaggaatgctcaaaataaaattagttttaatgaattggaaataaacataagcctgacggcactttttgaagggtggaaaaatatgaaaaacgaagggggaggtggctacatgatttactcaaagtgaaattctctgctttagagtmtaaattgcatgccctttcagaggtacaaaaggcgcatatatattatcattgtttaatcattctacttcctttatttaatgtcatcaatatttctccattgtctgtgcaaactacttagatggggttttagggacattcaggctttagtaccattctatgtatccaggcttttcttttcagtctccctaaacaagctgtaccggccggggaaaataactctgacttgtcagcagaaaacacacagtcctgcctctactcattttctcatgctgattcctctgcctagaac

SEQ ID NO: 876784 - DNA, 576 bp, Homo sapiens
tttctggaaaggtgacatttgaactgagtcctaaatgatacaaagaacctatattcaaggaagggggctataggagtagagtattttattataggaagagggcagaacatgggaaatgcccctgcattgagtgagcgtataaaggggagggagagtgcttgataggaggttggagggatgagcagggctacctcctgctgggtgagggtgtgtcttttttataagtgtaaggaaaatcccatgaagaaacctatgcagagacatggtatacctagatttgttgtaaaagtattggtgtactgcccygtgacagttggtttggagagggcagagatggaaatgaagggaccagttaaaagggtgtggttcaggctagtgatgattggtggccttcaataagaaagcagaggacagacccaagatgtattttaagacaaattatcaaatcctgaataaaaataaataaaagtatttttcttaatatatactaccttaagcataattttatttttttgtgttgtcttctctcattcaccaaattgctagctcttcacagtgaggtcagtttctgataca

SEQ ID NO: 876785 - DNA, 585 bp, Homo sapiens
ttttaaacagtttaatttttctgggtacagagtaaatgtatatatttatgaggtatatgggatatattgatacaggcatacaaaatataataattacattgggataaatgaggtatccatcacctcacgcatttatcctttgtgttacaagcaatccaattatactctttaaaatgtacaagtaaatcagtattgactatagtcaccctattgtgctatcagataatagatcttattccttctttcaaaatattttttgtgcccatttaatcatcccctctccccttgccctacatttcccaaaccctggtaatcatcattctactttctatctctgagttaattgttttaatttttagctctcacaaataagtgagaasatgaaaagtctgtctttctgtgcctgactgatttcctttagcataatgacctccagttccatccatagtgttgcaaatgacagggtctcattcttttatggctgaatagtactccattgtgtatatgttccactttttttttttttatccattcgcctgttgatggacacttgggttgcttccaagtcttggctgttgtgaatac

SEQ ID NO: 876786 - DNA, 533 bp, Homo sapiens
gatgggcacttgggttggttccaagtgtttgctattgtgaacagcactgcaataaacatacatgtgcatgtgtctttatagtagaatgatttataatcctttgggtatatacccagtaatgagattgctgggtcaaatggtatttctggttctagatccttaaggaatggccacactgtcttctacaatggttaaactaatttacactcccatcaacagtgtaaaagtgttccacatsctctccagcatctgttgtttcctgactttttaatgatcaccattctaactggtgtgagatggtatctcattgtggtcttgatttgcatttctctaatgaccagagatgatgagctttttttcatatgtttattggccacataaatgccttcttttgaaaagtgtccattcatatcttttgtccactttttgatggggttgttttttcttgtaaatttgtttaagttccttgtagattctggatattagactttgtcaaatggatagattgtaaaaattttctcttattctgtagg

SEQ ID NO: 876787 - DNA, 672 bp, Homo sapiens
ctctcacggaagaagctgtctaggaccacctcagtgaattgattcagctcccaaaacacccaggaagcccttccagattaatgagaacaggaaggcaaacacactcccaggacgctgatccttgtgaacaagaaataagcagtggccataacccctcccttttaattcaccaccttttaaacttcaatcatattttcctgagacaacattggaaactggcctttctgttggcattccttcttcagtgcatagatcagtcattttaggctcacttcaaacctatttgaatcccacgtcccctgytcaccatgctacctttctttttactgtcctccaatcttagtcttggtactactgtgtgtgtgtgagagagagagagagagagaaaaaaaaaaaaagaaagaaagaaagaacagagacagcaagagagagagagaagagagacagtgagagagagagagagagagaagagagacagcaagagagagagagaacgagaacccagttcttaagcttcaagtttctaggcagatgtgaccaagtgagtgttttaagaaaatctgtgacttgcttgtcacacataccaatgcacattcttatcccctccattttcctgtgaggcagatattattacctatcccgtttccatggtaataataatgagtatttgtt

SEQ ID NO: 876788 - DNA, 535 bp, Homo sapiens
acttgaggcgtgagaattctcttgtagtgtagaggcttgcagatggctacatagcggtcaaaagccatggtcagcagcagccccgtctccacagctgtggctaagtggacaaaaaacatctgagtgaaacaagcactaaagctgatkgagctgtctcctgagcagaagatgctcaccatcttgggtaccaccgaggaggccataacaatgtccacagcagccagaacacacagaaagcaatacatgggctcatgccgagtggaatccatccagattgcagtcacgatgatggtgtttcctaacagggctatgatgtacatggcactcagtgagatagccagccaaagatgtgaagattgcagtcctgggatacccacaaggaggaaggaggcaggggtttccattgtgtggttataagctggacccagcatcacaagtgagacttttttcctgttaatgcacaaatgatgtatgagaagaatgcaatcccgtaagatttgttgacacatgtggtgctgggaaaacctaaggatat

SEQ ID NO: 876789 - DNA, 661 bp, Homo sapiens
taaccaataacaatctccaaaattgaatcattaataaaaagtcctcaacaaaaagcttgcaaacaaaattcagcagtacatcaaaaatctaatccaccgtgaccaagaagacttcatcactgggataaaaggtagattcagcatacataaatcgattataataatgtgatttatcacatagaactaaagacaaaaccaaatgattatctcaataaatgcagaaaaagcttttgataaaatctaacaccattttatgttaaaaactcttaataaactatgtattgaagaaacataccttgaaaaataagggccatctatgacaaacccatagccaacatactgaaggtgcagatgctagaaggattccatttgaaaactgggagaagataatgatgccctctctcaccacttcttttcagtatcatattggaattcctggccagagcaatcaggaaagagaaagaaaaaaaagsgcatccaaatagaaaaagaggaagtcaaactatccctgtttgcagacaacatgattctatatctagaaaacctcataatcttggctcaaaagattcttcagctgataaacaacttcagcagtttcaggatgcaaagatacaaaaccaatgtagaaaaattactagcattcttatacatcaacaacagc

SEQ ID NO: 876790 - DNA, 657 bp, Homo sapiens
atgtttatttatttgtatatgttcaaccagccttgcatcccagggatgaagccgacttgttcgtggtggataaactttttgatgtgctgttgtattcaatttccaagtattttattgaggatttttgcaatgattttcatcagggatattggcttgaaatttttgttgttgttgtgtctctgccagttttgatttctagatgatgctggcctcatgaaatgagttagaraggagttcctcttttgctattttttggagtactttcagaaagaacggtatcagctcctctttgtacctctggtagaattcagctgtgaatctatctggtcctgggccttttttggttggtaggctattaattactggctcaatttcagaacttgtgattgtgctattcagggattcgatttcatcctggtttagtcttgggagagtgtatgtgtccaggagtttacccatttcttttacattttctaatttatttgcgtagaggtgtttatcatattctctggtggtagtttgtgtttctgtgggatcagtggtaatataccctttatcattttttattgtgtctatttgattgttctctctcttttcttctttttttagtctggctagcaatctatctattttgttaatcttttcaaaaaaacagct

SEQ ID NO: 876791 - DNA, 643 bp, Homo sapiens
ctattttctatatgttttacttttggagagacaacttctacttgatcctccaagtcttaacattgcattttttaaagctccagttagtatatatttaattttcaagaactttttattcctctctggatatccttttgtaatcactgtggccctattttatagatgaaatattctctcaaatctatttgagaatgttaattagaaatatttttggytctgttctgtcaattatctctatttcttttttttttcttttttttttttttttgagatggagtctcactttgtctcccaggctggagtgcagtggcgtgatctcggctcactgcaagctctgcctcctgggttcacaccattctcctgcctcagcctcccgagtagctgggactacaggcagccaccaccacacctggctaattttttttctactttttttcagtagagatgggttttcactgtgttagccaggatggtctcgatctcctgacctcgtgatccacccacctcagcctcccaaagcgttgggattacaggtgtgagccaccgcgcccggccaattatctctatttctttcaggttcagtttttctgatactgtatcttggctattctcttaaatgttatagacttttcttgattatcca

SEQ ID NO: 876792 - DNA, 643 bp, Homo sapiens
ctattttctatatgttttacttttggagagacaacttctacttgatcctccaagtcttaacattgcattttttaaagctccagttagtatatatttaattttcaagaactttttattcctctctggatatccttttgtaatcactgtggccctattttatagatgaaatattctctcaaatctatttgagaatgttaattagaaatatttttggttctgttctgtcaattatctctatttcttttttttttcttttttttttttttttgagatggagtctcactttgtctcccaggctggagtgcagtggcgtgatctcggctcactgcaagctctgcctcctgggttcacaccattctcctgcctcakcctcccgagtagctgggactacaggcagccaccaccacacctggctaattttttttctactttttttcagtagagatgggttttcactgtgttagccaggatggtctcgatctcctgacctcgtgatccacccacctcagcctcccaaagcgttgggattacaggtgtgagccaccgcgcccggccaattatctctatttctttcaggttcagtttttctgatactgtatcttggctattctcttaaatgttatagacttttcttgattatcca

SEQ ID NO: 876793 - DNA, 643 bp, Homo sapiens
ctattttctatatgttttacttttggagagacaacttctacttgatcctccaagtcttaacattgcattttttaaagctccagttagtatatatttaattttcaagaactttttattcctctctggatatccttttgtaatcactgtggccctattttatagatgaaatattctctcaaatctatttgagaatgttaattagaaatatttttggttctgttctgtcaattatctctatttcttttttttttcttttttttttttttttgagatggagtctcactttgtctcccaggctggagtgcagtggcgtgatctcggctcactgcaagctctgcctcctgggttcacaccattctcctgcctcagcctcccragtagctgggactacaggcagccaccaccacacctggctaattttttttctactttttttcagtagagatgggttttcactgtgttagccaggatggtctcgatctcctgacctcgtgatccacccacctcagcctcccaaagcgttgggattacaggtgtgagccaccgcgcccggccaattatctctatttctttcaggttcagtttttctgatactgtatcttggctattctcttaaatgttatagacttttcttgattatcca

SEQ ID NO: 876794 - DNA, 621 bp, Homo sapiens
tggtactggtacaaaaacagacacatagacaaatggaacagaatagagaactcagaaataagactgcacacctacaagcatcttatcttcaacaaacctgacaaaaacaagcaatgaggaaaggattccctatttaatacatggtgctgggataactggctaaccatatgcagaaaattgaaactggaccccctccttataccatgtacaaaaatcaacttgggatgtattaaaggcttaaatgtaaaacccaaaactataaaaaccctagaagaaaacctgtgcaataccattcaggacacaggcatgggcaaagattttatgatgaagatgccaaaagcaattgcaacaaaagcaaaaattggaaaatggaatctaatcaaactaaagagcttctgcacagtaataaaaaaaatcatcatcagagtaaacagaaaacctacagaatgggcaaaaatttttgcaatctrtccatctgagaaaggtctaatatccagtgtctataaggaacacttaaattaacaagcagtaaacaaacaaccccattaaaaagtgggcaaaggacatgaacagacatttctcaaaagaaaacatacatgcagtcaacaaacatgaaaaaag

SEQ ID NO: 876795 - DNA, 698 bp, Homo sapiens
atcacattatttcttctctcaataaaatgttgatatagcaactaaaatgtattagtaatgaagaaacactttgaggtgctttttctcaaataagtcagtaaaactaatgctacttaaaaaaatatacatactggtcgggcacggtggctcacacctgtaattccagcactttgggaggtcaaggcgggcagatcatgaggtcaggagtyggggaccagcctggccaacatgacgaaaccccgtctctactaaaaaatataaaaattccgggtgtagtgacacgtactgaaggataaagtcagcactctgcattcttcgttttttttgtagaatcttttgtaataaactgcatatatttattgagtttaatacttccataattcatcatctccaaaaaaatccctaacttacctttgtgtaagggataatccctaacttatctggtggggttattttaccccaccagatattagtgagaaagagaaaggaaaagatagctagataagtgtaaatgaagatagatagatgtaaaaacagatagatatgtatagacagatagatatgaataaataagaccaaatggatcatcaatggcttttacagacaattgtttccaaaagagctacagtatcaattatataattatttcatgatgaaatttattttaatttgagtttggacagcgttatttgtccttc

SEQ ID NO: 876796 - DNA, 589 bp, Homo sapiens
gagtgatatggtttggttatttgtccccatccaaatctcatgtctaattataatcctcacatgtcaggggagctggtgggaagtgattggatcatgggggggatttcccgcttgctgtttttgtgatagtgagtgagttctcacgagatttgatggtttaaaagtgtgtgccacttcccctttcactctctctccctcttgtcaccatgtgaagaaggtccttgcttccccttcaccttctgccataattgcaagtttcctgaggcctcccagtcatgcctcccattaagcgtgcagacctgtgagtcagttaaacctcttttcttcacaaattgcccaatttcgggtagttttttatagcagtgtgaaaacggactaayacagtgagatattaagaatgaatactaggcctggcaaggtggctcatgcctgtaatcctagcatttggaaggctgaggcagcaggatcacttgagttcaggagttcaagaccatctggggcaatatagcaagacctcctccgctaaaaaaaaaaaaaaaaaaaaaaaaaaaagaaaatagttaaaagaaattagtctggggttgtgggt

SEQ ID NO: 876797 - DNA, 588 bp, Homo sapiens
aaacaatgttctcctacttcattgaattccttaagtgttctgtagttcctgtcactgacatgtacgcagaaggtgtactcagtaccttctctgcacctgtcatggaagtgtgagaaatttaaaaaaattacatatatctatctctatgtgatgttgtgccaggaataaaaatgataaaaatttcatgtaatcttttttatatcattttgagtgatacayatatgttctgaggaagaataaattttatctccataatgatagtaaaaccacaatatctttgtaaggacatcactatttcattttttaaatgaaggagctgagggacaaagagattaagtaacttacataataaggtcacatagatttgattcatccattgaatcaatttttctatgctacataacaaatcactacacacttagcagctttaaataacaaaagtttattatttcatcatttctgtgagtcatgagtccaggtatcgtagattaataccttcttctactcagggtctcaccaggcagaaattaagctgtcagccagagctgctgtctcatttggagcactggatcctcttctaagctcatt

SEQ ID NO: 876798 - DNA, 617 bp, Homo sapiens
atcactatttcattttttaaatgaaggagctgagggacaaagagattaagtaacttacataataaggtcacatagatttgattcatccattgaatcaatttttctatgctacataacaaatcactacacacttagcagctttaaataacaaaagtttattatttcatcatttctgtgagtcatgagtccaggtatcgtagattaataccttcttctactcagggtctcaccaggcagaaattaagctgtcagccagagctgctgtctcatttggagcactggatcctcttctaagctcattggttgtttgcagaatrtatttctctggtgttgtatgcttgagatccctgttttctgactagttatcaaccagggacttctctcagcttctgcaggctaccctccagtccttgccatgtaaccacctcctcacaatatgaaatctatagtcaagaggaaagaagctctctcatgcttcactctcttttaaggactctcatgattaggttagacccacactgggaaagctctgttttgatgaactcgaattaaaaagtaacatatcataagagttatatctcatcataatcacagcttcttcctctgcttaccaccac

SEQ ID NO: 876799 - DNA, 540 bp, Homo sapiens
gtccattagaaagccctggatgtatgtattagtcagggttctctagagagacagaactaataggataggtgtatatataaaggggagtttattaaggagtattgactcacacaatcacaacatggggtaccacaattggccatctgcaagctgaagagcaaggaagccagtctgaatcccaaggctgaagaacttgggatccaatgttcaagggcacaaagcattcagcacaggagcaagttgtagaccagaagagyaaaccagcctaatcttttcatgttcttctgcctgcttttattctggccatgtttggagctgataagattgtgctcacccagattgagggtgggtctgcctttcccagtccactgactcaaatgttaatctcctttggcaacaccctcacagacacacccaggaacaatacttggcattctttaaaccaaccaaattggcactcaatgttaatcatcacaatgtgagacatggaacaaaaggagatgattttggagcttttagaattacagctgccctgctgaa

SEQ ID NO: 876800 - DNA, 573 bp, Homo sapiens
tccggtagacccggcggcccgcccgggtcacctgcgccggctgctaagggggcgcccttacctgcgcgcccggaaggggcttggtgactggcctcggttccctcagtccggagagtgtctctgccattccctgcagggctgacgccccagggctgggattcgraaggatctcggcacctctaccctacctgggattctcacctccaaccccgttggaggccccctggccttagtggaaactcatctccttgtctgcgcacccgcccccgaaatatgacctacttgaaatgtgacctactttttaaaagaaacccttaacaatcacgggaaaaccggatccaaaatttcgataagcatttttctttgaaatactattctattgcatcactgctcgaaagcttgaaaggtcaatggccacttttagttgaggccgcggctatgggaagttgggcgaggaagggggaggggtgggagggaggcgcgtcttgcaaactttgcctggtgccccccctgccggctctgggaggaaacgggaaccagctcccaaccttggggtctgcagccggggaccaa

SEQ ID NO: 876801 - DNA, 690 bp, Homo sapiens
ttataagctttaacaccaaaccagtgctgaagttccgtctcttgatctttgcatggggcatgttaaaaatcagcttcaaaatcaacactccaaatgaaaaaaggccagttaaaaatctgaatgcagtccccaaaatagaaatgctttcataaatatgccagtcttgagcatttactaaatagtgataattattgcatggccagtaatctacactttgccattttatgagttaataagcaatgaaaaagtatttcttgtgtgaattcttttaccattatctcatgtgggatcccttcagttgactctgttttgcttgttcttttgtaatactgcggaatcctttctaatctgctggagttttgttcttgcttttgtttggtttttgycttttgtatttttgagacagggactccctctgtcacccaggatggagtgtacagtggtgcaatcacagctcactgcagcctcgaactcctaggctcaagcgatcttcctgcctcagcctcctgagtagctgggactacaagtgcatgacaccatgcctggctttttttttaagaggcaaagatctggctatgttacccactctggtcttgaactcctgatctcaagagatcctcccaccaaggcctcccaaagtgttgggattactggtgggagccaccgtacccagccttgatctgcgtttta

SEQ ID NO: 876802 - DNA, 663 bp, Homo sapiens
gttttgtggctcaggtgggcatcacagtcctactgatatgtgatgtcacccccagaggcacagctgtaaaattcctctctttgtactctttctctttatttctcagccagctgacacttatggaaaatagaaagaacatacgttgaatattgggagagggttcccccgataactcatcacacttattctaaaattgaccacataaatggaagtaaaacactcctcagcaaatgcaaaagaatgaaaatcatcataacagtctctcagaccacagtgcaatcaaactagaactcaggattaataaactcactcaaaaccacacaaatacatggaaactgaacaacctgctgctgaatgactactgggtaaataatgaaatgaaggcagaaataaagatgttatttgaaaccaatgagaatgaagacacaatgtaccagaatctttgggacacrtataaagcagtgtgtacagggaaatttatagcactaaatgcccacaaaagaaagcaggaaagatctaaaattgacaccctaacatcaaaattaaaagaactagagaagcaatggcaaacaaattcaaaagctagcagaagacaagaaataactaagatcagaaccgaactgatggagatagagacacaaaaaacccttcaaaaaatcaatg

SEQ ID NO: 876803 - DNA, 613 bp, Homo sapiens
caacctggacaacatgatgagaccccgtctctagcaaaaacacaaaatattagccaggcttggtgacacatgcctgcagtcccaattactcaggaggctgaggtgagagaatggtttgagcccaggaggtagaggttgcagtgagccaagatcaagccaccactgtactctagcccaggtgagagacagacactgtccaaaaacagatactagagtagatcatgaaaggaagcyttatgagggctagtgaaagaaagcagcagtcactggtggtctacctgggttccttaagagagtaagtcacctcattcccaatgcttctctcccaaaccccttccttgtccagctaaaagaaatgttaagccatagtctttacttggactttagaaatcaacagtctttcatgatcttttggttgacagtgaagaggaagggttagcacaagtaaaaataaacaaattaaaaacagtcgaaatgtaacaaaatggaagggtttccatccatgagacacttgttgtgattcagctctgtggcatggctgtcgggagagtgagggtaggttttaaggatgttatctttacaagatgggtggccttcagctctctaccacgca

SEQ ID NO: 876804 - DNA, 611 bp, Homo sapiens
tttcttactttttaaaaagattacattgaaacgaagcaaaacaaaacaaaaaacaagcaatatagaaaggtataaagaaaaaggcaaaagtcaccctgatctctagcgcccctaccccatccatggttccttccttagagacctgtaagtttaatcatcatcacatagttttctagacctttctttgattttgcaaactttgaatgaatgggatcataaagtacttaaagtacataaagaacttactgttctgccacaatgaatgattttcaaatgcaaattaaagttttgtgtgttaaaaaatgctttgtgggccaggcaaggtggctcatgcttgtaatcccagcactttgggaggccaaagcaggcagatcacttgaggtcaggaatttgagaccagatggtgaaaccttgtctgtactaaaaatacaaaaattggcygggcgcagtggctcacgcctgtgatcccagcactttggggggccgaggtgggcggatcacaaggtcaagagctcgagaccatcctggccaacatgatgaaaccccgtctctactgaaaatacaaaaattagttgggcgtggtggcgcgcttctagtcccagctactcagg

SEQ ID NO: 876805 - DNA, 605 bp, Homo sapiens
attcattagacaagaaccagtatggaaacaggaatacctacagtggcaaagttaatcagagtgcataaggcatttacagtagcccgttggcccccagtgacctgagccttctgggcctcttgctccattatagtcccttcccatgtcgaaaaggtctgatttgtgtaactaayaggatattatggaaatgatggagtgtgacttccgttgcttgatcataaaggacatgtggcttcctccttgctttctcatggatctcttgctgtggaggaagccagctgccatgttgtaagtgcacttaagcagcctgcgaaaaaccccatgtggcaaaggactgaagccacctgtcaacagccatgtgagtgtgccatcttggaagtagatcctctggccccagtcaagccttcagatgactataaccttgactaacatcttgactgcagcctcatcagaaaccctgagccagaactgcctgattgagtcacttcttcttcttcttcttcttcttcttcttttttttttttttttttttttctgagacagagtctcactctgttgcccaggctggagtgcagtggtgtgatcttggctcagttgcaacctct

SEQ ID NO: 876806 - DNA, 654 bp, Homo sapiens
catactaagattgttgtgaggaaagaaaacaatgactcttactggtgtgattcctgtatctggaccataggctcaaatacccacccttattcaattttcacatcccaaaggaacagggaattggcctccagagagtagtttgcggtcttattttcaaccctaatccctttccattccctgtcctccagagtagattaagtgaaggaaattcagagaagaggaaatcatatagtcagctatttccaagagacaaacttaagatgaattctgggatgtaactcttataagctatttgagcttaaaagtcatgttgcatatgtgarcctcaccttcctctcctgtaaaatggcataaggttaacttttgataagattaaatgaaacattgggaagggtaccttctgcttccagataacataaattgacaaggtttaccctggttaacccttgaaacacctgaaacaaaccaacaaacaaaaagagaaaaaatacatagaaaaatggttttcagaactctgtgcatcaaactacaaaagagtgatccctgaaagatgaggaaaagatgatggtgataggactgccatggcccctgcttacatctttgaaagggcttcatcagtctgtggtgtagggaaggggatctcatataaagcct

SEQ ID NO: 876807 - DNA, 654 bp, Homo sapiens
catactaagattgttgtgaggaaagaaaacaatgactcttactggtgtgattcctgtatctggaccataggctcaaatacccacccttattcaattttcacatcccaaaggaacagggaattggcctccagagagtagtttgcggtcttattttcaaccctaatccctttccattccctgtcctccagagtagattaagtgaaggaaattcagagaagaggaaatcatatagtcagctatttccaagagacaaacttaagatgaattctgggatgtaactcttataagctatttgagcttaaaagtcatgttgcatatgtgagcctcaccttcctctcctgtaaaatggcataaggttaacttttgataagattaaatgaaacattgggaagggtaccttctgcttccagataacataaattracaaggtttaccctggttaacccttgaaacacctgaaacaaaccaacaaacaaaaagagaaaaaatacatagaaaaatggttttcagaactctgtgcatcaaactacaaaagagtgatccctgaaagatgaggaaaagatgatggtgataggactgccatggcccctgcttacatctttgaaagggcttcatcagtctgtggtgtagggaaggggatctcatataaagcct

SEQ ID NO: 876808 - DNA, 613 bp, Homo sapiens
cttgagcccagaaatttgaggccagcctgggcaacatggcaaaacctcgcctctacaaaaattggcctggtgtggtggtacgtgcctgtagtcccagctacttggggggctgagttgggagtattgcttaagcctgggaagttgaggctccagtgagccatgattataccactgtactcaagcccagatgacagagtaagaccctgtctctaaaaatataagaacaataaaaaatgatgagtcaatgtgtctaacaagttccaaaaatacaagcattttcactaagtggttctcagatattcgtatgcatcagaatcatctggagaattaaaaatacaccttcctgtgtccagcctccctgagcttctgttgtagacaaaggaattcacattttcagcccttcaagtgaagctaatcatagttgttcacactctgataatcactgtcctgacaaamaggatcactaagacagatgatttttgagcagtaaaatttttagatctcttagtacataggaagaaacatgcaagtttgttctgttggaagacaaaattaagaaatacaggtaaaaattttaagactgtggttcaacagcaagatgaagagtctccac

SEQ ID NO: 876809 - DNA, 644 bp, Homo sapiens
aggatatacaattattctttgtacttttgtgaaactttatgttggaacttatttcaacatcagaagttgtttaacaaaataattcctggaagtctttagggaaacattaaccaaaattgggaaaattgctacaatctattgtagaaaataatgataacactagaatttaaaatttccacaaaattgtgaagtgttgcaaaaaccctcaaattatttacttgctgattatggtctttctatggaattgcatgtttaacatattatcctgtaatacatgcatattagtgaacagagctatctaccaagaatcttgtactctatatttatgggcaatttagggattttccagggtgatttttactatttgtgattttcaacttattttagaactaaaaaccagcttttaaaatgttacctcagcgtatttctagaaaggcaagtttttctagatcagtttttgcagatctaaatttttaagsatgcagtctacaacatgtgagagtttgtgttgactggacaaggctgagttttttgtttctcacaggaagacagatcattatgttgacatattcttagcagcatcttgcaggagggagagaaaagtcaagatatatatgttttgagggtcgatttaaggtaaagtt

SEQ ID NO: 876810 - DNA, 595 bp, Homo sapiens
acctcctgtgctgagaataataccaggcttgggtgggagagggtctgtcttctgggaaggctggcctctggaatgaatgaatctagaaatgggcgtgaagcctacctcatgagctgttgctcatggagtaggtttggagtcttcccccactccacccaccaactgtgcttctctgttcacagccagtgcgtctggctcccaccgaggctctgtgtgtcatgctgcacgtgccgctgccagaaggagtgctggtctgtttctgtgctgttagactgatgcacaaaccagctccatgctattgcattagtgaaaaattagaagctgccycttggtgtgtaattgggggtcccacccctgttggcctccacctctgtgaggagaacggtgtaggtagagtccctaagaaaggagcaaggaatcttaccagccccatcccatctgaggccaccagtgttaatgggaagcaccccagaaagggcagcagcaggtaacacagagaaacgctaacaggatcttcaatgccactgaaaatagccatggtcagcatatcaagatccccagccacctgctccaggtcagccacaggccagctgtt

SEQ ID NO: 876811 - DNA, 614 bp, Homo sapiens
cagtgtttggttttctgtttcttgcattggtttgctgaggataatggctttgagctacatccatgcccctgcaaaggacatgatcctgttctttttatggctgcatagtatttcatggttttatgtactacattttctttatccggtctatcactgatagccatttaggttgagtccatgtctttgttattgtgaatagtgctgcaatgaatatacacatgcatgtatctttttaatagaatgatttatattcatttgggtatatascactgggtatatacccagtgggattactgggtcaaatgtatttctggttcttggtctttgaagaatcaccacactgtcttccacaatggttgaactaatttacattcccaccaacagtgtaaaatcattcctatttctccatagccttgccagcatctgttgtttcttggctttttaataattgccattctgactggcatgagatagtagctcattgtggttttgatttgcatttctctaatgatcaatggtgttgaggcttttttcatgtttgttggccgcatgaatgtcatcttttgagaagtgtctattcatgaataggacctaatttttttatagatggcaat

SEQ ID NO: 876812 - DNA, 590 bp, Homo sapiens
tttctgccgtttatgagttgtttgaactcgaacacatcaactaatctcaattacctcaactgcaaaggagcagttctgataacatccttcctgtctcattcacagggttactgggggaatgaatcagtcaatgtaatcaaaaatgctgcatacagacagtgtaaactgtgactgtcttgtaagagtcaagtgtcaataatgactgtcactttgatttggggtcaggattcactcttactgctgcctgttatgtacaatctcaagcagtgttgtttattattattctaagaatagcatagcttttgggtctgtattttacaaaccaaatattgtaattttagggataatggaatattaggggcataatggggaaagttgaaaaattatggtcagtggagagatagttaaaaaaaaagtactggaatagaagttagragacttcacctagtacctcagtgatctggagtcatcatggcaccatgctgggcctcagtttcctcgatctgtaaaatgaggatgcttgatccattgtttcttaactaggaggagttttggaatcacctggaaaatccccaaaggtagaatttttg

SEQ ID NO: 876813 - DNA, 509 bp, Homo sapiens
aacatatagctataactaatttcataatatctttctatttaagcacatcagcagattagatgatattaaattgtctcattgatattcattatatgattacccaaaacaatacacagaaatactaaaaattagccaaaaaccttggaaatttaaagaaaacatatttgttaaaatctgagtgggtttgtaatttttgaattactgatagcaaatcattaaagatgatctatttagacacaatctaataatagtttctcaaaaaatactrgacacatgttaattaataccaccatgtccaaataatatacaggattttatgtgagtagcatggagatcatgcacgatatcaccataatgtagatagaaaaactaaagtaaaatgaatgagaaagttgagttatacacaataaatttgacaggtcttagaaaattaaagacaaaatgaatatattctaagaatataatattcctaggaatttagaaaattttttaaaagtatgtatagaaca

SEQ ID NO: 876814 - DNA, 607 bp, Homo sapiens
atttatagcactaaatgcccacaggagaaagcaggaaagatctaaaattgacacactaacatcacaattaaacaaacttaagaagcaagagcaaacaaattcaaaagacagcagaagacaagaaataactaagatcagagcataactgaaggagatagagacacaaaaatccgttcaaaaaatcaatgaatccaggagctggttttttgaaaagatcaacaaaattgatagactgctagcaagactaataaagaagaaaagagaaaagaattgaatcaaatagacacagtaaaaaatgataaaggagatatcaccattgatcccacactaatacaaactaccatcagaaaatactatgaacacctctacgcaaataaactagaaaatctagaagaaatggataaattcctggaacatacaccttcccaaggctaaaccaggaaraagtcgaatccctgaataggccaataatacattctgaaattgaggcagtaattaatagcctaccaaccaaaaaaaagcccagaaccagatggattcacagccaaattctaccagaggtacaaagaggagatggtacgattccttctgaaactattccaaacaa

SEQ ID NO: 876815 - DNA, 600 bp, Homo sapiens
tacccaaactgagaaacaatggtaaaataatgtagaaaagtaagcagaacctcagaaaactgtggaaaaccatcaatttcataaaatgtatgcaaaggattaaaaagagagaagggacaaaaacagtatttgaaaaaataatggccaaaaactttctaaatttgatgaaaattatgacgatacacatcaaagaagctcaatgaacttcaagtagcataaactcaaatagatccatctctaaacacatcataatgaaatatcaatagccaaaggcaaaaagaaaatcttgatagcaagaagaggcaaacaacccatcacatacaaggaatcactacaaatatttacacctgaaataatgtaagaagtcatggamtctagaaacgaatggtataacatattaaaaatactgaaaggagaaaaacccatctacctataattgcatagccagcaaaactatagtttaaaaataaaggagaaataagaaatttccaaataagcaaaaactgtgaaactttgttgttggtagacttgcttttacaaaatactaaaagtaactcttcaaattgaaatgaaaagacactaaacagaaactcaaatcca

SEQ ID NO: 876816 - DNA, 622 bp, Homo sapiens
tgtaaataaacaggtaaataaaactaaagtatacaaatattttggttcgttttactgtttgccttcatcttatttaaatgacaactacattaaaaataattacaaatgtgtttataggcttataaatgcataaaattgcaatctgtttaaagacaataagatgatgcagggggagagatctgaactataatatgtaaatattttcaatactattgagattgttagtattattatgaacttgattgttttaaattaagatgttaattgtaattcccagtgatacaactaagaaaataactcaaaaatatgctaaaagaaagaaaatggggctgggtatggtggctcatgcctataatcccggcactttgggaggctgagatgggcaaatcacttgaggccaggagtttgagactascctggccaacatgccaaaaccctgtctccactaaaaatacaaaaattagccagccatggtgatgcacggctgtatcagctactcaggaatctgaggaacaagaattgcttgaacctgggaggcaaaggttgcagtgagccgagactggccactgcactccagcctggctgacaaagtgacaccaaaacaaaacaaaacaaaacaaaa

SEQ ID NO: 876817 - DNA, 654 bp, Homo sapiens
gaacacagcaaaagcagtgttaagtgggaaatgtatagcacaaaatgcccacatcaaaaagctagaaagatctcaagttaacaaactaagatcacaactaaaagaacaggagaaccaagagcaataaaccccaaagctagcagaagacaagaaataatcaaggtcagagctgaattcatggagatagagacaccaaaaatccttcaaaagatcaacgaatccagcagctgattttttttttgaaaaatttaataaaatagatggaacactagctaatctaatgaataagaaagagagaagattcaaataaacacaataaaawattataaaggggatgtcaccactgaccccacagaaatacaaacaaaaatcagagaatactataaaaggctttatgcacataaactagaaaaactagaaaaaactgataagttcctggacacatataccctcccaagactgaaccagaaaaaactgaattcctgattagaccaataattagctttgaaactgaggcagtaatcaatagcctagcaaacaaaaaaaaagcccaggaccagacaaattcatagctaaattctaccagaggtacaaagaagaactggtatcattcctactgaaacttttgcaaaaaattgaattttttttgaaatt

SEQ ID NO: 876818 - DNA, 559 bp, Homo sapiens
tgacaaggcagaaagaagacactgctctgtagatacatttaggaagaaaagctgatcaaactaagctttctctttttccagagaaacggtattaatgacatagagaaatcatatgaattatccaattgagctaagttttaaattcggcttggtatttagtagtctcttcccaactcctggtgagtattggttgtcttcgcctctctgagttacagtaaagtttttgactcctgttatattaggattccctctcctcaattagactcaaaatcccatcctatcacctgcttcccgcattgcaatgtcctggaaaaataaattaaaaggacatttttacagtaaacctactttgcttcytaatttttgaaataatcagatctgcttccaaatcctcattagctgtattgatgagctgaaccaaacaatgaggaaacattcacagctatagctgaactttcagcatgggccccactaggagaaatctttttgcttctatgtccttacagcctcttgttcttttgctctattcgtaccttctaagtggtgggttatataatct

SEQ ID NO: 876819 - DNA, 648 bp, Homo sapiens
aatatgcaccagagtagaaccacttggaagtataaaactcaccagttctataaaacagtaacatagtgagttaaacaaaatagttagcaatcaacataatgactgaaacagtacctcacgtctcaatattaattttaaatgtaattggtctaaatgctccacctataagacacagattgacagaatgaatttttttaaatcacaaatcaaatatctgcatcttcaagagacacacctaacatataagggtcyttatagactcaaagttaagaagtagaaaataatgaaaaccaaaacaagcagaagtagctattcttctatcagataaaacagactttaaagcaacaacagtaaagacaaataaggtcattataaaatgataaaatgatcaatccagcaagaagacattacaatcctaaatatatatgcaaggaactctggattcgttaaacaattactactagacctaagaaaagagatagacagcaaaaccataatagtggaggacttcaaaactccacttactgcactagacagattaagacaaagtcaacaaagagaaaatgaaattatactctaaaagaaatggacctaacaaatatttacagaacattcttagagaactgcagaatacacattcttctcatc

SEQ ID NO: 876820 - DNA, 639 bp, Homo sapiens
cttatcatccattgatgattcttaaattaacaaaattttactatatgtttgcaaaaggataattttcccattatggcatgtgcatcacatttattagctggaacttaaccacctcccatttacaagtttatttatgtatttgtgtatgtatgtacatacatatttaactgttaatgattggtttgggtgcatagatttctattttttcaattgtttttaattattacacttaataatcttggtgttcagagttttccagatctaaacagtggatcccctttaagctagtacttgtatccctgtcacatgtcctcatcattttttttgagagctycttaattatgacatagtagccctgaaaatgtttttcctttaagtggggaatatgatttaaaaaatcatgatctctgagttgctagatatgtgtattgttaatgaatatttctgtttatagtggtcagagatagggaatacatgcatacatgtgtatgaccatatatttatatatctatatctacatctatacacatatgtatgcatatatatgtatgtgtacatatatacacatatgtacatgtaaatacacactcaaatgcatacatttgaaaccataagcttacaccagtatctctaaattta

SEQ ID NO: 876821 - DNA, 536 bp, Homo sapiens
ttaggggaagtcaatgcaatatacctcttaactcagggagctaggctgttggaaggtttcttgaaaattggcctaagtacccccatgggaaagccaacatgtagaggcttagacatatagagagcttcaaatgaaagagggaaaatgtggtagaaacagcaagtagaagactttccattttttttccatgacttatctcagttcataccattcttaagcaaaatttctcccattgrcctaggagatattacaaaagtatccaacaattgattttcaaaaaactttttgcaatttataatattcaaagagattactaaatacttggaaagctgaaaaaagtaacccttccaaatgatatttaaaattagtttatctgtgaaagataccatcaagagaagaagacaaaccacagactgggagaaaataattgcaaaagacaaatttgataaactgttatcaaaaatatatgaataacacttaaaactcaaaaaaatgaacaatccaattgaaaaatgggcaaaagacttgaacagatg

SEQ ID NO: 876822 - DNA, 641 bp, Homo sapiens
gtactagataattgtgtccttacctatcctcagagttcactcaaaaaaatatgcaataggtggaaaatcaaagaagtcaaaatacgcggaaagtgaatgtggcagtgctgaggcagccctcaggtcgtcagagaatgcccaacaccaaaagcttccctgggacaacatggtgccgaggactgagcccctgtgtcctgatgccagcaccagttgctgctctgattgggtttcttacaacccataacaaagccccagtaatcccttccttagggtgccaaagagtttttaattattttataacctgaaagggcagcctctttgcacgggcaaatgcaaactccacagacataactgtttctgggcacaagataatgtgaatgaagccagtcaccagtgccaagggtctcataccctttactgtaggggttccagatgtatgccactccctcaacyacaggagtcattacacgcacatgccagttcctggggatggtaacaagtgaaatggaggcagctccttaaacaatggaacacctaatgctgcatcattagtctgctaacttttgcaacccgttcttcctctaagcctttgcaaggtgtctttctgaagccaggcttcattgtgggtatcgagaacctga

SEQ ID NO: 876823 - DNA, 616 bp, Homo sapiens; identical to SEQ ID NO: 874267

SEQ ID NO: 876824 - DNA, 645 bp, Homo sapiens
gtggcaaagatacagacaccccatttaaaccctaatttttgtggtgagtcaattgtgggctggtagcaagaagacaggttcattatatatacttccatgtgttcctttctctaatataggttctgaacaatgacgggtcaagtctggacgtgggccaactttattctagacaatttcccagaaaagttgaaaataaagacctgggacataaattggaacctgaattaacaatctcatgggacagagtggtagcctggtacaggggtctgaacacatcagaagaaatataaataaatagaggaattttaaaccagcaaacaatcactaaagtgagaaaagagattaaactcattttagccataccaagtctcaataagatttactacacacatgtcttttctaagtaagttactrccagatatcatgttgcatattaagcaaggaaatcaaggcagaggaaaaaaataagatgtagaaaacagtgcatcttcactaacatcctagcgaataaaagtcccaaagcccagttttatatagaggaatttaaatggtcttcaataccgttatcattaatcataatcatttgtacaaatatttgtacaatatttattgtccacttattatattcaaggtgctgtttaacat

SEQ ID NO: 876825 - DNA, 644 bp, Homo sapiens
aacaggcaacctacagaatgggagaaaatgtttgcaatctatcaatcacctgacaaagggctaatatccagaatctacaaagaacttaaacaaatttataagaaaaaaaacatcaaaaattgggcaaaggatatgaacagacacttctcgaaagtaaacatttatgcagccaacagacatatgaaaaaatgctcatcaycactggtcattagagaaatgcaaatcgaaaccacaatgagataccatctcatgccagttagaatggccatcattcaaaagtcaggaaacaacagatgctggagatgatatggagaaataggaatgcttttacaccgttggtaggagtgtaaactagttcaaccattctggaagacagtgtggcgattcctcaaggatctagaactagaaataccatttgatccagcaatcccattactgggtatatacccaaaggattagaaatcattctactataaagacacatgcacacgtgtgtatattgcagcactattcacaatagcaaagacttggaacctacccaaatgtccatcaataatagactggataaagaaaatgtggcacatatacacaatagaatactatgtagccataaaaaagaatgagttcatgacttttgcagggac

SEQ ID NO: 876826 - DNA, 707 bp, Homo sapiens
ggcaaagacttcattactaaagcaccaattttggcaacaaaagccaaaattgacaaatggggtctaattaaactaaagaacttctgcacagcaaaagaaactatcagcagagtgaacaggcaacctacagaatgggagaaaatgtttgcaatctatcaatcacctgacaaagggctaatatccagaatctacaaagaacttaaacaaatttataagaaaaaaaacatcaaaaattgggcaaaggatatgaacagacacttctcgaaagtaaacatttatgcagccaacagacatatgaaaaaatgctcatcatcactggtcattagagaaatgcaaatygaaaccacaatgagataccatctcatgccagttagaatggccatcattcaaaagtcaggaaacaacagatgctggagatgatatggagaaataggaatgcttttacaccgttggtaggagtgtaaactagttcaaccattctggaagacagtgtggcgattcctcaaggatctagaactagaaataccatttgatccagcaatcccattactgggtatatacccaaaggattagaaatcattctactataaagacacatgcacacgtgtgtatattgcagcactattcacaatagcaaagacttggaacctacccaaatgtccatcaataatagactggataaagaaaatgtggcacatatacacaat

SEQ ID NO: 876827 - DNA, 707 bp, Homo sapiens
ggcaaagacttcattactaaagcaccaattttggcaacaaaagccaaaattgacaaatggggtctaattaaactaaagaacttctgcacagcaaaagaaactatcagcagagtgaacaggcaacctacagaatgggagaaaatgtttgcaatctatcaatcacctgacaaagggctaatatccagaatctacaaagaacttaaacaaatttataagaaaaaaaacatcaaaaattgggcaaaggatatgaacagacacttctcgaaagtaaacatttatgcagccaacagacatatgaaaaaatgctcatcatcactggtcattagagaaatgcaaatcgaaaccacaatgagataccatctcatgccagttagaatggccatcattcaaragtcaggaaacaacagatgctggagatgatatggagaaataggaatgcttttacaccgttggtaggagtgtaaactagttcaaccattctggaagacagtgtggcgattcctcaaggatctagaactagaaataccatttgatccagcaatcccattactgggtatatacccaaaggattagaaatcattctactataaagacacatgcacacgtgtgtatattgcagcactattcacaatagcaaagacttggaacctacccaaatgtccatcaataatagactggataaagaaaatgtggcacatatacacaat

SEQ ID NO: 876828 - DNA, 641 bp, Homo sapiens
attcctgatttgggtcttagcttgactcttgttggtatataggaatgctagcgatttttgcacattgattttgtatcctgggactttgctgaagttgtttatcggcttaaggttttgggctgagactatgcagttttctagataaaggatcttgtcatctgcagacaggaatagtttgactttgtctcttcctatttggatgccctttatttctttcccttgcctgatttccctggcaagaatttccaatactaaattgaataagagtggtgtgttttgtgctggttttcaagaggaatgtttccagcttgtgcccattcagtataacattgcctatgggtttgtcatatatggctgtyattattttgaggtatgttttttcaatacctagtttactgagagtttttaacatgaatagatgttgaattttatcaaaagctttttctgtatctcttgaggtaagcatgtggtttttgtttttagttctctttatgtgatgaatcacattgattaatttgtgtatgttgactcaaccttgcatctgagggataaagtctacttgattgtggtgaataagcattttaatgtgatgctggatttggtttgccagtatttcattgaggatttttgcatcaaggttc

SEQ ID NO: 876829 - DNA, 666 bp, Homo sapiens
ttcattaaaaaaactcacggagatcaccaatatatgtgaagtgaaaaatataaggtgtaaagcactagttattataggatctatatgtgtaaaacactaatatacatacagatacatatatgcattaaaaatatctggcaggacacttaaaaaaatataattactggccagccacggtggctcacacctgtaatcccaacactttgggaggccaaggcaggcagatcacctgaggtcaggagtttgagaccagccgggccaacatggtgaaaccccatctctactaaaaatacaaaaaattagccaggcgtgatggtgggcgcctgtaatcccagctatcgggaggctgaggcaagagaatcacttgaatytgggaggcagaggttccagtgagctgagatggcaccactgcattccagcttgggtgacaagagcgagtactccatgtcaaaaaaaaaaaaaagaaaaagaaaatataattcttttttaaaagtagggctggtactgcaatagtcttgtccaagaaaagaaaaaaaaaaaagagacagtagggttggaagtcagggttaagatcaaatgttgtgttttagtttatttctttcaattctgttcaagttatatatttacgcatttttaaattatactttaagttctagggtacatgtg

SEQ ID NO: 876830 - DNA, 608 bp, Homo sapiens
tccacaagtgtgtgtaatcgggagttaatagtgttgaattacaccttgctttttgatagtacttaagttttttaaacatttttgcagttatcatttcattttaaattttacaaataaaccctgtggctccagtagtgaaatattgtcccttttttaacagattygaagacttgtcagtaaggctcagaggtttgcttgatgacactgggtgatcagacatatgagcgtctccaaagacatctggacatcaattttttttttcagacggagtctcgctctgtcacccaggctggagtgcagtggtgcgatcttggctcactgcaacctccacctcccaggttcaagcaattctctgcctcagcctcccgagtagctgggactaaaggtgcatgccactatgcccggctaatttttgtatttttagtagagatggggtttcaccatcttggccaggctggtcttgaactcctgacttcgtgatccacctgcctcggcctcccaaagtgctgggattacaggcgtgagccactgcgcccggccacatcaaatattaaagtatgacaagggatgacatggattttcactgaattgtgtgagtggttttattt

SEQ ID NO: 876831 - DNA, 687 bp, Homo sapiens
catattagttgcttccaagttttggcaattatgaataaaggggccacaagcatccatgtgagggtttttgtatgggcataagtttcaactcctttggataaataccaagaagcacaattgctatattatatggtaagagcatgtttataactaccatattagtatgttttcacactgctgataaagacatacccaacactgggaacaaaaagaggtttaattggactaacagtttcacatggctggggaggcctcagaatcatggcaggaggtgaaagcacttcttacatggtagtggcaagagaataatgaagaagaaaaagcagaaacccgtgataaactcattagatctcttgagacttattcactatcatgagaatagcaagggaaataccagcccccatgattcaattatctctccctgggtccctcccacaacacatgggaattctgggagacacaattcaagttgagatttgggtgggggcacagctgaatcayatcattccacccctggcccctccaaatcttatgtcctcacataccaaagccaatcatgccttcccaacagtcccgcaaagtcttaactaatttcagcatcaacccaaaagtccacagtccaaagtcttgtctgagacaaggctagtccctttcacctataagcctgtaaaatcaaaagcaagttag

SEQ ID NO: 876832 - DNA, 658 bp, Homo sapiens
gggggaggggggagggatagcattaggagatatacctaatgctaaatgatgagttaatgggtgcagcacaccagcatggcacatgtatacatatgtaactaacctgcacattgtgcacatgtaccctaaaacttaaagtataataataataaaaaagaaaaaaaaagaaatccattgtgaagttctctgttgataagcatttcttctgtttccttataagagtttgatggtttcaggttttacatgtaagtctttaatccactttgaattgatttctgtgtatggtataagggtctaatttcattctttttcatgtgaatatgcagttttcccaacaccatttaatgaagagactatcccttccccattgtgttcttggcatccttgttgaagatcagttaactctacatgcatgggtttatttctgggttctttacccygttacatttatctatatatcttttttcatgccagtaccaaactattttgattattatagccttgtaatatattttgaaatcaggggtatgatacctccagccttttttcttcttggtcagaatggttttgactatttgggttatttggtggttccatatgaattttaggagttttttctttctatttatgtaaaaaaaggcactgagattttgacagg

SEQ ID NO: 876833 - DNA, 577 bp, Homo sapiens
ctagcatgccctgtaaatgaagaatgttttggtttatcagaaagctgaacttcagcaagatttcaaaggtggagacttctgcaaggtgacattcaattatgcatatctttatataaaatgaattctgagtcattacagttgtataaactgaagataacccttttttggcaaataaagattgacaaattcatgcactttatagagatatcttgggtcaaatgatcatttacttatcagaaatggctaatgaaatgttacagtgatttatggtgtgctgcagtaaattttcataatatagttatttatcttacataagataatgaactgcctgtcyagttcatttactgagtaatagttactttaaatgttttatcagcagctccatttttctgttttcctcctcttcctctcagatttttatcacgatgagttagggagtaatatttcattttaaatgacttgtcttgactatagatagttcagggatataggcagaattgctgtcatgtgaaacacagttgttaatctgaaatatctatgttgaattgactcctgctgttattatcaagagctataa

SEQ ID NO: 876834 - DNA, 578 bp, Homo sapiens
actttttatggctatgcagtattccatggtgtatacgaaccacattttctatatccagtctatcattaatgggcgcttgggttggttccatgactttgctattgcaagtagttctataataaagatacatgtgcatgtgtctttatagtagaatgatttatattcctttatgtacatacccagtaataggattgctgggtcaaatggtatttctggttctagatccttgaggaatcacagtgtaaaaacaagcctctttctccacagcctcgctarcatctattgtttcttgactttttaataatcgccattctgactagtgtgagatggtatctcattgtggttttgatttgcatttctctaatgatcagtgatgttgagctttttttcatatgtttgttggctgtgtaaatgtcttcttttgagaagtgtctgttcatatcctttgcccagttttttacggagttgttcatttttttcttgtaaatttgtttaagttccttgtaaattctggatattagacctatgtcagatgggtagattgcaaaaattttctcctattctgtaggttgcctgtt

SEQ ID NO: 876835 - DNA, 665 bp, Homo sapiens
ctttatcatgtaatattgtaattaatttatatatataattacaaacagtatataaaaactgttcacacatagaagtctaatctactttaaagtttattcaagcaagcctagggaagggttgaatttaagtttaatatgatgctggagcagagggactgtgactacgagaacatattaaatgggyatgatgtccctcattcatagataagtatctacattatttaacagggacaacaggattgtcccttcttgagaaagacaacaaaggaaactcccatcactatgcagcttggagtgttggtgagagcctccccaaaatccatgagtgtgagcttattttgagaggcattctcattaccttgttatattggacattccctctagtgagatcatctacaggaggttttatagaaaagaaatacatttctaaatgacattattaggaacatgcacagctatccacagacacgtcttacttactagaactagtaagttctataccttacttacacttataccctactaactttgtaaaaagctattgtagttgttatcttaaaagaaatgagtatatatgttctttagaagtctttaattaaataagtttctcattaaagtaaaaagttaaaataagaaggatgcaatagaaatatcctggaagcaga

SEQ ID NO: 876836 - DNA, 592 bp, Homo sapiens
gcggtaacattagtttttttatagaactgtaatgatcagtaattcgaataatgtaagaaaaatgcttagcacagtgcatggcacaaaataagcatgcaataaattgctgttattgctcttctggacatttcaggtacctaaatgtagaaattgggagaatcctagtctacaycactgacctagttctatgtagccagataagcatttcttctaatccatacagctctcagatcacctaaattgctctctcgacagaacatgggatagggtagataacttcctcagctgtcttttttcatatcatttcctttaattttcagcccaagcaggccgacatcagcctttcattttctcagtgaggtcatgcatttatcaggtatgacttggcagttataatcatcacagatatttgaccaaagatgttttgtttcaaagtagcttaaatcactatcaaagaattttttgtgcaaatggacattctcaaatcatgggaataaagggtcctcaaacataattaagcaaactagagtaaaataattcctaattgtcctgtgtaggcccaatttgaataagaaatggtgagaaacagtac

SEQ ID NO: 876837 - DNA, 660 bp, Homo sapiens
aatactttatctgcatctatattgatgatcataaggtctattttgtctgatgtaagtctgatgtatgttaatttgatgtatcatgtttattgatttctctatgttgagccatccttgcataccagggataaattctacttgattatggtgaatgattctattaatgtactgttgaatttggtttgctagtataaggtgattatcccttattcaaaatgcttgtgaccagaagtgttttggatttaggattttggaatatttacattatatttaccagttgagcatctgtaacccaaatatcccaactttgaaattctccaatgagcatttcctttgagcatgacatcagtgctcaaaacgtttcagattttggagcattttagattttggagcatttcagattttggattaggaatactcaacctgtattttgtagaggatttttgcatctatcttcatyggggatattggcctgtgattttgctttcttgttgtgtctgtatctagatttggtatgagggtaatgctggctttgtaaaataaatttggaaatattctctccttttcaattttttggaaacatttgagaagcactgacattgatttttctttaaatgtttggtggaattcagctgtgaagctatcaggttcggggcttta

SEQ ID NO: 876838 - DNA, 629 bp, Homo sapiens
ccaaaaaaactaactcaggaccagactgattttaccagaagtaagaggaggagctggtaccattccttctgaaactattccaaacaatagaaaacaagggaatccttcctaactcattttatgaggccagcatcatcctgataccaaaacctggcagagacacaataaataaaagaaaatttcaggccaatatccctgatgaacatcgatgcgaaaatcctcartaaaatactggcaaatcgaatcctgcaacacatcaaaaagcttatccaccacgatcaagttggcttcatacctgggatgcaagtctggttcaacatacacaaatctataaacgtaatccatcacataaacggaaccaatgacaaaaaccacatgattatctcaatagatgcagaaaaagtcttccataaaatgcaacaccccttcatgctaaaaactctccataaactaggtattgatggaatgtatcttaaaataaagaataagagctatttatgacaaacccacagccgatatcatactgtatgggcaaaagctgaaagcgttccctttgaaaaccagcacaagacaagaatgccctctctcaccactcctattcaacagaccattggaagttctggctgggg

SEQ ID NO: 876839 - DNA, 616 bp, Homo sapiens
tagctgggggatgataaggctaaggaaaagctattatagacataaaattcacatttatcaatagctagaggaattaaggacacaagaaactacttaactcaatcatttcttagcattcccgcttgtttgaacattttttaaaagtcacyccttaaaaagtaaaaagatacgtttatcagacacagtagaaagaggaatatttaatggtgccaagagtctacccctagacataagtctcgagtaccagatattctctgtaaagagggagtggttggtgataagtgcagtttaagtgttacccctggccaggcatggtggctcacacctgtaatcccagcactgtgggaggcctagacaggagaatcccttgagcctaggagtttgacaccagcctgggcaacatagtgagaccccatatctacaaaactgttatttttcaattagctgggtgtgtgatcgtgtacttatagtcccagcttcttgggaggctgaggtaggaggatcacttgatctcaggagttctaggctgcagtagccatgatcatgccactgcactccagcctgggagacagaacaagatgacatctcaaaaaaaaaaagtgttgcctctaagaca

SEQ ID NO: 876840 - DNA, 581 bp, Homo sapiens
taatgaaattaaggcagaaatcaaggagttctttaaaactaatgagaacaaagataaaatgtaccagaatctctgggacacagctaaggcagtggtaagaagaaaatttacaacactaaaagctcacatcaaaaagttagaaagatctcaaattaacaatctaacatcacatctgaaagaattagacaagcaagaacagatcaacctcaaagttagcagaagacaagaaataaccaaaattaaagcagaactgaaggagatagagacacraaaaatcattcaaaagatcaatgaatccaggagctggttttttggaaaaaaaaatagtaaaatagatggaccactagctagattaataaggaaggaaagagagaatattcaaataaacacaatcagaaatgataagagggatattaccactgaccacacagaaaaacgacaatcagacaattatgtgtcttggagttgttcttctcaaggagtatctttgtggcgttctctgtatttcctgaattttaatgttggcctgccttgctagattggggaagttctcctgtataatatcctgcagagtgttttcc

SEQ ID NO: 876841 - DNA, 637 bp, Homo sapiens
ttacagggtaaagttgtaggatatcatgagcacattggtggactgatatttttacttcaaattcttgtttcacagtgacacttcagcttaagcttctattatcaagagtttacttattatcttattccacttagagaatagtggtgtggctacttggagaagagaagacttgcaggcaactcttaagcagaactcaaggacttcagaaaggatgagcataagtgctgaagaaggttcagtccacactcggagctcttcaccaaagatttctgtgttatttagagattgctattcagacaacttcctttggcttgtatatgcccactcccaatgtcaaatgcactgttacccttcctggatgcagccaggaagcaactctcagaccacagatgcttctaaaaggcccaggatgaggctgggtccttgtaatacagtagagaggtcaaaagaaaatgtggaataggggcrgccaaaagactcataggctcccatctacagcagtctctgtaatgtttgtttctttgaaatatcccaccccacagaatttatcactcactctgtttacttcaaacttcttttttaagaaaactgtctgagttttagcctccaattactgatttcccttcattactgagta

SEQ ID NO: 876842 - DNA, 696 bp, Homo sapiens
  misc_feature 1, 2, 3, 4, 5, 6, 7, 8, 9, 10: n = A,T,C or G
nnnnnnnnnnccccaaggctgaaggcagttctaccctaggcttaggaaatggagtctctaccttggtcttgtgcttcagacaccccttgcccctttcaccccatgagccccacccttcccacaggctgagttatccagaggccaaggggacgtatctaccaaagcctcagccctccttcagaattcattgcttttattcccccagtccattacagacaaatatatggtcttactttgtgtgattaatacacaactcaccccacttgtgactcaccccatgagtttaaaagcactcaacttagtttgcaccctgctcaatcagtaagttcaactagacaagtctgcctytggatgttctggcaatgtcaaattgctatagaaatttgtaaatgcttgcaatcagttcttatatgtatcccacagcagacagtaacaacagtttggtccctggaggacactgagtagcactattctaggctcttctgtgggtgctgggaccctggaatccagtctgaatgacaccaaatccaaatccacaccaagcctgcttccagagtctttatgggcctgttttcctgatctcttctgcaggtgtacactgccctagccccaggctgtttgcagggaggagtgggcagagatgagacatgtgtactgtggtgttcatacacatgcatctcaggcccctttaggtac

SEQ ID NO: 876843 - DNA, 657 bp, Homo sapiens
cctccaatggtgtgccccgatctacagccccaggtggaatacccaacccagagaagaagacgaactgtgagacccagtgcccaaatccccagagcctcagctcaggccctctgacccagaaacagaatggccttcagaccacagaggtagggttgcagccacagaatcaactggggactggagaatgggggtagggcttgcttcagggcagagccacccagccgctatgtccagggagggaccagggatggctcatcttggaaaaaaaaagtctctgccccacccatgtaaaaattgctgcaaaccccaccccaaaaccctgccttgagggttgctgctttttgtttccatgtgtatgtttgcttaagyacagctttattcaaggatcttgttttctgtggccactgtcaccatgttgatggtgaggactgtgctggttagaggaaccagtcttaggccaggcagctggccagtctcaggggttggcagggtggggagtgggcagaggaaggaaagagaagaccagagtggttggaaacaagcctcgcattttactcaggccctccaaccaggtggacattggaagggcccccaagggtggctctcatagcagaatgtggtgacagcatcatccccagactgttggaagaggcaggt

SEQ ID NO: 876844 - DNA, 563 bp, Homo sapiens
ttattacttttttttttttggagatagtgtctcactctgttgcacaagctggagtgcagtagcacaatcatggctcacttcagcctccactccctgggctcaagtgatcctcccaccttagcctcctgagtagctgggattacaggtgcatgccaccatacccacttaacttttttgtattttttgtggagatggggtttcaccatgttgcccacactatgccactacttttattacccctttctgtaattcttgaaatatgaacttatcagtaaaataaactataatgttatgccactctagaacatttaagattttctagagccattataaattaatatatatggggtagttccaagatggctgaatacgaacagctccagcctacagctcccagcgtgagcgaygcagacgggtgatttctgcatttccaactgaggtactgggttcatctcactggggatcgttggacagtgggggcaggacagtaggtgcagcccactgagtgtgagctgaaacagggcgaggcattgcctcacccgggaagtgcaaggggtcaggga

SEQ ID NO: 876845 - DNA, 637 bp, Homo sapiens
caaagacttggaaccaacccaaatatccaacaatgatagactggattaagaaaatgtggcacatatacaccatggaatactatgcagccttaaaaaatgatgaattcatgtcctttgtagggacatggatgaacctggaaaccatcattctcagcaaactatcgcaaggacaaaaaaaccaaacaccgcatgttctcactcgtaggtgggaattgaacaatgagaacacatggacacaggaaggggaacatcacacactggagactgttgtggggttgggggaggggggagggatagcattaggagatatacctaatgctaaatgacgagttaatgggtgcarcacaccaacatggcacatgtatacatatgtaactaacctgcacgttgtgcacatgtaccctaaaacttaaagtattataataataataataataatattttggatccaactttgagctagatgaaagaaactaatttaatttgtcaagtttttagagtttttactagacctttctagttttgctaaatgagttataataacaatcaaaagcaacttaatttgtcatgtcactgtcccagtagctcattttatattcatccccattacatgcattgtggaggatagatattatta

SEQ ID NO: 876846 - DNA, 632 bp, Homo sapiens
aaacaatgttatttatcagtgagtttatcagtattcgaggtctataaaagttgcatgacaaactaagcatctaacagtgatacagaggacaggttcaatgactgaccaaaaatattttactcatgttgtatgacaatagccaatttactcctctgctctgcactgggtgtagggggtaggtataggaaagtacattcaatatctggatagccatgaataattagctccatcaagcctgttttcatatagggagaggtgaaaaatgaattgctagtagctgatttatcttaccatttcactgaaattccaaaatgagtaaacattcttaagaaaaaaaaaattgggtgagaaataattaaaatgattaataattctgtaaatgcagccaacattatattaaaaaatgcttaacrtcactaatcattagaaaaatacaaaccaaaaccataatgagataccatcttacactagtcagaatggctactattaaaaggtaaaaaagtagcagatgctggcaagattgtggaataaagggaatgcttatacactgctggtgggaatgtaaattagttcagccattgtggaaagcagtttggcgatttctgaaaaaacttaaaacggaattaccattt

SEQ ID NO: 876847 - DNA, 562 bp, Homo sapiens
agcagcctttgaatacaaatgaaaatctcctactggatcctgctgaagtaatccaacatactgaagtctcaatttcctcctttagaagatagggataataataacggtcatgtcaaattgagataatgaaataaagagttatcaaaatgcctaacgtgactgggcgtggtcactcacacctgtaatcccagcattttgggaggctgaggtgggtgaatcatttgaggtcaggagttcaagaccagcctggccaacatgataaaaccccatctctactaaaaatagaaaaaattagctgggcttgttggcacatgcctataattccagttacttgggaggctgaggcagaatagcttgaacccggaagatggaggttgcagtgagctgagatcacaccattgcactccagcctgggcaacagagtragactctgtcaaaaaaaaaaaaaaagcctaacacttgagtgcactaaacataattttatttgcatttgtcaatatcagcttttatctttccctattataatatttttcttgagatcacatgtaaatgaccgtggaaa

SEQ ID NO: 876848 - DNA, 622 bp, Homo sapiens
taaaaccactcttaagaatatcttagaagttttggcctaaagaacatccccttgaggctgttgtccctgtgaggtgtgtgaaaaatgaggtgtcacccattgcttttgtcagtctcacacttcacaatctcttatctgtaataaaatgcgagagaagataatataactgtccctctgtgctatattgtttgagcatcattatcaagaatctctcaagagagtcttcactattagcaaggtaaccacagcatttgccttatagcccatggaagtgataaaactgtcttcgtgtggcttataaaaatccctgaaagaaattaattcagtggtatcatccatctatttaaaatcctgcagctcaaaggatatgtgatcctctttagttcatattcatttcacagtaaaaaagaaataaaaatttagcacatttcycttccaggtattgggctgagcctggtggtaacctggctccttttggaggagactgattcttggatagacctcaaaagcagggcctgccccttcctcctctccccatttctgtcaggtaacttctagtcagtgactgctccgcctttcataacacatctatgctcttctgaggcacagcctgtctcctgct

SEQ ID NO: 876849 - DNA, 657 bp, Homo sapiens
cccacatgattcaattacctcccaccaggcccttctcaccacacgtggggattcaagatgacatatgggtggagacaaagccaaactatatcattctgcccctggctcctcccaaatctcatgtcctcacatttcaaaacacaatcatgcctttccaacaatcctccaaagtcttagcttagcattaacccaaattccaagtcaaaagtctcatctgagacaaggcaagtcccttctgcctttgagcctgtaaaatcaaaagcaagtcagtaacttcctagataaaatggaggtacaggtattrggtaaatacacccattccaaataggaggaattggttaaaacaaagggtctacagatcccatacaagtctgaaatccaatagggcagtcattaaacattaaagttccaaaatgatctcctttgactccatgtctcaaatccaggtcacgctgatgcaagaggtgggctcccatggccttgggcaactctgcacctgtggctttgcagggtacagtccccctctcagctgctttcacaggctgctgttgagtgcctgtggcttctccaggtgcacactgtaagctgtcagtggctctaccattctcggatgtggaggacagtagccctcttctcacagctccacaaagcagtgct

SEQ ID NO: 876850 - DNA, 529 bp, Homo sapiens
tttccttgcttgaaaaatctatagtagcattatttgtagcagttttattgcaaagaaatgccattttaaaaaagaataacccctaaaatagcttgttgtcactaggctcataaatagggacatattacagcatgcttcagacaggcgagtacaaaaaytgccccaggagaaaacagctgatataccaaaagatttttaagattttgttcatttctatcagaggaaacatgggaaatatgtgtgaagatatagtctaaggatggtagatgaagaaaaatggaataaaacactaagtcagttttactgatgtgatgcacagattaataggataatttgggcacctgaaagtgactgtaatagtttccttggctggttgattgaggattgcactcagttgtgttcttcatttaatcatgttgagatgccagaactttcctggcataatttaaagaaagacatccaaagaattaaagggtaaagaatatcgtaatggacatttcctatgtaatatatacacctaccctcccaa

SEQ ID NO: 876851 - DNA, 647 bp, Homo sapiens
gaacattgctgaagaatactgatattaataataatgaggttcagaaatagtttactaaattgtacagtgttccacaaattttaaataagtatctctcatgatcttcacaaccagagaaatgttgttcaaatgtattatataatataaatagcaaagtctataaaaagtttctaattacataagtttttgaagtctgaaagacttcctagaaaaaaaaagtygtgatttttatattttaccagtttctgagtttattttgatcttatgtggagattttctcaggaaaacatagatttttttttaaaagtgttgtctcaagggtaaaaatacagaacatatatttaaactttgaacttatactggcatactaagagggcataaatcagaactgatgggagaggagaaaagattttatttcaacaggcaaaattccatcctttgttgagaaaatgtattgactatgaacaaatttatttcacaaaacttaaccctttctcttgctactgcgcttaacactagaaaataaaattatgcttgattaataaaaaagtagcaaacatgaaatctatagtttatgtataaagccttatttttattacaccatcatttccatcagatgtatttatttatttaacaaacatttgtta

SEQ ID NO: 876852 - DNA, 548 bp, Homo sapiens
tgatatcaaagttattcagtcgtttttgtctttaatttttgaatatttggccaggcacagtggcccatgcctgtaatcccagcactttgggaggccgaggcaggcagatcacttgaggtcaggagttcgagaaaagcctggccaacatggtgaaatcccatctctactaaaaatacaaaaattatccaggcatggtagtgggcacctgcaatcccagctacttgggaggctgaggcaggagaatcgcttgaacccaggaggcagaggttacattgagctgagatcgtgccactgcactccagcctgggcaacagagtgagactgtctaaaaaaaaaaaaaraaaagaaaagaaaagaaaagaaaaagaaaaaaaaattaatatttgacaagcattccttctgtttcagtaaaatcttgaacagtacagcaaatctttgtaaatcttttccattacttaatcaacgtgcattggcaaagaacacagattattacattcactgtcttctatttcttttaacagttccattaactgggattgatccatagc

SEQ ID NO: 876853 - DNA, 564 bp, Homo sapiens
atttatttaaaagactgctttttattttttaatacaaggctcaataaactctgaggtgttttgggaatccagagccctctccccgtccccacccctcttggaaatctagagccctctgccctgttcccaatcctcatacttagatgggtgggtgtaatcaaagagaactttctcctttctgctccagggcataatcaagtgaaattctcacaggtcttggaagaagaaagctcttacatagagtttccgatggtggtcacagagagtcaggaccgaagctctgctaacactttgctgagtccatgcaacytcagtcattagttacagcacatgattggaaattactgcagtatcaagttttggggattgcattttatacgtgcatttcatgtgacatttatcagtggtcatgttttgtacaccaaggataatttggggaaatgctgaggatcccaatgtgcttcctgctccttaaaagccaacaatctatgcatcctttagagatgtctagctttcaccttttaaaatacagttactgagcacatcctggtgttttgattttta

SEQ ID NO: 876854 - DNA, 579 bp, Homo sapiens
gggcatgttaaaattctagctgtgaaagcagcagtgaaggaagctgtgcattgttaatccttcctgtgacagaaacatcaaaaagcaagccttgaaggctcatttatgaggatggtgtttcctccaccctttaccaagtgtgtgtgtgggtatggggtgcccctcctggcaagcctgtaaagctgmgggaactgtgactgctgctattttcgaagcaaattgattattggccttcactgaatattcacagctctattagccaaaacccccactgtttctaagggagtaaaaactgggtagacttctaactttctgtgcccactctgtgccttaacaatggccccaggactgctactttaaactgaatttagaatgagagatccattatattttcctgtttatatttgtgaattatgtttgccagtttttttgcaaattgtttttaaagtggcctgccctcaattttaaaatctttgtgctctggacatatataatgaacttcattccaggtagaactgaaaccagcttcctatccttctgaccttgactgatgcttgacatacgtcaatgtatgggatt

SEQ ID NO: 876855 - DNA, 606 bp, Homo sapiens
ctctggccctaatgtctctgttaaaacattatctgaatcccagcactttgggaggccaaggtgggcggatcacaaggtcaggagatcaagaccatcctggccaacgtggtgaaaccccatctctactaaaaatgcaaaaattagccgggtgtggcagcacacacatgtaatcccagctactcattactctgcaggcggaggcaggagaattacttgaacccgggagrggggggagaggttgcagtgagctgagattgtgctgctgcactccagcctgggtgacagagcaagactccgtcttaaaaaacaaaacaaaacaaaacaaaacaaaccattatctgagtattatcacctcctgccttctcaatgatttgccacagtgagcatctttctttctttccttccaattctcatctttgtcgctgagcaggggccatccttatgtcttctccagggagactacttactccacaaacaatatgccaaattgttctgtattctatctgacatgaacttaaaagacgaaagttcagtgtcttcatcccactgcagtcccacctccccttgcagcaccagaacccttattgtttaggttcagatgggcaa

SEQ ID NO: 876856 - DNA, 480 bp, Homo sapiens
atacactaaaattgacccaagaattctagagcagacttcatgttaactccacagaagaacttctcctattttcctggtatttagtgatttacagacacaaaattgtgagggtttacaaatatatagaaatttttttggcatgtcttttttcaactggcaaaaatgttgaataaaaatagagatacctcagtaaggamaaagtgaaaggtgattatttctagacatttgcatatttctttcattgaagatgagagccaggtagctgaacaggtggaccagatttgtgaagatggtggatgacatcttcacaacctacactgtaggttcaaacacaacaaaggacctcgttcagtctgtacggagctcagtgcatcttgcatttgcaagatgactgttgtaggttatggatggagcaggtttggatggattagaacagatccaccactgatactagaaaacatgtacaagaatcttcattcc

SEQ ID NO: 876857 - DNA, 548 bp, Homo sapiens
tggtttctttctttccttcatatttatctggatggatcactgcccaccacattgaccctataggacaggaaaatagttatgcctctcaaaggcaacagaataagatcctagatcctgaccaggatagtcaatagagatttgctggacaggccactctgaggattcccttaccaaaacctttttaacattccattttacctcctctactggttacttacctctttscattttttttttagcagttgttctagggattgcatatgcatccttaacttatcacttagagctaatattgcatgaaatataagagcaatatgcaatatgatagcaatgtcctgctgatgctttgggcttagagattaccacagagaaagacagcctctgaaaagagcagtgcctgagtggaggttctgggcattactacatacctaggaattatagcagaatgcaacatcatcctgaagtgcttagaagcgtgcccctttcccaactcacttggagtctatacaatctaggcatttgactctcctccaaggtatatacgaaca

SEQ ID NO: 876858 - DNA, 742 bp, Homo sapiens
ctagtcatatagagatatatgtatctttgaacactgtctcctaaatactttgaaatattttttaattgtgtgattcactcactcatctaccactcaattgccattcgggggagtcctcttttttcaaaccccttttttgaggtrtaatttacataccttaaaattcatccccgtagctgtatagtttaatgattttggggggtaactttttagagttctacattcccccaatccagttttagaacatctcatctcgccaaaatgttcccttttgccattcacagtcgatccttcctcttagccccaagcaactactgatgtgctttctagttctatagatttgtattttctagaaattttatctaaatggaatcatatgatctacagtcttttgtgtcaggcttatttcattttgcataatgtttttgcggttcatccatgttgtaccatgtattggtagttcattctttcaatgctgaataatatttcattgtgtggatatatcccattttgtacatccattcaccagtagatggacatttgggttgttttcagtttagagcgattatgaataatgctcatatgaacatttatgtacaagtttttgtgtagacatgttttcatttcttgtgggtacacagctaggagtacaattactgggtaatatgtaagtgtatgcttaactttctaagaaactgccaaactgctttccaaagtggttttatcatttacattcccatca

SEQ ID NO: 876859 - DNA, 573 bp, Homo sapiens
gatttaaaaaaatagaattcagttttttaggacagttttagatttagagaaaaatgtgtaaagataataccaagagttcccacataaccaacacccagtttcctttactattaacatattttattagtatgatacatttgttactattaatgaaccaatattgatatatttttattacctgaagcttatattttattcaggcttccttagttttcacctaatttcctctttctgttccaggatctcttctaggatacaatgttacttctagtcatcacatctctttaggttcctgtcagtctcacaatttctcagactttccttgttttgatgaccttgacagttttgaggggtacyggtcaggtattttgcagaatgtcccttaatttagatttttctgatttttttcttatgattagactggggttatgatattggggatgaagaccatataggtaaagtgtcattttcatcacatcatatcaaagctacatactgtctacgaatgctgatgttggtctcaatcacctggctgaagtagggtttgttagatttctccactgtgaagttact

SEQ ID NO: 876860 - DNA, 679 bp, Homo sapiens
caggtgttagggcatgggtatctttgggaccattattaagaccgtgtaccacagtgtgttttcctctgctgggcacaagtgtgtaccttgaaatctttcttttgcacaatatccacaaatatcatctcattccatccccttattgactcaagcgatgcttagagaggttaagtgggtttgcgtgttgtcatacaattaagtcacgaatcttgtagctgagtccagggcccatccttttacattatagaaagcaaacaagttcacacccaggggcctcttcccccatcagagccaggatatgatatcctcagtgctcaaatattgctggtgcccagaactaaggaaaatgacaggttttggggtcttagctctttgggcagatttttttwaagaaaagattaggcgatccttagttctcctactcttacaacaggaaagatattgatttttcacaaagactcaatgtctgacctttgaccttgttacatgcccatggtcctaggtagttcagtacagttgcagaattagaatgtgattagcttaggaaaccaagtttctaaaggttgtatttctcaaagaagaaaaaatactaatttctaaaagtaggctagcggatatttatgtaatttaggcacaagatgatggacccctctcctcaattctatgttgctcttgcgtt

SEQ ID NO: 876861 - DNA, 679 bp, Homo sapiens
caggtgttagggcatgggtatctttgggaccattattaagaccgtgtaccacagtgtgttttcctctgctgggcacaagtgtgtaccttgaaatctttcttttgcacaatatccacaaatatcatctcattccatccccttattgactcaagcgatgcttagagaggttaagtgggtttgcgtgttgtcatacaattaagtcacgaatcttgtagctgagtccagggcccatccttttacattatagaaagcaaacaagttcacacccaggggcctcttcccccatcagagccaggatatgatatcctcagtgctcaaatattgctggtgcccagaactaaggaaaatgacaggttttggggtcttagctctttgggcagattttttttaagaaaagattaggcgatccttagttctcctactcttacaacaggaaagatattgatttttcayaaagactcaatgtctgacctttgaccttgttacatgcccatggtcctaggtagttcagtacagttgcagaattagaatgtgattagcttaggaaaccaagtttctaaaggttgtatttctcaaagaagaaaaaatactaatttctaaaagtaggctagcggatatttatgtaatttaggcacaagatgatggacccctctcctcaattctatgttgctcttgcgtt

SEQ ID NO: 876862 - DNA, 611 bp, Homo sapiens
cttctcaaaagaagacatctatgcagccaacagacacatgaaaaaatgctcatgatcactggatagagaaatgcaaatcaaaatcacaatgagatatcatctcacgccagttagaatggtgatcattaaaaagtcaggaaacaacagacgctggagaggatgtggagaaataggaatgcttttacactgttggtgggagtgtaaattagytcaaccattgccgaacacagtgtggcgattcctcaaggatctagaactagaattaccatttgacccagcaatcccattactggttatatacccaaaggattataaatcatgctagtataaagacacatgcacatgtatgtttattgtggcactattcacaatagcaaagacttggaaccaaaccaaatgtccatcaatgatagactggattaagaaaatgtggcacatatacaccatggaatactatgcagccataaaaaagatgagttcgtgtcctttgcagggacatggatgaagctggaaactgtcattctcagcagactatcacaaggacagaaaatcaaacaccgcatgttctcactcataggtgggaattgaacaatgagatcacttggacacag

SEQ ID NO: 876863 - DNA, 643 bp, Homo sapiens
tctacaagccagaagagagtgggggccaatattcaacattcttaaagataagaattttcaacccagaatttcatatccagccaaactaagcttcaaaagtgaaggagaaataaaatactttgcagacaagctaatgctgagagattttgtcaccaccacacgtgccctacaagagctcctgaaggaagcactaaacatggaaaggaacaaccggtaccagccactgcaaaaacatgccaaattgtaaagaccatcgaggtatgaagaaactgcatcaactaatgagcaaaataaccagctaacatcataatgacaggatcaaattcacacataacaatattaaycttaaatttaaatgggctaaattcttcaattaaaagacacagactggcaaattggataaagagtcaaggcctatcagtgtgctgtattcaggaaacccttctcacatgcagagacacacataggctcaaaataaagggatggaggaagatctaccaagcaaatggaaaacaaaaataggcaggggttgcaatcctagtctctgataaaacagacttcaaaccaacaaagatcaaaagagacaaagaaagccattacataatgggaaagggatcaattcaacaagaagagctaactatcc

SEQ ID NO: 876864 - DNA, 658 bp, Homo sapiens
atatatgtaatgataaatatatattatataccactatatatgtgtgtgtatatatatatatattccatgcctcctgtaaagtctgcagaaccatgagccaattaagcctcttttctttatgtgtgtatgtgtgtgtgtatatatatagagtggtatataacatatatctatcattacatatatatcattttatataatatataatatacaataatatatacctataatatatacctatcattataccactatatatagtagtatataatatatatcatatgatatatgtatatatgttatatgaaacattaatatttatatttctatgtataataataatatatttatatcttttctcattcaagcaagctttyttataactagacgtggaaaatggaaagaaagaagaaaatctggaggaaggcaaagggtgaatattgaatcaattgaatggattcaattcaagggggaatcaattttgtgaaatgaattttatcttagtgacactttagagaacaactcagtttctacaagccaaaagatcataacaaagcattagaatggactttattcaggttatttaaggcaagttagtttgcttttattcaaaggatgctgaaatacttatcaagcaagcagacaaagtgtgacatctaga

SEQ ID NO: 876865 - DNA, 553 bp, Homo sapiens
ctctacgcactgctttgaatgtgtcccagagattctggtatgttgtgtctttgttctcgttgttttcaaagaacatctttatttctgccttcatttcgttatgtacccagtagtcattcaggagcaggttgttcagtttccatgtagttgagcggttttgagtgagtttcttaatcctgagttctagtttgattgcactgtggtctgagagacagtttgttatgatttctrttcttttacatttgctgaggagtgtgttacttccaactatgtggtcaattttggaataagtgccgtgtggtgctgaaaagaaagtatattctgttgatttggggtggagagttctgtagatgtctatcaggtctgcttggtgcagagctgagttcaattcctggatatccttgttgactttctgtctcactgatctgtctaatgttgacaatggggtgttaaagtctcccaatattattgtgtgggagtctaagtctctttgtaggtctctaaggacttgctttatgaatctggttgctcctgtattgggtgcatatatatt

SEQ ID NO: 876866 - DNA, 610 bp, Homo sapiens
gcttgtaagatttaatgtaaagctattaaggcatggttataatgtcacaatccattaccatgaaatagaaggaaacgctttattatataagccacaatctatttgttcatcatttataaagcaaaactgagtgagcacctcagggggcatgaaaataggaatttgggatggattcaattcatagaacctctcccacaattagatgtaccacaaggtacttcagacatttgtgtttctaaggaagcaagccaagatgagatgctgggartaagacagcttgagggttttccgtatacttcaccacacttactaacatttttattcatgatgtgtcttcaaactttggatttctaaactctattactttactatatatctgataccaagctctcactcaggtaagtctgaagacaaccctaggtcaaaactctgcctacttcttttttgcccccaaggatttgtttccttgagtttctgttttagacctgttaatatccattttatgtctaacttaactatgaaatgaagtatacagtccccaaaataggtaaactacatctttttgcatttgttttgagatcttttattttgggaaatggtcaagggaaaa

SEQ ID NO: 876867 - DNA, 563 bp, Homo sapiens
gcctcctctctagctttgtaactctctttttggcctctcccactcattgctaactcttaaaagtgttagtagctatatttgtccgttttcacactgctgataaagacatacccaagactggacaatttacaaaacaaacttrttggtcttacagttcccaactatcccccaaagttttaactcatttcagcattaactcaaaagtccacagtccaaagtctcatccaagataaggcaagtcccttttgcctatgagcctgtaaaatcaaaagcaagttagttacttcctagatacaatgggggtacaggcattgggtaaatacagccattccaaatgggagaaattggccaaaacaaaggggctacaggccctgggcaagtctgaaatccagtggggcagtcaaatcttcaggcttcaaaatgatctcttttgattccatgtctcacatccaggtcatgcctatgtaagaaatgggttcccatagtcttgggcagctctgtccctgtggctttgcagggtgcagcttccttcctggctgctttcatgggctagcactgagtat

SEQ ID NO: 876868 - DNA, 636 bp, Homo sapiens
gaaaacactgttttttatcatctttttcagtttagctacttagcttctagcccagagtagcataaggattcagcaaatgtcttgaggggaaaaaaaaaaaaaaaaaaaacagagtgtcattccccgtgtctcccttctcattaggttttggcctctcaatgcctggtttccttggtaggctcaaactgtagtatttgtctccctggtcctgtaatattgctcaagactgctgtcttctctgtgtcttagcagcacccctttgcttgaattcttaggcttttgttctatactgagaatcagccagtgctccttaggggatataccttgaagaatatcaactcatctgtctgagattcctttgacttcaggatcttaactccccaaatttttattgcctttgcaratcaccaatgactttaagttaaacaaaactgttttctattttatctggccttgctagttcttctgagctgaaatgtccagaagaactagctgggctgcaactattttaccataactgaaggccaaaatcatgcttgagactccttgaaaatgtgtttgagtgtgtgtgtttttaaaaatttgaaatatagtattttttctttcctcttcctcctcaaaacaagtttctctcat

SEQ ID NO: 876869 - DNA, 581 bp, Homo sapiens
attttctttggctaaaacataaacacgatttttgttatagttgttgtactgttgatgacaatcaccaacaaataaaaaatgcattaaaaatgtctaatactggccaggcgccgtggctcacacctgtaatcccagcactttgagaggccgaggcaggtggatcacctgaggtcaggagttcaagaccagcctaaccaacatggtgaaactaaatttttagtctctactaaaaattcaaaaattagcagggcatggtggcacgtacctgtaatcccagctactcgggaggctaaggcaggagaatcgcttgaaccygggaggcagaggttgcagtgaaccgagatcgtaccactgcactccagcctgggcaacagagcaagactccgtctcaaaaaaagaaaaaaaaaagtctaataccgctttgctgtgtctttaaaaagcaactttatggctactgaaaatgctttgggccaggtgcggtagctcatgcctgtaatcccagcactttgggaggccgaggcaggcagatcaagaggtcaagagatcgagaccattctggccaacatggtggaattcgtctc

SEQ ID NO: 876870 - DNA, 665 bp, Homo sapiens
tttgtagccttggaaccataggttataccatacagccttaggtgtatagtaggatccgccatctaggttttggaattacactctgtgatttttgtacaatgacaaaatcacctagaatcacatttctcacaacattcccatcgttaagaaacacctggccgggcgcggtggctcaagcctgtaatcccaacactttgggaggccgaggcgggtggatcacgaggtcaggagatcaagaccatcctggctaacacggtgaaaccccgtctctactaaaaatacaaaaaaattagccaggtgtggtggcgggtgcctgtagtcccagctactcgggaggctgaggcaggagaatggcgtgaacccgggaggaggaacttgcagtgagccgaaatcgaaccactgyactccagcctgggcaacagagtgagactccatctcaaagaaaaaaaaaaaaaaaaaaaaaaagaaacacctgactgtattaaactgttttaataatattgtctgatccatgaagatctgcatattttaatatgctaccaaatgagatatccagtgatacttgccccagccaaaataaagtatgtgtataagagctgccttcatatcccgcctactttgtccaacaaactggaggtcatttgtcagagcctcaaggaactgaa

SEQ ID NO: 876871 - DNA, 593 bp, Homo sapiens
tgatgttcccctccctgtgtccatgtgttctcactgttcaactcccagttatgagtgagaacatgcagtgtttagttttctgttcctgtgttagtttgctgagaatgatagtttgcagcttcatccatgtccctgcaaaggacatgaactcatccttttttatggctgcatagtattccatggtgtacacgtgccacattttctttatccagtctattactgatgggcatttgggttggttccaagtctttgctattgtgaatagtgctgcaataaacgtacatgtgcatgtgtctttgaggcttgttttttatagcmgtgagtgttttagtataccttgttttttatagtaagcctacctacactccactttgtatagtaagcctacctacactccactttcaatagcattcttacagcaataatgctcatactgttttataaaacattccaaaagctttctagaaatggaatgggggaacttgtgagtatgtgaaataagtaacaagaaatgtttaaggaaatgttctgtggctatctaaggatgctaaggaaaaggaaagacagtgaatgaggtgacctgtaataattat

SEQ ID NO: 876872 - DNA, 686 bp, Homo sapiens
caggaggggaaatggtatgtataaggtcactcaattagcaccagaaatcctaagaatttgtcctgcttacagcacagccaggaccccaaaacatgcctttttttttttttttcctgcagacttagctttcctaacaatgcgccayacaatgctcaggtcagggaatctacccaaagcttccagccattgtttagcaatgagttccatacttcaggtatccagtcccatgtgccaaaaacccatgttctttccatctggttgtacctcaatttagtgggtaagtgaatgatgcaggcggcatgttaatgacctatggcggctgctcattcttctcctctcaagttgggataggtaagtctgcaccacctgagatccaacactgtgacttaggcattattaggagcagtttaacacttgctgaacactctaacagagttttggagccaacaatggggataaggagatgaacatgacatagactgcccaaagctcatgggcctctaaagctgtggttcacatatttttccaccaagtcctttaaacaggcaattaagtaatcttcattaggctacaataaaaaatatttaaaaaaactatttaacttggtttgcaacaatagtctctttttgacaaaactgtagctagataaaactatattagtgattcatcaaaagcaatattttgct

SEQ ID NO: 876873 - DNA, 660 bp, Homo sapiens
aaacctgacaaaaacacgcaatggggaaacgattacttattaaacaaatggtgctggaacaactggccagccatatgtagaagattgaaattggaccccttccttacaccatctacaaaaatcaactcaagatggattaaagacttaaatgtaaaactgagaactataaaaaccctggaagacaacctaggtaataccattcaggacatagtcacagtcaaagatttcatgacaaagatgtcaaaagcaactacaacaaaagcaaaagttgataaatggcatctaattaaactaaagagcttctaaaagcaaaataaactatcagtagagtaaacagatgataacctacagaatgggagaaaaaaatttgcaaactatcagtctggacaatggtctaatatccagcatctataaggaatgtaaataaatttacaagaaaaaacaaacaaccccattaaaaagygggcaaaagacaagattacacgcttttcaaaagaagacatacatgtggccaaaaatcatggaaaaaagctcagcatcactaatcattagagaaatgcaagtcaaaaccacaatgagacaccatctcacaccagtcagaatggctatcattaaaatgtcaaaaaatagataatggcaaggttgtggagaaaaagaaat

SEQ ID NO: 876874 - DNA, 587 bp, Homo sapiens
gatggcatgaaaagtgagacaaattttaaaattaggcagattcagtttttaagtgattttcttgtatacccatacatcatctgcacattaagcacttttctctaattaagccagggaaaatacagagtaatgataatatctgtgaggtcagctgtgatcagaagtgcccacaggctgcatctcttaaaaacagtccatggcacctcaagggacactgcaaagacagtggccgggaatgtaattgagctttaggaaatgattaaagggaagtaaaatcatctccaactcaacattaatgcgtttgatttcccgggtgagaacaggatttgcgtaactgagtggttctttctttctacagtcctggatgtttggaaagccarctcttacagttagctttctttgctttgctaacattatccatcagaaaatcgaaatgcaaacagctcctatttcccaatgaagaactttctctgatttaccttaccatcatcaggcttcaccatctcaccttggaagcgttcaatcttttggtcaatatttctagaccaaaataaagtgctctcaagcctgttctttggaaagtattt

SEQ ID NO: 876875 - DNA, 663 bp, Homo sapiens
tataaatgtttaacaagaaaactttaaactttaaataactatcatatttttcataagtaatctgggtaaactattaaaaaataataattaattatgacaaaaatgctgatagtgatatgaacaataaggtccaggctgaggtggtctcagatggggatgaggaacttgttaggaactagagaaaaggtgactcttattatgttttagcaaagtgactggcagcattttgcccctgccctagagatttgtggaactttgaacttgagagagatgatttacggtatctggcagaagaaatttytaagcagcaaagcattcaaaaggtgacttgtgtgctgttaaaagcattccattttaaaaggaaaacagagcaaaaagttcagaaaactttcagcttgacaatgcagtggaaaagaaaagcctgttttttgagaagaaattcaggccggctgcagaaattttcagaagtagcaaggagcctagtgttaatccccaagactacagggaaaatgtctccaggccacgtcagagaccttcgtggcagcctctcctatcacaggcccgggggcccaggaggaaaatgtggttttgtgggccaggtccagggtccccctgctgtgtgcagccaagtgacttggtgccctgtgtcccagctgctcccca

SEQ ID NO: 876876 - DNA, 589 bp, Homo sapiens
ctgttgatataaaatggtagccttttttaatcttgcttcatgtaaatactataatgatggtatttctttggtgatataaattttgttcatgggataaccataatgtatcattgagattaattatcatgattgtaaagtgagaccagataacatgtctctgtgttagaaccaatggactcaatggcatagtgtttacaaacaatatatataatctttaatcccaaaagcatcagatcactctctcatatacttttcagtttctcatatataactgctcttacttaaaagaatattactgaagtcttctgttagagtatgagctcctttaattccttaataaggaaagtacstaatttatcacctcttctatgtgcccagtagccctttaaaaaatgttagttgaaggaatgtcaatttaaaatgaaaaacagatgagactactaaatttgtacctgaaatgagaataagaatatataaactcataagattcctaagctttaaaaaatgttcactgcagatttgcaatataatatgctcagataattttatagtttagggaatgttaggaagttaacattttataatatat

SEQ ID NO: 876877 - DNA, 493 bp, Homo sapiens
ctgtggcatgtatccatacttcattcctttttaaggctgaatagtattccatcctgtggacaagccacattttgtttatccgttcttcagttgatggacatttagcttgtttccacttttaggttattgtgaataatgctgctatgaacattcgtgtacatgtttttttattttattttttttttgagacgaagtttcactcttgttgcctaggctrgagtgcaatggtgtgatctcggctcactgcaacctccgcctcccaggttcaagcgattctcctgcctgagcctcctgagtagctgggattacaggtgtgagccaccacacctggctaattttttgtatttctagtagagacggggtttcacgatgttggccagcctggcctcaaactcctgacctcaggtgatccacccacctcagccttccaaagtgctgggattacaggcgtgagccaccacacctggcccacgtacaggtttttgtgtgagga

SEQ ID NO: 876878 - DNA, 627 bp, Homo sapiens
ataaatatgcatgattcagaagaagacaggtaaagcaagaaacatgggcttgtccctgtgagcagatagagaatttccttaatcacaaaagggcctcaattctctcgaccagccagagaggtgggaggagggcagtaactgtccaataaaatagtagtcattattcagaaatgacatgaggagtaaagggagggaggaaaggaaagaaatttgttttaatgattttcaagaatgtcttctaatctgagttgctgatatggargaaagagcatgaactgattttggacaaatccctgagccccagtccccttagttttgaaatggggtcatagtatttaatttgttgtgagaagtagggataatgaacatacaatagcccccagtgggtgctccataaattgggcgtcttattaacttctcacacggtgctctagttcttaccagccatgccctaggaatggaagaggatcatttgcagtggcttggttataaaaaggttataaaaagtttcagtatcctgaaaaatcagattagcctcctcagtccccacagttttttgtgccacttattttagcacctcctcttttcataggctatgatgactctagaaattgctatggttcttta

SEQ ID NO: 876879 - DNA, 630 bp, Homo sapiens
aagtgcttagaactgtagttcttcaaacatgcttagccatttcattaacggctaacacaaaataggtaaaacagagttgctctggtcatggcacggggagagatgccctggacctccacgtgctgcagcatctcctggaaaccccagggctcccttaaggcactggtctggcacaaccagcagcctacctgactcactcccttgcacagctgggttatagtacccaggtgatcaggaccagtttagaggtccaggattgaggcagatgtgagtatacaatttttattgtttatgagtagaacttgaatttttgttcttataaatgggataagtaggaaatctaaggaaaaggacaaattaatttagtcttttaaatgatcttttacgttgtgacccagagagaaataaagaacctggtatttgtctaaagccaggagsatctgactcagcactgggtgagctcagccatgggagagggtctgcctccatcctgaatattgtgtcatcctggacacagaaatgatagcaagggggtgtgcattagccacagctacacagaggaaggggacctcttttgtgatgctaggttcatcccgactgcacaggcctttccctacaattgagagatgc

SEQ ID NO: 876880 - DNA, 342 bp, Homo sapiens
gccctcaccatggatgactttgcccctagaaggaaggggggtcagtggttcccttccttgagtcggggcctggggcagcaaggagattccgcttatctcagatccctgggatcagagagagctggaccagcctcttatctggaagcccggggmtcccacaagcaagtcacccaagcagttgatcacaagtctccccacaagaaaggggacgagacatggggggaatggaggagggagccttgtccagctgtggaacctaccaaagaccccagactccaagaagttaaacctccaggtctacaggcagggggaaggatgaaaagaattccagatggtctgact

SEQ ID NO: 876881 - DNA, 620 bp, Homo sapiens
tagagagtgactagggtgtatatggtggcagtggtggtggtggtgcagccaaggggtggggtggaggacaagacagctgtgaagactggtgagcatgaggtagtccctggtaacaaccagcgctccacaccctaccctcagagtgccattgcagggttagcatactccactgagtaaagcttccttgtccaggcaatcagttagaagagccaggaatgctgggcccaaagaggttsgccagagagaaaagtgcaggggacatggttcccagatccacgcagaacccctggggaccactgagttccacaacctcaacaaggcccagggttatactaacacagcaggtggcctcattttagaccccacaccagaatctgtgcaacgggaaattccagtgcagcagaagttggagtcaaatgcctgcctatttctcattccattttgggaagcctaaacagggaagccttctgtgttcctctcattcccatattaaactgaactgcaaaactcatggctctaagtagactttagaattgacctaggcagaagaaatagcccagccccttcattacttcagagcagaatagagcacttactcttatcacagcagcacaagaccc

SEQ ID NO: 876882 - DNA, 597 bp, Homo sapiens
gagcagatatagaatggaagcaatggaatatgttaaagaaaaaaaatcttcctcctttagaacttataaattagtttattgattttaaacatattttggcatgatatggaggctggattattctgcacatcactcacaatagacactagaatcccatacctgtttttatagattcactttattttgatttggttgttttgtttctagctgtattttggctggttttctaagatgaaaaatttgctaggaagatgacatcagtttctaaataggtagactaataaacgtgtgtaaacgtaagaatgaataaaatctcctttttatccatgatatttcttgagagcagagtgccaggcattgtaagtttatgtcatagggcctgcttgttacttaataaatgacagtagaaaacaataagttcatayacagcttttgaatttcaaaattattttttaaacaaaagacaaagccaacaactatagtagctttcaggaataatttgtgggtgttcttgatcatcacccatttctatatactatgttctaccatatagaaacaagtacttcacatgaaaacaatgtgcttgctaggaaaaag

SEQ ID NO: 876883 - DNA, 513 bp, Homo sapiens
tccatgagcatggaatttttttttttttttgcatttgtttgtgtcctatcttatttccgtgagcagttgtttgtagttccccttgaagaggtccttcacatcgcttgtaagttgtattcccaggtgttttattctctttgtaacaactgtgaatgggagttcattcrtgatttggctctctccttatctattgttgatgtatagtaacactcgtgatttttgcacattgattttgtatcctgaaactttgctgaagttgcttatcagctgaaggagtttttgggctgagatgatggggttttctaaatatagaatcatgtcatttgcagacaaggacactttgacatcctctcttcctatttgaatatgctttatttctttctcttgcctgactgccctggccagaacttctaatacaatgttgaataggagtggtgagagaggacatcattgtcttgtgctggttttcaaagggaatgcttccagattctgcccattcagcatgatattggc

SEQ ID NO: 876884 - DNA, 513 bp, Homo sapiens
tccatgagcatggaatttttttttttttttgcatttgtttgtgtcctatcttatttccgtgagcagttgtttgtagttccccttgaagaggtccttcacatcgcttgtaagttgtattcccaggtgttttattctctttgtaacaactgtgaatgggagttcattcatgatttggctctctccttatctattgttgatgtatagtaacactcgtgatttttgcacattgattttgtatcctgaaactttgctgaagttgcttatcagctgaaggagtttttgggctgagatratggggttttctaaatatagaatcatgtcatttgcagacaaggacactttgacatcctctcttcctatttgaatatgctttatttctttctcttgcctgactgccctggccagaacttctaatacaatgttgaataggagtggtgagagaggacatcattgtcttgtgctggttttcaaagggaatgcttccagattctgcccattcagcatgatattggc

SEQ ID NO: 876885 - DNA, 569 bp, Homo sapiens
agaaaaaaagtcagtgctatgtgaaaaaatgatgcctttctatgcagaagtgaataacaatttttactacagctcacctgtagtttctgagtcaaagaatccctctgttcttgtagttctctggcattatcaatttcttgttttaacctttctatttcctagaaaagacagagcaatgtcttaacattcaaactatatcaaggcaagggaaggtcttgtttttccctraaattattgttctagttcttagaaaaagatgattttaaaaacattccttcatattgacttttagagggatgaattcatctttatatgtatgttgtctagaacaataatcttaagcaacagcaacaagtctaacttggtgcttctggtacagcaatgcttagaaataacaacctgaacattttaatgttgcttcaagctttgtggatataattctttcctaagatattaaagttttgactggaacccagagaaaccaacagcttttaaaatccatttaacccctaatgattttctgttgactgtataaatgcaactctcatctggaaggcaacaggtggtat

SEQ ID NO: 876886 - DNA, 569 bp, Homo sapiens
agaaaaaaagtcagtgctatgtgaaaaaatgatgcctttctatgcagaagtgaataacaatttttactacagctcacctgtagtttctgagtcaaagaatccctctgttcttgtagttctctggcattatcaatttcttgttttaacctttctatttcctagaaaagacagagcaatgtcttaacattcaaactatatcaaggcaagggaaggtcttgtttttccctgaaattattgttctagttcttagaaaaagatgattttaaaaacattccttcatattgacttttagagggatgaattcatctttatatgtatgttgtctagaacaataatcttaagcaacagcaacaagtctaacttggtgcttctggtacagcaatgcttagaaataacaayctgaacattttaatgttgcttcaagctttgtggatataattctttcctaagatattaaagttttgactggaacccagagaaaccaacagcttttaaaatccatttaacccctaatgattttctgttgactgtataaatgcaactctcatctggaaggcaacaggtggtat

SEQ ID NO: 876887 - DNA, 587 bp, Homo sapiens
ctccaagatgtaaatgaccatgccccagaattcttggaaaatgaaatcctcctgaaaatctccgaaggcagccatccagggacttcatttcctttgaaaatagctcaagatttggacgtaggtagcaacacagttcagaactactcaattagcaccaactcctatttccaccttttcactcgcaatcacagcgacggcaagaaatacccagagctcgtgctggatcaagcgctggacckcgaggagcagccccagctcaggttaaccctcacagcgctggatggtgggtcaccgcccagaactgggacttcccaggttctcatagtgattgtagatatcaatgacaacgtccctgaatttgctcagcggcgctacgaggtgcaggtcccagagaacacccctataggttcccttgtcatcaccgtctctgccagggatttagatgctgggacccacggggagctctcctattcattttttcaatactccaatcaaatcattcaggcctttgaaataaactcaatcacgggagaaattagatttaaaaaggcgttggattttgaggaaattcaatcttatcacatgga

SEQ ID NO: 876888 - DNA, 567 bp, Homo sapiens
cttcccagaaaggcaaagccagagcagagcccctcccttttggttattgttccagctcactgagtattggccctgagacgtaaacggtttctttcctcttttccaacttcatggtttacattcattttattaggctacctctggccctctcagttctctgaagctagtgatcctaaatatctatggcgtctgggcatgggggtgcttttcatccccgcttcctactgcaacaacccctgcaatcccctctgcagccccaagcaaggagatccgtgtcgtcaggagtgcggtgcagccacacatccaaggctgacagggcrggcactctgccaagtcctgcgcgctgctcgccttccacaacaccttcctcagcttcgtctgtatttgaagagcttagtaaattaatttcccaggggcagagaagggaggaagagggagtgtctgagggctgaaaaatgcagtcgactcgccctctgctggttaaagatccgaatttgtcgccgccaaaacagcggggaatgagaaagcaatccatatggtacggaaaaattacaacaaaaactcggc

SEQ ID NO: 876889 - DNA, 654 bp, Homo sapiens
cagctactcaagaggctgaggcaggagaatggcatgaacctgggagcggaggttgcagtgagccgagatcgcgccactgcactccagcgtgcgggacagagcaagactccgtctcaaaaaaaaagaaaaaaaaaaaaaaagaatagaaattagccaaagcaaatgaacttattttgaaatatgtatatatatttcaaatgtaatatatattatattatatatgtatatataaaatagattatctatgtatatataaagtatacttatatatgtatatataaaacagaaaaattagaggaaggctgtccaaaaaaggaaaaggtacaataacttaaaacacagaataaaaaagaagtaactataaagactataaaaaataaataagatgagtgaaaagctaagtgcttagataaatttatatgaaaatagaaatgacaaattggtacaaatgtcataaaatttttgaatagataataattattaaaataatggaaatggtaatcacagacctgacayccccccaaaaaagaactagtctggatggttttatagtttatcaaacttccaataaactgttaatagtaatagaaaaaaataaagttgaacacttatatataatagatacatatggaaacatttatctttaaaaagact

SEQ ID NO: 876890 - DNA, 632 bp, Homo sapiens
acataatggtaaagggaccaattcaacaagagctaactatcctaaatatacatgcacccaatacaggagcacccagattcataaagcaagtccttagagacctacaaagagacttagacttagagacctacaaagagacttagactcccacacaataataatgggagactttaacaccccactgtcaatattagacagatcaaggagacagaaggttaacaaggatatccaggacttgaattcagctctgcaccaagcaaacctattagacatctacagaactcttcaccccaaatcaacagaagatacattcttctcagcaccacatcacacttattctaaaattgarcacataattggaagtaaagcactcctcagcaaatgtaaaagaacggaaatcacaacaaactgtctctcagaccacagtgcaatcaaattagaatttaggattaagaaactcactcaaaaccacacaactatatggaaactgaacaacttgctcctgaatgactactgggtacataacgaaatgaaggcagaaataaaggcgttctttgaaaccagtgagaagaaagacacaatgtaccagaatctctgggacacatttaaagcagcatgtagagggaaattta

SEQ ID NO: 876891 - DNA, 603 bp, Homo sapiens
aaaataaaaacaagctgcagatcattttttacatgtgttctttttaaagaaattacaaatagtggaaaacttttccaacaaccgtatttacaaaatcttttaaaatacattttacctttgaacagtgtaggggttgggaacactgaccccagcacagtcaaaaatccatgtataacatttgactccccaaagattaaattactaatagcttacagttaatsataagccttatcaatgacatacatagttaattagcatatattttgtatgatatataaaaattctactgtattctcacaataaagtaggccagagaaaagaaaatgttatgaaaaaataataaggaagagaaaatacatgtagtattcattaaatagaagtggatcatcataaaggtctttatccttcagctttcataatgagtaggctgaggaggaagaagaggaaggattggttttgctgactcagggatggcagaggcagaagaaaatttgcatttaagtggacacttgcagttcaaactcatgttgtacagagtttaaatgtactgttttactgatgataatttttaaaaagacatagattggccgggtggtggctcac

SEQ ID NO: 876892 - DNA, 603 bp, Homo sapiens
aaaataaaaacaagctgcagatcattttttacatgtgttctttttaaagaaattacaaatagtggaaaacttttccaacaaccgtatttacaaaatcttttaaaatacattttacctttgaacagtgtaggggttgggaacactgaccccagcacagtcaaaaatccatgtataacatttgactccccaaagattaaattactaatagcttacagttaatgataagccttatcaatgacatacatagttaattarcatatattttgtatgatatataaaaattctactgtattctcacaataaagtaggccagagaaaagaaaatgttatgaaaaaataataaggaagagaaaatacatgtagtattcattaaatagaagtggatcatcataaaggtctttatccttcagctttcataatgagtaggctgaggaggaagaagaggaaggattggttttgctgactcagggatggcagaggcagaagaaaatttgcatttaagtggacacttgcagttcaaactcatgttgtacagagtttaaatgtactgttttactgatgataatttttaaaaagacatagattggccgggtggtggctcac

SEQ ID NO: 876893 - DNA, 704 bp, Homo sapiens
ttataggccttcttcggtgaaatcaagatgacacagggtagaatgtgtagtttaaaattaggtaaactacatgaaaataagatgaaccttcagaaaattctaggattcagctaagtagctggcacttacgatactctaggtaaaaataatactttggttgtatttacaattgaataaagttaacagtggggatagcatggtaagttataggtggaacctatttatattataaaccaattacacttaatcttccaaaggaataatatatttcttatacaactaaatgattttgtacatccaaataaaaaaattatgctagaaaggtagaaagagaatattgggagccttcatttgatagaaaagtaatgtttccaatcaagttgtagagtggacacagattattacaggtagttagatggcatgagcatggcaggaaagggctctgaccccacccactaggtacactactttttcaaagccagggagagacaatctcctgatgctccacagctgttaacactaaattattgattraatgcagattccagggagaagaaacttcctgggtatgtgcactaggagagaagatggtgacatatgaccttccagggacactccactagaaaaaaaaaatgaagaaagcctcagataggcatgcatacaaatttctaaacatactgtgtgtgttcaattcccaaaggtag

SEQ ID NO: 876894 - DNA, 593 bp, Homo sapiens
tttctttcatgtttttcctattcctcttgagattactgtgatgaaacaactaataaataaaccctaacatttttacgggctcaatatcaagtcttcctgagtagttctgtggtatgaggttcattgttctatgaagttcattcagtaagaaacagggmgtttccacagttgtgtgagaaatcttgagaaataagcaggtcaaagaagatagctcagtggttacatcaatagaaacagattgaagagagaaaagaacagcaaagacagcagttaaatttgacgtctgtagctcaataacatgaagagaagaaaccactctaagaactttttgtgaattaaagaataaattgattctaatttagcccaacacgtttaaagaagtaaatgggagaaaatatagaatgatgacctggaaacagttaaaataactacaatggtttgttgctgagatggatgatatcccttaattcctttcacagtttaaatctgagtctctgatggagggtcttactttatctaatgcacagtggtagccagagaagctactagggagagtaaaagaaacagaaagacatgggagcatgagcacaaaa

SEQ ID NO: 876895 - DNA, 593 bp, Homo sapiens
tttctttcatgtttttcctattcctcttgagattactgtgatgaaacaactaataaataaaccctaacatttttacgggctcaatatcaagtcttcctgagtagttctgtggtatgaggttcattgttctatgaagttcattcagtaagaaacagggagtttccacagttgtgtgagaaatcttgagaaataagcaggtcaaagaagatagctcagtggttacatcaatagaaacagattgaagagagaaaagaacagcaaagacagcagttaaatttgacgtctgtagctcaataacatgaagagaagaaaccactctaagaactttttgtgaattaaagaataaattgattctaatttagcccaacaygtttaaagaagtaaatgggagaaaatatagaatgatgacctggaaacagttaaaataactacaatggtttgttgctgagatggatgatatcccttaattcctttcacagtttaaatctgagtctctgatggagggtcttactttatctaatgcacagtggtagccagagaagctactagggagagtaaaagaaacagaaagacatgggagcatgagcacaaaa

SEQ ID NO: 876896 - DNA, 505 bp, Homo sapiens
agagattagccttgattatgcaggtggacccagtgtaatcacaaggaatcttataaggcaagagggtcaatatgagagaaggcactgtcatgatagaaacaggggatgaaatagtccacttcaaagatagaggaaggggctagggttgtgggatagggaatacaggtggcctctggtggatgaaaaaagctggaaaacggattctccctgcagtcttcagaagtatcacagccctgttgacacctggatttttgccccagaagactgattttggacttctgatgcctgatctgcaggagaataaataaatttgtattgttttaagccactaagtttgtgataatttattacagkagccacaagaaagtaatacactagatcatcaagagccttccatgctgtgttagttcgttcttgcattactataaataaatgcctgggactggataatttataaagaaaagaggcttagttggatcatggttctgcagggcttacaggaagc

SEQ ID NO: 876897 - DNA, 481 bp, Homo sapiens
tgctgccatagaaaaaggacatgtttgcttcccattccaccatgactgtaagtttcctgaggcatcccagccatgctgaactgtgagtctattaaacctattttctttataaattacccagttttgggtatttcttcatagcagtgtaagaatggactaatacagtaaattggtactgcagagattgggatgctgctgctataaggataccccaaaatgtggaagcaactttakaactggataacaggcagagattggaacagtttggagggctcagaagaagacaggaagatgtgggaaagtttggaacttcctagagacttgttgaatggcttttaccaaaatgctgatagtgaaatgaacaataaagtccaggctgaggttgtctcagatggagatgaggaatttgttggaagcagaataaaggtgattcttgctgtgctttaacaataagactggccgcattttgcccctgccctag

SEQ ID NO: 876898 - DNA, 623 bp, Homo sapiens
ggaaaatccaacaaaaatttaaataatgtctcaaagaaatgagagaggccaggcgtggtggctcatgtctgtaatcccagcactttgggtggccaagatgggcagatcactccaactccaacagagttggagaccactctggccaacatagcaaaaccccatctctactaaaagtacaaaaattagccgggtctggtggcgggcgcctgtaatcccagctgctcgagaggctgaggcaggagaattgcttgaacccgggaggtggaggttgcagtgagctgagatcgtgccactgcactccagcctgaaaaaaaagaagaagataaaagaataaataaaataggtaaactatgtagtgattaygaaaacacagaaaaaagagcaggccaaggaaagggaaattgagagtgaagagtggagagggggctagacagcaagattgagattaagtttgaccaatgacgtggaggagggcagggagttagctggggaagacatccaggggaagagcatgacagacaaaggggctgctgaggctgaactcccaaggtcggggcaggccttgcatgcttgatcaacaatgagcaggtcagtgtggctgagcagaattggcaaagggagca

SEQ ID NO: 876899 - DNA, 623 bp, Homo sapiens
ggaaaatccaacaaaaatttaaataatgtctcaaagaaatgagagaggccaggcgtggtggctcatgtctgtaatcccagcactttgggtggccaagatgggcagatcactccaactccaacagagttggagaccactctggccaacatagcaaaaccccatctctactaaaagtacaaaaattagccgggtctggtggcgggcgcctgtaatcccagctgctcgagaggctgaggcaggagaattgcttgaacccgggaggtggaggttgcagtgagctgagatcgtgccactgcactccagcctgaaaaaaaagaagaagataaaagaataaataaaataggtaaactatgtagtgattatgaaaacacagaaaaaagagcaggccaaggaaagggaaattgagagtgaagagtggagagggggctagacagcaagatygagattaagtttgaccaatgacgtggaggagggcagggagttagctggggaagacatccaggggaagagcatgacagacaaaggggctgctgaggctgaactcccaaggtcggggcaggccttgcatgcttgatcaacaatgagcaggtcagtgtggctgagcagaattggcaaagggagca

SEQ ID NO: 876900 - DNA, 500 bp, Homo sapiens
agaactcactcactgtcatgaaaacagcaaaggagaaatccacccccatgatccaattacctccgaccaagtccctcttctgacacatgggaattgcaatttgacatgagattttggtggggacacagagccaaatcttatcaatcaagaatgttatcaagatactggcccggatttggccctgatctcactaaagtcggtgaaactaagagcatgtaaaaggcagcaaccaatactcagtttcctaaagttgaatgtgtacaggatccacattagttggtctcctgtgtttctggattacagagcagcacctcagaagtttcctccagttgrggtcctagaccatgtggtgacctatcaaaggatcagcagtcaagttggcagttttggaggaaaaagcatagcaaagaattgcttgtattttttaaatgtaaatgtaaaattaaattttattttttatagaaataccatgaagttatttataatatttatagttctaa

SEQ ID NO: 876901 - DNA, 680 bp, Homo sapiens
caaggagagccagtccgagtttcaaaactgaagaacttgggagtccgatgtttgagggcaggaagcctctagcacaggagaaagatgtaggctgggaggctaggccagtctcacctcttcacgtttttctgcctgctttatattcgctggcagctgattagattgttcccaccagattaagggccggtctgccttccccagtccactgactcaaatgttaatctcctttggcaacattctcacagacacacccaggatcaatacttcacaaccttcaatctaatcgagttgacactcagtattagccatcagagtgactgttatgttaaactcttattttaaaacaaatcagcaaccttaaagtatttgcagaaaatcaaagttaaatgctaggtagaattacattactgagcccttgaaaaatgttataaaaaatgctattctaacaaaacccagcccccacccagaagtttgmtaaggtaagatttcttggcctcaggttcttcaattttcaaagaatttacttttgagttataaagtctcacttagctgactgttttaggtaaacagcagctcaaaaagccagatataacaatcgaggtggaattacagggatgacagtctttagcttacagctactcattcattttggctttaccaaagtgtctgcccttgactta

SEQ ID NO: 876902 - DNA, 567 bp, Homo sapiens
agaatttcaagtctggccaaactaaacttcataagcaaaggagaaataaaatcctttcagacaagtaaatgctgagggaatttgttactaaccaacctgctttaaaatatctcctgaaggaagcattaaatatggaaaggaaagactgttaccagccactataaaaacacaktgaagtacacagaccagtgacactacaaagccaacacataggaaaatctgcaaaataaccagccaacatcatgaagacaagatcaaatccaaacatgtcaatactaactttaaatgtaaatgagctaaatccccaattaaaaaacacagggtcacaagctggataaagaaacaagacccgttagtatgctgtcttcaagagacccatctcatgtgcagtgacacacataggctcaaaataaagggatggaggaaaatctaccaagaaaatggaaaacagaaaaaagcaggggttgcaattctagtttctgacaaacagactttaaaccaacaaaaataaaaaaatgacaaagaaggacactacataatggtaaagggttaaattcaacaagaaga

SEQ ID NO: 876903 - DNA, 567 bp, Homo sapiens
agaatttcaagtctggccaaactaaacttcataagcaaaggagaaataaaatcctttcagacaagtaaatgctgagggaatttgttactaaccaacctgctttaaaatatctcctgaaggaagcattaaatatggaaaggaaagactgttaccagccactataaaaacacattgaagtacacagaccagtgacactacaaagccaacacataggaaaatctgcaaaataaccagccaacatcatgaagacaagatcaaatccaaacatgtcaatactaactttaaatgtaaatgagctaaatccccaattaaaaaacacagggtcrcaagctggataaagaaacaagacccgttagtatgctgtcttcaagagacccatctcatgtgcagtgacacacataggctcaaaataaagggatggaggaaaatctaccaagaaaatggaaaacagaaaaaagcaggggttgcaattctagtttctgacaaacagactttaaaccaacaaaaataaaaaaatgacaaagaaggacactacataatggtaaagggttaaattcaacaagaaga

SEQ ID NO: 876904 - DNA, 685 bp, Homo sapiens
aaacctcaagatgagaggaattcacccagatctataggtactgcaggtgaagtttgctggtgagttcctggcttggcttcccagctttgagaggctttttaaagtcttaattcctttcataagattccttattaaaagctccagcaaagcaaactgaaaaagacctacgtagtcagttaccatttttgctggacttaggaaaataattgagccaaatctaatgagacaagatttattttgcgaacaagaatattacttttattatctttgacagaaatgaggatgattatagacagaaagtgtgtgtttcaatggaaggctatagcacatcatggtgggtaccygattataatcccgttgactgtctttcagctattttttacctccgtaaactccattttactttctaatttgttatgtacctgtaaactggattaaatcctaaatttttctagtttcctttcatatccagctacaaccctctagactaacatttccaaattttatcttaccctcctgacttggctgagaactaaaacagaagccctgcaagctgaagctggacaacttgatataaactttaaagaaataatggtaacagatcatgtgtagtcaatgtttgtgcctgcgctatatgggtcactcagaaagttcaccaaaacaaccaatgccatcacagaataac

SEQ ID NO: 876905 - DNA, 611 bp, Homo sapiens
gagcacgagcaaaatgctaccagtctctttaccaaaacataacaagagtcacctttcctccagttcccaacaagtttctcatctccatctgagaccacctcagcctggattttattgtccatgtcactacctgcattttgagcaaagccatttaacttgtctctaggaaattctgaactttcccacattttcctatcttcttgtgagtcctccaaactgctctgacctctgcctrttacccagttccaaagtcacttccacatttttgggtatcttttcagcagcgccccactcttccggtaccaatttactgtattagttcattttcacgttgctgagaaagacatatccaagactgagcaatttacaaaagaaacaggtttaatgaacttacaatttcacatggcttgagaggcctcacagtcatggtggaaggcaaggaagagcaagtcacatcttacatggatcgtgacaggcaaagagacagcttgtgcagggaaactcccatttttaaaaccatcagatctcgtgagattcattcactatcatgagaacagtgcaggaaagacctgcccccctaattcaatcacctcccatcaggttcttcccac

SEQ ID NO: 876906 - DNA, 564 bp, Homo sapiens
ttttcagaattctctttgtgtttgacttttgacagtttgatgataatatgccttggagaagagttctttgggctgaatctgtttaggaattcttgagctgcatatatctggatgtctataactgttgcaagatgtgggaagtttttagttattattttgttgttcaaattgtaattttgaggggagacagttgcttcagagtcctactctgccatcatgttccactctcaaaagtttgctgatccccaaattcctgtctctggtctaaacttctctcttacactccaaactaatgcagccactcctgctgactgggagatcattagatagtttgatarcaacatatcaaaaatatgtttcctcccaacctgctgtacatttacgtttccccgtctcagttggtaacaattacttaggccagaaactttgagattcagtccttctctttctcttccacccctcagccaatacgtaagaaaatctcgtctctatctctaaattatagtcagagtctttttaatttttttaccacctctgaattaccatcctgctccaattcatctt

SEQ ID NO: 876907 - DNA, 616 bp, Homo sapiens
gatcacaaggtcagcagatcaacaccatcctggctaacatggtgaaaccccatattctactaaaaaatacaaaaaaaaaaaaattaggtgggcgtggtggtgggcgcctgtagtcccagctactcaggaggctgaggcaggagaatgacatgaacccgtgaactcggcttgcagtgagccgagattgtgccactgcactctagcctgggtgacacagcaaagactgtctcaaaaaaaaaaaaaaaatttgtatagacgaggtctgactaggttgcgcaggccagtcttgaactctcagcctcaagcaatcatcttgtctcagtctcccraaatggtgggattacaggcatgagccaccatccccagccaccatttcattttcatttctctgatgaacaccattagctgataactcaattttcttatcagtgtcaaacatttaccaatgactgtattttctgtagaaaaagaacattttctacccctctaatctattgttctttctgtcctccttccattggtccaatattagtttcatctgaaatactgtatgttaatttctatgtttatacttttattgtttggccattcaaaaaatccagccatcaatagatat

SEQ ID NO: 876908 - DNA, 616 bp, Homo sapiens
gatcacaaggtcagcagatcaacaccatcctggctaacatggtgaaaccccatattctactaaaaaatacaaaaaaaaaaaaattaggtgggcgtggtggtgggcgcctgtagtcccagctactcaggaggctgaggcaggagaatgacatgaacccgtgaactcggcttgcagtgagccgagattgtgccactgcactctagcctgggtgacacagcaaagactgtctcaaaaaaaaaaaaaaaatttgtatagacgaggtctgactaggttgcgcaggccagtcttgaactctcagcctcaagcaatcatcttgtctcagtctcccgaaatggtgggattacaggcatgagccaccatccccagccaccatttcattttcatttctctgatgaacaccattagctgataactcaattttcttatcagtgtcaaacatttaccaatgwctgtattttctgtagaaaaagaacattttctacccctctaatctattgttctttctgtcctccttccattggtccaatattagtttcatctgaaatactgtatgttaatttctatgtttatacttttattgtttggccattcaaaaaatccagccatcaatagatat

SEQ ID NO: 876909 - DNA, 687 bp, Homo sapiens
tggttattctgtgatggcattggttgttttggtgaactttctgagtgacccatatagcgcaggcacaaacattgactacacatgatctgttaccattatttctttaaagtttatatcaagttgtccagcttcagcttgcagggcttctgttttagttctcagccaagtcaggagggtaagataaaatttggaaatgttagtctagagggttgtagctggatatgaaaggaaactagaaaaatttaggatttaatccagtttacaggtacataacaaattagaaagtaaaatggagtttacggaggtaaaaaatagctgaaagacagtcaacgggattataatcrggtacccaccatgatgtgctatagccttccattgaaacacacactttctgtctataatcatcctcatttctgtcaaagataataaaagtaatattcttgttcgcaaaataaatcttgtctcattagatttggctcaattattttcctaagtccagcaaaaatggtaactgactacgtaggtctttttcagtttgctttgctggagcttttaataaggaatcttatgaaaggaattaagactttaaaaagcctctcaaagctgggaagccaagccaggaactcaccagcaaacttcacctgcagtacctatagatctgggtgaattcctctcatcttgaggttt

SEQ ID NO: 876910 - DNA, 683 bp, Homo sapiens
taagtcaagggcagacactttggtaaagccaaaatgaatgagtagctgtaagctaaagactgtcatccctgtaattccacctcgattgttatatctggctttttgagctgctgtttacctaaaacagtcagctaagtgagactttataactcaaaagtaaattctttgaaaattgaagaacctgaggccaagaaatcttaccttakcaaacttctgggtgggggctgggttttgttagaatagcattttttataacatttttcaagggctcagtaatgtaattctacctagcatttaactttgattttctgcaaatactttaaggttgctgatttgttttaaaataagagtttaacataacagtcactctgatggctaatactgagtgtcaactcgattagattgaaggttgtgaagtattgatcctgggtgtgtctgtgagaatgttgccaaaggagattaacatttgagtcagtggactggggaaggcagaccggcccttaatctggtgggaacaatctaatcagctgccagcgaatataaagcaggcagaaaaacgtgaagaggtgagactggcctagcctcccagcctacatctttctcctgtgctagaggcttcctgccctcaaacatcggactcccaagttcttcagttttgaaactcggactggctctccttgctc

SEQ ID NO: 876911 - DNA, 482 bp, Homo sapiens
ttataaataacttcatggtatttctataaaaaataaaatttaattttacatttacatttaaaaaatacaagcaattctttgctatgctttttcctccaaaactgccaacttgactgctgatcctttgataggtcaccacatggtctaggaccycaactggaggaaacttctgaggtgctgctctgtaatccagaaacacaggagaccaactaatgtggatcctgtacacattcaactttaggaaactgagtattggttgctgccttttacatgctcttagtttcaccgactttagtgagatcagggccaaatccgggccagtatcttgataacattcttgattgataagatttggctctgtgtccccaccaaaatctcatgtcaaattgcaattcccatgtgtcagaagagggacttggtcggaggtaattggatcatgggggtggatttctcctttgctgttttcatgacagtgagtgagt

SEQ ID NO: 876912 - DNA, 647 bp, Homo sapiens
ttacccctgccctagggatctgtggaactttgaacttgggaaagatgatttaggatatctggcagaagaaatttctaagcagcaaagcattcaagatttgacctggctgtttctggaagcatacagtcatatgaattcacaaagaggtgatctgaaattgaaatttgtgtttaaaagggaagcagagcctaaaagtttggaaaatttataggctaaccatgttgtagaaaagaaaaacccattttggggggaakccattcaagcttctggctgaagaaatttgcataagtaaagaggaggtgaatgttaattgctaagatagtgggggaaatgtctgcagggcatttcagaaattttcacaatagcccctcccatcatagacctggaggcctagaagggaataatggtttcatgagctaggtacagggtcccgctgctctatgcagcctcagaacatggcaccctgagtcccagccactccagcttcagctgtggctgttgcttcagagggtgcaagcgtcaagccttggcaacttccatgtggtgttggacctgcaggtgtacagaaggcaagagtttgggaacctctgcctagatttcagaggatgtatggaaacacctggatatccaggcagaagtctgctgca

SEQ ID NO: 876913 - DNA, 665 bp, Homo sapiens
cactctcttctggcttgtagagtttctgccgagagatcagctgttagtctgatgggcttccctttgtgggtaacccgacctttctctctggctgcccttaacgttttttccttcatttcaactttggtgaatctgacaattatgtgtcttggagttgctcttctcgaggagtagctttgtgttgttctctgtatttcctgaatctgaatgttggcctcccttgctagattggggaagttctcctggacaatatcctgcagagtgttttttaacttggttccattctccccgtcactttcaggtacaccaatcagaygtagatttggtcttttcacatagtcccatatttcttgaagactttgttcatttatttttattctttttaaacttcccttctcacttcctttcattcatttgatcttccatcactgatatcctttcttccagttggtcaaatcggctactgaggcttgtgcattcattacgtacttctcgtgccttggttttcagctccatcaggtcctttaaggacttctctgcattggttattctagttagcctttcatctaattttttttcaaggtttttaacttttttgccatgggttcaatcttcctcctttagcttggagtagtttgatcatctgaagcattcttctctcaact

SEQ ID NO: 876914 - DNA, 543 bp, Homo sapiens
atcgttgtattttatagccaacttaatgcttgaaatcactgtaaagataatttttctgcctggaattgctcataaagaatgataaccctggtgcctggagcttgttgggatcttatgagatttggtctagctaggtggtttgtattttatgccagtcataattcaagggttgtagggtatagttttattttgacctgatcgggcaatcatttctgttcttgcacaggtattcttcttgataatggctccatttagtggtttaaatcagacataaacttattgacatcgctggrtggtttaaaaaaattttactttctgatatctttgaagaagaggaaagagatcagtgatcctttttcaaggaggcattcagagttcttgaaaccattatatctaggtggtttcacaccaagttgcaagtgcttcctttgtggcctttccagctgtagctggctatgctatttattcattcactcacaaaaagttattgaatgcatgccatgtgccaggctctgttctagctcttgaggctatagtggtgaa

SEQ ID NO: 876915 - DNA, 666 bp, Homo sapiens
acaagcagcaccacaagcagtgatcattcacacacactttcagcctccaagatatcccaacaaccaaggaaatactttgctgccccctctgcggcttttcttaccttggtctgtgcacgaagttacctggtcactgtggtatttgtaggcaagcctttccttcccacattgctgagagtctgggtttattcatcacagtgggtgatggctggatctttagcccctgagaccactgcagtgaggcagtgggacgcatctccccctgggagatgaccagagaccccttcctcagaggaaaatgggaatcctgggcaggcccccaaattgttagaaacaaatatttggtgccacaaagtgaaactagcactcaggcaaaagttttctcagcaagrcaatttacttctatagaagggcgcctcttgcatgcaaggcagaggcaagggagagcatgcaaaacaaaggagagtaggagatttttatctgtaatgcagaccctgttcctgtgtcctccccttgtgggctggggtcggaccacacaatctaggctaatttcaatctagggtaaactaagctactgttgacatcatcaaaggaggcaagggtgggcatttgatgggaaggacaggtatggtacatcatggggtgtttgggcatagcagagatagg

SEQ ID NO: 876916 - DNA, 598 bp, Homo sapiens
tgcaccctctaaaacaatggcttgagctataccttggccccttttagccactgctggagctgaagcagctggaatgcagggcatcatgtcctgaggctgcatacagcagggcccagcccatttttccctgccaggcctctgggcctgtgatgagagaggctactgtgaaggtctgtgatatgccctggagacgttttccccattgtctcagtgattaacattcagctcctctttacttaagtaaatttctacarctgacttgaatttctctaaagaaaatgggtttttcttttctattgcatcataaggctacaagtttttcaaacttttgtactctgcttcctcttggatgctttgctgcttagaaatttcttccaccagataccctaaatcatctctctcaagttcaaagttccatagatctctagggcaggggcaaaatgctgtcaatctctttgctaaagcatagcaagagtcacctttgctccaggccccaagaagttccttatctccatctgaaaccacctcagcctggacttcattgtccaatcactatcagcattttggtctgaaccattcttcaagtctctaggaagtt

SEQ ID NO: 876917 - DNA, 442 bp, Homo sapiens
aggggcaaaatgctgtcaatctctttgctaaagcatagcaagagtcacctttgctccaggccccaagaagttccttatctccatctgaaaccacctcagcctggacttcattgtccaatcactatcagcattttggtctgaaccattcttcaagtctctaggaagttccaaacttttccacatcttcctgtcttctgagctttccaaatggttccaacctctgcctgttacccagttcttaagtcacttccacatttttgagtatgtttacagcagtgrccccactacttcggtaccaatttactgtattagtctgttctcacactgctatgaaaaaataccccagactgggtgatttataaaggaaagaggtttaattgactcacagttctgcattgctgggaaggccttaggaaacttacactcaaggcagaaggtgaag

SEQ ID NO: 876918 - DNA, 660 bp, Homo sapiens
catgatgaaaatttaatggatgaggagttgccacttatggatgagtaaagaaacagttttgtgagatggaatctactcctggtaaagatgctgtgaacatggttgaaatgacaacaaaggatttagaatattacatcaattcagttgataaaacagaggcagggtttgagaggrctgactccaattttgaaagaagttttactgtgggtaaaatgctggcaaacagcattgcattctacggagaaatcttttgtgaaacggagaatcaattgatgtggcaaacttcattttcgtctttcttttagaaattgccagagccacccagccatcagcaaccaccaccctgatcagtcagcagccatgaacgctgaggcaagaccctctaccagcaaaaaccctccacctcagtggcaaaaaaaccttgcctctgaggcaagaccctccaccacttgccaaaagctcagatgattattaggatgtttacaaaataaagtattataagtcaaagtatgtacacttttttgtcatgacagcctactattacatacatcaattttgttagacataatgctattgtatacttaatagattaaagtatagggtaaacataacttttatatgcactaggaaatcaaaaattttgtgtgacttgctttatct

SEQ ID NO: 876919 - DNA, 692 bp, Homo sapiens
gtagattctggatattagccctttgtcagatggatagattgcaaaatttttcttccattctgtaggttgcctgctgactctgatgatagtttcttttctgtgcagaagatctttagtttaattatatagcatttatcaattttggcttttgttgccattgcttttggtgttttagtcatgaaggctttgcccatgcctatgtcctgaatggtattgcctaggttttcttttagagtttttacagttttggatcttatgtttaagtstgtaatccgtgttgagttaatttttgtataaggtgtaaggaaggggtccagtttcagttttctgcatatggctagccagttttcccaacaccatttattaaatagggaattctttccccattgcttgtttttgtcaggtttgtcaaagatcagatggttatagatttgtggcattatttctgaggcctctgttctgttccgttggtctatatatctgttttggtatcagcaccatgctgttttgattactgtagccttgtagtatagtttgaagtctggtactgtgatgtctccagctttcatattgttgcttaggattgtcttggctatacgagctcttctttggtttcatatgaaatttaaagtagatttttctaattctgtgaagaaagtcaatggtagcttgatggggatagtattgaatct

SEQ ID NO: 876920 - DNA, 619 bp, Homo sapiens
ggcatgtgacaggtaccctaagtggctgtgtcctcctggccaaaaatcacagcccagggtccagacatctctgtgtagagggagggatggttgccgaggcccctaggggaatctctgctgtccctggagtgggatcttcctgctcaagcttttaggagctgtcagaggtcacagcaggggctcagcccctggtcctgtggcagcgctgggggcccctgcgcacccagctcctcagccacagccatggcctcacacagtgccctctgccgagcgagccacagcttctcccacctctccctgctctgggaggcaggtttccttcccctctgttgccaatatcttgtcatgcttaaagagcaaacaaaacatcaaaagcttacatayaatgttagtgaacagtactctcaagtacaggaacctctgtttattattgtaagaaaactgagctaatttctttaaagcaaggcagacaggcgtcgccaccctgctccggatgcccagtgtggttttgtgtgacctgctggggcttgttgtttggaaatcggagcgttgcattttagccacattgatgtctttgtaaaggtgatacatgtggtctgtctgtcagacaaatacccca

SEQ ID NO: 876921 - DNA, 581 bp, Homo sapiens
  misc_feature 7: n = A,T,C or G
ccaggtngcttccttatcactacctacaaaaattaactgcagatggattaaagacttaaatgtaaaacccaaaactataaaaaaagaaaaaaaaaaaaaccctgggagacagccttgacaataccattctggacataggaatgggcaatgatttcccatgacgaagatgccaaaagcagttgcaacaaaaacaaaaattgacaaaaggaatctaattaaactaaagagcttctgtgcagcaaaagaaactatcaacagagtaaacaggcaacctacagaatgagagrccatttttgcaaactatgcatctgacacaggtctaatatccagcatctgtaagaaactcaaacacatttacaaacgaaacaaccccattaaaaagtgagtggacatcaacagtcacttttcaaaagaagacatacatgcagccaacaggcatatgaaaaaaagctcaacatcacttatcattaaagaaatgcaaatcaaaaccacaatgagatagcatctaagaccagtcagaatggtgattattaaaaagtcaagaaaataacaggtgctggtgaagttatggaaaaaaagga

SEQ ID NO: 876922 - DNA, 600 bp, Homo sapiens
gaagtattaatctccaatgtaatggtattagaatgtggggatttggaaggtgattagttttagataagtctggagggtggaggccccaagatggaattagtacccttacaagaagaggaagagctgggttcagtggctcacamctgaaatctcagcactttgtgaggtcaaggtgggagaatcacttgaggccaggggttctaaaccagcctgggcaacatagtgagaccctatctctaaaaaaaataaaaaagaaaaaaaaaaagaaaaagaggaagagaccagagcctcttcaccacatgaagatacagcaagaagatggccatctataagccagaaagtgaaccatcaccagacatcaaatctgtcagtgccttgattttggacttcccagcctccagaactatgctgttgaagctacccagtttatagtatttgattagagcaacttgaatctaagacagaccttcccatgaaaacatagtcaataaatactgttaaaggttgtggaaccctaattcatcacagcaaaagcacatgggcaaggctttgaaccctgtgtctattgtctgtctccatctatctgtctgttatctatgt

SEQ ID NO: 876923 - DNA, 600 bp, Homo sapiens
gaagtattaatctccaatgtaatggtattagaatgtggggatttggaaggtgattagttttagataagtctggagggtggaggccccaagatggaattagtacccttacaagaagaggaagagctgggttcagtggctcacaactgaaatctcakcactttgtgaggtcaaggtgggagaatcacttgaggccaggggttctaaaccagcctgggcaacatagtgagaccctatctctaaaaaaaataaaaaagaaaaaaaaaaagaaaaagaggaagagaccagagcctcttcaccacatgaagatacagcaagaagatggccatctataagccagaaagtgaaccatcaccagacatcaaatctgtcagtgccttgattttggacttcccagcctccagaactatgctgttgaagctacccagtttatagtatttgattagagcaacttgaatctaagacagaccttcccatgaaaacatagtcaataaatactgttaaaggttgtggaaccctaattcatcacagcaaaagcacatgggcaaggctttgaaccctgtgtctattgtctgtctccatctatctgtctgttatctatgt

SEQ ID NO: 876924 - DNA, 568 bp, Homo sapiens
agccctgaatatacttgttaattttccgtctcgttggtctgtctaatattgacagtggggtgttaaagtctctcgctattattgtgtaggagtctaactctctttgtaggtctctaagaacttgggttatgaatctgggtgctcctgtattgggtgcatatatatttaggatagttagatctttttgttgcattgatccctttaccattatgtaatgacattttttgtctcttttgatttytgttggtttaaagtctgttttatcagagactaggattgcaacccctgtctttttttttttttttttttttttgctttccatttgcttggtaaatattcctccttcccattattttgagcctatgtgtgtctttgcacgtgagatgggtctcctgaacacagcacaccgatggatctcaactcgttatccaatttaccagtctgtgtcttttaattgaggcatttagcctatttccacttaaggttaatattgttacgtgtaaatttgatcctgtcattatgatgctagccagttgttttgcctgttagttgatgcagtttattcata

SEQ ID NO: 876925 - DNA, 574 bp, Homo sapiens
tttctcacaactcctattcaacacagtattggaagttctgaccggggcaatcaggtgagagaaagcaataaagtgtaatcagataggaagagaggaagtccaattgtctctgtttgcagatgtcatgattctatatttagaaaaacccattgtctcagcccaaaacctccttaagctgataagcaacttcagcaaacttgcaggacacaaaatcagtgtgcaaaaatcacaggcaatcctatacaacaataacagacaaacagagagccaaatcataagtgaactcccattcacaattgctgctaagagaataaaatacctaggaatacaacttacaagggatgtgaaggacctcttcaaggagaactagaaacaactgctcaaggaaataagagaggacacaaaaaactggaaraacattccacggtcatggataggaagaatcaatatcgtgaaaatggctatactacccaaagtaatttatagattcaatgctgtgcccatcaagctaccactgactttcttcacataattggataaactactttaaacttcatatggaacaataaaagag

SEQ ID NO: 876926 - DNA, 586 bp, Homo sapiens
ccatgcacctggaaaagctgcagacactcaacgccagcccatgaaagcagccaggaggtgggctataccctgcaaagccacagggtggaactgcccaagactatgggaacctacttcttgcatcaacgtcacctgaatgtaagacatggagtcaaagtcattttggagctttaaaatttgactggcccactgkatttcagccttgcacgccccgcccccaccagcccctttgttttggccaatgtctctcatttgaattgttgtatttacccagtgtttgtgcccccattatatctaggaaataactatcttgcttttgattatacaggctcataggcagtagggacttgccttgtctcaggtgagactttggactatgggcttttgagttaatgctgaaacgagttaagactttgggggactgttgggaaggtgtgattggttttggaatgtgatttacatgagatttggcagggtccaggggtggaatgatatggtttggctctatgtccccatctaaatctcatcttgaattgtactactataattcccacattttgtaggaggaacctggtaggagataatt

SEQ ID NO: 876927 - DNA, 561 bp, Homo sapiens
ctgcagagcagcaaatattgctgaacagcaaatgttgctgcctgatcattcctctggaagcttcgtctcaggggtacccagctgtgtgaggtgtcagtctacccctactggggggtccctctcagataggctactcgggggtcagggacccacttgaggaggcagtctgttcgtcctcagatctcaaactccgtgttgggagaaccactactctcttcaaagctgcagacagggacatttaaatctgcagaggtttctgctgtcttttgttctgctataccctgcccccagaggtggagtctacagaggcaggcrggcctccttgagctgcggtgggctccacccagttcaagcttccccaccactttgtttacctactcaagcctcagcaatggcgggcgcccctcccccagcctagcagcccccttgcagttagatctcagactgctgtgctagcaatgagtgcagctccttgggcatgggaccctctgagccaggcatgggatataatctcccggtgtgccatttgctaagacccttggaaaagtgcagtattagggt

SEQ ID NO: 876928 - DNA, 621 bp, Homo sapiens
atgtaccctaaaacttagagtataataaaaaaaaaaaaaaagatcaaggccccagaaccttgcttctgaaagggagactgctgtggtcaacccttaggaacttcccaaggccaattcttaaaagcagaaacagagaccaccaaatatcacacacttagtcctccacccacagacactgccctcactgtcccatgtgagggcagtagctgccaagtccccagtggaatcctggaagaagtgcaaggaaatagccaaaggaatgttaatatgttaattctcagaggttcagtggctgcctgatggtgaaagaagagaaattgttggsgaggagggggaataggggcagaactcatctctccccacagaaggtcaagaggccacccaccgcccagccccagaagaccactcaaactctgctgccctccaggaggaggggatgcctcctctgatgtgacgttgtctgctttggccttccaaagctcaatgtcatcaaatgtcctttccctagattcaaaaatatgtccttggggataagagcacaatactgtggttaggaatacatgctagatagtcagaaagccagatgcaaaccctggctccaccacttactatatgggagat

SEQ ID NO: 876929 - DNA, 621 bp, Homo sapiens
atgtaccctaaaacttagagtataataaaaaaaaaaaaaaagatcaaggccccagaaccttgcttctgaaagggagactgctgtggtcaacccttaggaacttcccaaggccaattcttaaaagcagaaacagagaccaccaaatatcacacacttagtcctccacccacagacactgccctcactgtcccatgtgagggcagtagctgccaagtccccagtggaatcctggaagaagtgcaaggaaatagccaaaggaatgttaatatgttaattctcagaggttcagtggctgcctgatggtgaaagaagagaaattgttggggaggagggrgaataggggcagaactcatctctccccacagaaggtcaagaggccacccaccgcccagccccagaagaccactcaaactctgctgccctccaggaggaggggatgcctcctctgatgtgacgttgtctgctttggccttccaaagctcaatgtcatcaaatgtcctttccctagattcaaaaatatgtccttggggataagagcacaatactgtggttaggaatacatgctagatagtcagaaagccagatgcaaaccctggctccaccacttactatatgggagat

SEQ ID NO: 876930 - DNA, 621 bp, Homo sapiens
atgtaccctaaaacttagagtataataaaaaaaaaaaaaaagatcaaggccccagaaccttgcttctgaaagggagactgctgtggtcaacccttaggaacttcccaaggccaattcttaaaagcagaaacagagaccaccaaatatcacacacttagtcctccacccacagacactgccctcactgtcccatgtgagggcagtagctgccaagtccccagtggaatcctggaagaagtgcaaggaaatagccaaaggaatgttaatatgttaattctcagaggttcagtggctgcctgatggtgaaagaagagaaattgttggggaggagggggaataggggcagaactcatctctccccacagaaggtcaagaggccacccacmgcccagccccagaagaccactcaaactctgctgccctccaggaggaggggatgcctcctctgatgtgacgttgtctgctttggccttccaaagctcaatgtcatcaaatgtcctttccctagattcaaaaatatgtccttggggataagagcacaatactgtggttaggaatacatgctagatagtcagaaagccagatgcaaaccctggctccaccacttactatatgggagat

SEQ ID NO: 876931 - DNA, 611 bp, Homo sapiens
agtattaatctccaatgtaatggtattagaatgtggggatttggaaggtgattagttttagataaggtctggagggtggaggccccaagatggaattagtacccttacaagaagaggaagaggctgggttcagtggctcacamctgaaatctcagcactttgtgaggtcaaggtgggagaatcacttgaggccaggggttctaaaccagcctgggcaacatagtgagaccctatctctaaaaaaaataaaaaagaaaaaaaaaaagaaaaagaggaagagaccagagcctcttcaccacatgaagatacagcaagaagatggccatctataagccagaaagtgaaccatcaccagacatcaaatctgtcagtgccttgattttggacttcccagcctccagaactatgctgttgaagctacccagtttatagtatttgattagagcaacttgaactaagacagaccttcccatgaaaacatagtcaataaatactgttaaaggttgtggaaccctaattcatcacagcaaaaagcacatggcaaggctttgaaccttgtctattgtctgtctccatctatctgtctgtttatctatgtatctatttaccta

SEQ ID NO: 876932 - DNA, 611 bp, Homo sapiens
agtattaatctccaatgtaatggtattagaatgtggggatttggaaggtgattagttttagataaggtctggagggtggaggccccaagatggaattagtacccttacaagaagaggaagaggctgggttcagtggctcacaactgaaatctcakcactttgtgaggtcaaggtgggagaatcacttgaggccaggggttctaaaccagcctgggcaacatagtgagaccctatctctaaaaaaaataaaaaagaaaaaaaaaaagaaaaagaggaagagaccagagcctcttcaccacatgaagatacagcaagaagatggccatctataagccagaaagtgaaccatcaccagacatcaaatctgtcagtgccttgattttggacttcccagcctccagaactatgctgttgaagctacccagtttatagtatttgattagagcaacttgaactaagacagaccttcccatgaaaacatagtcaataaatactgttaaaggttgtggaaccctaattcatcacagcaaaaagcacatggcaaggctttgaaccttgtctattgtctgtctccatctatctgtctgtttatctatgtatctatttaccta

SEQ ID NO: 876933 - DNA, 625 bp, Homo sapiens
ggcatgtgacaggtaccctaagtggctgtgtcctcctggccaaaaatcacagcccagggtccagacatctctgtgtagagggagggatggttgccgaggcccctaggggaatctctgctgtccctggagtgggatcttcctgctcaagcttttaggagctgtcagaggtcacagcaggggctcagcccctggtcctgtggcagcgctgggggcccctgcgcacccagctcctcagccacagccrtggcctcacacagtgccctctgccgagcgagccacagcttctcccacctctccctgctctgggaggcaggtttccttcccctctgttgccaatatcttgtcatgcttaaagagcaaacaaaacatcaaaagcttacatacaatgttagtgaacagtactctcaagtacaggaacctctgtttattattgtaagaaaactgagctaatttctttaaagcaaggcagacaggcgtcgccaccctgctccggatgcccagtgtggttttgtgtgacctgctggggcttgttgtttggaaatcggagcgttgcattttagccacattgatgtctttgtaaaggtgatacatgtggtctgtctgtcagacaaataccccaacaagt

SEQ ID NO: 876934 - DNA, 639 bp, Homo sapiens
aatattataacacctgaaagaggttgcaaaataaaagtcattacttgaaattctctaacactatgggttggggaggggcgcacccagagactacagctgtgatactattttatatatatgttttcatccaaggtttctggctcgtaactcccatagcscttgtgacagtgttttgttgtaatgttggagcactttagatcccagaagcaggcctgagaaaatacaatctctctctgaccgtctcctgccctcctttcacctgctccctttttttcccaaggcaggccttaggaactaaaaatatactctaattgttccctacctttctgtcttgcactggccaaaaagaaattccctgacctaccttgtctgattgcaggtcataagaccccatttcagaagaggtcctgccccattcccaggaggaaggaatgctgcacagagaggccaaaaagaatctgaacagacaggccttgctgggtttagagcatactcttcttatccaatcacattttgacacagttgtctctgcttcaattatggacaatcaatgcagcctccaaaagaggcccaaaggacagggttcgagggcttccggggcgctgaacacatggaggctggcaggaaggcgaagaactc

SEQ ID NO: 876935 - DNA, 669 bp, Homo sapiens
catctataaactaatttatccaacaacagcagaatacacattcttcttaagctcacatggaacattcatcaagatagataacattatgggccgtaaaacacaacataacaaatttaaaagaagagaaatcagacaacatttgctctcagaccacaatgaaattgaactagaaataagtaacaaagtgataacaggaaaatcctaaaacccatggagattaaacaacatacttctaaacaaacataggtcagagaaaaaatcccccaaaaaattgtttaatattttgaagtaaatacaaataaaaacacagtttatcaaaatttgtggaatacagcaaaagctgtgattagagggaaatttatagcattgaaggtatacattagaaaggaaatctttctgatttaaattaacaaccyaagcttccaccttaagaaactagaaaaagtagagcaagttaaatccaaagtaagcaggaaaaaagaaataatgaaaatgagggcatattaaaaacaaaaaattaataaagaaaaataaatgaaaccaaaagctgattttttgaaaagataaataaaattgataaccctctagcaaattcaaattcaaaagaggatacaaattattaacattagaagtgaaagaggcaacattactacagacattatggatatt

SEQ ID NO: 876936 - DNA, 669 bp, Homo sapiens
catctataaactaatttatccaacaacagcagaatacacattcttcttaagctcacatggaacattcatcaagatagataacattatgggccgtaaaacacaacataacaaatttaaaagaagagaaatcagacaacatttgctctcagaccacaatgaaattgaactagaaataagtaacaaagtgataacaggaaaatcctaaaacccatggagattaaacaacatacttctaaacaaacataggtcagagaaaaaatcccccaaaaaattgtttaatattttgaagtaaatacaaataaaaacacagtttatcaaaatttgtggaatacagcaaaagctgtgattagagggaaatttatagcattgaaggtatacattagaaaggaaatctttctgatttaaattaacaacctaagcttccaccttaagaaactagaaaaagtagagcaagttaaatccaaagtaagcaggaaaraagaaataatgaaaatgagggcatattaaaaacaaaaaattaataaagaaaaataaatgaaaccaaaagctgattttttgaaaagataaataaaattgataaccctctagcaaattcaaattcaaaagaggatacaaattattaacattagaagtgaaagaggcaacattactacagacattatggatatt

SEQ ID NO: 876937 - DNA, 575 bp, Homo sapiens
aagcactcaaaagttacatgtgcccagtgactgtcatacagagccttggataaggaaaagattgaatggaaattcagtcatgtcagcaaggattctttaggttgcccatctcagaaatgcaatttaaattagcctgagcaattgcaggtatcaatatcactatcagtctttctttggctatgcaggctcttttttgattccatatgaattttaggattgtctttcttgttctgtgaaggatgatggcggtattttgttggaaaatgcatggaatttgtagattgcttttggcagtatggtcattttcacaatattgattctatccatctatgagcatgggatgtgtttccatttgttttaggatttctttcagcagtgttttgcagatttccttgcagaattctttcaccttytttgttatgtatattcctaagtatttttttttttttttttgcagatattgtaaaagagattgagttcttgatttgattctcaaaaacagcttggtcactgtttgcatatagcagagctactaatttgtgtacattaattttgtatcccaaaactttgctgaa

SEQ ID NO: 876938 - DNA, 577 bp, Homo sapiens
tctcataatgccagaggacatcatagtggtttacatcatactttggaatctacagagcagaatgtattgtgtaacttcagcaaatcttactaagagtgcaatggataaatctcacaaaaatacaaaacaagggttttacttcaggcaacttttttttttgagggaggaggatggaaattaggatatatttttagacgataggctccaaataacaaaatgctatcacctttgagtgataatttctccaatggatttaggctacattgaaagccattctgggacttgacccttacaacccagcaaatgcgaaatttctcaacaattctgtggtaggtggagttactcaatagagttgggaagcatcccctagggcaggagttcagcagcatcccttacggcaggggtccccaaaccwtgggccacagtactactctgtggcctgttaggaaccaggctgcactgcaggaggtgatcggtgggctagagaagctttatctgtatttacagccgctccccatcactcatattttcacctgagctccacctcctgtcagatcagcggctgcattagatttgt

SEQ ID NO: 876939 - DNA, 607 bp, Homo sapiens
acatgtgaattctaaatacaaaataggaaagagaagaaaggaaggacatatagggatttttttcttttaagagagagagtctctgttgcccagggtggagtgcagtgggtgctatccactagtggttctagtaatcttcttgtttcagcctcccaagtagctgagactacaggtgtgcaccaccacacccagctgacttttcttttgtacagatgtggtctgaccttgaaattttagcctcaagcaatcctcccaccttggtatcccaaaatcctaggattacaagcatgagccaccacacctggcctcagaaatagaactttgttatgagtgtgttacctggatgcaataaagtgctatagtcgtgtgtatgtgtgtgtgtgtgtgtgtgtgtccaggtcttattctgttgcccasgctgagggcagtgacacaatcacatgtaactgcagccttgacctcctaggctcaagcgatcctcttacctcagcctctcaagtagctaggactacaggcatgcaccactacacctggctaatttttgatttatagagacaaggtcatgctatgttgcctaggccagtctaaaactcctggacacaagcag

SEQ ID NO: 876940 - DNA, 625 bp, Homo sapiens
attggattatgagctccgagatggcagaaaccatgtctcatgcctctttaaatcccaatttaaatctttaaatcccaaggattttccttgtagtggtgatggatttattctttacccagtcttctttataaccagtagtacatagccaggttaggaataaagtttgtgaccataaaagaggatgaacaactaccctcgcacagctctcctcaggtcattaatggtatgtgctaatttcagtacaacccagataatacacaagtatgagggtcattatgaattcatctaataaattgaccacaggaaggtacctaagaggtttgccttacttattaaaaatacttctttatttacaacataagtagtatyaatctcagcaagcaaaaaccataagaggattcatgaagagaaagctgatgaaaaagaagttcaatcatgttcctaatgacatacacagcttcctaagaacacaccattgagtggtaagtccccttctagatcctaggattagggttcacattaagtgaaccaagtattgaccaaaattgaagattttccttgtacttcagtttcatctttaaattctcctcttcagcagaaagatacttgtagaaagaatttcaaa

SEQ ID NO: 876941 - DNA, 625 bp, Homo sapiens
attggattatgagctccgagatggcagaaaccatgtctcatgcctctttaaatcccaatttaaatctttaaatcccaaggattttccttgtagtggtgatggatttattctttacccagtcttctttataaccagtagtacatagccaggttaggaataaagtttgtgaccataaaagaggatgaacaactaccctcgcacagctctcctcaggtcattaatggtatgtgctaatttcagtacaacccagataatacacaagtatgagggtcattatgaattcatctaataaattgaccacaggaaggtacctaagaggtttgccttacttattaaaaatacttctttatttacaacataagtagtattaatctcagcaagcaaaaaccataagaggattcatgaagagaaagctgatgaaaaagaagttcaatcatgttcctaatgacatacacagcttcctaagaayacaccattgagtggtaagtccccttctagatcctaggattagggttcacattaagtgaaccaagtattgaccaaaattgaagattttccttgtacttcagtttcatctttaaattctcctcttcagcagaaagatacttgtagaaagaatttcaaa

SEQ ID NO: 876942 - DNA, 625 bp, Homo sapiens
attggattatgagctccgagatggcagaaaccatgtctcatgcctctttaaatcccaatttaaatctttaaatcccaaggattttccttgtagtggtgatggatttattctttacccagtcttctttataaccagtagtacatagccaggttaggaataaagtttgtgaccataaaagaggatgaacaactaccctcgcacagctctcctcaggtcattaatggtatgtgctaatttcagtacaacccagataatacacaagtatgagggtcattatgaattcatctaataaattgaccacaggaaggtacctaagaggtttgccttacttattaaaaatacttctttatttacaacataagtagtattaatctcagcaagcaaaaaccataagaggattcatgaagagaaagctgatgaaaaagaagttcaatcatgttcctaatgacatacacagcttcctaagaacacaccaytgagtggtaagtccccttctagatcctaggattagggttcacattaagtgaaccaagtattgaccaaaattgaagattttccttgtacttcagtttcatctttaaattctcctcttcagcagaaagatacttgtagaaagaatttcaaa

SEQ ID NO: 876943 - DNA, 607 bp, Homo sapiens
gccaatatcatactgaatgggcaaaagctggaagcattccctttgaaaaccggcacaagacaaggatgccatctctcaccactcctattcaacatagggttggaagttctggctagggcaatcaggcaagagaaagaaataaagggtattcaaataggaagagaggaagtcaaattgtttctgtttgcagatgacatgattgtatatttagaaaaccccatcatcccagcccaaaatctccttaagctgataaacaacttcagcaaaatctcaggatacaaaatcaatrtgcaaaaatcataagcattcctatacatcaataatagacaaacagagagccaaatcatgagtgaactcccactcacaattgctacaaagagaacaaaatacctaggaatccaacttacaagggatgcaaaggacctctttaaggagaactacaaaccactgctcaaggaaataaaagaggacacaaacaaatggaaaaacattccaagctcatagattggaagaatcaatatcgtgaaaacagacatattgcccaaagtaatttataggtttaatcctatctccattaagctaccattgactttcttcacagaattag

SEQ ID NO: 876944 - DNA, 622 bp, Homo sapiens
agttattaatttgaaggatctgagaggcatcaacatcatgctgtagttaggtgacgaaaaagttattttattttgtcaactaaagatctctaaattctgttagtaatgtggatttttgtctttatggatcaaaactacctgaaccagtaaatgaaaggtactttaaaaaatagagagagatgaccaggcctggtggctcacacctctaatcccagcactttgggaggctgaggtgggcagatcacaaggtcaggagttccagaccagcctggctaacatggtgaaacccagtctctactaaaaataaaaaaattacctgagcatggtggtgcgatcctgtaatcccatstactcgggaggctgaggcaggagtattgcttgaactgggacctgggaggcggaggttgcagtgagccaagattgcaccactgcattccagcctgggctacagagcgagactccatctcaaaaaaaaaaaaaaaaaaaaaatagagaatacatacagtgatgctgagtgatttgcaactgattttggacaacttaatgctatatgtcttctgagcagaacagtttaacactcagtcaaacgctcctagagtgtttggagtacttttgtattaag

SEQ ID NO: 876945 - DNA, 572 bp, Homo sapiens
ttgcttgaactgggacctgggaggcggaggttgcagtgagccaagattgcaccactgcattccagcctgggctacagagcgagactccatctcaaaaaaaaaaaaaaaaaaaaaatagagaatacatacagtgatgctgagtgatttgcaactgattttggacaacttaatgctatatgtcttctgagcagaacagtttaacactcagtcaaacgctcctagagtgtttggagtacttttgtattaagggaataaaagattcagcaaaacgctactgagtaatacaggagtatggtttgggggcaagtaaaaggcccgtctgcagtgtggagaggagctttgcagagggtgggaccatcctgcaaaagaagggcttgtgttgtgggacatcaccctcatggtttctcctgtgtgccccaraaacttgaaagaaatccctttaattgttttttcagctaggaaaaccaccagaaactttgagatgtacatcaagctttcactgattccctaagatttttgtttcctctgttctctcatgtacattattttttccagtcctatacacagattgt

SEQ ID NO: 876946 - DNA, 596 bp, Homo sapiens
tgtttctaacagtgtacagtcatgcattcacaaagagacaatctgaaattggaacttacttatgtttaaaaggaaagcagagaataaaagttcgaaacacttgcagcctgaccaggtggtgaaaaaggaaaacccattttatcgggagaaattcaagcctgctgcaaaaatttgcataakcaaagaggagccaaatgaaaatcaccaagacagtggggaaaatgtctccaagttgtgtcagaaagcttcatgacagcccctcccatcacaggcctggaggccaagaatggaaaaatggttttgtaggacaggcccagggccctactgctctgtgtagcctcaagacttggcacgctgtgtcccagctgctccagctctagccatggctaaaatgggataagatatggttagggatgttgcttcagagggtgcaagccccaagctttggtggcttctttgcagtattaggcctgcaggtgcacagaaggcaagagttgagatttgggaatctccacctacatttcagaggatgtatggaaacatctggatgtccagggtaaagtctgttgcaggatggagccctcatagagagcctc

SEQ ID NO: 876947 - DNA, 703 bp, Homo sapiens
tgttttttttaatttaatgtttttaggcagggcctcaaaactggctcaagagaatattttaaaaattattttattgaggtatgcttaacatataaaaagctgtagaaatttaatgggacccatatcaatgagtgtggagataagtatatgcctgtaaacctatcactaccgtaaaggccataagcatatccatcatctccaaaatttccttccrccccattaatatggcattaaaatatctatactattttagagattcaaacaagacttggaaggacaagtgaaaaaggaattttaagacctattctaataggctacagcatatacacacaaagaattatgacttcaacaaatgttattgctcctttgggggaagaagaatatttggcagagaattatatctaaatagttcaggtagaaagaaaaattgattggtaaaaattagtagataggattgacacttggaattcatggtttaatgaatgactcaagtacctgaaacccactttaagaatctgctaaattggctaagtaaatcttggtttcaggggtggcctctggttaatgagattgaggttccaacatctccctctataatgtaatgtaattgatccaaagtctcagggagataggaacgttggaattaatctgttatgcacaaccggcccattcattctttattcacatgccctgagagagggag

SEQ ID NO: 876948 - DNA, 626 bp, Homo sapiens
tacattaatacaccactatattaagaaaaatagaaaagttctcaaatcaatgatcattgtaacaaacttaaggaaatagaaaatgtaacaaatttaatcctaagtagaaggagaaagaaaataataaatatcaaagcacagatgtatacaactaaaaatatttgataatttgaatttcatcaaaattaatacctgcttattgaaagacagttttaaraggatgaaattacaggtatattcttagaaaaaatatttgcaaattaaatatctaataaaacatcaagaatgcaaaaacatctaaaactaaaattaaaagaaaatgaaattaaacatgggcacaatatttgaactgatagcttagcaaacatgataatgaaatggtacataagacagacaaagatgcttcactgcattagtctttaaggaaatgcaaatttaatacgcaatgtgatatcactacatatatttggaaagtgtaaaaattaaaagtctggttatactagtgttgataaggatgaagaacaattggaagtctcatatcctactgatgagatgcaaatggaaaaacagttcagcagtaaacctacacctatgatatatctacatgtctcactcctaggtattca

SEQ ID NO: 876949 - DNA, 652 bp, Homo sapiens
agactcattaggtctccataaaggcttgcagcaggagttgaggagatagctttgctacaatctggtgtcttcttttctacttatgggaagctatgggttctgtgggtgttatgtgatcttcttgtttatgtttatattacatgcagcatttaattacatgcagattgtggaggccccagaaggggaaactccctatgatgtactctctttactctatcccgayaccaacctatgcattttctaaaccttaatgccagtcaaaagcaaagagtgtcataggcgtcacaaaggaacagtacacatgaatacccagattaattctagcacctattagtaaagcctaaagtctccattctcctgtacatgtggagacattttgatgtggatacatacctcctactcattagtacaaaatcctttgcacagagaacttcagaaacatacagactgaaaaaagagtccatttgcaaattttctacagaacccaaataaagtgggtttcatcctccttatacgacttaaggtttagtgccaactggtttgtagcaatggtccctcaagggataacacacagtcctgtctgtgctgtccttggaaccacagctacaattgcattccaccttctcatctacatggatctggggctccatga

SEQ ID NO: 876950 - DNA, 577 bp, Homo sapiens
tccatgcatccatccatccatttgtattatgaaaatggtgacctttttgttcaaagaataaaaaaacaattacctgccacctaaagtttcttccagaaagaaatcaaaactctttttaaattctctttgatgatcttcaggtgcaagccaactgataacttgatwtgatttttcttcctttttaaaatctaagaaaacagcaacgggttaaaaaaaaagttaaatatgctacacaaaagagtaacattagcataacaatatcaaaacttatttcaaagattatgtatgtatttgaatgattgcttcaagtattttttaatgtatgcgtttatttatttttgagacagagtcttgctctgtcatttaggctggagtgcaatagcacaatcctagctcattgcagtctcagctcccttaaaaaccactgggattacaggtgtgagacattggtatagtttgtgtttaaatacagtacacatttgtttgattccagagcctctgttctttctgttttacaaaaacaatcatttttattatttaaagtgatacatgcaaataatttttaaattcagtcaaa

SEQ ID NO: 876951 - DNA, 697 bp, Homo sapiens
ataacagacagagagccaaatcatgagtgaactcccattcactactgctacaaagagagtaaaacacctagcaatccagccaacaagaaatgtgaaggacctcttcaaggagaactacaaaccattcattgctcagtgaaataaaggaggacacaaacaattggaggaacattccatgcccacagataggaagaatcaataacgtgaaaatggccatactgcccaaggtaatttatagattcaatgccatctccatcaagctaccaattactttctttacagaattggagaaaactwttttaaagttcatatggaaccaaaaaagagcccacactgccaagacaatcctaagccaaaagaacaaagctggaggcatcgcgctacctgatttcaaactatagtacaaggctacagtaaccaaaacagcatggtactagtaccaaaacagatatatagaccaatggaacagaatagagccctcagaattaacaccacacatctacaaccatctgctctttgacaaacctgacaaaaacaagcaatggggaaaggattccctattgaataaatgttgctgggaaaactggctagccatatgtagcaagctgaaactgcatcccttccttacaccttatacaaaaattaaatcaagatgggttaaagacttaaacgatagacctaaaaccataaaaaccct

SEQ ID NO: 876952 - DNA, 697 bp, Homo sapiens
ataacagacagagagccaaatcatgagtgaactcccattcactactgctacaaagagagtaaaacacctagcaatccagccaacaagaaatgtgaaggacctcttcaaggagaactacaaaccattcattgctcagtgaaataaaggaggacacaaacaattggaggaacattccatgcccacagataggaagaatcaataacgtgaaaatggccatactgcccaaggtaatttatagattcaatgccatctccatcaagctaccaattactttctttacagaattggagaaaactaytttaaagttcatatggaaccaaaaaagagcccacactgccaagacaatcctaagccaaaagaacaaagctggaggcatcgcgctacctgatttcaaactatagtacaaggctacagtaaccaaaacagcatggtactagtaccaaaacagatatatagaccaatggaacagaatagagccctcagaattaacaccacacatctacaaccatctgctctttgacaaacctgacaaaaacaagcaatggggaaaggattccctattgaataaatgttgctgggaaaactggctagccatatgtagcaagctgaaactgcatcccttccttacaccttatacaaaaattaaatcaagatgggttaaagacttaaacgatagacctaaaaccataaaaaccct

SEQ ID NO: 876953 - DNA, 641 bp, Homo sapiens
atctaccatcccccctctttacaaatgaagaaattgaaatccaaaaggctaagatcgcaatgaagaagaggcagatcagaatttcaaaccaaagtctctcggctccctaacctaaaatgggtgccttacaccaggctgcttcaatgacagtagatttgaggaccaaagatggctcatgggagtaaaagaagcaaaatggaatccagaaagctaaaacaaaatatacacaaagtcgtggaatcttctcatttatactttacaagaaartggcatacttatttcccccaatttgagacacaaacaaaagcgttggggactccacatctagtttctgagaataagaaaaatttctaccaaggctacaaaaagaccaaaggttaaacaggtatgtacacataaatgaacttacatctacatgaagccagaggctgtgcctctcgcagatgtctgctatttcatccagagggtcaaaagctcccaacacagttgtaccagaagtggcacagacaagaaacggtgctgccccctgtaagaaggatccacacacacaaaattatcactgtcatcactaaatttgtcctgtaatagctggaaaatataaagggttatgcatccagagagttatttgggttttttggagg

SEQ ID NO: 876954 - DNA, 582 bp, Homo sapiens
caaacattttccttctaattttatctattgacattttatacctccttctcagggatctttggctcagagtattgacacacaattgtaaattgcctaggttttaaatgtgagggcttggagataagcttgcaatgcttttcctttcctttcatcttcattctagaggaggcttggaatatagaccctcccccgcaccccccccacttttatttttggagaaggagtagcagaaaaaagagtgggatagtcattcaacacatagttattgaggatgtgytgagccacatagtacaacgtaaaggaaaaaaaaaggagactaatgtcatttcccagtgtggtcaccaggaaaagacagaatttttgctggaaaatatacctgagaagcaggttacttagccccattttcgtttctgttctgaatgattgatattacaaatgacaattattacatgccagttaaaaagtgtgcaagtaaagagaaaaaggaaagaaagtacatttttcttttaaatcagagaaactagaacaaactgaatctgcttttgtggggatttcttttctagctcttgcttttcttcatag

SEQ ID NO: 876955 - DNA, 613 bp, Homo sapiens
ccacattttgatattttcagacaaatgggatatgtctgaatcccattttagccagtttggttggcatgtaactttatcccattatagctttaatttgcattttcttaataactaatgaaattgagtgccttatacatttattggccatcctaggtatcctgggttctgaagtatctaagtttttagttcatttttcactgttctcccaagcatastctttcaattcctgttttacactttcacctgttgtggggttttgttttgtttgttttttgtttgtttttttggggtttttttttctttgtttgctgtgtcacccaggctagagtgcagtggcatgatcttggctcactgcaaccacatcccaggctcaagcaatcctcccacctcagcctcccaagtagccaggatcacaggcgtgtaccaccatggccagctaattttttgtatttttagtagaggtggggtttccccatgttgtccaggctggtcttgaactcctgagttcacaggttctgcctgcctcagcatcccaaagtgctgggattgcaggcatgagccactgcacctggccacacttttgcctttttcttttcccctatgtaaacaaaag

SEQ ID NO: 876956 - DNA, 613 bp, Homo sapiens
ccacattttgatattttcagacaaatgggatatgtctgaatcccattttagccagtttggttggcatgtaactttatcccattatagctttaatttgcattttcttaataactaatgaaattgagtgccttatacatttattggccatcctaggtatcctgggttctgaagtatctaagtttttagttcatttttcactgttctcccaagcatagtctttcaattcctgttttacactttcacctrttgtggggttttgttttgtttgttttttgtttgtttttttggggtttttttttctttgtttgctgtgtcacccaggctagagtgcagtggcatgatcttggctcactgcaaccacatcccaggctcaagcaatcctcccacctcagcctcccaagtagccaggatcacaggcgtgtaccaccatggccagctaattttttgtatttttagtagaggtggggtttccccatgttgtccaggctggtcttgaactcctgagttcacaggttctgcctgcctcagcatcccaaagtgctgggattgcaggcatgagccactgcacctggccacacttttgcctttttcttttcccctatgtaaacaaaag

SEQ ID NO: 876957 - DNA, 613 bp, Homo sapiens
ccacattttgatattttcagacaaatgggatatgtctgaatcccattttagccagtttggttggcatgtaactttatcccattatagctttaatttgcattttcttaataactaatgaaattgagtgccttatacatttattggccatcctaggtatcctgggttctgaagtatctaagtttttagttcatttttcactgttctcccaagcatagtctttcaattcctgttttacactttcacctgttgtggggttttgttttgtttgttttttgtttgtttttttggggtttttttttctttgtttgctgtgtcacccaggctagagtgcagtggcatgatcttggctcactgcaaccacatcccaggctcaagcaatcctcccacctcagcctcccaagtagccaggatcacaggcgtgtaccaccatggccagctaattttttgtatttttagtagaggtggggtttccycatgttgtccaggctggtcttgaactcctgagttcacaggttctgcctgcctcagcatcccaaagtgctgggattgcaggcatgagccactgcacctggccacacttttgcctttttcttttcccctatgtaaacaaaag

SEQ ID NO: 876958 - DNA, 693 bp, Homo sapiens
ttcataaatatactcaactatttatagatcaaatggtattatgtctggggtttgcttcaaacctatctagtggtggtatgagggtatgtggtacagatgaaataggagcatgagcctaatgactgctgattacagaatgggtatatgaagcctcatgatattagtctcttggtttttgtgtgttttggttttttaggaaacatttacaattttttgtaatgagaagtttaaaatttaagaagtggggaatagggaatggagaaagggaggaaggaaggagaaatgagggagggaagaaagacaatcatgacacaattaatattccccaccaacaagcattaacaacataatgcaaattatttttgataggaatttatgtaaaaagaaatgaaactaaaactagaaaacaatatctgtggttytcagcagaacgaacttacaagttgttactcagaattataccagagtcaaagaaatctgatcatgcaaaccaccagataacaataaagttcacttgtcattggaatgtttaaaaaaaaaaaaaaaaaaaaaagtaggacacacacctgaagtcaatacatctgcaataatggcagaaattttaaatacagaagttcaagccaaatattgtgatctagcattctccaggactaggtagtttttatgaaaacttgaaaaaaaaaagtacaacaa

SEQ ID NO: 876959 - DNA, 693 bp, Homo sapiens
ttcataaatatactcaactatttatagatcaaatggtattatgtctggggtttgcttcaaacctatctagtggtggtatgagggtatgtggtacagatgaaataggagcatgagcctaatgactgctgattacagaatgggtatatgaagcctcatgatattagtctcttggtttttgtgtgttttggttttttaggaaacatttacaattttttgtaatgagaagtttaaaatttaagaagtggggaatagggaatggagaaagggaggaaggaaggagaaatgagggagggaagaaagacaatcatgacacaattaatattccccaccaacaagcattaacaacataatgcaaattatttttgataggaatttatgtaaaaagaaatgaaactaaaactagaaaacaatatctgtggttctcagcagaacgaacttacaagttgttactcagaattataccagagtcaaagaaatytgatcatgcaaaccaccagataacaataaagttcacttgtcattggaatgtttaaaaaaaaaaaaaaaaaaaaaagtaggacacacacctgaagtcaatacatctgcaataatggcagaaattttaaatacagaagttcaagccaaatattgtgatctagcattctccaggactaggtagtttttatgaaaacttgaaaaaaaaaagtacaacaa

SEQ ID NO: 876960 - DNA, 578 bp, Homo sapiens
cactgaatacatattccattatgtggatgtgccatggtttgcttatccacctatcttgggttgcttccgattttggtcaattacgaataaagttgctataaatattcgattgcaggttttcatgttgacataagttttcactcacttgagcatatacctagaagcacaattgctagatagtatgtaaggctgtttatctttgtaagaaacttccaaattttcttccaaagtggttgtagtactggcaacaaatcagagtttctgttgctctacatccttatcagcatttgatactgtaaatgtcttggattttagccattctaataggtgtgtasaaacttattttcactccctcttcgaatggctctcagagctccactgtgatctttccattgctgactggcctcaaggcccttgtaaaactaggaacatcttaatgaaagtatccacctttgttcctctgtctccagtaatcacaaggcttggcatgtagagggttccaaaattgaatgtgatcttctgactacaattgttttttcttaactgtccttggaatcagtctctttccagccacctta

SEQ ID NO: 876961 - DNA, 650 bp, Homo sapiens
tttcttttgacttatttttatccatgtgtgggttatattcggtgagttttgcattattctcttttgttgaaaactatattttaaggagtacaatgtggcagctctgacagccagctaaccaccaggatttgttgtgctttgtattactggtgctgttgctgtttgtttctttagtgactttcctagactaattctatgacgatgatattatttgttatatgtggctactaaaatctctgcttagttatcttagtagttaggtaattattaaaaacagattttattcgatattttgaaacaataattctcccagccattaccaaggggctctgtgtatgcattggggcatgtcttcagyggtccagagggaagtttacaagtcttccttatctttcacttcctgcttacacagagcctcaaaatcagttagtggtaggtgaatagagttttcttattcttccttggatatgtgcatagtcctgcacatgtatatggccttctatattttcaggaatatgttggaacttttcaaagccctctatgggcatcttattccttagtttttcatatatctatatctatatctaatctatatataatttctgttgttgcctccaactgatatcactgtcttgggaacctgcaatgac

SEQ ID NO: 876962 - DNA, 509 bp, Homo sapiens
accaggtgcgctttgttcaatctcagacttcaccctttgtagccatttactatatcaataaatgaataataaatatgtcaataactaaataaatgagtgtttgccagtaagttacctaagctgtctgactcccatctatgaagttgatacaagaatttctttcttaccaggttgttctattaactgatagagcaaatacttctacccagcataaattcaccacaaaaatttgcttcctctgccccacccttyaccctatccacgccagcagcctggtagagcagaaaaagctttacagtttgatgtaactgaatttagttttttactttctagttatttcctgtgtaaccctagtcaagttgcttaacatctttgagcctgttctctcatctataaaactgatataataatatctaccctcataggattgtggctaggattaaataaagtaacatgtataaagcacccagcatgtgcacattccatagatgtgacttctcagtctctga

SEQ ID NO: 876963 - DNA, 613 bp, Homo sapiens; identical to SEQ ID NO: 876443

SEQ ID NO: 876964 - DNA, 628 bp, Homo sapiens; identical to SEQ ID NO: 876444

SEQ ID NO: 876965 - DNA, 673 bp, Homo sapiens
tgctcatttttgctttgaaattgcagttcttctccttatcacattgtgaagtgttgaaaagcatgcatttgcttaccgaaaaatgaaaacatatcagatatgcttaattatttgtaaatgtaggcatctgaggagacaaggcgatttgaggccacactgtcagccaaatgctagtgatgtccgtgggtccagtgtccacatcccacagccgggaagcagtcctgctcygtgcccatagcaggggtcccaggagctatgagatccgctactttaaacagtttttttgagataatatgagggactcttttctgggagaggtccaaaactacattttaaaaagatggtacacaggatgaagtattttctgtactcttgggaaggtatttttaataacctcagatgggttttataagtttcctgagccacatcctaacagagagatgagcttagtgacacagggaaagtacaaggccagggacagcgttgagagaacattctgaatctctcagtggagctctcatcgctttgaggtggaaccagtccaggcgaggacctgcccactttcacggggccaggtcatcagtctggcttccatcagggtgggccgcctgatttgctttgcttttctctgatggagagaaggaacaggctctctgagaccctacagagccca

SEQ ID NO: 876966 - DNA, 579 bp, Homo sapiens
gtatgagtcaactatgttttcttagaaaaaggaggaggaaaaggaggatgagaacgtagtacgagttataggcaaatattgctacttcttttttttttttttttttttttttgagacagagtctcgctctgtcgcccaggctggagtgcagtggcgcgatctcggctcactgcaagctccgcctcccgggttcacgccattctcctgcctcagcctcccgagtagctgggactacaggcgcccgccaccacgcccagctaattttttttttggtatttttagtaaagacggggtttcaccgtgttagctaggatggkctcaatctcctgaccttgtgatctgcctgcctcagcctcccaaagtgctgggattacaggcgtgagccaccgcgcctggccaatattgctacttctaaaataattgcaaagctaaacatatgggatgcaaggtcagatggtacaaatgccaagtggtactccattctacattcagcaaaaatgtattgtgtacctatatgtgaaagacatcatgtagggtagacatctatgatcaattccttttggcatctgggctatagac

SEQ ID NO: 876967 - DNA, 627 bp, Homo sapiens
tgctttcagaattgcctcattttatggtcagaataactctgagctaatattcacacgctttttttctctctctgatctcctacatatgatccaatagttaatcatcagttataatcacctggtgcaataataataaagactgttcttgtttttcctcagcctcatcccaacagcytcagttaaatcaggaagcatgaattatggttgaggtagttattctgcttcctggaaaatccaatgtagcatgcatgtttgaaacatagatatcctccagtatgaaaaatatcgaattcagatttaaaggtatccaaccttcctagattaaggtctatctaagctaagtgctctcactgtactttttgcatggtatttattatgttattttgtaactgttaatttattttcctgccataacaatttgtgtgtgatttcttaaaagcagaaaatatgtcttttaaatctggattgtgcctagcaaaattcatggcacttttttgataatcagtaactttttgtctatgcatgattggtactctctcctctttactccatataaaacaaagaattttttattatcccaggaatcttcattggcatgccaattgattcaaggatattgaggcttcc

SEQ ID NO: 876968 - DNA, 562 bp, Homo sapiens
aatcacttatcactttaccccagtaggtttttgattagataattttctttatcatggattttcctttctttctattgtatctttcattctagacaaaactcaggccctcatgtctacaaactcttcatattcctatgtgtacaaggtgcctccacacatttctcatctcctctgtaaatcactataagctattttcttgtccttattttcttgctaaaattcctgtcttatgagctacagctaagtgtgtgaaawtaagaaaaaaatggtggatatatggatgatgaaatggagaatcatagacaataaaggtgtctgaatatttattatgacaaatgtattaaccaaatatgcattcagaaactaactcccatgatttctagttgggcgaagtaagctaaaccacagtttccttttctaaaagaataaattaatactagctactttgctgcttttttgtcagttaattaaaacaatgcatgtaaagatcttatcacagtgcctaccaaataataagcattatttcaatgtagttgatcacatatataaaacatacacgtgt

SEQ ID NO: 876969 - DNA, 617 bp, Homo sapiens
ttgatcattcatgtagaaaccacatcagtgcctttgcttttgtgcatttcttctagtctcagatgcagtcagtattcacaaatttaatctctgttcttcacatttactattatcaagacaagccccagcccttatggtctcatacttagtctactaatatacattttaatcatttttcctacatgtgagctcttgactttacttgtcaatctgtgtttggcaacaagagttgattgcttaaaacaaaacawacaaacaaacaaacacttgacattttgactggctttcttaaatacttggttatttttcctgtaaattaaaataaaaccccatatgtactgtacaaagctatgtaaggtctccaatttcaaccaatttttaaaaataatctctggcacacaatttaatctaaaattcatacttactggaatgctttctaaataccatgaccttttctcattctactcactgtgaattctttccgttagccacactctgcctagatcctgccaaagcttttgtcttaccctgtatgttatctgtcacaccagctttttctgattgctccatagagggataattatgttctctggttttctgatgaccctgcaccagaa

SEQ ID NO: 876970 - DNA, 526 bp, Homo sapiens
agcaccattaaaaagagtctcatttatttccccaagcagataattgtccatagtgaatttcctgaaaaagagttgtacctggacatgagaaagaagaaaactcaaatcatgccaaaatgaaaaattgaatcgtgcctgagtaggctaaaatggccttytcagacctcaatacagcacttggcctacttttttcttaagattttgttcctggctcccagtttgtcatttctgtaatggatttttaaatgactcttttcttcaggaaggtagcatttatcatggtgtggtagaaagagccctgggatggaacttgggagaactgggttatggccttgctggttctatattgctatgagctgtgtgatttggagaaaattatttacctgtctgaagtttggaagacaaccagaacttcttcattctgtttttcttttgcttgtttgctttagcagtagcttttaagctggagactgaagcatctaaaataacattcagcgaaagttcaatgtgtaaaagagatgaaagt

SEQ ID NO: 876971 - DNA, 628 bp, Homo sapiens
tcatgtcctcacatttcaaaaccaatcatgccttcccaacagtcccccaaagttttaactcatttcaacattaacccaaaagtccacagtccaaagtcttgtctgagacaagacaagccccttccacctatgagcctggaaaatcaaaagcaagctagttatttcctagatacaatgggggtacaggtattgggtaaatacagctgttccaaatgggagaaattggccaaaactaaggggttacagggcccatgtaaatccgaaatctagcatggcagtcaaattctaaagctccagaatgacctcctttgactccatgtctcacatccaggtcatgctgatgcaagaggtaggttcctatagccttgaacagctccaaccctgtggctttgcagggtatagccccactcctgactgcttttacaggctgatgttgagtgtctgtggcttttcyaggcacatggtgcaagctgtcaggggatctaccattctggggtctggagaatggttgcccgcttctcacagctccattaggcagtgtcccagtagagactctgtgtggggctctgacccacatttccctttcacactgccctagcagaggttctctgtgagggccccactctgc

SEQ ID NO: 876972 - DNA, 646 bp, Homo sapiens
attcagccttgggaggttgtgtgtttccaggaatttatccacttcccctaaattttctagtttgtgtgcagaaaggtggtcataatagtctctgagtatcttttgtatttctgtgagatcagtcataatgacacctttgtcgtttctgaktgtgcgtatttggatcttctctcttttttatttgattatctagctagtggtctattgatcttgtttatcctttcaaaaaaccagcttttagttttgttgatcctttgtatagattttggggtctcaactgtactcagttctgctctgattttagttatttcttttcttctactagatttggggttagttcttattattccagttcctctaggttcaatattacactgttaatttgagatctttctaactccttgatgcaggcctttatagctataaattttccttctaacactgcttttgctgcatctcagagatgttggtatgttatgcttctgtttccatttatttcaaagcattttttgatttctgccttaatttcattgtttacccaaaagtcattcatgagtaagtcatttaatttccatgtaactctgtggttttgagagatcttctggtattgattagtattactattccactatgatttgaaagtatg

SEQ ID NO: 876973 - DNA, 582 bp, Homo sapiens
ttgctctatcttgtaaaatgtcttgtaaaatgtttttactctgtgtgtctgtgtgtgtgtgtgtgtttcagtttgggtaattctcattgacctcccttaacattcagttattttctgagtggtgtcaaatgtttcaatgagctctctaaaggcatttttaaaatctctgttatttctgtttaaaaagtatttctaacatttacagttgaccctttcttacaccctttctttcacctctgctgaaatttctcatggttcatgaatatttttcaccttttctaccagagcctttaacatatcaatcatagtcattttaaaatctctgtcttataagtcacttctgagtctagttctcttgattgatttatctcttgayagaggagtgttttcacttgcttttttgatgtgtcttgtaattttcgattgagtgctgggcatggtatacagaacagtagaggctgaagtaaaaatttatgcctgaaaatggcaagccttttcttttgcttggctgctagtatggagggggggagttgagtcaatctggtcaggaatgaaacgaattgggttttgttgttgttatat

SEQ ID NO: 876974 - DNA, 674 bp, Homo sapiens
tcaggtttaacaaatagagagtttcatggatacagacttatccaatgatcattcctctgactcctggatgaataaatgaaatggaaatactgaggatctgataaaaccctaacattgatctgtgacttgtggacaagaacaattacagtargaaaagatatttttatcacactacaatacccactacagagcatccattgcagaagagggactaaacaattagatgaacaggatgattcatcaaacagatgttaattggcatttgtccttgattaccccagcacttgcacaatagattcataaacagattatccatgatgtcaaggatggaagctatccatgacttagctattgacactaaaaacattctcttcaatatatcagcaaaagagaccaatgccgagtccctgatattattatgatcactcaaggagacaaaaactctagtttgtggcaagttgattacatgggacccctttcatcctaaaaaggaaagcactttttcaggattaaaaaagaaaagggggttgtctcttccagccagagtgccttggcatgcactgtatctgaaggctcacagaatgtcttatttacaggcacagtatcctgaataatatcacgttgggccacagtacctacctaatagcaaaaaatgtgcagcagtaggcacatga

SEQ ID NO: 876975 - DNA, 620 bp, Homo sapiens
tcttcccaatccaaagcctcctttgcgtcctcctcttgtattctcccaccttaacccacaagaataagatacctctactccctccttggcgaccgatcatgcaccccttactatctcattaaaacctaatcacccttaccmccctcaacaccaatatcccatcccacagcatgctttaaaaggattaaagcctgttatcactcacctgctacagcatggccttttaaagcctataaactctccttacaattcccccattatacctgtcctaaaaccagacaagccttccaagttagttcaggatctatgccttatcaaccaaattgttttgcctatccaccccatggtgccaaacccatatactctcctatcctcaatacctccctccacaatccattattctgtgctggatctcaaacctgctttctttactattcctttgcacccatcatcccagcctctcttcgctttcacttggactgaccctgacacccatcaggctcaggaaattacctgggctgtactgccgcaaagtttcacagacagcccccattacttcagtcaagcccaaatttattccttatctgttacctatctcagcataattctcataaaaacac

SEQ ID NO: 876976 - DNA, 620 bp, Homo sapiens
tcttcccaatccaaagcctcctttgcgtcctcctcttgtattctcccaccttaacccacaagaataagatacctctactccctccttggcgaccgatcatgcaccccttactatctcattaaaacctaatcacccttaccaccctcaacaccaatatcccatcccacascatgctttaaaaggattaaagcctgttatcactcacctgctacagcatggccttttaaagcctataaactctccttacaattcccccattatacctgtcctaaaaccagacaagccttccaagttagttcaggatctatgccttatcaaccaaattgttttgcctatccaccccatggtgccaaacccatatactctcctatcctcaatacctccctccacaatccattattctgtgctggatctcaaacctgctttctttactattcctttgcacccatcatcccagcctctcttcgctttcacttggactgaccctgacacccatcaggctcaggaaattacctgggctgtactgccgcaaagtttcacagacagcccccattacttcagtcaagcccaaatttattccttatctgttacctatctcagcataattctcataaaaacac

SEQ ID NO: 876977 - DNA, 620 bp, Homo sapiens
tcttcccaatccaaagcctcctttgcgtcctcctcttgtattctcccaccttaacccacaagaataagatacctctactccctccttggcgaccgatcatgcaccccttactatctcattaaaacctaatcacccttaccaccctcaacaccaatatcccatcccacagcatgctttraaaggattaaagcctgttatcactcacctgctacagcatggccttttaaagcctataaactctccttacaattcccccattatacctgtcctaaaaccagacaagccttccaagttagttcaggatctatgccttatcaaccaaattgttttgcctatccaccccatggtgccaaacccatatactctcctatcctcaatacctccctccacaatccattattctgtgctggatctcaaacctgctttctttactattcctttgcacccatcatcccagcctctcttcgctttcacttggactgaccctgacacccatcaggctcaggaaattacctgggctgtactgccgcaaagtttcacagacagcccccattacttcagtcaagcccaaatttattccttatctgttacctatctcagcataattctcataaaaacac

SEQ ID NO: 876978 - DNA, 618 bp, Homo sapiens
attttgcagtggtccattttatgtaaaaacatcataattaaatatctcttgcaatgtacatagaagagtttttcttgccaatacattgcagaaaactagaatggagataattagaggaggagctatttagtaagaaacaacaaccaaaaaaaaaaaaaaaaataggatcttaatccatgaaatcagtcttaaaatcaagtataaatctcaccctagaaaaatctaatttttatctgctttttaaaatatctccatggctgcaattgttggtagtttttataatccttggactcctaaccagcaagaatattcttaggagttgaggaaaggataggatacatcaaaacaaagrtggtcagatgctattagtggtcattctaattccggctgacctatcttgaaggacaatttggcatttcttattccaaaggctacttcatgttaattttcatggaaccaacccattctgatctcttgaacctttcttaatcagccatcccctctatttcttctactcagaacctcttctttttccctggaattgacttaaaatccctacttgaatcgttctcatgaaaccccattttacactgcattttctcccactggctgtataaa

SEQ ID NO: 876979 - DNA, 374 bp, Homo sapiens
aagaagtttctgagaatgcttctgtctagatttgatctgaagacaatcccgtttccaacgaaatcctcaaggctaggcaaatatcctcttgcagattccagaaaaagagtgtttcaaaactgctccttcaaaacggtggttyaattctcttagttgagtacacacatctcaaataagtttctgagaatgcttctgcctagttgttacgggaagatatttccctttccaacataggcctgaaagcgctccaaatgtccacttccagatactacaaaaagagtgtttcaaacctgctctaccaaagggaatgttctgctctgtgacttgaatgcaaacatcccaaagaagtttctgagaatgcttctgtctagatt

SEQ ID NO: 876980 - DNA, 374 bp, Homo sapiens; identical to SEQ ID NO: 876979

SEQ ID NO: 876981 - DNA, 500 bp, Homo sapiens
cattcacaattactacaaagagaataaaatacctaggaatccaacttacaagggatatgaaggacctcttcatggagaactacaaaccactgctcaatgaaataaaagaggacacaagcaaatggaagaacattccatgctcatggataggaataatcaatatcatgaaaatggctatactgcacaaagtaatttatagattcaatgytatcgccatcaagctaccactgactttcttcacaaaattggaaaaataactactttaaagttcatatggaaccacaaaagagcccacatagccaagacaatcctaagcataaagaacaaacctggaggcatcatgctacctgacttcaaactatactacaagggtacagtaaccaaaatagcatgctactggtaccaaaacagatatatagaccaatggaacagaacagcggcctcagaaataacaccacacatctacaaccatctgatctttgacaaacctgagaaaaaca

SEQ ID NO: 876982 - DNA, 664 bp, Homo sapiens
tgttgatcttcatcatagattaacttccttcttacttcttttacacaaaggcctcatgactaccacatcatctaagatggtatgttaaatatattctttttaattggaaaaggaaaataaaacaagcttgtagccaatcaaattgctataacacataagtctcatataggaaacataatcttattaattttctttgatttctaactctmttcctttggagtctgtgttacctgaatgaccattctcagcttttaaactgggttctgatcctttttattatttcagattgacaagtctctcagccagcctcaagatggcttaatatctcagaagtagccctaggaccaagtttgttctaatttcaaaaccaaccatgcattctactagtcaagttttcctttttttgttaaaaataattgggtaaaataagaccatgttcaataataagacaagttaaacaacaattgaacaataataaatgtttttcttaaaatgacagctctttgagttgggtgtaaaaacaggtcatttctctataaattatgattatcactgccaaagccatgctctgcttcagggatagtctccaacaaacaggaactgtgatgattgtagaaaatcacaaggagaaaaattgagttattgtactaaagtacagaaatta

SEQ ID NO: 876983 - DNA, 560 bp, Homo sapiens
cttattctaaaagtgaccacataattggaggtaaaacactcctcagcaaatgcaaaaggacggaaatcataacagtctctcagaccacagtgcaaacaaattagaactcagaattaagaaacttactcaaaacctcacaactacatggaaactgaacaacctgctcctgaatgactactgggtaaataatgaaattaaggcagatatacataatttgaaaccaatgagaacaaagatacaacataccagaatctctgggacacagctaaagcagtgtttatagggaaatttatagcaataaatgcccacaggagaaagcaggaaagatctaaaackgacaccctaacatcacaattaaaagaactagagaagcaagagcaaacaaatccaaaagctagcagaagacaagaaataactaagatcagagcagaactgaaggagatagaaacacgaaaaacccttcaaaaacttaatgaatctaggagctggttttatgaaaagattaacaaaatagactgctagtgagactaataaagaagaaaaagaagaatcaaatagac

SEQ ID NO: 876984 - DNA, 622 bp, Homo sapiens
gttcaaattcatttccatttctcattttcaaggtggcattgggcaagttgcttaagttctatgactcatctgaaaaagggaggcaaaaagaatgctcattcatagatagggttgcactgaagattaagtcagttaataatgtgcaaagtgttcagaaatgtatctggcatgtggtaaatcatggataaacagctgatattctaaatgcacagagcatagggcaatttgaagaccttaattgtgcagagttgtacagacagggacaggcacagaaagaattcacccatgatctgcattcactcatgaattccagcactcactcrtgaccggaagccagggccagctgtccaggagagcctgtcatccctcaggcaagcacaaccagattctgtggggtgcaggtgtaccgcatgtacttggcaaaatgttgctcttatttgtatgaatggaacaggctgtctcatatactgaaccataacttgctattgcctggttcctctctcctagagaacttcaaggagattgtggtgggcaaatcagatgatgccaaaactcagatatttagggcctaatgaatgcccagaaggaataggagttggcacttgccaggtttctgtctttg

SEQ ID NO: 876985 - DNA, 586 bp, Homo sapiens
aaactctcaataaaccaggtattaatgtaacatgtctcaaaataataagaactatttatgacaaacctacagtcaatatcatattgaatggacaaagctggaagcattccctctgaaaactggtacaaaacaaggatgccctctctcacaactcmtattcaacatagtactggaagttctggcttgggcaatcaggcaatagaaagaaaaggtattcaaataggaagagaggaagtcaagttgtctctgtttgcagatgacaaatagaaaatctaaatgattttatattagaaaaccccatcatctcagcctcaaaacttttgaactgataatcaacttcagcaaagtctcaggatacaaaatcagtgcaaaaatcacaagcattcctttacaccaacaatagacaagcagagagccaaatcatgaataaactcccattcatgatcactacaatgagaataaaatacctaggaatacagctaacaaggaatgtgagggaccttttcaaagagagctaaaaaccacggctcagggaaataagagaggaaacaaataaatggaaaaacattccatcctcacagatagg

SEQ ID NO: 876986 - DNA, 586 bp, Homo sapiens
aaactctcaataaaccaggtattaatgtaacatgtctcaaaataataagaactatttatgacaaacctacagtcaatatcatattgaatggacaaagctggaagcattccctctgaaaactggtacaaaacaaggatgccctctctcacaactcatattcaacatagtactggaagttctggcttgggcaatcaggcaatagaaagaaaaggtattcaaataggaagagaggaagtcaagttgtctctgtttgcagatgacaaatagaaaatctaaatgattttatattagaaaaccccatcatctcagcctcaaaacwtttgaactgataatcaacttcagcaaagtctcaggatacaaaatcagtgcaaaaatcacaagcattcctttacaccaacaatagacaagcagagagccaaatcatgaataaactcccattcatgatcactacaatgagaataaaatacctaggaatacagctaacaaggaatgtgagggaccttttcaaagagagctaaaaaccacggctcagggaaataagagaggaaacaaataaatggaaaaacattccatcctcacagatagg

SEQ ID NO: 876987 - DNA, 651 bp, Homo sapiens
ctggtttaggagtcccaagagatgacactgaggtgtggactggagcagttttctaattaaaaagtcagatggtctttttctctaaggaaagcttcaactcccagtgaatgcttggctcatagcttcttggcccaaggccatttagcatctgcctcaacaaaaccccttcctgaagtagagtctagcaagmaatgtagattcaagtcctcaaaaaccaaagaacttggaaagctaaagaaccccttccaagcacaattttgaaagaaaattcatttaatggaaacagctatttgcaaaattttaaccaatagatgaataaggaaaaaatggaaaaatggaaccgttttagccattgatgaaaacatcaatcacagctcccttctgatacagtttttttcttttgttttagaaaggcttattatatttcccctttatgaaccttcaaacaattggaatcagcggtttgagttccctgctatcagcatttggttctttttttaatctctgttgtagcagtttatataccttttcaaatcttgaatcacttcattatcacagctcatggttttaaaatatttgctataatgaaaaaccacacatcttaccccccaaaaaaatgtatagttcactgatttttttttcaggctggtg

SEQ ID NO: 876988 - DNA, 649 bp, Homo sapiens
ggtcttctgaaatagtcacaatattttaaattcacttaaatttattttcccaatatactctgacatcaggatcccgtggttgagcatcgggaccccattcctgagcaaaacaatttatcatggacatttctgaaggagaccccagagttttttggttcagtttgagattcagaaggtagggatgtaagagaaacggttataatgttctgctgactaatgtgcctgttgaattgccagaagcattcaggcaatatgccctaaatacaacccattgactgagaagaggcagtaaagtgaaaatgaatttatgtgcttcatccttaactaattttctggggaacagataattaacaaatactttgcataaaatatgaagcaatttcaaatcaaatggtcaaaactgaagaatatcttccatatcagttatatgcaattcatgttcctgatcctaacgttaaaatgggtattatgtcatatagwctatgtagaaattgccatattagttatgtattattttttaataatagaaacatactttaaagactctgattttcaaactttaattaaaaaattttctaaaagtctgaattaaatgcaagagatttctggagtaaattaatatttcaaaatatcatataaagaaacaata

SEQ ID NO: 876989 - DNA, 629 bp, Homo sapiens
tttacttttagtagactgatatggtttggctgtattcccactcaaatctcatcttgaattgtagttcccataatccccacataatcctcccataatcctcctgtaatgtcatgggggggacctggtgggaggttaattgattcatgggggcagttacccccatgctactctcatgatagtgagtgggttctcatgaaatctgatggttttacaaggggcttttccctctttgcttagcacttctctttcctgccrtcttgtgaagaaggacctgtttgcttcctcttctgccatgattgtaaacttcctgaggccttcccagacatatggaactgtgagtcaattaagcctctttcctttataaattacccagtcttgggtatttcttcataccagtgtgagaaggaactaatacagtacattcgtactgagatagtagggtgctgctataaggatgcctgaaaatgtggaagtgactttggaactgggtaacaggcagaagttggaaccgttttgaaggatagaaggaagacaggaaaatgtgggaaagtttgaaacttcctagagatttggagggctcagaagacaggaaggtgtaggaaagtttgaaacatcccagagacttgttg

SEQ ID NO: 876990 - DNA, 613 bp, Homo sapiens
tttatatcttccgtgaattattatggagttttagtgtctctatttctctattgaaaatgtataacatgtacagtacctagtgtttcctcctaaccacttaagttaagcttctccaacatgcggcctgcaggtcacatgcagcccaggcagctttgaatgtgrcccaacacgaatttataaattttcctaaaacattatgagatttttttagctcatcagctattgtcagtgttagtgcatttcatgtgtggccagacaattctttttccaatgtggcccagggaagccaaaagattgaatgctcctgacttaagtaatcgaatataaaagactattaaataaggttcttcatttagcactcaaagtgctaaatgcacacaaaagagaagaaatatcctttgtgttctgtgttcttatgagatgaaagtcacagaatgaccaggagtcatttgcttttgaatcacatccacaaagacaaagttttataaaaagccatctgtttattcatatattcattcatatacttattcaataaaatgcgtacaaatgaaaaagatacagggatggcagaagcaaggaaatcataatttctgactttaaggagttcaatcta

SEQ ID NO: 876991 - DNA, 735 bp, Homo sapiens
agaaacctgtgttggtagaatcttgttttattgtggacgggttgtagtgaggccctgaatttcctagcagctattttaaataactatccgttattagatatgtttagattgctggttatatgggagaaaatggatatagaaaggatgagcgttagagttagaataccatattacccatagatgtttgatgcacaaagcattgcatcagttatttatttgctggtaatttattctaataaaggatttattggtagtttgaagaactggaagagaacaaggctcatttcattgaagactcccagaatgaaataatttgcaaaacttatttaaaagtccaattgatgtagtctccagagcacctggtcagattgaaaaataaacagatttgtttggaaaaatcaacagtgcagttaaatatgtgttgacccttattttaaaaatgtaagtaggagcagatgaaggggaatacaattaaatttgttaaggagttactaagaaagagtaaggtcatggttgataaccttagttgaagataccccactgaatatgataaatcrtgttgagccagttttgggaaacaatttgacaatttcttacagtgttaaaatatgtacagtcaccatatgatccagcagttactaagacaaaggaaagcatacgccagtgttcacatgagtgttcaagcagcattattcataatactgcaaaacaaaaatgcatttacctttattcata

SEQ ID NO: 876992 - DNA, 601 bp, Homo sapiens
ctcaaaatgagttacaaatctaaaagacccaagatattaaaactcctagaagaaaacatagagaaagtgtttcataacattggatttggcagtgatttattggatatggcatcaaaagcacaggcaacaaaagcaaaaatagacaaatgggactacatcaaacttaaaaaattattgttcaaaggacacaatcaacaaagcaaaaaagcagcctatggattargagaaaatatttacaaactatatatctgataaggaattaatatctagaatataaaaaaattcctgcaactcaacaacaggaaaacaaacaacctgattaaaaatgagtaaagacttgcataaacactttcccaaatacattatacaaattatcaacacacatatgaaaagatgctcagcacaattaatcattaaagaaatgcaaatcaaaaccacaatatcacttcacacccataagaatggctactattaaacacacacaaaacagagagaaagagagaataacaaatgttgacaagtatgtggagaaattggaaaccttatgcactgttggtagtgttgtaaaatggtataaccactacggaaaacaatatggatg

SEQ ID NO: 876993 - DNA, 591 bp, Homo sapiens
ctcaactaggaagctagtggtctaaccattcttttaaaatacttttcaattaattctttattatttcaggcctacccctcacacattcgccctgtcagaggaacctggtgttttccattcctgggcctctcttgggttctatgtcatgaatgatttgttgcttatttactttcccactttgcaggcttaggttccaattccttggctctgttaaatagttatttccatctacttttcatattcaaaatttcatttccttgctgttttttttcttttcctttttttcttcttttacgtttatgcgttttcagaatttctcatagtcatttcaaaagatattgagaaaggagcagagataacrtatataatcatgtttagttaactggaagcacaaagttgaactttgataaaacagaaatttgttcatgtcactgactgcttaaactctttactgtctcctcattgcagaaagcataaagttcaaatgactttggtcagttatgaccacttctcttagtttgcttttgctgtagttatcctgcatgcaaaccaccaattttaatggcttggaacaataaaggtttatttatt

SEQ ID NO: 876994 - DNA, 573 bp, Homo sapiens
actaactgatatttaatctataaccctttgcataagaaagtgccagggtccacagcagcctgggatgaatacttattctaaggttagttttgcacctttgtttctaggataaatggatgtttcagtgggacttgggcagcagaagttaggggcaggctgattttacccagtgaatatctctggtggagtgagggaaaatgmatttgggaatggtttttcaactgtatttctatatgcaaattgatcattgcatcagtttaaggcatttgtgttgactaatgctgcaaataaataatgatcagttttattcttacagtgccttgttacatgtggtaaaggaacaaagcagcggcaggtatggtgtcagctgaatgtagatcacttgagtgatggcttctgtaattcaagtaccaaacctgaatctctgagtccatgtgaacttcatacatgtgcttcctggcaagtaggaccatggggtcctgtgagtatatgatatgggtttttctaatttgatctatctttacagaatagcacaaaagttgtgttatatttactcctcccttagtggatgca

SEQ ID NO: 876995 - DNA, 615 bp, Homo sapiens
tttgactccccaagtccctgaatgaaaactctaacgggctattaaaaaaaaatgtgcaccacctgtgggtgtcaccgcacctgaggcttttcactattctgattcgtcttcaattaaaggattttcagatctgcataattctaatcagtaacataaaagtaaaactttgttagtcctcaggtgtaattgtgaaatcttcaaatatacaagcagctcttctgaaaaactgacygtgagggctcctgatgactgctaataatctattgcctgccctttgtcctcagcagtaaacctagcgcaattagtaacaccttacaaccatacagcaccttcacataccttatctgatatcatctcgtaacaaggcaaagacaagttgaattacctactcaagggttactgagcacttgaaatgtggttaatgtgacaaagaaactgaattttatattttatttcattttaatataaatttaaatagccacatgggctggtgactattgagtagcacagacagagagagctcactgtactagttgcccacatagcattctaaaagataaaaccctatattttaaaaagggtgggatgacagcttcaatatagggtggaaaaaaa

SEQ ID NO: 876996 - DNA, 669 bp, Homo sapiens
atacttatttatatatgtacatatgtaagaagaaattcctaaagagggaatccagaatagttagggtatctccagttttatgtcttattctactgtgtatttctgttttttaaaactatctttatatgttgccttaattaaaaagtaaaacataatttaagcattcaaatttctttgacaaattctgatcttgatgctatatagtttactcatttttttttttttgagatggagtctcactgtcgcctgtgctagaatgcaatggtgcaatctcagctcactgcaacctctgcctcccaggttcaagggattctccttgtctcagtctcccaagtagctgggattacaggtgcccgccaccaggcccggctaattttttttttgtatttttagtagagacggggtttcactatgtgggccaggctggtctcgaactcctgacctcatgatccayccgccccagcctcccaaagtgctgagattacaggcgtgacccactgtgtccggcctactctgcattgtttaatggtctaacccatttagattacataggaagtacctagtccttaagatttggtttgtttgtttttgagacggagtctccctctgtcacccaggctggagtgcagtgggcgtgatctcagctcactgcaagctctgcctcccggg

SEQ ID NO: 876997 - DNA, 551 bp, Homo sapiens
ggaacacaggagaacatacacagttaccacccctcccctaagaggagatggctgctgcagggctctacgtaactgactgatgtagtacctggcacataggaggtactcaggaaatattttttggcttaattgaacagtcttagattatcagaccttctaaatttttttcaagaagggtaagacatttacatttttatgtaaaatctgctggattataaatttgggaccaaaatttaaaaaaaaaaaacacstttgcagagcaacaagacacttctgtgccaaatgtgcatcacaggcaactaattttcaagttttgtataacagttaccaaggagctttccaaaaatgctccaaatattttcaagttagttagtttattcaagggataaataataaattataaagagtagtaataatattggttcatttaaaacatttttcctaagaatgtacaatcataatcatggttagaagatgtttagaacatggttagaaaagtttcttctagatgtgaatacttgcttaggtataaatttaaattctgatgagga

SEQ ID NO: 876998 - DNA, 600 bp, Homo sapiens
aagataaaataatggaaagagaaaaagagagagcaagggcccttagctcctaggtttatcctctctgaggcggaacccacagctgtatccgtgaaatgttatgtttgtcaacaaactcccttttaggcacaccctagttcaacttacatatctgtcatttgcaatcgaagcgtcctgaccactactgctgctgatatgtgattgratgtatccctgcacctcacctgaacgtgtgcgtaacagacatatccaaatgaattgctccaagaacataaagaatatgttcaagaagcactacggtttctacttcccatttttccttatctaggccatttggcacagctggtgtttttcaaaggctaagtgccagacttaattttctgtcatggtggatttgtaatgacagctcgagttccatcatggtcaaatactagctttattgggtacgtggtcattcatcatgcaaaactcagatgatgagatacatttcatggatttgctgctccgctgaaagtctttgctgccataaactgtgaaacagacaaaaattacccacaccattatagttagaggtggctcagctcccaggctgttattgtt

SEQ ID NO: 876999 - DNA, 608 bp, Homo sapiens
aaaagctcagaaagaaatttttaatataataacacaagaaagcacagaaataagtctatttcataatgccttttcagtataaaagcattcctactacgccacatcctctcctgcatctgttgtttcctgactttttaatgattgccattctaactggcatgagatggtatctcattgtggttttgatttgcatgtctctgatgaccagttatgatgagcattttttcatatgtctgttggctgcataaatgtcttctgtwgagaagtgtctgctcatatcctttgcccactttttgatggggttgtttgtttttttcttgtaaatttgtttaagttctttgtagattctggatattagccctttgtcagatggatagattgcaaaaattttcttccattctgtaggttgcctgttcactctgatgatagtttccttggcagtgcagaagctctttagtttaattagatcccatttgtcaattttggcttttgttgccatagcttttggtgttttagtcataaagtctttgcccatgcctatatcgtgaatggtattgcctaggttttcttctagggtgtttacggctttaggccttacatttaagtct

SEQ ID NO: 877000 - DNA, 620 bp, Homo sapiens
agtagaaccaactgggaagaaatacgttaagtgctattgcaaaagctttatgctagcttgtcatttcttttatataagtgtcttttcattattaaatttttcctgtctgcaccaaaacttcctgctgaaggaattcttactgattcagtaagaggtatgtttgagtgttcatattagaaacactaaattccttcttctaagtcctcctgcagtttatatatcccttaattacaccaataatcatttggcaggcagtatttttagttgtggacatgtcctatatgtctcattagattgtatttcttgacaacacsgaacatgtgatattatattacacattaaaaaaaatttatatgaggcatagaatatttccttataaatactacaagaccaatagatgtttctttagttgtgctatttttacatatcaatcctaaaggcatcggatacatttgtcacttttgataactgccaactaattaatatttttatgcatattcttcacagagttcccacggatttataagaaggttcgactatgcttttcccggataaaacgtgtctctttccctttcattgccatctgctggatgacaatcctttattctgatacagtcatc

SEQ ID NO: 877001 - DNA, 628 bp, Homo sapiens
gacacagccaaaccatatcattccaccctggcccctcccaaatctcatgtcctcacattttaaaacacaatctggtacttccaacattcccccaaagtcttaactcattttagcattaacttaaaagtccaagtccaaagtcccatataagacaaggcaagttccttccacctatgaggctgtaaaatcaaaagcaagytagttacttcctagatacatgggagtacaggcattgggtaaatacacctgttccaaatgggaaaacttggccaaaattaaggggctataggccccatgcaagtcaaaaatctaataggtcacccattaaatcttaaagttccaaaatgatctcctttgactccatgtctcacatccaggtcacgctgatggaagtaggctccatggccttgggcagctctgcctctgtggctctgcagggtataggccccctgctggttgctttcacgggctggtgttgtgtctgaggcttttccatgtgcacagtgcaagctgtcagtggatttaaaattctgggggctggaggatggtggttcttttctcacagctccactaggcagtgccccagtggggactctgtgtgggggctccaacccacatttcccttcca

SEQ ID NO: 877002 - DNA, 687 bp, Homo sapiens
gcagattagataaagagtcaagacccatcggtgtgctgcattcaggagacccatctcacatgcaaagacacacataggctcaacataaagggatagaggaatatttaccaagcaaatagaaagcaaaaaaaagcagggcttgcaatcctagtctctgataaaacagactttaaaccaacaaagatcaaaagacacaaagaagggcattctataatggtaaaggaatcaatgcaacaagaagaactaactatcctaaatatatatgcgcccaatacagcagcacccagattcataaagcaagttcttagagacmtacaaagagacttagactcccacaaaataatactaagagttaaataccccactgtcaatattagacagatcaatgaaacagaaaattaacaatgttattcagaactttaactcagctttggaccaagcagacctaatagacatctacagaactctccaccctgaatcaatagaatatacattcttctcagcgccacatagtacttattctaaaattgaccacataaatggaagtaaaacactcctcaaaaaatgcaaaagaatggaaatcataatgaacagtctctcagaccacagtgcagtgacgttagaactcagaattaagaaactcaatcaaaaccgcacaactacatggaaactgaacaacctgctcct

SEQ ID NO: 877003 - DNA, 576 bp, Homo sapiens
tgataagacatttgaaataactaaagaattgatattgaagtagtgagttaaatcaattaaaattgtcaaaattgtatgtacacgtgtaattggaagggaaggtaataattaagaaactgattttcaaatataatcaattaactattgatggttattgatgatgaattatcaaattctgaaatcatttagtaaagtttattgtaaagtcacttcaaaggttttcttagtggactctggattttaatagcagatgctaaatagaaaccccacctcgttgcagtttcattgaaatttgtattaagcatttgctagagatcttagacaactaactactacagtctccagtcctaaattcaaacaccatgtatcarcaaaagacattgctttttgccaagagccattataaaatacttgcacaaagcaaacagtagaaacaacacagttttggaaatgttataagcaaaattgaccaaacagaacacatatgagtctaaaaacaggaagcttatcagagttgttctcatagaagaaaataacgtactaatacatcactatttaaactacagtagctaaagt

SEQ ID NO: 877004 - DNA, 625 bp, Homo sapiens
tattattattattattattattattattattattattattatactttaagttctggaatatatgtgcagaacgagcaggtttgttacataggtatacacgtgccatggtggtttgctgcacccatcaacccctcacctacattaggtatttctcctaatgctatgtccccgctagccccccactccccgacaggccccagtgtgtgatgttcccctccctgtgtccatgtgttctcattggtcaactcccacttawgaatgagaatatatggtgtttggttttctgttcctgtgttagtttgctgagaatgatggtttccagcttcatctatgtccctgcaaaggacattaactcatccttttttatagctgcatagtattccgtgctgtgtatgtgccacattttctttatccagtctatcattgatgggcatttgggttggttccaagtctttgctatttgtgaatagtgctgcaataaacatatgtgttcatgtgtctttacagtagaatgttttataatcctttgggcatatatccagcaatgggattgcttggtcaaatggtatttctggttctagatccttgaggaatcaccacactgtattccacaatggttgaacta

SEQ ID NO: 877005 - DNA, 636 bp, Homo sapiens
aagaacaaagctgggggcatcacactacctgacttcaaactatgctaaaaggctacagtaaccaaaagagcatggtactggtactaaaacagatatataggccaatggaacagaatagaggcctcagagataataccacatatttacaaccatctgatatttgacaaacctgacaaaaacaagcagtggggaaaggattccctaatttaacaaatggtgttgggaaaactggctatccatatgcagaaaactgaaactggacgccttccttataccttacacaaaaattaactcaagatggattaaagacttaaatgtaagatctaaaaccataaaaatcctggaagaaaacctaggcaatrtcattcaggatataggcatgggcaaagacttcatgaataaaacaccaagagcaatgacaataaaagccaaaactgacaaatgggatctaattaaactaaagagcttctgcacagcaaaagaaactatcaccagagtgaataggcaacctacagaatgggaaaaaaattttgcaatctatccatctgacaaagaattaatatccagaatctaaaaggaacttaacaaatttacaagaaaatatgaacaaccccatcaaaatatgggcaaaggata

SEQ ID NO: 877006 - DNA, 636 bp, Homo sapiens
aagaacaaagctgggggcatcacactacctgacttcaaactatgctaaaaggctacagtaaccaaaagagcatggtactggtactaaaacagatatataggccaatggaacagaatagaggcctcagagataataccacatatttacaaccatctgatatttgacaaacctgacaaaaacaagcagtggggaaaggattccctaatttaacaaatggtgttgggaaaactggctatccatatgcagaaaactgaaactggacgccttccttataccttacacaaaaattaactcaagatggattaaagacttaaatgtaagatctaaaaccataaaaatcctggaagaaaacctaggcaatatcattcaggatataggcatgggcaaagacttcatgaataaaacaccaagagcaatgacaataaaagccaaaaytgacaaatgggatctaattaaactaaagagcttctgcacagcaaaagaaactatcaccagagtgaataggcaacctacagaatgggaaaaaaattttgcaatctatccatctgacaaagaattaatatccagaatctaaaaggaacttaacaaatttacaagaaaatatgaacaaccccatcaaaatatgggcaaaggata

SEQ ID NO: 877007 - DNA, 596 bp, Homo sapiens
ttttaattaaaaaaggaaagaaaagcaatacaggcagcaagaacagcaagaccaaagttatatacttagagatgtttggaagaatgttcaaagagatggctctcaaattgtgctccccagtatagattatcagcatcatataggaatttactagaaatgcaaaatcttggcccagcgcggtggctcacgcctgtaatcccagcactttgggaggcggaggcgggcggatcacraggtcaggagatcgagaccatcctggataacatggtgaaactccgtctctactacaaatacaaattagccgggtgtggtggcgggtgcctgtagtcccagccactggggaggctgaggcaggagaatggcgtgaacctgggaggcggagcttggagtgagcccagatcacgtcactgcactccagcctgggcaacagagcaagactctgtctcaaaaagcaaaaacaaacaaacaaaaaaaagaaaagaaatgcaaaatcttgagcccagtctagaccaacgaggtaaaaaaattcggggatcatagactagtaatctctgcattaacatggtccccagataattctgaagcatatgaaaact

SEQ ID NO: 877008 - DNA, 610 bp, Homo sapiens
taaagttcccaattttttccttgataaatgcagttgtatattctatgtgtttgatgataaactgtaatttctctcatggaattgaggcactagataaacttacttggcaaacctttgttgctttccctcctcccattattttgtgttattttagtgattcactaaatctcgaagtcttgggaaacaacacaatacttcatctgatattcacaactatgattctgtccactttgcrgatgaagaaacaatctttgagagacttttaaagatctatgtcaaaatggaggcatttagtccatagcagagctgggtctgaaaaccatgaatggcttaaatcaatattcctgctcataactactatgttacataactactatgtatctctttatgacagtaataaaaggccaggcataataagcatcaaaggccaagattgagtggaacagggattctcaatacaacttataaaaatctttaaacatgttcctactccagtttccttaaactcattttggagttataaagagactgcaattaaagagattaaaaatgtggactctacatcagtggtctagcattggtaaagcagctttcgtagcttctggggggg

SEQ ID NO: 877009 - DNA, 662 bp, Homo sapiens
tttcattttcaaaagtgtctccatttggaggatgaattgtatcagtagttcttaaagtgtggtctagggatctctgggggtatctgagatattttcttgagccagcaagatcaaaattatttttataatatattacaaaactgtttttctttttctcctctaattttcttatgagtggagttttccaaaggctacgtgaagtgtgatgttgcagctaagtgaatgtagagggagatctgagaatccaactgtcttctgttcagccaaatattaaagagattgcatgaacataaagccactactcttagtagtttttttttgttcattttggaaaatatctttatttttcattaaagtatgttgtttatgttatcataagctgggtctattttatttgtattattttaagtaaatttataaataaatatatattttcatgctcagttttaatgtcaaacagggtaaatattcataaatataacctrtataaacatcagccctttgaggtcctcagtaatagttaagaatgtaaaagcctcctgagactgaaaagttatgttactggaaagttacgtttttcctcgtatcatttcaattaccagtttgggtttacttcagtttctctctttggggtcatagagttttatttccccatacatgag

SEQ ID NO: 877010 - DNA, 691 bp, Homo sapiens
gaaaaatgatgtataaaggcagataagtagggaggttactgtaacaatccagatgatagatgatggggcttagaaaagattggtgaaaatgaatgggtgagacatagattctggttacatgtttaaagcagagaaaaaaaaatttgcttgttgagtggatgtagagtataagaaaaatacagaagtcaaagatagagtcgttgtttgtgacatgagtggtataaataaagtagctaacatagagtgagaaagtgtgcaaaaagggtacattgtggcattatgactgggatttctattcagtattaatttgagatgtcaaatacatagttcgttataagagtctagagttaggacttagatttaattcaaagtattaatagatatatgaatttagccagtagatggtttataaaacaatgaaacttgatgatatctcatctggacaagatcataaggagtgatatagacawagaaaagaagaggtctgaagatctgtctcaaatgtgtagaaaagtccaaacacattgtgagagtttttcatatgttattttgtggtcattgatagtattttaatatgtagcttgagattgtattaacaatacatcaaagttgattcagaagataccaaagaaataagttgacattttagatatctttgctttcgtcaggaattatttttgttcacagatgc

SEQ ID NO: 877011 - DNA, 651 bp, Homo sapiens
ccagcatatcttcactgatccacttcaacccccaaatctgtcttagtgcactttctatctgttcccattttgtaccatgtgctaaacactgaactaaatgttgggggaaatatgaagtctaaaatatcatttctgcttccaaggaacctacagtctagcatagcctggcatacaaatttaagaaatttatttgaaatgagtagaagaaaaaagtgacagaaaagtataaaatgtcatgatttcttccaacataaatccagaaattttaaactggaaaaaaagtgayttggaattacaacttgacatttatgttctctcattagttttttattcatgtaaaatataagccactaattaattaattttctgttttcagcttcctccttaaaagcaaaaaaaaataaactttcaatatgttactggtatatattaaaattctgaaaaataaactatttaaacttaaaaatcattgtatcagttctaaattattgattattgaagggtaataagagtacagataagaattgcaagtttatctctgaattactttaaaggagaggaatttactttctggttcatggttaattaaaattttaaaagagagaaaataaaataattgaccattaaaaatggcactaaagtaaatttaag

SEQ ID NO: 877012 - DNA, 651 bp, Homo sapiens
ccagcatatcttcactgatccacttcaacccccaaatctgtcttagtgcactttctatctgttcccattttgtaccatgtgctaaacactgaactaaatgttgggggaaatatgaagtctaaaatatcatttctgcttccaaggaacctacagtctagcatagcctggcatacaaatttaagaaatttatttgaaatgagtagaagaaaaaagtgacagaaaagtataaaatgtcatgatttcttccaacataaatccagaaattttaaactggaaaaaaagtgacttggaattacaacttgacatttatgttctctcattagttttttattcatgtaaaatataagccactaattaattaattttctgttttcagcttcctccttaaaagcaaaaaaaaataaactttcaatatgttactggtatatattaaaattctgaaaaataaactatttaracttaaaaatcattgtatcagttctaaattattgattattgaagggtaataagagtacagataagaattgcaagtttatctctgaattactttaaaggagaggaatttactttctggttcatggttaattaaaattttaaaagagagaaaataaaataattgaccattaaaaatggcactaaagtaaatttaag
